United States Patent Application Publication US 2011/0183924 A1 - sequence listing, part 250

SEQ ID NO: 707732 - DNA, 868 bp, Homo sapiens
  misc_feature (177)..(177): n is a, c, g, or t
caggaccagcctggccaacatggcaaaaccctgtctctactaaaaagtaaaaaaaattagccgggcatggtggcttgtgcttgtagtcccacttcagtctaagtagctgggactacaggcacgtgccaccaggcccagctaatttttgtgttttgttagagatgaggttttgccatnttgcccaggctcgtcttgaacaccggggctcaaggaatctgcccatcttcgcctcccaaagttctgagatagcaggtgtgagtcatcatgcccagcctccttgaagtttactaacaattgggataactgagggaagagaagtgacaattccactcagtctattagaggtctggatataaggtagccacacaataactctaacttgacttctaaccattctatcttattgatttggaggctgtcttctgccagattttttgtggcttgagatgatattttcgaacccttctttcactacctttcttacccttaatgtgccaagcttgaaacaggatttgatttcctgagctacttgttcgccttctgtgcgtcaccaagtaatctggttcatctttcgtctcattcatgttattttcaagtgaaacaagacattttggggggtcaagtctctttggggtgtttggttttatgtatataaaaaatggattttggtgttccccttcccatgtaaagtaccactttatatgggaacttcccaatcataatgtaaagaaaaaatgaaagcctggtgttttgttcttccagatgcctcccttatggataaaatctccttggtaaaataaaatattgccttgtaaatcagtcttcccatccatattaattattaaatattaaagaaattttaaattcc

SEQ ID NO: 707733 - DNA, 287 bp, Homo sapiens
ccaaaaaaaaaaaaaaaagggggggtggggggttggttttaaggggccccccccccaccaatttttttggttccccccaaattgggattccgggggtttattttaaaaccaaaaaagggcccccggtttttagccctggcctggataaaaaaaaatgccggttccccggaaggttatggggtttttccttttttgggaaatgggcttttatcctggaaaaggaaaccctagttttggtgcctttttttaccgggtttttggtgccaaaaaaaagcggctggaattta

SEQ ID NO: 707734 - DNA, 197 bp, Homo sapiens
ccccccttgggtttttgggggggggggggggggggttttaaaaaaagccgggtttccccaaaaaaaaattttaaaaacccccttctttttaaacaagggtggtgttgggccgggggcccgcccccccggggtggggccccctgggtttgcctttttgttttttggcccaaggaaaaataaactgtttttggggggta

SEQ ID NO: 707735 - DNA, 90 bp, Homo sapiens
agctagggaaaaaccctccagctccttattattttttgatcttccgttggatttttgtgaatattttaatacatctttttccatttttga

SEQ ID NO: 707736 - DNA, 194 bp, Homo sapiens
cttgacccaaatatgatggcagtttctacaactctctttagtcttgaggacttaactgttgaaagtatattcatatttagttcaccccttttgtaccccttatactccttctgacctataacaaattctgtctttactagaaatctttcagcattctaacgttcttcgttagctctctcacgacatcgtgatta

SEQ ID NO: 707737 - DNA, 507 bp, Homo sapiens
  misc_feature (1)..(1): n is a, c, g, or t
  misc_feature (11)..(11): n is a, c, g, or t
  misc_feature (261)..(261): n is a, c, g, or t
  misc_feature (340)..(340): n is a, c, g, or t
  misc_feature (407)..(407): n is a, c, g, or t
  misc_feature (421)..(421): n is a, c, g, or t
  misc_feature (436)..(436): n is a, c, g, or t
  misc_feature (442)..(444): n is a, c, g, or t
  misc_feature (478)..(478): n is a, c, g, or t
  misc_feature (493)..(493): n is a, c, g, or t
  misc_feature (504)..(504): n is a, c, g, or t
ntactcaatcnttggatcctgttcataagtaagaacatgtgataattttctgttcctatgttagttcacttaatagacctccagctccatccatgttgctgcaaaggacatgatcttgttctttttagtactccatggtgtatatgtgccacattttctttatctggtctaccactcatgggcatttggattgattccatcgaaagactcctatttggaggaccctctgtagaggcccgcttcatcaagtggccacgttgnccactctgacttttagttatcttggaaattggaagattaattgaagtcttagcagaacttagaactgtcatgccccagnggtgcctgagcttaagacttgttagcccttaagtttagccattttcttggcttaacattcattccgncaaattgtttaggntagggtaggattgtnacttgnnngggcaatccccaaagatacaaggaactgagattnggggaaaacgcttanccactgggtancaa

SEQ ID NO: 707738 - DNA, 368 bp, Homo sapiens
accgttaatatttcggagaatgcatcatattttcaagacacttcaaagtgaatctctactcccatctcctaatactacccagccaagaagtacaactatactactatcactagatataactataccaaatattacacctggtaagatactctggtattaaactatagactgagtgtatcagaaatagaaaaaacatgaagatttataaagcatttaaaaaataatcatatatagcacgtccttaaaagccccagatgaaaaaggcagtactccacttctaataacacctatggtttatgttgcgtaatattcattaacaaaacagcatactgaccaatgataatttataggaaattcatttgccaagt

SEQ ID NO: 707739 - DNA, 748 bp, Homo sapiens
  misc_feature (163)..(163): n is a, c, g, or t
gaatcgcgtttccggagagacctggctgctgtgtcccgcggttgcgctccgtagtgactccgcgggccttcggaagatgcaggcctggggtagtctcctttctggacgtgagaagagaagaagtggagaagccccctcttcccattagttgccttgtgcatgnggtttggcttgtggctacaacagcactggtgggttcctggtgggatcgtggggctatgtaaaaacaggcagcgtgtcgtccctggctgcagggcttgctcttcggcaagtctagccggcctgggtgcttaacccagctgtatcaggatccaaggaactgttggggtttcctagccgctacatctgttacttggtgcggggtaatgggaatgagatcctgctactatggaaaattcatgcctgtaggtttaaatgtgcaggtgaccaggttgtgctgatggcgccaaagttggagttcgtaatgttgatgacatctgattagcagaaagtcatgttccagctgtggactcattgaagggattacaaactctgcatcttccactaattcttcaactgtatttagagaaaataagtgcagcattttgtgatctggacattgtaacctaaaaaaaacaaaggacaccaaatttgggggaggggggggaaaactcaggttggtaccatttattacccttaaaagaggtggtgggagcttgtaacatggagcttaatggggaccttcatagagatgatccgggtaaagggg

SEQ ID NO: 707740 - DNA, 1397 bp, Homo sapiens
ggtcgttgtcgtgggtggggtgacggacgggtggttcgtgttgctctgttgtggtcgtgttgttggtcgtgtctgtgtttgtcgtgtgtgggttttgttgtcggttcgttcgtctgttgtctgtgctctggtttgtgtggtcgtcatgtgttattgtggtgtctgtggcagttgttttttgtgcagtttttgtttgcttttcaggtggttggtatggttgttactgttggctattcttttaagaagtttttgcttattgttttctgcggatgtggtgttcgtggctcccaggtgttgggccccgcgcgcgcctgtggtggggacgctggggtcttggggactgcttgtctgcgctttcctcgtgagggatgtttgccggaagttttctctgggggaaacctttttttggccccgtggtcccccgttggggcggggggagccttgctcttgtgctttctttggtggtgagatggtccatgttggggggtcaccttggggggtgtttctctgggtggttataatgggtgcctgtttttaaggggcccgccctgcgctctccctgttatggggtttatatggttggacgtgggaggcgttgcaaagtgttgtgtgctgaagggggttcccccctcttttgtacgccactgtctagtgatacttgggcgttcctgtgttgctgtaggtttggggattggggccccgggtccgtgcccccccctgtgtataggaggtctgggctttttcttgcgccacagtttcgcaaatcccccgtttgtagggctataaactctgttggggggacgcccaacattgtggggttatactgttgttaagaccactgtttgcaacgcgggaaaaggggaagaattgtttctgaatttcttataaattgtggaagagtttgtaatgtcctcacgggttcccccacgccccacgggttttgtcacttccacgcccctggaagagcacttgtatgggaaacacccctcgttcacgagccccgggctttgtaaagagtgttcccctggaaggcccccagaggagtttagaagggagaaaaggtggattcctcgggtataactcgttccacggattgctcccacggtgttgagatggtaattgctataaattttaaattctaacccacggaaaccccaaccccacaccttttataaatgttctttctattctccacttgtattttttttaaacctgcccccactgatagcaaagtcttttgctgaaatgagttttgatgagtttcttgtttatcgctttataaaaacggaaaagaacatataccccactcttgacttttgtgactttcgtgaaggtttctttaaagaatcgtccattcccttctgcttgctttttagttaatgttttactaccgggga

SEQ ID NO: 707741 - DNA, 1786 bp, Homo sapiens
caactaacaaaaacaaggtactctttataacccatttctagttcctaacctaattattcttcttaaatgcttgaatataaatgtgaaattgaacaaatttgaggttcttgcatcactcctatatctaaagtatctgtttcactagtgtatgttaataagagtgtgggaaaatggtgctttaataatcgtgaggttagatgctcatctgatgttcgcagctatgttatattaccaaccattttctcttttgtgattgaccaatgcccacacattgatgatttttaaatatttaaatatcattatgcttctttggtttttcaataattttaggaaatgattagctaaatctccatacttcttacgaattttatgaaatataagttaaaagagtaaagccggtactcaaaacttagcatgtttgcattaactgtcatttatctatatttatacctctgtatataaatacagaaataattacaaaaatgtaattgtaaaaatataaacatctgtatttatatatctgcgtctctatatatcggcagaggagagagaaatacaaagacagagagagagagaaagctatttggatacattttaatttctgataataaagttatatgtttagggatttacaataaccttacttattaggaataagcagtggcatcaataataaaagaactttgcatgtcttcagcttctacatttggatcaaaattttcttgacataatctatatctattttttaaggtgagaactggtgactcactttagtttcttttttccccaaaaattggatatttaaattgacaacctcaatctcttccagctttatggaaatacacaatctgtatatactcattcatatgcatagtgatatttgttgattaactcactagtcctcaattatagccattaatttccttgtgttgataataattctttcttgatatagcaccatgcttactgagatttttctgtaaaatatttcataaagcattatacttcgatacttacttttggaatattagatttgatagttacaaaaataaagatgaataacataacataataattattaattataataattattctcaaaatcgtttgttgtaaagggcatattgttaaaaatatcttcactcccctttcttcccttttactgtgggatgaatatattttcatgccctattaatgttaggcttaggtttgtgacttgtttgtgcaatggcatatgaacaaatgtgatatacaaatgtccaataaatgctaattattggcacttctcatgaggttctgatagatgcctgcagaataaaatgttttatataacagacattaattcattctcggtactaggataggaaaacacatcatgcaaaccttagcactctgttcagcctgaatctaaaccaagtcaacattaagagagttaaatagaatcatagccaacccaaagactcagtactgataaatatgtgtttactacaattcatgagatttgtgagttacttattactgcaccaaaggctggctaatacattatgtttagaaaagatatatatttgaggtgtcttttgttgtaaataataatcatatcaatataaacaactgctgttgcttagtcaacatggtttatttttttcacagacaaaacaatgaatacgaagtacttactgttggcatttattatgcgtctcttggtgtttttaggtttccttcatttatctcaagatggctgctgtagttctagatattgtgtcagcattcagtgcagaagaactgg

SEQ ID NO: 707742 - DNA, 392 bp, Homo sapiens
  misc_feature (21)..(21): n is a, c, g, or t
  misc_feature (23)..(23): n is a, c, g, or t
  misc_feature (49)..(50): n is a, c, g, or t
  misc_feature (53)..(53): n is a, c, g, or t
  misc_feature (83)..(83): n is a, c, g, or t
  misc_feature (85)..(85): n is a, c, g, or t
  misc_feature (87)..(87): n is a, c, g, or t
  misc_feature (115)..(115): n is a, c, g, or t
  misc_feature (123)..(123): n is a, c, g, or t
  misc_feature (143)..(144): n is a, c, g, or t
  misc_feature (148)..(148): n is a, c, g, or t
  misc_feature (182)..(182): n is a, c, g, or t
  misc_feature (184)..(184): n is a, c, g, or t
  misc_feature (198)..(198): n is a, c, g, or t
  misc_feature (237)..(237): n is a, c, g, or t
  misc_feature (282)..(282): n is a, c, g, or t
  misc_feature (286)..(286): n is a, c, g, or t
  misc_feature (303)..(303): n is a, c, g, or t
  misc_feature (347)..(347): n is a, c, g, or t
  misc_feature (365)..(365): n is a, c, g, or t
  misc_feature (370)..(370): n is a, c, g, or t
  misc_feature (378)..(378): n is a, c, g, or t
ggatttaatttctgatgttcncngaaaaggtgatatgtataacccagtnnccngttgggtcaactgttttctctctttcaccncncntgttagatagtgtctaataattgttccntaaaagcnttttgagaaactagtctcgnnttcngaattttctaatacttgcccagtacccaacaccngntaggtgtttgatcncgcggtgtattgaaattgaattaaattgtgaaggatacnaataagactcctgcatgtgctgtgttttaggaatattcaccccancacngtgctcacgcctattcnggagggtaggggtttggggcggtggggaggatcacttgaagccnggagttccagaccagccntggcnacatagcnagacaccatctgta

SEQ ID NO: 707743 - DNA, 845 bp, Homo sapiens
  misc_feature (272)..(272): n is a, c, g, or t
  misc_feature (280)..(280): n is a, c, g, or t
  misc_feature (304)..(304): n is a, c, g, or t
  misc_feature (340)..(340): n is a, c, g, or t
  misc_feature (346)..(346): n is a, c, g, or t
  misc_feature (360)..(360): n is a, c, g, or t
  misc_feature (389)..(389): n is a, c, g, or t
  misc_feature (393)..(393): n is a, c, g, or t
  misc_feature (426)..(426): n is a, c, g, or t
  misc_feature (431)..(431): n is a, c, g, or t
  misc_feature (433)..(434): n is a, c, g, or t
  misc_feature (442)..(442): n is a, c, g, or t
  misc_feature (451)..(451): n is a, c, g, or t
  misc_feature (461)..(462): n is a, c, g, or t
  misc_feature (465)..(465): n is a, c, g, or t
  misc_feature (467)..(467): n is a, c, g, or t
  misc_feature (486)..(486): n is a, c, g, or t
  misc_feature (494)..(495): n is a, c, g, or t
  misc_feature (526)..(526): n is a, c, g, or t
  misc_feature (534)..(534): n is a, c, g, or t
gagtggaccgggatggcgcattttcttgcaccaactaatgcggtgtcgctggcggtgaggagggcggagagttctgtggtgaaatagtgggaaggattcatgtaggcatcgggaagagcctaagtccacattataaaataggaagtgatgcggggtacagttactcccggaccggggcgtgaaagtcgtgatatcatcgttgaactattagctttgaagtttaaatccaatggagaagactcaagaaacagtccaaagaattcttctagaancctataantacttacttcagttaccaggtaancaagtgagaaccaaatttcacaggcatttaatcatnggctgnaagttccagagganaagctacagattcattatggcagtgaccngaantgttgcataatgccagtttactcatcgatgatntgganannaaactcanaatccgacngtggtttccnngtngnccacagcatctatggaatnccatctgnncatcaattctgcaaattacgtgtatttcctngggttggngaaagtcttaaccttgatcacccagatgcagtgaagctttttaccgccagctttttggaactccatcagggaccaggctagatatttactggagggatcattacacttgttccactgaagaagaatattaagtatggtgctgcagaaaacaggtggactgtgttggattagcagtacgtctcatgcaagttgttctctggattcccagaagattttaaaccggttacttatacacctgggctcctttttccaaatagggatgattatcgtaatctacactccaagagtttttttacaccacagttttcgta

SEQ ID NO: 707744 - DNA, 187 bp, Homo sapiens
agacgatgctagcgattcgactgcttagaggccttgagagacttttgggtttgggaaaaagactgtacatctgaaaaaaattcagtaccaataagattaactgaaacataggtatgtcgtaaacagataggaggaagtaggttatttcaagtaatatgagtgggagtagaacggctgttgtatgatt

SEQ ID NO: 707745 - DNA, 288 bp, Homo sapiens
  misc_feature (31)..(31): n is a, c, g, or t
gccccggggtcccccaaatttgggaaatccnccccccccccagggggggggggccccccgccccccaaaaaaacccggttttacccaaaaccccgggggtgggggcaaaaaccccgggggggggtttggggcccaatggaaacccggggttttttgtttttgttttgggggaagggggaggcccccccccccagggggttaaagggggtttttttttttgcccccccccggggggggggggaaaaggacccggggggggggggcccgggaaaaagggtttttttttta

SEQ ID NO: 707746 - DNA, 167 bp, Homo sapiens
atcgtaatctctactcatcagacaggctgaggcacggagaatcaccttaacactgaaggtggaggtgcagtgagccgagagcccgccactgcactccagacctgcgagacagtagcaagactccatcagcaaagaaagaaagacagaaagaaagaaagaaagaaata

SEQ ID NO: 707747 - DNA, 106 bp, Homo sapiens
gagaccccctgtgagaagtgcctagaaagcaagaggtgagccctctgtcatgcccacataagggtccgttgctccttggccaacgagtaatgcagtgctgggaagg

SEQ ID NO: 707748 - DNA, 352 bp, Homo sapiens
gcacgaggtaaccatgttgactatgggggagagacgatgcattccagaaacgtcttaacacttgagtgaatcttcaaaggaccctgacattaaatgctgaggctttaatacacacatattttatcccaagtttataatggtggtctgaacaaggcacctgtaaataaatcagcatttatgaccagaagaccaataatctgatcttggacttttaagttttattgcacatgcagggcggacgtgggccaaataagtctacccacacgaaaaaagaaatttgccttgtccgtttgtgtacacccatgaaaaactgctcgttggctcacagaagttgtgacattaaaaaatacta

SEQ ID NO: 707749 - DNA, 364 bp, Homo sapiens
  misc_feature (29)..(31): n is a, c, g, or t
  misc_feature (35)..(37): n is a, c, g, or t
  misc_feature (39)..(39): n is a, c, g, or t
  misc_feature (41)..(42): n is a, c, g, or t
  misc_feature (44)..(45): n is a, c, g, or t
  misc_feature (48)..(48): n is a, c, g, or t
  misc_feature (50)..(50): n is a, c, g, or t
  misc_feature (87)..(87): n is a, c, g, or t
gcgagttgctgagaagcacaggtaaaacnnngtannncntnncnntgnantagggtgggaggcctgtctggcgggactcggcccttnggaatctaatgctatgtcccggtagatagcgtcaccattgaattagaagacacacatatgtgagaataatcattctggtcatttgctgcatgtcttattgaaaatatgtaaccacatcctttatcctgaccttatggcacctgggttgagaaccatgatttgaaccagacgttggtctgtcactttctcagtttgaaactttcttttgcctttagcgttttgctgttgctttttcgttgtcttttgtttcgtttcgttcctaagttacagagccagg

SEQ ID NO: 707750 - DNA, 202 bp, Homo sapiens
gatccggatcacctgtttgaaaccatctcccaaaccatgctgaatgctgtgggccgggatgcagtgtcaggcatgggagtcattgtccccatcatcgagaagggcaaaatcccccccagggccctgaagggccgaatgggctaaccctgttcccagagcccccttttttttctttttttgaaataaaaaagcctgtctttca

SEQ ID NO: 707751 - DNA, 446 bp, Homo sapiens
  misc_feature (134)..(134): n is a, c, g, or t
  misc_feature (441)..(441): n is a, c, g, or t
catctcgtgaccggcgattatcaccatgtacagtctgcgtttctgtttgtaagtttgataaattttaacttttttttttggagagggagtatggctttgtcacccagggtggagtacagtggtgcgatctcggntcactgcaacctactgcctcccaggttcaagcgatgctcccgtatcagcctggatgtgtgtattttatggtagtaaatcataaaagactagtatctacatatatttcatgcattcatgacatacctttttaattttttccatatttctaggctatgtaggttcatctgcaagttttttcaaattgtagcaaatctccaaaaaaatttacaagtgaactcgtgcagttcaaacctgtgctgtgcaagagtcaactgtatttgcttatttcctcaaaaaggaatgcctaaaggataatcgccggtcacngagat

SEQ ID NO: 707752 - DNA, 949 bp, Homo sapiens
  misc_feature (136)..(136): n is a, c, g, or t
  misc_feature (597)..(597): n is a, c, g, or t
  misc_feature (647)..(647): n is a, c, g, or t
agcggatcctgcagcctccgggccggccggcgagccagtgcgcgtgcgcgggggaggtctccgcaagcgaccggtggagcggaactgaccggacgggcagggactagtcgatgccaggacgagtggtgaggcagcngaggcgcaggccgaggcctgcgagcgactatgggggtaccgggaagcaagactgcgtgcatgcggagcgcggtttggaccgaggcacggcggaggcgcatacggatcgatcatggctcgtccggcatatgaagggctgcgtgacagcagcttgaagtgaatcctcgtcttccatatgcaatgatcgatacatctccgtctctgatggcctacacacgaatgttggttgtgtgccagtggcgatcttcactggcatggtcattcagcatcgattgagccatgcatagacacgcatggttgcatggcaaacggaagaagaccatgtgcgagaaaacgtttattgcttaaccgggaagcaagacttgcagcaagggaagtctggacgtacagactttgcatgtgatcgtcctggtcattctgcgttgagcagaggttcctggaatactaaggagactgtgagantgaagtttccaagttattgaggacgcacagggttggtcttgactcctgcnagaattcgacaggggtggagtatacttacctctggctatcgttgatgcatgaggggtccgctatcgtggcgggaccgaaggaaacatagcgagtcggttggatcggaaaggccttcgttgcaagcatggtccctaccgagagggaaaggaccttgttcgagaattccaaggctaaacagaagcctaggaattgccaatagaccgatggcattccccaatcgcgtgcttggggaccctgggccccttcaatagggttcgtcccgatggttcctaacttatgttgacagagtcacacgaaaatg

SEQ ID NO: 707753 - DNA, 231 bp, Homo sapiens
gtggggcagaggggagtgacgtgcctgggccaagatactcagcacccatctggagattgcatgaagtgccaagacgtgctgctgagccagtgtcatggtaaagaagccggattccagtgccagctggagccaggagtaacccacttcccaggactgcctgaggaccaatgtgcaggaagcaaccaacaccacacccagcatagtcggcatctagggagctgtgaagccaca

SEQ ID NO: 707754 - DNA, 335 bp, Homo sapiens
gagtaaccagactggtatacggtcacagcatatacagagaaaagataggagcataaatacaaaactaaggcaaaatagacgcttagctgcagatctacagagaacttctggtacattaaaagatttcaattcatagcaaacaggtgtattaaactattgcagtagctggaacttaaaagtgtaaccagcatatataggagaagtgaatacacaaggaaataaagatagagtaaaagccaagatgatgctcctcacgaactggagagccagtttatcttacgtctgcctccagaatatgcctctactgtgagaagggcagtacagtcagatcatgt

SEQ ID NO: 707755 - DNA, 724 bp, Homo sapiens
tggaaagtgaaaggatggtttttacccctaaaggaaaaaaaacttttttaaaaaaacaaaaaaaaaaaaaaaaaaaaaaaaaaaaaaaaaaaaaaaaaaaaaaaaaaaaaaaaaaaaaaaaaaaaaaaaaaaaaaaaaaaaaaaaaaaaacaacgggggggggcgctaccaatatactacaaccgcccggaggagagcaccaaacaactcatacaccaccccccacgttctgtatacgaaaaaacaaacggcgagcaccacacgcaaacggagtcatacataataataaataaagcgcgagaccgcgcgcggagcataacacaaacacgtccggacgaagagaagaacacaacaaatacatgctcgaagagagaaactaaatacgaaacagacaaacacccactcccacctctgctctagggggagcggacaacccacacatgatggagcgccagaccacacaccacccccaccaaaaagcacgtagcaaaaacagcacgccagcgcaacgcaaaaacaaaaacccacacaagtacccaaacgtaccgtcaaccagatcagcgactcacaacacaaccaagacaaaaagacctagtaacacaaacaccaccaacacaacacaacaacaccaccaaaccacatcgcacaacaactcatcaaagacgccaacaataaatacacaccacagccagagcccgcacaactgcaccaaacacacgagggt

SEQ ID NO: 707756 - DNA, 380 bp, Homo sapiens
caatttaaaggcaatgctaccaaatactaattgagtgtatgtaaacttctgacccactgggaatgtgatgaaagaaataaaagctgaaataaatcattctctctgatattattctgacatttcacattcttacaataaagtggtgatcccaactgaactaagacaggaattgtgaaaaactgagtttaaatgtttttggcaaaggtgtatgtaaacttccgacttcatctgtatctacaactcatgctttactttctaacacgatgtgcgtaggtcaactcaacccactataggatatgaatcagccaccctaacaagacatccccaaccacaaactctttatatgagtgggctaagaatggatagaatttcgtcgacgc

SEQ ID NO: 707757 - DNA, 425 bp, Homo sapiens
ggccacgctgcagagcctggggcggtggcagcagcgtcgtcataggtaatattggggccctggatgggcgccacccacaagtatctcgatagtggggggggtggggggtagccagcagctcccagaacctctttttcctttttggcctaaatcttccaggtaggaactagaaccttgcccttttttttttttttttttttttttgagatgggttctcactatattgtccaggctagggggcagtggctattcacagatgcgaacatagtacactgcagcctccaactcctagcctcaagtgatcctcctgtctcaacctcccaagtaggattacaagcatgcgccgacgatgcccagaatccagaactttgtttttcactctccccaacaacctagatgtgaaaacagaataaacttccccccga

SEQ ID NO: 707758 - DNA, 1528 bp, Homo sapiens
  misc_feature (1312)..(1312): n is a, c, g, or t
  misc_feature (1346)..(1346): n is a, c, g, or t
gttccagatcgcttggtgacgtgaatgcttcgtccaggacacgcatgggatgccagtgtgtggcagtcgacttccgatgcgatgttgcctggtcgtggaccctatggagttgaaggcccgtcaatgcgttcgagtagatcgtagcggtacacttcacttgaatggacgcattgactgctgagataagtatccctccttgcgctgtccataatgcggtcctgcgtagccttcttcgtgcttcgcgtactacccagggaatgtgtgtcttttaagacattgatccctagcactacgcagtacagaacgaagtaatagctagtccatcgtaggctctcgtagcacatagattgctcagtcgtccggttgcatctacgccggcgatcgcacgcagtgactcgtagaggccgagccgcacatggtatcttctccgtcaggaggcgtctctcggcggacttcgttccccctgcagtttgtgtaggggcgaccttggcattgagcacttgaactagccgccgtgcatgtttggcctggccgagttgctagcggggcttggtgcttcgtgtcgcaaaatggaacgggcgacatggcagagggtacacccatggtggattgcatcacgcacgcgcgcgcttatccacccgatggtagagtctcttccagtctagactgttccgaagtggggaagttctattcgccgaaaccatagtccatcggattcggcaatttgaggaccgcctgtgagtttttggagggcccagagggcctgtgaaaagaaataggccaaagaaacccattcgttgttgtcggggccctgcaagcccatggactttgaggccgcctttcccatttcccacagtttgcatcccgatgtaggcgctgtcgcttctccgccattcttaccccttgttggctttgtggttccgttaccgcatggtgccgagtcgttgccgttctaccccatttctgaggcgttcggttatcctccttgttccaagaccggtcgggaaggcaagggccgacactggttttccgtgtgccgaacgggctgaccttttccaccttcgggaaaggggaggttgagaccctgtgaacccttcgtccaaaatgtgaacgctttcttatggcccaaagccaaatggacagcggttcgcgaaaggccccaaacttggttgggccaagcgtggaacagaagacgctgaactcaatgagttttccgacaccaagttcaatctttttgccggggccattggggccccctcatgggggcgcccctgttcaagggagcaggtttgtttcctcaacttctccagtncggtttgcgcacggttacccacgttgtgcggaangccctcgcccagagagctgaaagtgcccgtccgggggggaatccccataacccgagaatatttccccctgggagagccaattttcttttactccccctttgtacggtgggcgcctcttcccggaaaaggtccgcccaaaaagtggcgtccttttatccctttttacctttctttatcccggg

SEQ ID NO: 707759 - DNA, 301 bp, Homo sapiens
cctcgcgcaggtatactccagagctgtgactggtgccacatgcattctagcctggatgacaaagcaagacgctgtaccaaaattaaaacgttaaacaactgagataaatacttgaaatattacaattattacaatagttgttttccccactggaaacaaaagttgagcagagcggtgtcttaagcactccagaaaaaactctaactctagttgaaggctaagtgactcttctcaaacagcaagcccttcaccttttaactttcctatagcacttacttttggaaaatcaaggagtaagcac

SEQ ID NO: 707760 - DNA, 514 bp, Homo sapiens
  misc_feature (5)..(5): n is a, c, g, or t
  misc_feature (80)..(80): n is a, c, g, or t
  misc_feature (86)..(86): n is a, c, g, or t
  misc_feature (135)..(135): n is a, c, g, or t
  misc_feature (169)..(169): n is a, c, g, or t
  misc_feature (183)..(183): n is a, c, g, or t
  misc_feature (290)..(290): n is a, c, g, or t
  misc_feature (344)..(344): n is a, c, g, or t
  misc_feature (346)..(346): n is a, c, g, or t
  misc_feature (399)..(399): n is a, c, g, or t
  misc_feature (431)..(431): n is a, c, g, or t
gaggnggaagaccacggggatctgggccagggggggggggggctccggcaggcccgggagccacgtagccatcggcgccngggcangagcacccgccagtgcacagggcgaagacagggccttccgccacggcanggaggtcaaacgcggagggggcccagccactccncacatactccaggnccagcggcatcgggtagaagaggttccactcctccggcgtctcttccactttccctctcctccgggggcagcaagtcagcgcggaggagggggtaaaacacacacgnggggcggagcacagggagaaggggcccgcaacaaagacaggccgggcgggaggntngcgggccagggcggcctgctgatcgggactctggattcctacgatgtggggcngggggggatctgctgcacctgttgagtctttnggcaaaggaacctggtagatggtgaccctggcactaaggtcaggctccatgtgccgcagcaaaacatggccagctccacaggg

SEQ ID NO: 707761 - DNA, 491 bp, Homo sapiens
gaagcatcctaacaggacacatacagactatgaggtcccgttccagccaatggaaaccggacacagcagtagggtggacgcatcaggttacaaactaaccctgtctcttagttcggtgtactctcgtggcaaaactgctggcgaatgtaccctttctgcgggaagtaaaactggccttgcagagtaaattcacatttctgttcaagtgctcatttcttcacggccacggggccacacagcatttcaacacacttgcattagagcttatgtcaactcagcacttctttcacaccaggcgtggtcagctcacacctataatcccagtacttagagcagccccaggatccagcctaggcaccatcagtgagcactccatctctgcaaaaaaaatataatttccatccaacaccattcattcaatcacaaaccgctttcacacaattcataccaggcgtagtggcacacacctgtagttccagccactagggagg

SEQ ID NO: 707762 - DNA, 598 bp, Homo sapiens
attttcccatctttcttttcagtccttgcgcaccgggggaacaaggtcgtgaaaaaagaaggtctagcgtgaggtgccgtgcattctcatctgtcctcattctctgcgcctttcgcagagcttccagcagcggtatgttggtgcccacgacgcatccggaggttcacaatctctgtggtccgtaggagccactagtgaggagggccctgggaaccaatttgccattttgcatgtggaaaacaagtggtcgttactagctaagatgtgtcgtacttcggatctgtatttgctacaaccttccttgtagtaaagacgaccaaatctgcgttaagaacgataagggatgttgcatgttcctccattcaacagatatgaagagcattttaagaggtgcagcctctggaagtggatcaaagtagaactcagtattgccatactagatatgttggtcaatagaattatgacgtgaatgataggaaggtaaaagatagaattaggctctctggaaagattattccagaataccaggtcttatagtggaatagcagatcggaaaagaatcaggaagtagagatgagtggaaatgctttggtaatga

SEQ ID NO: 707763 - DNA, 689 bp, Homo sapiens
gagttacacagtgatactatgctcttaccattattacgatagtaacaacgcgtccagcttagaccgttcttgacttggaaagaccttgcgtgtgaagagatccttcgcatcatgttgcttcagtttaacctatttctaaagtgactactacatgcagaatatgtacaaactactcggactgaaaagtacaaagacgtatactcctacaagatgtatcgaataccttttcctaaacatcaagatacccgcctcaaaacactttaataacaagatttggtctacttaggcgtccggcttgacagctaaacacttttagtaccacacaaagttaacatcatgttacatacgtcgttacagtgcacgttaccccaatctgtgaaaatcaaccaccatgaaactcatgcagcattacttagctcttgtctttagtgcctcaggtatcacagcatcacttagtagacagaaatcttatcttccccttaaagtagttgtcatgccatacagactttttaatattcccaaaaattaagaaaaacatccttggaaaatatattatcagaggaattgtatcgtactgaacaggtaagtcatccctcagcctgagattagtctacttcttccatgcgtgatgtgtcgtcatctccttcaacgggtggcatttcttcagttacagcagcactggtatcatc

SEQ ID NO: 707764 - DNA, 1142 bp, Homo sapiens
  misc_feature (842)..(842): n is a, c, g, or t
agcgtgggttccgtgtcgtgctgctgcatggcgtccggcttagacgctttggctccggtgtgttccggacgccgtgacggacggagacggtggcgtcgtctcctgtgcgtgcgtgctggaggtcagataacgacggaccctgtgccgagcctgtgggactagcttcccgtgtcgcttcgcctgacgttggtggactctgtgtgaccacggatacttcgcacagtgaagaccaagtactagtaaagtgtagattgcacccaaagttacatgaggcacagtgtaagaaaggcaagcttgatttgtctatgaaccttatacacaatatcagagctattgactgctatcggcattaaaacactaaacaattttgcttagctaaaaggggttcccgagtagcgaccattgagaaatccattttgtaagcatcgtggaaactcatatattggggcaaaacgggtttcaattgcgcaccactaatcttgtgtcctgaaaacaattgttatttcctttgcggcatactttgcacttaccctgaaagggtaggccaatttaaatgcagttatgaacctgtgcatctattaacacttgtcgcaatggctatgtgagcaagcccaaggaatacagaacagggaagaagccttattgcgtttgttcacaccacatagacttttattgggtggtggcaaggttccacatacgtataatctgtgtgtaccccgtgggtaacccgtcgttaaccattgtttgcgcaagacttttcgacggggccgcacgcctttgaccctttgcgtgctccttttttgcgcccttggtgccctattactttttgtcgaaaaactagnttccttcaggtaaccgtaaacgggtgggagccggctttgacacacgagaatgtagccgaattaagacatacggctggtgcagccaatatttggctttcacgcgtaattgtaaacgcatgtccaggcgggaaaaaacctccgaagaaaactttaacaaccccaaaagataactttttgaatttcggctcaaatgtattgtgtacacagatgacaaagggcgctaatatttgtcatacaacttcttgcgacacacgagcgccctatggtgtaatttactaccccacatacacaattatctac

SEQ ID NO: 707765 - DNA, 129 bp, Homo sapiens
cacgctgaacaggtgcgcgaagtggtggtgcagccgtgggcagtcggtgtcgttcctgccggacgacattcatcagtcatccacgtcaccggcgatgagccgaccctgcatttccacctgtacggccag

SEQ ID NO: 707766 - DNA, 214 bp, Homo sapiens
aaaagatacatgaataaaaccttattacatccaccctcctctccctaggaggcctgcccccgataagcggctgatgcccacatgggcacttatcgaagacttcacaacacacaatagcctcatcatccccaacatcatagccaccatcaccctcattaacctctaattctacctacgcctattttacaccaaccccggtgccgatgaatagcga

SEQ ID NO: 707767 - DNA, 191 bp, Homo sapiens
gtctccagtcgcaacctggctggtcccccgtctcccgggcaggtctccatattgatgccgaacttatgtgcggacaccccatcggcattgcgcactactagccgcacaactcctgggctcattgtcgatcctcccatctcagcttcccataatgctgacattacaggcgtggtactcccgactgtagcgaa

SEQ ID NO: 707768 - DNA, 207 bp, Homo sapiens
catgggagggggcagctgtgccatcagaggcggctatggaagcagagccggaggcagctatggctatggaggcgccgggagtggattaggacacggtggtggagacggcattggcttaggtcggggtggtggagccggccttgctggtggctttgggggcctggtttccctgtgtgccccctggaggcatccaagaggcagtgtcaa

SEQ ID NO: 707769 - DNA, 716 bp, Homo sapiens
  misc_feature (297)..(297): n is a, c, g, or t
  misc_feature (687)..(687): n is a, c, g, or t
tggaggcaagggagccagcccctcttacatggatgcgccaggctaagagaccttgccagggaacctcccccttatatcggtccagccctcgtgagcctatttctatcattagaccagcatggaaaagccctccctccataatccatcatctcccatcaggtccctcccccacccatgggattatgggagctacaagatgatattggttatcttcacatttcaaaaccaatcatgccttcccaacaatcccccaaaggctcaactcatttcagcattaacccaaaagtccaagtccanagtctcatctgagacaaggcaagtcccttctgcctacaaacctgtaaaatcaaaagcaagctagttatttcctagatacaatgggggtacaggcattgggtaaatatagctattccaaatgggagaaattggccaaaacaaaggtgctacaggccccatgaaagtccaaaatccagcagggtagtcaaatcttaaagttccaaaatgatctcctttgactccatgtcttacgtctgggtcacactcacgccagaggtgggttcccatggtcttgggcagccctgccgctatagctttgcagggtacagcctccctcatggctgctttcacaggcagttgtggagtgtcctgagtcttttccaggcctacagtgcaggctgtcagtggatntaccactctggctctggagcacggtggcc

SEQ ID NO: 707770 - DNA, 749 bp, Homo sapiens
ctcatcgacgagggcagccacatggtgatgctggaatgccctgagacggtcaacacgctgctccacgaattcctgctctgggagcccgagccctcgcccaaggctctaccggagccactgccgtgcgcctccagaatgacaacgaatgtagccgctgggccggcggggcatcgcttgcgtgagcacagccgcagacagtgaggaggcccgagcctgcagcgcagaccagctgggcgggccgttcgctccggtgggtcggggccagtgtcagggagacgcccccaggctgcctgggctggggccgtggcatccgaggtgagcccatgcggacattccgctctccgctttccgtcccgcggggcccatcggccgtatctggggccgcaagccgggacccttcacggcaagatgaccttgtacacgaacgctcttccctcacctttccctccgcaaatcgctcgcggagccgagggcatggccccgaaagcgccggtgatcattccagttgtcgagcccgttgccttgaagtcctgggtagacccgacggaagacccgaactgggggaaccgcgtcgaggccaccaatccggattatcacggaggaacccctttgcctacgcctccgagtacccctcgggcggctggcggacgccactcttcctggccgacaagggagagcgctgaaattgggcatgcgctgtgcggcacaccgcacaccctgcgccttgtctccacctgggtactccacat

SEQ ID NO: 707771 - DNA, 797 bp, Homo sapiens
  misc_feature (138)..(138): n is a, c, g, or t
  misc_feature (170)..(170): n is a, c, g, or t
  misc_feature (272)..(272): n is a, c, g, or t
  misc_feature (300)..(300): n is a, c, g, or t
  misc_feature (458)..(458): n is a, c, g, or t
  misc_feature (742)..(742): n is a, c, g, or t
ctcttaacggctgatgcagggcaagaaacctaggtggtcctgtctgttattgactagctgtgagatgttgcacaggcctgttttattatctgtgacccacagttgtacggaagggttctggtttacatgtgagggtcntgtaaaaaagaaatttgaacatttcacagttngtttacagtttttcaggagcacatttgtttctctagagtaggtcctctttgcagtccactttgagaagctgatgaaagctatggattctcattgtccagacnttacacatacatgaacaatttacaaacnaatccaaggaatatgcactgatctttaagtccacccattgcccgggcgagatagagctttctttcctctgttgcttctttcttccttatggcccatagtggacagcagaactggaaatgggattcacgattctgatgtggacaccgtgttaataaaantaagaccactagaactattgtttaaagatacacgtggaaaataaaaaagtatgtctttcaaagggcttaagtctttttacacaaattaatgttttttcttgtaagtttttccagggtcgttgggtaagcaatagttactcctattccccagagaggagaaactgagccacagttaggctgcttggtaggatcagtggagtagtcaaactgctgttgcaggaactctaccccagtttgtcctttcatttagcaactatctggagcttcctctttgtgacaggcanacaggtagcatggcttagcagtgaaatgcaaactaataccccacatcatacaggc

SEQ ID NO: 707772 - DNA, 476 bp, Homo sapiens
ccatcgcccggcagatcggcaacgccgtccccatcccattgggcgccgccatcgcacggcaagtcctcgcgcagttctgagggcgatcccgagcgtcggctccgtcgatgcatcccaggattcccaatacgttgaacccggcgaccccacccatcgccggaattctttcggcattttctcctgtgttctcagcagcaggtcctaagcgagccttcaaccattccggttatggttcgcctgagcacgagatcagacgaccgggaggcggacacgcagatggcacgtggtgggaggggattccaaggcacagtgctcaaggcgctgcgggcacctgagcacaagctcacgatcaccgcagtgcgggagttggcgccctacacggagctgactgtccactgtccgagcctgctgggcaccggcgccgccatgctgccgcccaccgcctgggtgcgcatgtggatcccgcagggcggccg

SEQ ID NO: 707773 - DNA, 207 bp, Homo sapiens
gctcgaccgttccagcaggcgcgggcgattatcgcgccttgccgccgttcgtgaccaccgtcggcctgttcgtcaatgccagccgttgcgagctgggggaaatcctcgacgcggtgccgctggacctgttgcagttccatggcgatgaagcccgcgagcagtgcgaaggttatcaccgtccctatatcaaggccttgcgggtcaagg

SEQ ID NO: 707774 - DNA, 294 bp, Homo sapiens
cacgaaaaaaagatcaatggcacaggtaggaagagaaaagggagggtgtgccacagaagggctgacataaatccaagattatgaaaggagttatgtggtgttgaggaaacaaagtagcctgactaatctctgtctatccttaatttattgcacggttacaagcaacatttgcttgcaagtttagtcaccaggtcctgcaaatttggagcttatctatgttggggaggcttggggtacccggaggctcggaaatttcgtaaatcactgggtcataagctggttttcccttgttgt

SEQ ID NO: 707775 - DNA, 272 bp, Homo sapiens
gcgtcatgatcatctttactccagcagccataaaatgaatcatgtttctctcttgatttttgcccagaagaggcagttatgattccatgtttcttctttaagtgtttttaattgggctcaattaaggatcacaatccatattttgaagacaatatttcttcacgttgcagacacaatctgttctacattaggaggttgagaaaggcggagaaagccaaaccaaatggattcttttagctttaggatcttgtctgcttatgatattgacagag

SEQ ID NO: 707776 - DNA, 134 bp, Homo sapiens
ctatcggttcatgctggcgtacatcctatgcaggaactgcaaccattaggatatactggccaatttgttgtgcatttccataccactggccccactgcgcataaggttggggatatccaatttgattctgctgc

SEQ ID NO: 707777 - DNA, 981 bp, Homo sapiens
  misc_feature (387)..(387): n is a, c, g, or t
  misc_feature (389)..(390): n is a, c, g, or t
  misc_feature (393)..(393): n is a, c, g, or t
  misc_feature (395)..(395): n is a, c, g, or t
  misc_feature (420)..(420): n is a, c, g, or t
  misc_feature (676)..(677): n is a, c, g, or t
  misc_feature (679)..(679): n is a, c, g, or t
  misc_feature (682)..(682): n is a, c, g, or t
  misc_feature (709)..(709): n is a, c, g, or t
  misc_feature (717)..(718): n is a, c, g, or t
  misc_feature (744)..(744): n is a, c, g, or t
  misc_feature (749)..(749): n is a, c, g, or t
  misc_feature (758)..(758): n is a, c, g, or t
  misc_feature (769)..(769): n is a, c, g, or t
  misc_feature (785)..(785): n is a, c, g, or t
  misc_feature (793)..(793): n is a, c, g, or t
  misc_feature (860)..(860): n is a, c, g, or t
  misc_feature (867)..(867): n is a, c, g, or t
  misc_feature (873)..(873): n is a, c, g, or t
  misc_feature (895)..(896): n is a, c, g, or t
  misc_feature (921)..(921): n is a, c, g, or t
  misc_feature (925)..(925): n is a, c, g, or t
tccctggccgggagggctcagaagagaagtagggcatggcatcgtcctctgctgaccacctgcactcggctccccgtgcgctgcaggtccctgttccagcagcttctctacggcctcatctaccacagctggttccaagcagaccccgcggaggccgaggggagccccgagacgcgcgagagcagctgcgtcatgaaacagacccagtactacttcggctcggtaaacgcctcctacaacgccatcatcgactgcggaaactgctccaggctgttccacgcgcagagactgaccaacaccaatcttctctttgtggtggccgagaagccgctgtgcagccagtgcgaggctggccggctgctgcagaaggagacgcactgtatcctncnnccncnctccccgccgcccgctccccctctnccccgcgcgccccctccgtgccgccgccgccgtccgcctcctttactccccacccatgcccagcggacggcccggagcagtgtgagctagtgcagagcaccgcgataccggagaggcccgcacatctgcttcgactacaacgcgacagaagatacctcagactgtggccgcggggcctccttcccgccgtcgctgggcgtcctggtctccctgcaactgctgctcctcctgggcctgccgccccggccgcagcctnntnttntcgtccacgcctctcgccgcctctgancaccctgnnccaccccacctccactcccacctcanccggnctcttcgcntttgccacctnctgccccacactcccnccttaganctcgtcctcctacactgaaggactgagctggccaggcctgagaatctggtctgcgcttgggatgggngtccaancgggancgcagtgtttggcaccaatcannctcactcgaatgtcaatgtcccaancttntgcctctggctccccagtggatggaaggagcaaagcatgtgcaaacagctctgtgc

SEQ ID NO: 707778 - DNA, 578 bp, Homo sapiens
tctaaggatcccaagaggtaggaccggggctggggaagaggggacatcctggatccccgggcataaacggaggccgggggccgccgtcacggaagaggagcacaagcggtacgacgacatcgacttggacatagaggagttggccaaggatgtgggggcgcagatcctccggcacagccacaagaaagacatcctcatgcaccgatggcggtacccgtctctgtccctccagggcatcgaaggcgccttctcggggtcgggggccaagaccgtgattcccaggaggggggtgggcaagttctccatcaggctcgtgccgaacatgactcctgaagtcgtcggcgagcaggtcacaagctacctaactaagaagttggctgaactacgcagccccaatgagttcagggggtacatgggccaggggggaaagcccggggtctcggacttcagtcaccctcataaccgggcggggagaagagccatgaagacagttttggcggttgagccagacttgaccagggaaggcggcagattcccgtgaccttgacctttcaggagggcacgggcaagaacgtcat

SEQ ID NO: 707779 - DNA, 192 bp, Homo sapiens
cagaagtacttttacttcgtgtaagatttcacttcttttttaatactcgggttcggtaacctacatatacattaatacatgggagggtggggggataaagaagatagtctcttcctccttagggtcaaaaaggggcatgtaacttaaatggataagggtgagacggcactaaagtcaggggtaccgagctcg

SEQ ID NO: 707780 - DNA, 908 bp, Homo sapiens
tagttctagatcgcgagcggcgccctttttttttttggtttttccataactaaagtctttcacccagaagccggctctgttggcacttggctgccgactttgcaaacttttgggcagggggggagactgagtctcattctgtcacccaggctgggatgtgcagtgggcccgatctcagcttactggcaacctctggccctccagggttctgggcaattccgcctcagtctcctgagtagctggggattacaggcatgcgccaccacacccgggtaaattttggtattttaagtagaagaccaggtttcatcatgttggggcaggagtggtcttgaacccctgtgacctcaggtgatctgcccatcttcggcctctcaaagtgcgtgggattacaagtgtgagccatcgcgcccggcctgcaaactttttggtaggtatttcgggtaaacaaatccttaggttactcttggcgggtggtgggggttgggcttaagtcatgattccaaagtagaaatagctaggcattatttttggaaatatatgaccctatagtgtagtcaagaatccactgaacagagggaagcaaacctttgggaaacgggctttggggcagacggtaaacgtccagttggatgctggaagctttgaaacagctccatcaggtaggtactcctcacatctgatgagttggtcctttcagcctaagggggtcggacgggacgtcgcggacaatagcaaatacgctgtgttgactggcaacgtggtgtggcgacaaaggcgagttcccaacaaaaggataggtccggccgttgtttcatggctggaagcgcctggaaagtgctccccttcctttccgcctctggtacttgctgggccacagggccttactccaggctgaatgtgccgtg

SEQ ID NO: 707781 - DNA, 127 bp, Homo sapiens
tgatggctggtatcgatgacttctacacctcagcccggggctagcaactgccaccctggggcaacttcgccaaggccacctttcgatgccatttctaaggcctcacgctacctgacccccgacctct

SEQ ID NO: 707782 - DNA, 630 bp, Homo sapiens
  misc_feature (140)..(140): n is a, c, g, or t
tgtcagacccaggcagctctcgatctaagaaagcaggccgtgtgctcgtctcactgcgtgatggacgccagctctctgtcttggcaagatacacttaacagatgtttctacctcacatgaatgagatttgctaaacagcnctgcgcagtgggaggaggaggtatattatttcccacagtatctcctgggccttctggaatgaccatgttatcctgtggcggtgggtgtgtcattgcgcccgccgtcttccaaagccttacatccccaagctgccagccaggaggtgataaccacccctcccagagtttctctcggctctttttttaaaagtcccccaacaaataggattcttgctgggaaaggaagttcggtaaggaaatgtcaaatctggtttttaaacaaggtccaaccctgcaatgaagcagccacttcagcccagagagattataagaactgatgtggccagagtgcctacccactgtggcccgggtgttgtgcccccagccccgaccatctgttttgggaaatgccccaagggggggttaacccatgggcaaaaaaaacaaaagaatcccaaaggggtcctttgggaaagggtggtttttcttgatttgagttttcccaaatgaa

SEQ ID NO: 707783 - DNA, 202 bp, Homo sapiens
actccctccccgtactcatcatactctttcaccacagcacaagtcctacctccatcgctaaccccactaaaacactcaccaagacctcaacccaaaacaggcataattaacactttacttccatctctttcttcattcccccgtcatcctggagaaaagtgtgctgccagtaaaggtggcgccccactcactccttcaccca

SEQ ID NO: 707784 - DNA, 115 bp, Homo sapiens
  misc_feature (31)..(31): n is a, c, g, or t
gttggcacacctcgtcaagtgtttgttattngttcttaaggaagaggggcgcgagagagcaagcctatttttaaggctaagttgctgtgctttgcatggggcgctcttgctttat

SEQ ID NO: 707785 - DNA, 1067 bp, Homo sapiens
agcgggctgagtctgcttgccgagccagcggctggtggaggggcagctgcagacctctgcgtgcccgggcgggcgcggcgcgggagtcctgggcctgctggcggtgcaacgcctctgcccgacctgctgctggtgtgaatggcttggctgctgcttgccctgtgcctggagccagtggggcagtgtctgccgcaaagtgtgacttgtgggagaccttgcgggccgccctgggtacgcgcctcccggatcggctcggcctcggctcggactggaggggaggacggagtgagcaggccgagctgcattccgcgctggatgcttgcgagggagcgcaggagtggaagctgcgccagccggggtcctcggatctgggcccatgtgacggaatttttaaagtttggacacaagagcaatgaaaaaaagcaaaatcttgtcagaagcactggatgaccgctggccacttgaacatcatgaattagagcagtctctggtgaacaggctctccagcccggcagcatccttagcgaggacgagttctatgatgcgctgtcagataccgagtccgaaaggtccctgagtagattggaacgccgtgacaagcagcgctccttttgcacgagcgacgggcggagcatttggggcaggacgaacaagcaccaggaatgtccgaacgaagagcagacttgtggtggcgcgcgaatgctctcgtccaagtgcgaatcaaggacaccacaggaagcgaggtttgccttctcctactgggttagcccaggacgagttgcacttcaggttagtcttggcagccattggatccgagagaacaatggctaattgggacagtggggacgctactacccagagaatcgaccgcactgccaagggtagtacttctaacatgcggccgtccttgagggtttcccctaggaggcggcccttaacgcttgcacatacacattggcgtgcgcgaacaacgttacaccgtcgaagtcacacgaacgggcgcctcgggtgccacggtcttcgtgcactccgtttgtgggacagactgcgaaattcagaggtgcgca

SEQ ID NO: 707786 - DNA, 150 bp, Homo sapiens
acttctccggtgcatcctgtcatttcttcaaagaggtggggtgacacttcaccattccatatgaacatgtacccctcaggaaggccagccaccagctccagcagctcaaggtcaaacactaatacggcacggcggggcacttctccaccc

SEQ ID NO: 707787 - DNA, 343 bp, Homo sapiens
tttttttacccccctaaaaccacttttttttccccgggggaaaatttttttttttcccaaaaacccttttttatccggcccccgggttgttccggggggtggacatttaccccttttttccattttttgttttaaaccccgaaagttttttttttaaggggggggaaaaagcccaattccttccccttgggggggcccttgtgttttttcctttacccccttggccccctttttaaaaaggcccccccggttttttggtttttttaattttaaattttttttttttgggggggggggggtattttttggggggggtagggcttttttaaaatccccttttcca

SEQ ID NO: 707788 - DNA, 680 bp, Homo sapiens
cgaggcacgcaagtaagcgcccctgtcctggggcctctcctcgtaactccatgcttgccacaggttgtctgaagaagccagaaaatagttttccaagaacctgggcagcgccgtttgtcatgcacatgaagaggtaagagaagaatgggatctaggcagccctcggtcagcagacctgtgatccgcgtggtgctcggagccatttgcaattccggtctgtcgggtgctcggggatgcctggtgacgggcccggttcccggtggctcgcccccacctgcgggcgtcgggaaggatccctgtccagtctgctcagccgcagaggaggccctggcagcgccccggctgtagccatgcaaccccgaggagtcccgggcaccttcaccccaccgggaggggccacaaggacctgggcctcggccaccaagctttgtcccctctcgctgtggggggactagtgattctcctccgacctgacgattgcttggttttttcaaaagggagttttgtgcggtgagaagtgtgattctgtgtggctaactctgggctagcgtgccgtggccactgaaggcgtggcctcgcgtgtgctgcactcgtaagtaacgctagtattgactgctagtcagtcaggggaacgcctgcctgtgtcagtcgtaagcgcacaggttggattgttctataca

SEQ ID NO: 707789 - DNA, 338 bp, Homo sapiens
tcgagaccagcctgcccaacatggcgaaaccccgtctctactaaaaatacaaaaaattagccaggtgtggtggtgggcgcctgtaatcccagcactttgggaggctgagcatggagaatcacttgaactcgggaggcagagtttgcagtgagccgagattgtgccattgcactgggcaacaagaacgaaactccatctcaaaacaaaacaatgaacgtgtaatgctagaaaatgtttaacttagcagtattcagtgtatatgtatgggtgaacgagctggggactcaggcaggtcccacctcagtagcccctcctggctctccttctggggcccagcc

SEQ ID NO: 707790 - DNA, 130 bp, Homo sapiens
ggcatggtgagaatgtcacgcgtccacataagacctgctggatctggttacgcaggactcaagttctgtttgtcgatctttcttgatggcatagcgctgtcgtgctgtcacgggtgccgcaccagagtat

SEQ ID NO: 707791 - DNA, 1732 bp, Homo sapiens
  misc_feature (1732)..(1732): n is a, c, g, or t
ggcaggcccctactagaggccagccccgagccagccccagcacccagcccccgcgtggctgaacgaggctgcccccctcagccctgtcgagcgagcggggccgcccgcgcgcacccatggccagccgcatgggctactccacgcgccacagctcccccgctccccccaacagaacgcacacaagctaccagtacccacgctcccctttcctgcacaggacagcagccaaggcaacgcaagcagcagcaccctcgcctgacacagccccccctgcccgcctcacacccccctagcatcgcctgctacccggcagccgcacccccctgcgcgcatcctgacccagccgcctcccccgcgccgcccacccggtcctgcctgccttccctgcttccctctgctgctactcctgcccaccactcgcccccctcatccagcctcttcagtcctccctctcgccccctctcagcacgcggctcccctctctcctcccgcttgcaccccacgccccccggctgcttagccccccgggccccccttgcccccccacccttgctgctcgccctcccagggccccgccgccgcgctccccccccaccgcccgtggcccccgcctctgcgcccctcccttcctactgctatcccgctcctcgccctcttcctgggctcgtcccaccgaccacttggctcctccctccctccccccccattcgccctccgccgcggcccctccgcacgtcttcttggccccctctcgcccccctctccctccccgctccccctgccccccgccctctcccctgtcccccccctcccggccccctgcccccccctccctctccctcccctgcacccccctcccacccctctccccccttgccccgccgcccctcccctgcccctggctctctcacccccccccccctccctctctccctgccccctccctcgccctggactcccccccccccgccgctccccaccgccccccctccacagcagatccactcatacccccatcgaaccggcgcgaccgccgcaagtgaaactcatcgccgggccgcgacttcgcaccctggccgcggcgcctctccccacgcacccatgccatctcccgcatctccctcctcctcccccctctcagcaccttccgtagtcctcttctcgtcgctccgccccccatgccgcgcacctcagcggccaccaccgccccgcctccagacattcgcacccaccctaccacgacctcctctccccacccaccgctccctccgctccttctggcggctccacacgacactcggcccccgcacacacccccacccgccccgcttccgccccccccacctccctcgcccacccaaccccaccacccccccgcacaccccccagccactcacacaccgctccccctcccacccccacgaccccactccaaccgcacgcctcgccccccccactgccccagcccccacccccacccttctccctccgccccctcacctccctcccctcccccccctcccccccctcacccctctccccccctctccccccacccactccacccctcacatctccatcaccccgttcccccccgccctctctccctcaccacccctctccctcctctccccccctgccaccacaccctcaacactccactccaccctccccccacaccacccaccccacacacccaccccccaccccgaccccccatcccccccccccn

SEQ ID NO: 707792 - DNA, 800 bp, Homo sapiens
  misc_feature (3)..(3): n is a, c, g, or t
  misc_feature (87)..(87): n is a, c, g, or t
  misc_feature (92)..(92): n is a, c, g, or t
  misc_feature (94)..(94): n is a, c, g, or t
  misc_feature (105)..(105): n is a, c, g, or t
  misc_feature (114)..(114): n is a, c, g, or t
  misc_feature (118)..(118): n is a, c, g, or t
  misc_feature (122)..(123): n is a, c, g, or t
  misc_feature (125)..(125): n is a, c, g, or t
  misc_feature (129)..(130): n is a, c, g, or t
  misc_feature (134)..(134): n is a, c, g, or t
  misc_feature (140)..(140): n is a, c, g, or t
  misc_feature (142)..(142): n is a, c, g, or t
  misc_feature (159)..(160): n is a, c, g, or t
  misc_feature (166)..(166): n is a, c, g, or t
  misc_feature (169)..(169): n is a, c, g, or t
  misc_feature (173)..(173): n is a, c, g, or t
  misc_feature (185)..(185): n is a, c, g, or t
  misc_feature (189)..(189): n is a, c, g, or t
  misc_feature (205)..(205): n is a, c, g, or t
  misc_feature (246)..(246): n is a, c, g, or t
  misc_feature (274)..(275): n is a, c, g, or t
  misc_feature (685)..(685): n is a, c, g, or t
  misc_feature (773)..(773): n is a, c, g, or t
agnagagaaaagtggaggttgtctttttcgatggcaaatcggacccttgcgggctgagggggagagagctacgtcacgcacggaggnggggngntcccggggggntgtgggtcngggngganngnctgnncggnttgcgngngctcctgctggtggggnnccaganatnctgncaaagtgtctgngcgngcgcgagtgtgggggncgacgggcccactctggccacacggcggccggggggcaggnggggccctgcgtcccataggctgcctgnnggtgggtagggcggcctgcggcatagtggggtggctgtgggctcccagcctggcccctgggaaccgtgggggcgcagggacaagcacatggctatgggatgcagggtgacgccaagggcaagcgagtggcggggatctctactgtgaccatgcagaattgatcgcagtctgctgcgccaccaccacctcatgttcccgaggggaacagctgggctggcgactggcatccaggccgtaactgcaaatctatgctaggcggggtctcccttctgtgtgttcaagtgttctcgacttggattcttaactattttaaaaaatgcactgagtttgggttaaaaccaaccaccaaaatggatttcaacacagctctaaagccaagggcgtggccggctctcccaacacagcgactnctggaggccaggtgcccatgggcctacatcccctctcagcactgaacagtgagttgatttttctttttacaataaaaaaagctgagtnatattgcataggagtgccagaaactgc

SEQ ID NO: 707793 - DNA, 377 bp, Homo sapiens
cgcaggtttctctttttctgtagcagctaaacaagcactagcctcaagataagcagcattgaaacaaccgcagctcctccccctgccgaccctggccccacacccctgctccaccagccgtaactagagctttccttggacaagagactcgtttcagtaacttttccctgataagagaccctgaccatagacgggttctggctggtttacagagattgcaccctcatgtgccttcatgtcctgaaagtactttttgaggtataccacctaattgtaatacgcttacatgctgccttcaccccaaggtgaacatgggtcatatgtaacatgcatgtttatccagcacacgtgtccgaataaacatgcatgtatattcg

SEQ ID NO: 707794 - DNA, 1210 bp, Homo sapiens
  misc_feature (205)..(205): n is a, c, g, or t
caacctccgcctccagggcttaaactattctcttgcttcagcctcccgagcagctgggactacaggcatgcgctaccacgcacagctaatttttgcatttttagtcaagacggggtttcaccattttggccaggctgatttcgaactcctgacctcgtgatctgccctcctagggctcccaacgtctgggattataggcgtgccnccgcgcccggcctctcatttcttaattgtagacattgcgtacttccggagaaggtccctgagaacctggctgatcttccccgctgcacccctcacgtggtcctgttagctcccaaactgtcaacctgaaaggaaacccagaggcaggctctccaggacaagtgagttaatctgggaatcgcagggggttgcagcctaggctgttcgtgccatgacagatcataggcctatctgagagggccgggcgaaggggaaaatacagatgagctcacaaaagttgttttgtaacaaaaaccactggctgtgggcgcttgctgcaggagtgggcgttagcttgttgttggagagagccttaccaggccgacgtccttgtgcaagctgcttatctagaatactgcagtcctgaggaatttccctgcagtaagtccggttacaggcaaacgtgcaggacgtgcaggagcgtcttgtgaggaggcctgctgcaggtattcctgcatgagagctcccccttcgtggcctcccgactccatttgtttagggattggtggaagtagttccattttggtacctgcaactttcacagctgtcgtgatgaaatcaggcttagctcttcatgattgagtacctgctgttcactgctacagtataaaaccatgccacaattcctgtacaatctttttttttcttttgagttaataattacctaatattttcacatatctagctttttactaacccatggccagcctttttttcaagtaccccaacgtttttgccacatgcctaacgataccgttttccaaaggctcaaacacatccgttgtgtctaactgattctcctgttccgacctagaccgatcacttcctgacccggctgcacagctcttatctcgagcttttctctgctctcatccttgagactcactttgtctgtctcctttcttggattccctgtgtaaacgaaaaataaaatcctaagctctctaaaaaaaaaaaggcggccgct

SEQ ID NO: 707795 - DNA, 308 bp, Homo sapiens
cccagccccaggcgcggtggctgacgtatgtaacccctagcactttgggaggcccaaggtgggaggaatcgcttgaagccttgggagttgtagacccaacccaccctgggcaacatagtgagaccttgtctctgcaaaaaataaagtattatctgggtgtgatggtgcacacctgtggtcccggctacttaggaggctgagttgggaggatcacgggagaccgggagattgaggctgcggagagctgagattgcgcctctgcactcccagcctgagtgacccagtgagatcctctcttaaaaaaaaaa

SEQ ID NO: 707796 - DNA, 524 bp, Homo sapiens
gaatcggctaacgaagtcagaggaggcaagtacaagtagtgcaaagtgagaaagatctttgtgggccaaaaggaatcccacatctggtgactcaagatagcccgcaccatctgctaccccaatcccctcatcaaggtgaatagataccattcagattgatttagagactggcaagattactgatatacatcaagtacgacactagtaacctgtagtataggtagactggaggtgctaacctaggaagaataaggtgtagatacaccaacagaaagaggcaccctggatctattgacgtgctacacgtagaaaaatagccaatagcaacagctaagccaatacgaaaataaccaacatatatgtataataggcaagggccaacaaaccatggaatattctctaaccccgaggaaagggtaatccgcctcaccatatgctgaagagagagacaaaagacaggcggccaaacagagcagtgcgtgaacagggtaccctaggtaacatagtccgatcatagtaccgta

SEQ ID NO: 707797 - DNA, 422 bp, Homo sapiens
cggtccatgaaatactgaggatgcgtatttctccatgcacattattaactgcactaaccacaattatctagctgattgctaggatagggctctaaacatatggaggcaacaggttctcacgaatagtgtccggggcattatttaatcagtgttagttctgacaggtgaacaacctgagttggtctctgcagatagtacctatgaaacattaaggtcagattgattcagctacctggtgtgtaagataatgcccaatttatagtttcctttatattttttctggtacttctacaaatataaccctgagcatagaaataccctcattattttaatgggacatcctatttctaccatgcaatttgagcttgatctgagacatttctgtgaagtgtgaaagtacagttaatcattcttaaatgttc

SEQ ID NO: 707798 - DNA, 866 bp, Homo sapiens
  misc_feature (24)..(24): n is a, c, g, or t
  misc_feature (26)..(26): n is a, c, g, or t
  misc_feature (31)..(31): n is a, c, g, or t
aattcctgatagtctgtctctagngnatccntcataggtcgcagggggttgcagcctaggctgttcgtgccatgacagatcataggcctatctgagagggccgggcgaaggggaaaatacagatgagctcacaaaagttgttttgtaacaaaaaccactggctgtgggcgcttgctgcaggagtgggcgttagcttgttgttggagagagccttaccaggccgacgtccttgtgcaagctgcttatctagaatactgcagtcctgaggaatttccctgcagtaagtccggttacaggcaaacgtgcaggacgtgcaggagcgtcttgtgaggaggcctgctgcaggtattcctgcatgagagctcccccttcgtggcctcccgactccatttgtttagggattggtggaagtagttccattttggtacctgcaactttcacagctgtcgtgatgaaatcaggcttagctcttcatgattgagtacctgctgttcactgctacagtataaaaccatgccacaattcctgtacaatctttttttttcttttgagttaataattacctaatattttcacatatctagctttttactaacccatggccagcctttttttcaagtaccccaacgtttttgccacatgcctaacgataccgttttccaaaggctcaaacacatccgttgtgtctaactgattctcctgttccgacctagaccgatcacttcctgacccggctgcacagctcttatctcgagcttttctctgctctcatccttgagactcactttgtctgtctcctttcttggattccctgtgtaaacgaaaaataaaatcctaagctctctaaaaaaaaaaaggcggccgct

SEQ ID NO: 707799 - DNA, 865 bp, Homo sapiens
  misc_feature (694)..(694): n is a, c, g, or t
  misc_feature (738)..(738): n is a, c, g, or t
  misc_feature (740)..(741): n is a, c, g, or t
  misc_feature (745)..(745): n is a, c, g, or t
  misc_feature (748)..(748): n is a, c, g, or t
  misc_feature (756)..(756): n is a, c, g, or t
  misc_feature (758)..(758): n is a, c, g, or t
  misc_feature (761)..(761): n is a, c, g, or t
  misc_feature (766)..(767): n is a, c, g, or t
  misc_feature (772)..(772): n is a, c, g, or t
  misc_feature (776)..(777): n is a, c, g, or t
  misc_feature (780)..(780): n is a, c, g, or t
  misc_feature (785)..(785): n is a, c, g, or t
  misc_feature (787)..(788): n is a, c, g, or t
  misc_feature (803)..(803): n is a, c, g, or t
  misc_feature (809)..(809): n is a, c, g, or t
  misc_feature (815)..(815): n is a, c, g, or t
  misc_feature (822)..(822): n is a, c, g, or t
  misc_feature (825)..(825): n is a, c, g, or t
  misc_feature (834)..(834): n is a, c, g, or t
gaaaacgcaggcaaacctgaggtcctcagaatggcgggcacaggttggtggctggagaggttgtggtggatgcgctgccgtattttgatcaaggttatgaagcccctggtgtgcgggaagcggctgcagcgctggtggagtgaggaaactcgcagataccgacctactaagaactacctgagctacctgacagccccggattattctgcctttgaaactgacataatgagaaatgaatttgaaagactggctgctcgacaaccaattgaattgctcagtatgaaacgatatgagcttccagccccctcctctggtcaaaaaaatgacattactgcatggcaagaatgtgtaaacaattctatggcccagttagagcatcaagcagttagaattgagaatctggaactaatgtcacagcatggatgtaatgcctggaaagtatacaatgaaaatctagttcatatgattgaacacgcacagaaggaacttcagaagttaagaaaacatattcaagatttaaactggcagagaaagaacatgcaatcacaggtggatctaaattgagagaaatggggtcaaattgggtatccctggtcagtaagaattatgagattgacggactatgttcagctagaaaatgaatctatcacattaagccgcacctgggagggaacaagaaaaatcgggagacttntgaaagaacacttgcggtgaagaaagtggggttccaaagggttnanntttntgnatgtgggnanagntttcnncatgngttnnttngaaanannggggggggggacatnttctcncaaagngcggggnttncaaaaattncagagggatatgtaaaacggcttaatgaata

SEQ ID NO: 707800 - DNA, 105 bp, Homo sapiens
gcggccgcctactactactactgctcgaattcaagcttctaacgatgtacggggacatgagtttcccaattaaaaaaaaaatgacttcttgtccagtggaaaaaa

SEQ ID NO: 707801 - DNA, 492 bp, Homo sapiens
  misc_feature (11)..(11): n is a, c, g, or t
  misc_feature (392)..(392): n is a, c, g, or t
cctgaagctgnctagatcacatacaaaaggcctctctctttttccttaaatatgctggggctcctagagtcatttatgactggaggctatccatcatacttcaaacattcaggtttactcacgtcatccatcatacaatggaaagtcaaattccctgaattgctatgtgtctgggattcatccatccgacattgaagttaacttactgaagaatgtttaaagaattgaaaaagaggaacatttcgactctgctcttacaaaggactgggctttctatctatctctactccagctggagcaacccccaacttatttacataaattttccttccaggcctcaaattaattttatttaaccccatataatcagcgggattaaaaatttaacaagnacctctctgtttaaagaatcccccatttaattggttaattccaaatttgcttgcttgcctcctaatattgataagcttatacaatttcacttttttaaca

SEQ ID NO: 707802 - DNA, 114 bp, Homo sapiens
ataatatctgccgagtggacattattcccgcgtcatcctgctgcctttgttcttatagactcaatgtacagactacccacaacctttattctctgagtcatcctgcctgcgtgc

SEQ ID NO: 707803 - DNA, 794 bp, Homo sapiens
  misc_feature (623)..(623): n is a, c, g, or t
  misc_feature (667)..(667): n is a, c, g, or t
  misc_feature (669)..(670): n is a, c, g, or t
  misc_feature (674)..(674): n is a, c, g, or t
  misc_feature (677)..(677): n is a, c, g, or t
  misc_feature (685)..(685): n is a, c, g, or t
  misc_feature (687)..(687): n is a, c, g, or t
  misc_feature (690)..(690): n is a, c, g, or t
  misc_feature (695)..(696): n is a, c, g, or t
  misc_feature (701)..(701): n is a, c, g, or t
  misc_feature (705)..(706): n is a, c, g, or t
  misc_feature (709)..(709): n is a, c, g, or t
  misc_feature (714)..(714): n is a, c, g, or t
  misc_feature (716)..(717): n is a, c, g, or t
  misc_feature (732)..(732): n is a, c, g, or t
  misc_feature (738)..(738): n is a, c, g, or t
  misc_feature (744)..(744): n is a, c, g, or t
  misc_feature (751)..(751): n is a, c, g, or t
  misc_feature (754)..(754): n is a, c, g, or t
  misc_feature (763)..(763): n is a, c, g, or t
gaaaacgcaggcaaacctgaggtcctcagaatggcgggcacaggttggtggctggagaggttgtggtggatgcgctgccgtattttgatcaaggttatgaagcccctggtgtgcgggaagcggctgcagcgctggtggagtgaggaaactcgcagataccgacctactaagaactacctgagctacctgacagccccggattattctgcctttgaaatatgagcttccagccccctcctctggtcaaaaaaatgacattactgcatggcaagaatgtgtaaacaattctatggcccagttagagcatcaagcagttagaattgagaatctggaactaatgtcacagcatggatgtaatgcctggaaagtatacaatgaaaatctagttcatatgattgaacacgcacagaaggaacttcagaagttaagaaaacatattcaagatttaaactggcagagaaagaacatgcaatcacaggtggatctaaattgagagaaatggggtcaaattgggtatccctggtcagtaagaattatgagattgacggactatgttcagctagaaaatgaatctatcacattaagccgcacctgggagggaacaagaaaaatcgggagacttntgaaagaacacttgcggtgaagaaagtggggttccaaagggttnanntttntgnatgtgggnanagntttcnncatgngttnnttngaaanannggggggggggacatnttctcncaaagngcggggnttncaaaaattncagagggatatgtaaaacggcttaatgaata

SEQ ID NO: 707804 - DNA, 388 bp, Homo sapiens
  misc_feature (3)..(3): n is a, c, g, or t
  misc_feature (34)..(34): n is a, c, g, or t
  misc_feature (65)..(65): n is a, c, g, or t
  misc_feature (134)..(134): n is a, c, g, or t
  misc_feature (166)..(166): n is a, c, g, or t
  misc_feature (180)..(180): n is a, c, g, or t
  misc_feature (194)..(194): n is a, c, g, or t
  misc_feature (303)..(303): n is a, c, g, or t
  misc_feature (306)..(306): n is a, c, g, or t
  misc_feature (316)..(316): n is a, c, g, or t
  misc_feature (381)..(381): n is a, c, g, or t
aanatgccatttccagttccaggtccaggttttnccccgtcaaataagttatgtaaaactttagncctttagaactttgtggattttaggattttgttcaaggggcctaggcacggtggcctcaaacctgtaanccccagtgctttgggaggccaaggcaggaggntcagttgagccccnggattcaagatcancctgggaagcaaaatgagactccgtttctacaaaaataaaaatgaaatcagccgggtagggtggcacatgcctgtcatcccagttacttgggaggctgaggtgagaggntcncttgagcccnggaggtcaaggctgcagtaaactatgattgtgccactgcaattcagcctaggcaactgagtgagnccctgtc

SEQ ID NO: 707805 - DNA, 363 bp, Homo sapiens
  misc_feature (338)..(338): n is a, c, g, or t
caggcatgcactaccatatcagctagcttttttttattttttgtagagatagggtctgttatgttacccaggttggtctcaaactcctggccttaagcgatcctcccatcttagcctgccaaagctgtgggattacaggagtgagccacagcactcagccagccagtaaatatttattgagcacttataatatgccagattctatactaggcactggggaatatactagtgagcaaaacaaaattgtcctgcactttcctagcttacagtctaatggaggaaaccgctcaaatacatgcacccactcagcaaacatctttttaatatctacttgtatnagcactcttctcaggacaggaaata

SEQ ID NO: 707806 - DNA, 526 bp, Homo sapiens
tgaggaccccgatagtgaataggtaggttcttccctctcaatgtattctatattgagccaatatggcaagggaaacagcaccctatttatagataaagctaccttcaaagagataaaataactgttagttctaaggcctgagaaagttctactaaccagccctgcaaaggatacatcacatgctaaaaaagacaatgaaggagcactagaatgtcacacaaacacttcagtttaagaagtaattgccttccacccaagctgccactccacggctaagtaaagagccaaggccttgcaagtgacactttcaacaaagctttcctgattttcttggtttcatttccaatttttcaaaattcttgttgttcatcagaaacatttaacatcctcactgtagaaaattaggaaaatatacagttttataaagagtaagaaagaagactgagttcctggaactttgggaaaaattatttggttaccctggcagatcaggggtaacctggaccacctacctatttcacaatcg

SEQ ID NO: 707807 - DNA, 175 bp, Homo sapiens
tgatctagaggaccccccgcgcaagcagtttctgtcatctgcctttttctggagtacgggtcatgtttcctgtttgtttgttttttgttttgtatgtttgtttgttttgttttgcttgtgtgttttttcatgtcctataattgtaggaaactggacattttaggtaatgtattgt

SEQ ID NO: 707808 - DNA, 1051 bp, Homo sapiens
  misc_feature (559)..(559): n is a, c, g, or t
agcggagagagcctcggctaggtgtggaaacaggaagagaactagaactggaagtaaagcattgaagatgtgactgaattgctgcaatctcatgatcaaatttgaatggatgaggagttgctttttagggatgagcaaagaaagtggtttctcgagatggaatctactggtgaagttgctgtgaacattgttaaaatgccaataaaggatttaggaattacagaaacctggttgataaagcagtgccagggtgtgagagagttgacttcaattttgaaataagttccactggctgggtgtggtggctcacacctgcaatcccagtactttaggaggccgagactggtagatcatttgaggtcaggagttcaagaccagccttgccaacatggtgaaaccccacctctaccaaattagccaggtgtggtgcacacctgtagtcccagctacttgggaagctgaggcaggagaatctcttgaaccagggaggaggaggttgcagtaagccgagatggcgcccctgcactccagcctgggtgacagagtgagaccttgcgtntaaaacaacaaaacaacacagggagacacggcaaaaaaaagttctcactggggggtaacaatgctatcatgctatcaaacaggttcacatgctacagagaagtccttgcggacaggatgtctccgtggtggcaaaacttcatggggctcttaaagaaatttgccccaaggtattacgtatctttcaagcagcagcaacccttgatgagttcagtagccatcgttacagttggggttagaaccctccaaccaggaaaacggattggttgagcatttttttaggccaggacagtgtcattttatccaacttatatcataatgcgctattggacccctttcttattagaccatcggctttaggtgttaacccataattttatgcccggtggaaacccaccaatttctgaagagtcggttgataggaaggtcctggaaaatgagccgccacggtttccgaggctaccgggcgtttaagagttcccgtatttatacc

SEQ ID NO: 707809 - DNA, 523 bp, Homo sapiens
  misc_feature (24)..(24): n is a, c, g, or t
  misc_feature (97)..(97): n is a, c, g, or t
  misc_feature (189)..(189): n is a, c, g, or t
  misc_feature (235)..(235): n is a, c, g, or t
  misc_feature (271)..(271): n is a, c, g, or t
  misc_feature (304)..(304): n is a, c, g, or t
  misc_feature (315)..(315): n is a, c, g, or t
  misc_feature (397)..(397): n is a, c, g, or t
  misc_feature (443)..(443): n is a, c, g, or t
  misc_feature (456)..(456): n is a, c, g, or t
  misc_feature (509)..(509): n is a, c, g, or t
ggattgagaaatagtttgaaaganaaaggtgggacacagggggccatcgccattgtggaggctgtgaaggccctgagctctgggagcccatgctatntattggcagtccaacaaagaaacatgtggtgagaatgtggaggtcaaaaggatatgttgcattaagcacatgatttacagctgtgatggttnagcgtttatatggaacatgttttgctacttgagataatgggagtangagcctaggaaggctagaagcaaggagccagcaagntagacacattccaagaggacattatgtcagatntgcaatccctncctcagtttctcccaacactcagctttttcctaacatgccccccttctcttttttgtaaaatgagaaaggtattattactanctatcattagcaaggtgattggcaggcttgtgcaaccctttaattnccggttggtgatncagcttcatttttcttagcccttatttcaaaccggagtcactctggggttgangtggcttcccacat

SEQ ID NO: 707810 - DNA, 1683 bp, Homo sapiens
  misc_feature (1683)..(1683): n is a, c, g, or t
gtatgtgtggtgccgctgcagccgactgagataggaaagacgctcatagatacccagcatgtatgctccgacactagtctagccactatacctatctagtatataggactgcagccccaataatcatgtgaaaattgctagtacctagtggagagtgagtacactacaaaaggaacagacattcacattggcgaaacaagtacgatatcgatgcgtcaatagagaccgcctacattaccacgagtacatcggtgacacgtgacgcaccatgtccaaacagtagcatagagctccaagaaagacgagacgcctccgcaagattcatactataacgccatatgcccatgaggactggtagggaccacaaattaggctcgtgtgcacatcttcggcgatatgcagtcccaaatcaacgtaagtaactttccaatagaatcacaaattcagcaactcaagcgtaacaaaaccacaatgatcgtagctcgaatgcacatagtaaatagacgtagagtacatactaatggatcaacgctttagttccatgcaatttaacctttaacaattactcccataaatatgccgaggaagagacactatcagaataggcataaaaacagccggtcacatatacctataagagccattgagataagtccaaacacaagcaaaccacacatccacaacacgtaatatatatagcaataactaacacaacacgtaggcacatcacgccgctattgcactggaattgtaatgctacccgggcaacattcacaaaacagcaacacaatagttcaatgaaaagggtacacttatctgcagtaacatcgaccacaatcatagtgggactaacagaaatccacaccaattggggacatcacacttattacactatcatctaattataactctacaactcttcgtatatgcactaacaactaataaaacttaaaaagatgaatatcaaataccaccaaatattcaatgaaaaaaaccttacaaaatatttattgatctattcccttttcgaaacatataaaaccatttcactcaacatgtacttccatcttaaccaaatacaacacctatacaacgtacaacaaaactacatatacactatacctaaacaatgtacagttgccttgtagtgcccataacttggtaatctacaagttacatcgggaatagtacaaatctaacacgtacatatacccctacgtacaatctggatcccgtgctgtgctttagaacgaacaactggcacgtcaaaagaaacgaaaataataattacaccacctgtcgaaaacatgaccaaaatcacaaagatgatttcgagaaaacgtaattctacctatgcaatatgcatagttgtgtagattatcctaacaactaatataactcaagaaaacctaaaaaaagaacaccagaaccacactgataagatactataaaatataactataatacacacaaactacaacatcaaaaaaacataatactacagtaactaacaaacataatacatacaataactacaacttacaaataatatacattctatacacaaacaaatctcctaatcaaaacacataaagacccaaaacaacacacaatataccaactaaccatattatcctcaatatcataaatcataaaactaacatttacatctaatataaacan

SEQ ID NO: 707811 - DNA, 658 bp, Homo sapiens
ggaggagaatcgcttgaacctgggaggcacaggttgcagtgagccgagatcacgccactgcactccagcctgggtgacagagcaagacctggtctaaaaaaaaaaaacacacacacaaaaaacaacaaccaaaaaacaaacaacgccaggcgtggtgggtcgtgcctgcaatattagcacttggggaggccgaggtgggtggataacctgaggtcaggagttcgagaccagtctgaccaatatggtgaaaccccatctctactaaaaatacaaaaattagccggatgtggtggcatccaactgtactcccagctactcgggaggctgagacaggagaattgcttgaacccaggaggtgggatggttgcagtgagccaagatcgggccactgcactctagcctggggtgacagaatgagactctgtctcaaaaattacaacaagacacgaaagaaaagaatcaaagacaactggggacattagactgctttatattcctccaatgtgtctgggacagcactcatgggccagatctagcctgaagcctctttgtttttttcaactttcgggtcaaaacgggggggtccaccattgggcacaagggtcaacaaacggggacgagacaaacacaaggcgagcaagggagaagagaggacaga

SEQ ID NO: 707812 - DNA, 674 bp, Homo sapiens
  misc_feature (410)..(410): n is a, c, g, or t
  misc_feature (437)..(437): n is a, c, g, or t
  misc_feature (555)..(555): n is a, c, g, or t
  misc_feature (589)..(589): n is a, c, g, or t
  misc_feature (621)..(621): n is a, c, g, or t
tttttcacttttaaaccagtctttaattttcaattcaggtgtgaggcacatatatacacacaaacatattaatttaaggaagcaagaatgtagaatattaacatgtatggcagacactacttcatgtattttgtttaaaacttaactttgaaataacttcattgtttacatgtaaaagaaaaatatcattcacttatacttccacttccctttaaagtattctcaaattatatttcctgaaactccaatagaaagcattctctcttaatcatggcaacgggtcgggtactcattggtgaccaaaatctggtgacaccatcttttatgttctttgccatattcttaaatgcctggcaaacagtagatatttaccagatgaatatgacattaaaaaaataaatttccaaganattgagattctttagcccaagtttgangggactacatccattttgaaagcactcctagaaagggggaatgttgattaaattgttgactgccatgccctggggcttggctgctcctaagttattagagctgtgttttaagcgtttnggaaatagaaaaaccaatgccccctaaggaaaanaaaggcacctaaggggaaaccatgggttgccnagtgcactgccaaaatgacccaatggcccctacttcccaaattttcccccttc

SEQ ID NO: 707813 - DNA, 340 bp, Homo sapiens
  misc_feature (197)..(197): n is a, c, g, or t
  misc_feature (216)..(216): n is a, c, g, or t
  misc_feature (253)..(253): n is a, c, g, or t
gtgggaactagagcttggttgtctggcatagagtgggactcctaaagtctgtaacatgaagtggcaaattggtgtcactgcaattacagacccctacgaaaggcacgcggaatggcaggaatgtggggtgtgctggctatgtctgacactgttggaaatacatcagcagcttaaaacttcaaaatctcaactcaatncatgttaaaagaagtgcgntgtctctgtaaccatttggtagtatctcctatctctnaaagaggaataattcaatatattcagagtccaggactattgggttggggggaaggagtgtggcatttgaaaggttaggatgggggaa

SEQ ID NO: 707814 - DNA, 342 bp, Homo sapiens
  misc_feature (35)..(35): n is a, c, g, or t
  misc_feature (39)..(39): n is a, c, g, or t
  misc_feature (50)..(50): n is a, c, g, or t
  misc_feature (156)..(156): n is a, c, g, or t
cacttttcagattagggatgttcaagttgtagtantttnggtgctggctntagcattatataaagaataacaagataaatgttgcagtaggctagaggttcttcactcggagcttatgaaaagacttagagttttctgaaccccctgaagtagtangcaaattttagtgtgtatataaacacacacagacatacatatttgtatcctctttttgaattgaacttactgctcctgtctaactgaaactttgtaccctctgaacaggatcttcctgttacatacccacccccactccattccgcctacgtttggtaaccaccgttctactctaactaccattct

SEQ ID NO: 707815 - DNA, 636 bp, Homo sapiens
aaaggaagggggtgtttttaacaaccaaaaaattttaaccgcctaacaatgcccataagttaaaaattaattttccctttggggtaacaaaaattgttgttttacatggaaaaaaaaacatttccaatttgttaatccttattcacattggggatcccgcaataaaacacaatttgtttttttcttttcacaaaaaaaaaaaaaaggggggaaattgggctttgtcaagaggccctccaagaaaaagtttttttttccaaatagattttttttgacagattttgaataaatagacctttttgctttgtaatttgcaaagatttggcaagaccacaggttaaaatgcccccagtttcacttaaaacccctggaaacttggcggggaaattaaaaaataaagggcaagactttgccttgaaaaatccctaataaattttggggggaaggggaaaagaaaccaaaaggcggtgccattcgtaggagaacccccttggaagagcttgggaaaatcaggttccatttcgggtaccgagggacctttaacaaccggggtagaagaaaatttggaaagagtaacttggaaatagggaagccccaccctgggctttcttgttaaagggggggctaacctccaaa

SEQ ID NO: 707816 - DNA, 101 bp, Homo sapiens
atccacgtgctctggactccttgctgcctgtttgtagactgatgctgcctgttggacctctgcctcagtcgctgtgtcgatgcaccaggcacagctccagg

SEQ ID NO: 707817 - DNA, 152 bp, Homo sapiens
tggactatataatttttattatttaaagtatgggggtctcagtatgttgcccatgctggtcttgaacacctggcctcctgcaatcctgcctcagcctcccaagtagctggattctaggcatgagtcatcacacctagctagaaaatttttga

SEQ ID NO: 707818 - DNA, 222 bp, Homo sapiens
  misc_feature (60)..(60): n is a, c, g, or t
  misc_feature (148)..(148): n is a, c, g, or t
tcaaatatcactgtcctacttagaggactcaacatactggtcccagccctatactccctntaaatatttaccacgacacaatggggctcactcaccaccacattaacaccataaacccctcattcacacgagaaaacacctcagggtnaaaacactatcccccattttcctcctatccctcaaccccgacatcattaccgggttttcctcttaaaaaaaaaa

SEQ ID NO: 707819 - DNA, 658 bp, Homo sapiens
cctgagggtatgggaaatgctggcgcgcgcggcgcggggcactggggcccattttgcatgagtgggctctctactggcttctggccgcgctccgcgccgcgcctcctctggattgccccgaacacaccgtggtactgttcgtgccgcagcacggaggcctgagtggtggagcgactgggccgattccaccggcatcctggagcctggtttcgaacatcctcatccctgctgttcacaccggatccgcatactgtgcagacgtctcacggacaatatgtcatacaacgctgcctgcagcagtcggctagtgactctacgaaaaatagtcaactactagacaaatacgactaggagtacctatataaccatagcgcatacatagagaccctataacaaaggcaagactaacagcgtagtaggacggcaccctagagatatagccagtaaacaccacagctaagactacacaacaaccacatgacgatacagagcctcgcgcaaaaactactactgctagagcaccacaacgtcttaccgagagacaacggaagtcaccaagacatgccaagccataagtacggatgccaatacaaaacaacgactcgctagactagaaaggaggtataccgcatgcctccgcaaatagaccatcaacgca

SEQ ID NO: 707820 - DNA, 193 bp, Homo sapiens
ggcggggggggtataatttttccccggggcaggttttccctttttggccttttaaaaatttttttttgtgcctttttgggggccccccccggttaccgttcgggtttttcggggggtccccccccccccccccccccccccgaaataaataaaaatattaaaaaaaattcattaaaaaaatatctaaataata

SEQ ID NO: 707821 - DNA, 418 bp, Homo sapiens
gctctctgggacagaacagagacggaccatttatcagctctacggagagaagggcgtctgcgcatggtcaccagtcgtggtgtcatccagctccctggggtagcaacgcctgtgccactcgagctccatgcgttcaagttggtctgcttgctagaaaagtctcatgggctatagttaatgaaatggtgcagagaacaagagaggccttgggaattaaaagtatgatagtttggccgggctgtaattcaagcacttttggaggccgaggcaggcggatcacgaggtcaggagttcgagaccagcctgcccaacatggtgaaactgcatttctactaaaaatacaacaaatagctgggtgtggtggtccacgcctgtaatcccagctactcaggagactgaggcaggagaattgcttgaa

SEQ ID NO: 707822 - DNA, 624 bp, Homo sapiens
agcggagtaggcggcggtggcagtgtggaggtggaggctgtggagcggcagcggcagcagcgggtcccgggactgaggcagcagcggttggcggcggctgtggcggaatgctgaggtgacggaaggcagcaggctggctggcggacctgtttcccatcacgggatggcgagagaccaagggctggctggcgagcaacgaatgagggcacgagagccactagaatgaatgatcacacagaccaagcatatgtgactgtgggtggacgtgagaaatcacacgtactggtgtgaccgaagagaaggtaaagaagctatgcaacgtgtaagtgatgggagaagagtgtagaagtgggcgggacggtccaggggggaggcgagattaggcgttgtgcgcgccgtgggcgaccgatataggaggaaggtacaaatcatgcgaagcagggacagggaggatacgatcgaggggagcagagagaagagtagtcgcaaggcaacgaaggaaccgtgacggaggctagatggaaatagattttagagaacagcagtccgtgatattccgtaaaaactggccgcgagagtaaaggtacgaggaaaagaagggagagaggagagcgaagagacgcg

SEQ ID NO: 707823 - DNA, 387 bp, Homo sapiens
ctgaaactgctctaccacaaatacaaaaattagctggtggtggtggtgggcacctgtaatcccagctactcaggaggctgaggcaggagaatcgcttgaacccgggagacggaggttgcagcaagccgagatcacgccattgcattccagcctgggcgacagagcaacactcagactcaaaaaaaaaaaacacaaaaaacaaaaccaaaacaaacacacacacccaaaaacaccattttatggggcagccacaatggctcacgcttgtaaccccagcacttgggaaggcccaggcgcaagattcacctgagatcaggattttgagaccagcctggcaaaattggcaaaccccgtgtctctactaaaaacacaaaagggtatcgataa

SEQ ID NO: 707824 - DNA, 154 bp, Homo sapiens
gatgatacagatctccgcttcatgcacttaagagtccaaacgcgacaattagcagacaggtcaattctgtcgtcacgtagtccagccattttgaggggtaatcctttcatcacagcggttacctttaaacctcagagaattttaaggggtttat

SEQ ID NO: 707825 - DNA, 140 bp, Homo sapiens
gattctagaggactccccccgtttccccctaaaaatccaaaaattatctgggtgtgtggcgggcgcctgtagtcccagctattcgggaggttctttgatttggttgtgatttcttcgtatactttcagcgcttctatcac

SEQ ID NO: 707826 - DNA, 675 bp, Homo sapiens
  misc_feature (208)..(208): n is a, c, g, or t
  misc_feature (252)..(252): n is a, c, g, or t
  misc_feature (295)..(295): n is a, c, g, or t
  misc_feature (329)..(329): n is a, c, g, or t
  misc_feature (363)..(363): n is a, c, g, or t
  misc_feature (501)..(501): n is a, c, g, or t
cgctcatgagctattcaaaagtgaatgtcacagtcatcacttgctgagtggtactcatccttaacagagtcctcatgagggaatcaggtctcgctgagtttagcatgtttaataatcttttctcacggtctcgatacatggatcgcattactagatataaggtgcttgcccaaaatgatttttctggagtttttaggagatattgtcntccttgggggacatacatggtgtatgttctcattgtgggattcnattttgttctaccaggacctctaatttctgccagttacttcantcatttgttctcttcaccatgagtctccagaggntacttccatggtccgtgcctccccatctcccagnaattctgcatttccaagattggcacctctggtcctctgcacggtgaagccccttcctttcaattccccagtagccagtgctctaatccaccaggtctcaggcatgatctatgtttctccacactcgctttctgagganagttttgcctgggttctatcatgaacaggccctccctgctgtcctggcctctatttgcatagtgtttcctgctccctctgccgtcgtgtggctcccagacctggctaagaaatcactgagggccacagtgttccctagcctggtgtttagggcaggattatggggtgagatttt

SEQ ID NO: 707827 - DNA, 159 bp, Homo sapiens
tttttggggggggggtttgttttctttttcccccaggtttggtttttggcctcccccccttggggtcccccgggggttgttaaagggccagcctttcggttcccttccccgccctttttaatccgcctttcccaaaggttttgggggccttgcccccca

SEQ ID NO: 707828 - DNA, 471 bp, Homo sapiens
cgtcaccccatcgagaagcgcggctggcctggcctgggtggctgggcgtctgcaccccgagagagctcccccgcgcgcgggcgcctggcccgggcaggtgggtgcggagcggctctgggggccccagtccccggcagctcttgtcccgcgcgtggtttttgtgaagacactgtgggcgggatgggcgcagggtttcggtagccttggaactctcgccaaagaaaatcgcgggcgccggtgcctcagccgtcctgcctgagagactcgcctccgagaggaggaagggacagaccaaagcagtaaatcggccatcctgcagaggagccgccttctgctgtctgtgggtacagccagaactcccatacgcgggcgctgaagtgccaaaccttcgtgcgtgttctctagtaattaggtgcattgttttgaaggaataaagaatggctactccataggcagaacagcctctagtaa

SEQ ID NO: 707829 - DNA, 252 bp, Homo sapiens
cggtattacctgctgcttttgcgccactggatggcgacaaggtggttggttgctacggccaaagctggtccatagtcccctgcgtaagcagggaataaccctcagagggctaagggagctgagatgggtgggcggatggaattggggcacatttgcagatgtgaggcctaaaggcttgaggcatctgcatcaggaggatggctggaagctggtcccctgggccttgaagccttgcaattgttgctactaggc

SEQ ID NO: 707830 - DNA, 318 bp, Homo sapiens
tgccccccccccccccccaacggtttttaaagaattccccttgcccccctttcttctgtcccacggggacaaaatttgccaaggtggtacttggggcccattcttcaccaacaagtcctatgagcaaagggcccacgcttagggatgcaagaacaacccgtttttaaatgttaccagtcccagccaatcttacggtgacattacagttaaatttcccaattgaaaacaagcaaacagacactcaaactggtcctgtaattgttgctagactttatgtgttgtacaactaaacattgctgtttgaccagtaaaaaaaaa

SEQ ID NO: 707831 - DNA, 1245 bp, Homo sapiens
  misc_feature (424)..(424): n is a, c, g, or t
cggacgcgtgggtcctactcctcattgtacccatgtctaatcgcaatgggctattcctaatgtcttaccgaagcgaaaaattctaggcatatatacaacatacgcagaggccccaacgttgtaggcccctacgggctacgtacaacctttcgctgacgccataaaactcttcatgcaaagaggcccctagaaatcccgccacagtcgtaccagtcatccatctacatcatccgccccggacaccttgagcgtcatcgaccgatcggctcgtttgtgacttcattgcaaccctcaccatcccacgccataaccacaagagccccctcgtagggctcacatcgcctctcacattcgtaaggcggtccctcaacgtgaatattcactctctgtatgccccaaacgttcgtgagaaacgcgtggaatngaccccagtttgtggtcaacctcttgcgcgaatatagctacccgttatcattatggggatttaccccagagcgggacatttggggacacggctccggaggtcaaccaaaaaagcaaggcctttccggcaaaattaggcgcatataagaacggcgcgcaagcggacgctgtgcgcaaccttttcccggcgcgggcacttgggtctcaaacccggttagtgggcacggacaaaccgcctgtttgtaggctactcaaaaggtctggtccgccaaagtggagcccagacgacggatctggaacgtgaagactttttgccgcgcatctgcgaaaattagcggccaatcagggcggggtcacgtgtacgcgcacgctacgggttataaacggaattagcggccccaagattgcagctagacttgttgcccccaattgcagagcgttttcgagaagtttcccccaatattacgcgcaggagcgtcttcctattgtacaccgccttaaaaggaacttcttccaccacccagtaagggatttactgggccggcacccattttccccaccacggtttgttgggtaccgggcaaaaaatggcgcaaccgcctttttgcgggggttgcccaccccgcgaaaaacacccctaacacggttggtggctgaaccctcacccgcgtcattcgtggtaaaagaggcatttacaccctttaaagcgatggggtttaaaccagagctgcggaagcagtcggccgtgtgtcccgtagtctcgcgggaattttggtgggagtaaaccctgtgaacttttatagggacaggacgcccacgccc

SEQ ID NO: 707832 - DNA, 513 bp, Homo sapiens
gccacctcacagcactgtcctgtccagggtctgttgggccctggtgatgagtggccggtgccttggccccagggagctcatgtatggctctcgtacctgtcttgccaagggtgtgtccgtgtgctgtgtacatgcatgtgcccgttcacgcggcatgtgctttatccatgctgctgtgagccagcccaggctaggccctgggggcctgcggtggagtaagacaggcacaggccagatgcagtggctcatgcctgtagtcccagcactttgggagggcaaggcgggcggatcacctgaggtcgggagttcgagatcagcctgaccaatgtggagaaaccctgtctctactaaaaatacaaaattagccaggcgtggtggcgcatgcctgtaatcccagctactcgggaggctgaggcaggagaatggcttgaacctgggaggcggaggttgcgttgagccgagatcgcgtcattgcactccagcctgggcaacaagagcaaaactccgtctcaa

SEQ ID NO: 707833 - DNA, 447 bp, Homo sapiens
  misc_feature (362)..(362): n is a, c, g, or t
  misc_feature (441)..(441): n is a, c, g, or t
tttccctgcttttctaagtagacttttctgctgcttgaacatacatgtaaccattgttcattggcttaagctctttattatgaacatcagctattttataataccttaatatagaaaacctctcaggagctgtttaagtataaagccaagattttccttaggctaatggtctgacttctgtgctttcaaattaaagtacttaaagcactgaaggattggccaggtgtggtggctcacgcctgtaatcccagcactttgggaggccaaggtgggtggatcatctgaggtcaggagtttgagaccagcctgggccaacatggtgaaacctccatctctacttaaaaatattaaaaattaggccngggtgtgggtgggcttcatggcctgttaattcccaggcttacttcagggtgggccggagggcacaaggattaggacttnaaagtt

SEQ ID NO: 707834 - DNA, 376 bp, Homo sapiens
caaggaagaaagtatctctcactgaaaaatctagaaaaaaaaaaaacaaaacccaggacaggtgcgagtggctcacaccttgtaatcccagccttgtgggaggccgaggcgggaagattacttgagctcaggagttcgagaccagcctgggaaacatagtgagacctcgtctctacaaaacatttaaaatattagctgggtgtggtggtgtgtgcctgtggtaccagctactcaggaggttgaggcaagaggatggttggagcctgagaggtcgagctcttttaatttggtcattgatccattctgagagtggaacccttatgacctaaatacctcccataaggccccacctccaaatactgttacatataacggg

SEQ ID NO: 707835 - DNA, 171 bp, Homo sapiens
ccagtggatcaccacatggtccccgtattgggggtgtggaggaaagctttctgacatgatctgagcccggctctttctcttaggggtgtaccaccgttggtggggttggagtaagcggcttcctcgcagatacgctggcggagccgcttgatgtggcggagcagggcaatc

SEQ ID NO: 707836 - DNA, 133 bp, Homo sapiens
gagggacagtttgtgggctatttcctgctgtagaagacgacgttgatgaaacgaaagcgggaccaggacgaggagatggactatgcaccagatgatgtgtatgactacaaaattgcttgggggccagctggag

SEQ ID NO: 707837 - DNA, 817 bp, Homo sapiens
ggattggcatcggagtgggctgccggagcctatgtgctggcaagtttgcactcatcttccccgacctggtggaggggctggtgctggtgaacatcgacccaatggccaaaggctggatagactgggctcgcaacaagctctccgggctaactagacactttaaccgaacacgggtgctctcccacactcttcagacaggaggagctggtgaacaacacagagttggttgcagagctaacggcagcagatttggggaacgtagtgaacccaaggggcaaactggaggctcttcttgggaacatgtacaacagacgcagaagacctggacattaaacgggctgggaacggtgcccaaatcggcaagacgctccgctgcccgtgatgctggctcgtttggggataatgcaaccgctgaggaacggggatggtggagtgcgcacgccaaagctgggaaccgacacaacatacgaacttccgtgaagaatggccaggaatctggagggctggcacagaggacacacagacaagggaagctgacatgaaagccttcaaaatacttactggcaaaggcatggtgctaaaatggcgcatcagcacaagaattgaacccggcatgggcaaggtgacaccccgcaacatggaagttcactcaacccaagatgccaaggatccggataggaatggccaagcggcacaacaaagccattgaagcccaacacggaagaagacagcgaaggggcatgggccaaagggcaaacaaaaacaatggaaggtgtccctgtaaaaagcaccaaggataccagtgaaagaaggcccc

SEQ ID NO: 707838 - DNA, 408 bp, Homo sapiens
actgagtttttttttttaagaatttttttattgaggtaaacgtcccataacataaaattaactattttaaagtgagaagttcagtgcccattagtattgttaacaatgttgcataaccgccacctttatttaaagttccaaaaaaaatgttttcctttaaaaggaaaccccatcccattaagcagatactttccattccttccttcctccagccccagcaatctgctttctgtctatatggttttatctattcttgctattttatataaatcgaattgtatgagaccttttgtgtctggcttctttcacttagtacaagtttttgagatttatttacatagtagcatgtatcaacacttcatttttatggccaaataaaattgtattatgtgtttatagcacaattta

SEQ ID NO: 707839 - DNA, 155 bp, Homo sapiens
  misc_feature (151)..(151): n is a, c, g, or t
ggttgatctagcaggcatcccccaagcaatgcatggcatggcagtgttcccagttagcctgcatgcagcaggggcaagtggtgggggcagcacatcaacccccacccatcaaggcacatttccatcaccggggccgggtgtcacggcagcntcgc

SEQ ID NO: 707840 - DNA, 955 bp, Homo sapiens
  misc_feature (512)..(512): n is a, c, g, or t
acttgatgtgtgtccctgtgggatggacgtggatggggatcggtgggataccaggatatccgacatagtgggtcaaaatgcagatcttcatgacaagccttaccggtcagaacatcacccatgaggtggagcccgggggacatctatcagctaatgtgatggctatgatgcatgccataagggaatgccattatccccgaagcgagcagatggctctctcctcttgcaaggcaagcgagactgcgaagatggcccgtacttcttgtcttgacatacgaagatccattaagagagtcgaccactgacacctggttgcctgacgtctgcaacagtgctggatatggcagactcgtttcagccgcatagatgcactagaaacgtgctaggaacattactaggactgtgagagctggaagtcccacttgaaaatccggtcctaatatactcgttgggcacatagatcctcattgtatagcacgataaggtcatgctgatctccgtacactgaccgnatggcgtcaatcttatgtcagtgcttatgcatgctggtaacgagtgtgctcgcaagatcctttttctgagctatccatattgcgcacacaggacgtcgaacgccttgcagcttggctccctgtgttactgactacggtggctcggccagcatcgcccttggactagacctctgagactgcccagagccatcggtcagcgacggtaggaacccttgccgcgcacgccacacctgtgaggggccacgagccgagtgatacggacgggatgccctccgggccaggcgctcgtactggcgcgcacgcaggccggcgactgacgccccccatcccgctatcccggcccggcaccgttcccccgtgcggcgccccccccccagggtgcgggcagactactacaggccaccagggcctccatagggtccctacacatcccctccacccgg

SEQ ID NO: 707841 - DNA, 711 bp, Homo sapiens
cccgcgtcgatcaccccatgccttgattgttgtttctgccccgcatgtattttataggaatagtgacacatttagggaccacccacagaatgatccgtattaaaggggtggtagaaaactgctgtttatgataaaagtcatcggtccagaaaatccagcttggattggtgcccagtgttttattgggtgaaccaccctgggagattttaatagcttgaggccaggtggaggggccagaagatccctggggaaactgctggtctgggtgctgctggcctcccagactggccaatgggaagggctagtgagacccaccaccggggtagacccccagcagcagccaccctgcaagcccagcctggcccggactgctcagacccgcttgcagaggccgcacgccgctgtgggcacgggggtgtggcacggagctccccgcacctggagagcccccggagctcacaccccggtacctcacactggggccttttctgagccaggtctcgaaagcgcacggcccccctggctgagcagccccgccctttccccgctgcacctcgccctgtggacagccccgacacacccctttcctgaggctgtcgctcactcagattgtccctttgctatgccgaatgcagcccaaattcctttttaccatttgtgatgccttaccgatttgatcttaatcccgtatttaaagttttctaaccctga

SEQ ID NO: 707842 - DNA, 146 bp, Homo sapiens
ggaattcgaggctgcagtgagctatgattgcatcactgtactccagcatgggtaacagagtgagactgtgtctctatttaaaacaaaaaagattacattccccttggcgtatgctctcccagtataactagtgtatctattataaa

SEQ ID NO: 707843 - DNA, 110 bp, Homo sapiens
atccttatacagtgagcaagatcatgccactgcactcaagcttaggggacagtgcaagtctgtctcaaaaaaaaaaaacccattggattcccttggatttttgggccagg

SEQ ID NO: 707844 - DNA, 1610 bp, Homo sapiens
  misc_feature (610)..(610): n is a, c, g, or t
  misc_feature (1150)..(1150): n is a, c, g, or t
  misc_feature (1186)..(1186): n is a, c, g, or t
  misc_feature (1201)..(1201): n is a, c, g, or t
  misc_feature (1342)..(1342): n is a, c, g, or t
  misc_feature (1348)..(1348): n is a, c, g, or t
  misc_feature (1386)..(1386): n is a, c, g, or t
tcgccttattggttggggcgttgtttcgcgatgcccgtcgtgggtgttgttttgttatcaccgtcgctgtgtgtggaagcaagtcgttttttcccgtcattggttgatgacgtgtctctgtgtggcctctacttgcaggcccctcccggggggtgacaaccagaggctggtgatcccgcccggtttgtttctcgaagcgatgtttttttcctcccctctttcgggagtaggcccctctcttcttcgtgtggtacccctgctccccgcggggttggcgccccactttgtgggggattcccccccagccgtggtttctctccgcggggaccgacccacccaaccacgtgtgtgttataatgatatggggggtaaattcccccccggaggccacacgtttccccctgtccaaggcttctcttgggagatgggacactccgtgccccccttttgggtggttttttccccagaacgggagccccccccccccgcggaggccggaatttttgttggccgccacaataccacagagaattgttgtcttgagatgttgggcctcttgtgtctcgttgtggacccacaccccgcgcccaaaattggttctctctcttgngaattctctctcggagagattataacaccgccctctcccaagctattatgggaaaataacccccctgggggtgttgtcggccacaaagaaacacacactgtgtctccacgggaatgaggacgccacacctctcaagaagttgggttgtctcttttgtgggttccccgcgtttttctcgcgcccccacacagccaggcgcagcacaccccgttattttcattctcggtctctctcctgtgtgtgccctgtgggcaccaagacactgtgtctctcagagatatatgtgagcacaccctggcgctatacatctgcgccaagcctgtatagcacaccacgcgcaccacactttgggcgcgaccacaccaccggcgctattttctctgaggacacacccgcgggtgaccccttgtgtctttctctctcacacgagagtgtgagatctcccgtctctgttggcgctttcttgtgagagcctacacagagagattgtgccacagcgcccacctggttatttgtggagatctctccacaccgcaaagnccacacacacacacctcttacacaccgcgctatagnaaatgtggtgtgggnacacacatacacatcacacacgcccccctcgtgtggcttcacgcgccctcatacccgcgctatcacgtgggctgtgtgtgtctgcgcccacacgcgccctcacgcgcactctcaacgagttctgtggagtttatagagagnggaganaagagtcacttgtgatagagtgagaactcgagaagccnccacagaaagttatccacgtgatccacccacgcccaaggcacagaaccaccccccagtggcaccctctccctcggcctcggttctgcttagatggccacagagactctgtttgtctggctatacccggagccacaccttggtgcgagtgtggccacggtgagcccttggcacccccctagaaatttaattggccgagcttttaccaaaataaaaaaaaaactgg

SEQ ID NO: 707845 - DNA, 127 bp, Homo sapiens
  misc_feature (9)..(9): n is a, c, g, or t
gaatctganagttgtgcagagtagtaactgtgtgagagagagagtgcagggtaactgtaccgatttcctggagaacacatttgatacattttgaaggaacaattttcagtcttaaaatcacatgttt

SEQ ID NO: 707846 - DNA, 189 bp, Homo sapiens
  misc_feature (136)..(138): n is a, c, g, or t
  misc_feature (149)..(149): n is a, c, g, or t
gagtactctatgaaatagacaggaagaggcagcacaatccattttgtctctgtggtagccataaacgttatatatgcctcccaagtgccaggtgagtctggtggagtctgcccagttcacagggggatctgacaannntctcccaatcntatttttcttccctccatgaaaatttgtgaaagatattat

SEQ ID NO: 707847 - DNA, 907 bp, Homo sapiens
ggagtcacggctcgcgatggcctaagtcgccgcagaactgccacgtggggatgagattgctgggctggtagcggcggctgctgcgggaggtccgcccacgtgaagccagcctaactgagctctggacttgtggggacagctgtcagtggcctaggccgcaggacaccaatgaagcaactgccagtctgtgggaacctggagacaagcccaggaaaagcaacatggtacacctttgattgtccctggagacagcccctgtgcctcgagtgggccacagctgttcatatttacccccagttgtggtaatgccaaagagagggaaggtttccattgtggggggagcaaatccaaagggaagcttctcagacgtgcacaccaatggatctgggaaaaccaccagtgggacttagatacctgcagggcctcttgcccggtatgaacatgctagctttcattcctcctgcaacacctgaccgtatctgggtattggaggtgcaaccaatcaggaaatcgaaattgtctacaagtcttgaatctgaaacagggacgtgagaccacgccaagaaagtgaccaagcaccccaaccatcccaagaacatccaacacatcatccgggagcaatggaaacaagctaatatggtcatgggggccggcagacgagggtgccagcccgcaggacccggaagagcatgtgtgagggcaaaactctggcgggtcccggcagaagacactggagcctcacctccgggaggacgtgaggggcagcggacaagcccaccacggggctggggggcaattatatgcccaggtgtaatggcagaagagaagcacaccgggccagggggccaccggccgcgaagtgactggggacccgaggaaaacacaaaaggatacccagaggcgggac

SEQ ID NO: 707848 - DNA, 160 bp, Homo sapiens
tctcgaggatcctccaaagatctttgagcatacccaggaggcaaggtgttcacattcatagacttcacttccaattcctggaatgttcatttcttatggcttacaggagagactagacaggaaagccaggcaattgcttaggcaactaaacatgaggttg

SEQ ID NO: 707849 - DNA, 191 bp, Homo sapiens
ccgcccccatactccgccaaccgaccgctgtaggggatgccacagctgaccacggtagcagccagactggagcttgggattgaagttgcaaagcggcccctggccgggctcgccgtcgctgtccagggacggtcacggtgttgtggctgtaaagctgtaggacctttttaataaatagagaattattaata

SEQ ID NO: 707850 - DNA, 647 bp, Homo sapiens
ggctggctcggcttggcggctctgcctggatctcggcgccgcagtcctgcgcctctcccgcccctgtctcccgctccgttagccccgggcacggcggaggcagcggagccctgggccatcgtacctggagtagaacagaaaaattattatgtctgtgttcccttgggactcattggaaattgtacagtgacatcttctgggatttagtctggattgtgcaccccgcgcgcttccccactgggaacgtcgactattaatggagagctctagaagataccctgaccaccttgcccttccctggggctgcaggccaactccaccggcggaaaggcggaatggccagagaagccccgctgcttccaggcaccaccctgactccccgatgcggaggaccgtgtcaagcgcataccagaagtccctacacatggactctacacatatccgcgtctcggctcccaccgcactgggccgagggaagctccccagacagtcgcaggcctcaagcacacgctgcaccagggagcgacgaaaagcacgaagccacacgcagcacaggcacatgcccaatccccttcaccgcgtcccaaaaaccacgcgtcacgcatcgcacagcgcaccatcgcacccggcaaccgcccccgaccccc

SEQ ID NO: 707851 - DNA, 154 bp, Homo sapiens
tagatcttaaggtcaacacttaacagctacccactagtcacaagtcttacttattatcaacaatcaagagttctcagaatagttcgttaaagaacttatgtatattacaatatttagcaagtgttatcacagtcagattcagtgaaagatttac

SEQ ID NO: 707852 - DNA, 101 bp, Homo sapiens
atttggagcacttgctatgctcccaagtgctgtgcaaagacctggagggaaacatcacagctccatgtcgcaagttgcctgcagtttggtgggggagacag

SEQ ID NO: 707853 - DNA, 108 bp, Homo sapiens
tatagacatccgagtcatatttaaagcagcatacttctcatgctgtcttattttctcttagtttcgaaatggaccatagaacgctgagggattcccctggggaaaagt

SEQ ID NO: 707854 - DNA, 301 bp, Homo sapiens
cgatccccgggtagacgggctctggagcagtttgccactgtggtggaggccttgctgatcaactcaataaggggtttgtcaatgaaccgtttctgctgcagcggctggcatactgggccattgacctctatgccatggtggtggttctctcgagggcctcacgatccctgagtgtgggcctaccccactggccccgcattagaaaatgctctgtgacaccttgtgtatcgaggctgcatctcgtatcccacagggcatggccgccctgcagtctgacccctggcagccatagctctaccgc

SEQ ID NO: 707855 - DNA, 284 bp, Homo sapiens
gcttatggcatggcaagctggtctcaatctggctcaggctatcctcccgtctcggccttcccaaagcattaggattacaggcatgagccaccgcacccgcctggccttacacctgtcttctgctagacctggggcagcatcgcgggtggtggaggccccactttctgcatttaacagtttctaaagcggattctggcagcgggcagcaaaaaagctaggggaagggctggtccccttcccgctgctggctccacctctgatagacttggccttgccatatgcaa

SEQ ID NO: 707856 - DNA, 218 bp, Homo sapiens
tgcagctgagcccagctttatgcaaacaacactctttttgttttttttttgtttggagagggagtctctccctctcgcccaggctgggaggatcgcttgagtccagggagtcctggggctggtagtggcgctatgccgatcgggtgtccgcactaagttgggcttcaattgggtgacctcccgggagcgggggaccaccaggataaagaggtgtgggg

SEQ ID NO: 707857 - DNA, 211 bp, Homo sapiens
gttgaaatgtcatattagtagtaaagtggggtttatttatatagtggttaagaaatgtcagtttacactgctgtatacttcttcttctgtgtccctaaggcctggtacagtgccaagcaaatatttattggataccaagtatgtgcttggctctgtaccaggcacatacttggtatccaataaatatttgttggatgaatgtatgcatatg

SEQ ID NO: 707858 - DNA, 959 bp, Homo sapiens
tggtgtgtgttgggtgtggagatgtgtggtgtgagtgtgtggatattggcactgacgtgccgagggcagtggtggtttgtctcgcgatggattgatcatgagcgacaggtgtgttgcgcccttatataatgtgtgcgccggcgtagaagtggtggtttctccgcgcgggatttttgtggctcgctcgttgaggtggcgggggcttctctccccgtgggcgggaaagttgttcgccggggttctcccctccgtgggggagctgttttcccaacaaaggtcgtgtgttagttgggtcccgcgcgtcctctctggtaggggatcggggtgtgctttccataggagttgggggggaaacgtgttctagggcaacaaaccaagggtggccccccgctcgggtgtaatccccggggttgtgtacaacccggtgggggaccccccggacgagttaaacccgccgggtggtaaactagccccgctccaactcgacaggaagcgtgctcccgagaccccccgggtaggaacactcgggttggtttagcacaaagggcgccgtgataacgaccacccgggcatagagaaaaaagtgccggccacaactggagagggcggcctcttggccacaagtcaagtgacactctttgcggagtccccccaaaagcctgggcctttttggctcttgaatcacgttggggtccccgaagttactaattgttcacgccatgtcgcgatgttcccttgcgagaggacgtgttggaacaaattggcgagattcttctattcggaggatcttcccaggcggtaatgttgacacaagcaaaaaggctttcttataaggcgggggaggtgccaaaattcaccccccgttatgtctttgggaaaaaaggttcggccccccccagggaaaatgggggttttcccctgggggtgtccaaaaaaattttcccccgcgcgaacaaaaa

SEQ ID NO: 707859 - DNA, 196 bp, Homo sapiens
atgcggatccttgcgagatgcatacgggacgtcatcactgtgtttcagcgacttcgacagctgagagacaaaaagaagccgtgcctctactactggatcacagattatgttcatttacagaaccaaattataaaggcggaaagacgagttctcacagcagttgggtttctagcgtccatagtgaagcatcctcata

SEQ ID NO: 707860 - DNA, 174 bp, Homo sapiens
  misc_feature (108)..(108): n is a, c, g, or t
ctctgctgctcctcttcacccaactacagaggaggatctgagcacagagtcggtcgcgtcacaagctcgtctcggaggcctatcaggatctgactgtctcgagatganacgggaaaccacagctgaaacaatcgaggggctggtggaggagctgctgaagagggagggagcagc

SEQ ID NO: 707861 - DNA, 343 bp, Homo sapiens
gttgccgaggctggagtgggtgccatcttggctcactgcagccttgaccttctgagcccaagtgatcccagctgctggagtagctgtgaccatgggcatgtgccaccatgcccggctaatttttgtactgttttttgtagagatggggtttctccatgttgcccaggatggtcttgaactcctgagctcaagccacccatctgcctccgcctcccaccgtgctgggattatagatgtgagccactgcacccagccaatagctaacatttttttgagtacctatttaggcactctatctagaccctttctcaatcctcgcaataacccaactttgttgtcgacg

SEQ ID NO: 707862 - DNA, 438 bp, Homo sapiens
tgtataaaccatcgaggcgggaacggtggctcatgcctgtaatcccagcaccgttggatttgccgaggcaggtggagtcacccgaggtcaggcgtatgagaccagcctgggcgacagaggttgcagtgagccaagatcatgctactgcactccagcctgggcaatagagcaaaacgctgtctcagagaacaacaatgacaatgaaaacaacaacaaaacttaggcgggcgtggctgcatgcacttgtaaacccagatactagggagcctgaggcaggatcatcaattgaacccaggaggtggaggttgcagcgtgccgagatcgcgccactggactccagactgagtgacagagtacgaggccggaacatcgcttaaacccgggagaccaaggttgcagtgagccgtgtataacccacagccatccagcctacgtgag

SEQ ID NO: 707863 - DNA, 183 bp, Homo sapiens
  misc_feature (3)..(3): n is a, c, g, or t
  misc_feature (32)..(32): n is a, c, g, or t
tantctggctctacctggacaaggtgcgcgcnctggaggcgggcaaggtcaatatagaggtcgagatccgcgactggtaccagaaagcaggggcttgggccctcccgcgactacagccactactacacgaccatccaggacctgcgggacaacgattctgggtgccaaccattgagaactcca

SEQ ID NO: 707864 - DNA, 182 bp, Homo sapiens
tatgagataataaatcagtggtgttttaagctgctaaatttgtggctatttgttatgtaggaataggaaatgaatgcagtattttaaaagaggtaaataggaaatcttcattcttgattccctgtagtatgctgcatatttcttggtaaaggcatgaataaagtctttagtagccagtcaaa

SEQ ID NO: 707865 - DNA, 323 bp, Homo sapiens
  misc_feature (271)..(271): n is a, c, g, or t
tcactctgaaacatcaaacatcgtgcgcctccatacagtatttctgaagaagggtttcactacctcgtgtttgaccttttaccggcggggagctgtttgaagacttgtggccagagagtactacagtgaagcagatccagccactgtatacgtcatattcgggcgcagatgtttagcatgtccaccagcttgacatctcccaccgggaccttctagcttgctggctgatttcgggctacgacaacttcctgtgctattatctattttcatngtcgcgtcccctgtttttgaatttttttccccctatacctgcgaacctatga

SEQ ID NO: 707866 - DNA, 968 bp, Homo sapiens
  misc_feature (4)..(4): n is a, c, g, or t
ggcnaaatagctagtcgaggcctggtgtgaatcggcaccgaggatggtgaagcccgtctctactaaaaatacaaaaaaattggccgtgcttggtggcacctgtgatcccagctgcttgggaggctgaggcaggagaatcgcctgaacctgggagactaaggcaggagaatcgcctgaacctgggaggcagaggttgcggtgggcccagacggcaccattgcactctagcctgggcaacaacacgaaactccgtcccaaaaaaaaaaaaaaaaagaaaaaaaaaaaaaaacaagaatagccagaaagaaaacaaacgaaagcaacaccggccaagaatgggcttgaccttccgtcgccaaggaggaaaccgcgctcggcccggcgaagccaacgttgggggagacccacacggggcattaggacactaggctgggaaacccacggcgaggcgtcccgtaccccaaacggaggccgtagaagagaagcgaaaaaacaaagaagagacaccacacaggaaaagagccaccaaccacgagagacggacgaataagaggcacgcacaggagaagagacacacaccccgcgtcgtgggaagaccaaacgacgggaaaagacatccgtgagcgaggacaaccatcggggggggagcaaaacaaaggagcgagcaaaccaatttggcggtggagcacccccaagaagccgcgcccgtgtgaatgaggaagcacaaaccgcgctccacacatcaggggggggcagcacgacaaccatgtggggtggcacagccaccacacaagaaaacaaacgacgcagcgagaatcgctgggtaggacgagcagcaaaaaagttggcgaagacaacttggcggggccacaaccgcagcgtggtctggagaaggcacaggaagattatccaacgggaaagacatagtactgacccgggaaagaagaagacaattcgtaaacgggggc

SEQ ID NO: 707867 - DNA, 305 bp, Homo sapiens
  misc_feature (64)..(64): n is a, c, g, or t
gctcgactgtctaatggagcactgaccaggcagcaataaagaaaagatctagaccgggcacgtnggctcatgcctgtaatcccagcactttgggaggctgaggtgggcggatcatgaggtcaagagattgagaccatgctggccaacatggtgaaacctgtctctactacaaatacaaaaattagctggacatggtggcacgtgcctatagtccctgctactcgggaggctgaggcaggagaatcacttgaatccgggaggcagaggttgcagtgagcggagatcatgccactgcacgtcgacgc

SEQ ID NO: 707868 - DNA, 200 bp, Homo sapiens
aaaactacatatacgaatcgagcgcggtaccttggtctacatgtctggtctcaagaagacaggcagagtagtggatatattacctcccacatgcgctaccatgcctgactaattttgtatttttagtagagactggggtttttccttgttggtcaggccggtctcgaactcccgacctcaggtgatccgctggcctacag

SEQ ID NO: 707869 - DNA, 155 bp, Homo sapiens
ctgtcagtgcctccccaagctgttaacagtctgctgttggttagcctgttcctgcttcttttctagaggggactcagcccagcagaatctaatgagagccctagaatgccctgatggctgctggaacccaaattaatggctggatggacctcaca

SEQ ID NO: 707870 - DNA, 330 bp, Homo sapiens
ttttaaaaggcccccccggggggggcccccccgggggttttttgggttttgtaaccccggggggggaaatttttcccccccgggggggggggcggggggggggaattcccccctttttaaaaaaacccccccccttgggggtttggggtttggttttttcccgggggcccggggttccccccccccccatttttttttttccccccgtttttccccccccgggggggggttttttttaagggggggttttttccccccgggggggtttttttttaccctgttcctttttttttggggggggggggaaaaaccccttttttttttttttta

SEQ ID NO: 707871 - DNA, 908 bp, Homo sapiens
ggtgcttttctaccaaagggcgcgtcctgttccttttaaccgccaaagagtggtgtgggtgtgttttaaggccgccccatagtgtggttgtcccatacctgggtagtacgccagcgatgggtggccgcgcgcacccccaacgtgtggcaggtttttgccgcccacgttgatgtagctggtcaatccgttgggttcgtttgtaccccccccctgccccgtcgtcgcgctggttgtgggagaacaaagttcccgggggtgccaaagtagggcgccgcccgcccgtctcgcgccggtgttgggtatcttctgtcatacgcccggcaccgcccaccccgggcgcgagttttcgtgggcggaaccccccgctccatcgggggtggtccgccagttgggggtgcgttatatccgcggttctgtcatctgcgggaataaatcgctcccccgccctgtctctcgctcgactaatggcgctccttgctgtctcaaccgatgactgtgcttgtctgcagattaaagttctccccctcacagtatggttgtatggcctccccccccactgcttttaaacccgcacacaaccaggagcccccctccctcgtcggagtacccctctggcaaaccttatattcactctggtgggtattcattaattgatcttctcattcaatatccgctgttttaaccccacacgcacccgtcttatatcaaccggtatgttcttcacatcattctggccgtaacaccagcagaggaggacacactttctcatccactaacagcagagcgagagagcgaagcatcatcttggcacccaccacaaggaaacgccatgaaagaatgttcgcccgctcacacacgctcgaacgtatgtttgatgatgttataaaaaaccttcttccaacataaca

SEQ ID NO: 707872 - DNA, 969 bp, Homo sapiens
  misc_feature (484)..(484): n is a, c, g, or t
gggggcgggcgtggtggcgcacacctgtaatcccagctactcaggaagctgaggcaggagaatcgcttaaacccaggggatggagattgcagagagccgagactgtgctactgactccaggcggatgacacgagtgatgaaagtgcaaataccaagataggagtactgagagacatttggggggcgtctatcgagccccggagaaaagggtgatgcaacaaccatccggttgggggcgccgcgccccgatgggtgtaggaaccattgggccaaaggggggtcccaaaggagaacacccggggccagagccaaggggtcgggggttcctccccaattaaaaaacgggccggggggacccccggggggtgtgtggaccaacctccaaagagggagggtcccgggggggccattcagggggctccctccacacgcgggggctccagggggaggcccaagaatcaaaattacgccggcgggcggtggnatacaccatacacacaagcaaaatacacataggattagtagcaagaaaacaatagacagcacagcatataccacgagtcacaacataacgacacactgacaagcaagtacagctcacaacgatgaacacaaatatacaacaaacagtataacacacacagtacacaacgcgagcccagagaacaaaaagggaatgacacgcaagcggacaatggccgaacgaccacacgcgggaacacgaacgagcaagaacgacaatacaagagaccatggccaagcagataggcacaagaaaaagagcaacacggagccgcaaacagaaaaacggacagactcaaagacaaaacacaatacagccagaggaccacaaccaagagatgcgcccacaaagccacgaacaacggacgcaacaggagaaaccagaaacaggagaccaacaacgaccaaaagacgaagaaacaaaaagcgcaaaggagaaaacacaac

SEQ ID NO: 707873 - DNA, 133 bp, Homo sapiens
acaccgagacagtgctagtaacatgtgtgcaggtgaacatgctagtaatgtttgtcatgaagcacctgtgctcatgttagattggcggcgccccactactgctagatgagctatcctgggacttaatagccag

SEQ ID NO: 707874 - DNA, 421 bp, Homo sapiens
  misc_feature (324)..(324): n is a, c, g, or t
  misc_feature (367)..(367): n is a, c, g, or t
  misc_feature (401)..(401): n is a, c, g, or t
  misc_feature (415)..(415): n is a, c, g, or t
ttttttttttttgagacagtcttgctctgtcaccagccttggagtgtagtggcacgatctcgcctcactgcaacttccgcctcccaggttcaagcaattctgcttcagcgtctccaacagctggaattacaggaacgcgccatcacgacccgctaatttttgtatttttagtagagacggggttttccgtatgttgcccaggttggtctcgaactcctggcctgaagtgatctgcccacctcagcccccaaagtgctgggattacaggtgtgaatcactgcacccagccaaatgttttgttatttctttgacattattcttttncccaactacttgctttaagttgagtgctcaaataattggactnttaaatttttcacatatggtattaggttcccgtngtgtttaagagggncggtta

SEQ ID NO: 707875 - DNA, 1569 bp, Homo sapiens
gacctgagatcctgttccctgaaactgtgattatagaatgatgccgtggtaacttgatgccccaggttcatgcttgtctagtgagctagctcatttcatgactacaactttcttactgctacagctcagaattagtacgcacctagtaaacccttccttacccttcttacctatcctccttccctccactttcactttcctaccctctcgcaaccacttgcttgaacacagttcttatcactcgtctcctcaccttactatctatgcactcgcgtctaaccgtgttgcttattgactacacctttccacttttacactttaaccacgtggtttctcttgcattgcgtacccgctatgtaccaaaatgctacctgtcccatttcaacgttttattccttccgacatttctcacttgtgcacctatgactctttaactttccgcctttcctgtctccgataatgctcattttcgtattattcatcaacaccgtccacgcgttaccctcattcgaacttatctaatactaccttacattgaacatataggctttttctggtataaacctcagagagatacctttgtttaactcagctattgtggtggggccaacgcggtaaaactatgaaataccgcagcggacctttgttggaacaggctattagtataatacaattctctgtcagtgcgttccgaataaattgctaaaggccctgaagggggtcccactgagtgggggagttcacctaaacgttggttggacatatcattgccaggtcattacaggttggatccaaaccaaaaattatctccgatggtaaaagcctgtttgttgccgtgaccactactaccggcggtcacacattccgcacatgttctccattgctccgaaggttaggaccccattgtgccagttgtagataacacctattgttcccttttaagcagggggggtatcaccacattttcttaagcgaaaggccacctttttatctatggagatgacaacctccagtcgacaaacatggcgagcttgcggtgaactctgccttagacgtgttggttggtgcccgctcgcctgttgccggagacatcagagttagtcccacttaggagagacccactcgggcaagtcacagacgacatgatctcgcttccccattggtcagcgtcagaaatagtcattccgaacgccacccacatcaagcggtgtagcccccgtgttaatggccgccatgggcaaggtgtgacctccacagggaaggggttcccccgtagtggcaagttgcctatgcggctttccgccggagttttgtggccgccgaatgccatggggctgtgtgcgcggtgctccacttccttgtgtgccttgtcgtgcacggtcgcgctttctgcctttcagtggaacaccctttcgcgagaggctcacagcaatcgttgtttagacgagggtcgtcccccagaggtgccctatggggcagcaagagaattggcttccctggaggggcgcccctgtgcggagagcgttctccagaagagtttagggtgtgccgtcgggggtctgggcggca

SEQ ID NO: 707876 - DNA, 405 bp, Homo sapiens
cacgagggcgaaaatggcgcaattcctgatttggaaaatcagatttatggagcccgcttaccagacgccgcgggtgagaccggtggcgaggtatccccagagcgtcggcggaaaccacttctggctcggcagatcgacccgccggggggtgaggcgcccggcaagggcatcctcgatggcgcggacgaaaaggggcagggcggtcgcggcctggacgtactggtaggtggcgatggtatcgccgggatcgaaagtgacctgcgcctgatagagcacggcgccggtgtccaccccttcgtcgacgagatggatggtcacgcccgcatttccggcgtctcccgtggcgagtgcccagtagccgggatcctggccgcggtacttcggggtgataccccgcgtggtagt

SEQ ID NO: 707877 - DNA, 572 bp, Homo sapiens
cttggccagctataggggagccagacttccaagcccttgccatccaccgtggggatgcccaggaggagagggcttttcgggtatcagcagtttaaagattttcaacggcgaattctggtggcgtaccaacctatttggccgaggcatggacatcgagcgggtgaaccttgcttttaattatgacatgcctgaggattctgacacctacctgcatcgggtggccagagcaggccggtttggccccaagggcttggctatcacctttgggtccgatgagaatgatgcccagatcctccatgatgggcagggtcgctttgagggccatattagtgagctgcctgatgagatagacatctcctcctacattgaacagacccgggagaagactcgccccttttggaatgggaccgtctgtccctcaggagaggaccccagggggggggggaaggagacactactgcccccccccctggcagccccccccccatgggttccattttttggatccccccccctcctggacccccctttttgatttggcagaatttttttttaacaaaactaaaaatgga

SEQ ID NO: 707878 - DNA, 160 bp, Homo sapiens
gtgagctgtgattacgctactgcactccagcctgggtgacagagaaagaccctgtctcagaaaaaaaaagaaaaattgagaaagcaatcccttttacgatagctaccccccaaaaaacaaaaaacaaagattatccaggtgtggcggtgggcccctgtga

SEQ ID NO: 707879 - DNA, 358 bp, Homo sapiens
  misc_feature (206)..(206): n is a, c, g, or t
  misc_feature (326)..(326): n is a, c, g, or t
  misc_feature (337)..(337): n is a, c, g, or t
aattatattaattaatataaaaggttacattcatggacctcccaacatcaccacattgaggatcaaatttcaggagggacaaaccacatccaactcatggcagatggtaatggggattgtggttatgttttaacaagtgtattttagagctagatattgaagtatttaaaatgaaatgctgtatctgagatttgcttccatcctcntgtgtgtgtgtgtgtgtgtgtgtgtgtctgtgtgaagtgggtggaggtgaaatgaaataggactggctccattttgataatgggttgagggtgggtgatggacgtttggtgattcattgnattactcctgnctactccttgttgtagtttgg

SEQ ID NO: 707880 - DNA, 154 bp, Homo sapiens
  misc_feature (10)..(10): n is a, c, g, or t
  misc_feature (18)..(18): n is a, c, g, or t
  misc_feature (90)..(90): n is a, c, g, or t
cgcggccgcncgacacgntgcgagaagacgacagaagggcaagggctcctcgaactcctatgccaaagaagaaggacgagctggagcgtntggccaagtccaaccgctgacccagctgctgcccaataaacctgtctgcccggggcagccccag

SEQ ID NO: 707881 - DNA, 229 bp, Homo sapiens
acataaaaaagccatttcttaccttgctatatcatgatagtaatttaatggcagcataatagtacctacaaattgtgccatcctttatattacttctagttgtaagttttctattttgtagctgttaaacctacaaagacacttattatgagcataagcatcctctctataatattcttcagatacatcactctgtagtagaatagatcacaagcgtgcatttatgttt

SEQ ID NO: 707882 - DNA, 110 bp, Homo sapiens
gcggccgcctactactactactactgctcgaattcaagcttctaacgatgtacggggacatggcagagaaaaaaatcataataaaatggctttattttctggaaaaaaaa

SEQ ID NO: 707883 - DNA, 497 bp, Homo sapiens
ttttgtggatgggtcccccacaaattcaaaacaaccgtttgtgacattcccccttggggcctcaaaaaggcagtcccctttattgggaaaaggacaaccctcccgggggttttcaaggggattttggggcagtttcctgccctgtttccccggaaggccctccccccctgggaccccggggaggggatgggcgaaatggggtttccccagggtgaaagccacaagaacgcccttgttttttaggatcacccggccccggatgccccccccaaaaaggaggaggtttttggttaggagggccaaagaggggcctaagggagagccccccctccccccagggttttcagttcccctaaccgttttaatcaaatgcccccttcctttccccccaaaattgggtttggggccccttttttgttttttgtttttttttttggggggggggttaaaaccgggcccgggcccaaggaggggccccaaaaaaacttgtttgttta

SEQ ID NO: 707884 - DNA, 314 bp, Homo sapiens
  misc_feature (307)..(307): n is a, c, g, or t
aatccatgggaactttccctagaaacgctgcccactcctcaaaaggcttcctcaatttcaaaatttgaaaaacttaattctctcccctcttagtttcaaagttgttacagtgttatcctatgtgaagtatgtggaaagttgggggctggggattttcctcccaggcagattaagaaacagctctccgggtcgggcgctgtgctcaggcctgtaatcccagcactttgggaggctgaggcaggagaatcgctcgaacccgggaggcggaggttgcagtgagctgagatcatgccattgcactccgggncctgggc

SEQ ID NO: 707885 - DNA, 80 bp, Homo sapiens
catgagcctgttgcaggtttggtactttagaaatgtaacttttgctcttataattttattttattaaattaaattactgc

SEQ ID NO: 707886 - DNA, 415 bp, Homo sapiens
  misc_feature (13)..(13): n is a, c, g, or t
  misc_feature (42)..(42): n is a, c, g, or t
  misc_feature (48)..(48): n is a, c, g, or t
  misc_feature (98)..(98): n is a, c, g, or t
  misc_feature (197)..(198): n is a, c, g, or t
  misc_feature (263)..(263): n is a, c, g, or t
  misc_feature (296)..(296): n is a, c, g, or t
  misc_feature (333)..(333): n is a, c, g, or t
  misc_feature (403)..(403): n is a, c, g, or t
ccaggcagtgccnttcccggagcgtgccctcgccgctgagcntccccntgaacagcagctgcagcagccatggccccgccatgggtgcccgccatggnttcacgctggcgcccagctggggtgcttcgtgggctccgctttgtcacggcgagggtctccgctggtacgccggccatgcagaagcctcgtggcacccnncccactgggtgcatgggccctgtctggggcacgctctactcagccatggggtacggctcctaccntggtctggaaagaagctgggaggcttcacaganaaggctgtggttccccctgggcctctacactgggcanctggccctgaactgggcatggcccccatcttctttggtgccgacaaatgggctgggcttggtggatctcntgctggtcagtg

SEQ ID NO: 707887 - DNA, 857 bp, Homo sapiens
  misc_feature (443)..(443): n is a, c, g, or t
cattcttggatctcgcagaagaaaaaattcatgtggagtccatggagtaaagtgaaacaagtttgatagagaattaaagaaaaaaatgaatggctactccatagacagagcagcctggttagttgaaaagattaataaaattgataaacctctagccaagctaaccaaaggaaaaaaagagaacacacaaattactaatattataaataaaatagaaccatcatacttatcttgtgggcattgaaaatataataaaggaatagtatgaacaattctatgctacaaatgtgataactaaaatgaaatggactagtgacttgaaagacaccgactatcagaactcacactaggatgaataatttgaacaggcctatatccattaaaaatagagttaataatttccaaaaaagaaagtaccaggctcagatggtttcagtggcatntttctactaattcactggggttttacaaaacatttaaggaaccaatgggtatcaatttctgcaacatcttccagaatatctaagcagagcaaacacttcctaattcattctatgaggccagcattcccctaatatcaaaaccagagatattccaagaagagaacactcatgggccaatatctctcatgaacctagatgcaaaaacctcaaaacagtagcaaattaaccatgtctgccaggaaacatactcttgtgaccttatgagcattgtattgccacgcttttgaaagaattagtctaagcatttaaacattggataactgtaatccattcatattcataaggctcagaaaacaatatgattactcagtcccaatactccttggatcataaaacctttggccacttccaatc

SEQ ID NO: 707888 - DNA, 200 bp, Homo sapiens
gggtagtgggttgctgggctgggctttctgaggtagaggcagcgcaagaagagggcctttccgcctggtcgggatttggatgtcgcgaggacacaagttcgcgtcggccccctttccgagaaggtggacgcgtggataatatatacgcgagacacagtcgcgtgacacagagagatatggggcgccacgcacagccccgg

SEQ ID NO: 707889 - DNA, 329 bp, Homo sapiens
  misc_feature (39)..(39): n is a, c, g, or t
  misc_feature (41)..(41): n is a, c, g, or t
  misc_feature (55)..(55): n is a, c, g, or t
  misc_feature (89)..(89): n is a, c, g, or t
  misc_feature (115)..(115): n is a, c, g, or t
  misc_feature (132)..(132): n is a, c, g, or t
gcctcagggcctttgcacttgttggcctctgtctggaanangcttttcctcaganctgcctgcctcaacttccccaaagtgctgggaanacaggtatgagccactgcgctttaantcttttttttttttttntttttgagatggattttcactcttgtcacctagaatggagtgcaatggctcaatctcggctcactgctatctccacctcccaggttcaagcagttctcctgcctcagctactcaggaggctgaggcaggagaatcacctgaacttaggaggtagagactgaagtgagctgagatcgcagtgtgggtgacagagtact

SEQ ID NO: 707890 - DNA, 485 bp, Homo sapiens
ggggccacggccaaagcagggcctctccccctctgggtttctttttttgcccccaagacaacaggttccaacaaggttttggtttggtggttgattcagccaaaattccccaggggcaacctcgcaaaaggttttttcctcttttaggtggctctgggaaagggaaaaggggaggaaggccaaggggagtttgttttaaaaccccccggtttttacaagaagccggaaaaataaatggccttatttttggtagccaagattaaatggggccttgggagccctcccctttttttcctttccttccacaggaacccgaaaagccaaaccggttcccttttaaggaaaaggttaaaattttttaaataataaagatgatgatgatgatggaaactaagggtttttccaaaggtctttttttcccaaacctttttgggccgggcccggatggattttttttttttaaaaaaagccccaggaccttttga

SEQ ID NO: 707891 - DNA, 410 bp, Homo sapiens
ggtttaatacaaagtagaatagcatatattaatacataaaattattaaaaaggctttatcagtataataatagcatacctaacagtacccctgctccatcccatcctaattctccacgagcaatgacttataaactactatttagcaatgtctatctgtttttttcctcacataacttaagtcatttcattatatatataattatatagtgatattactaggatataaacagataaggatattagctcttacaccatacacaatcttcacttttcctcccatattgtcccagagtagttaccatatttaggggctaagcagtcacatcattatgactgtatacatactgctccttgttgagaaaaacagtgtattatgctcttcctatcctgtacttctttctgccctag

SEQ ID NO: 707892 - DNA, 305 bp, Homo sapiens
tggcccctcttactcccaaaatgctgaggcgggcagatcacttgaggtcaggagttcaagaacagcttggccacatggcaaaaccctgtctctactaaaaatacaaagagcttaccctggcattgtggcgtgcgccgtgtatcccagctacctgggagactgaggcatgaaaatctcttgaacccgggagctggaggttgcagttgagccaagactatgccactgcactccagccttggggagagagcaagactctgtctccaaaatacaaaaaaacaaacaaaaacaagtttccccataacagg

SEQ ID NO: 707893 - DNA, 411 bp, Homo sapiens
agaaagtggtatattaaacggtgcaaaattctgcccatatgaaattactgcaagaagaagaaaaaaagtatcaacagtgctcttcaagtacccccttggtagagggagacgagcttgccagagcttccccaccggactagctccagcagacaccctgacaaacgcttgtcggctccagcctgctaccccaactcccccactctcgaaccctattcgacagcacggctacaaaagctcgaaaccatccgccattatcccagttcctcctcaactgaaaaccaggactgagcaggcttacctaaggagcatctggcagactttgcaggatgtgactcgagtgaaggtatgcatcttgaagtcgtggaaattggagtctgcatagtctggtcttatgttagacctaaaaaaaaa

SEQ ID NO: 707894 - DNA, 1471 bp, Homo sapiens
gacgtggctcgctgctgtagactgcgctggctctttccgctcgttaccactggctgctgcgacctcctcgggctcttctctcctctcttccaaggacaccccccagggcggggttgtcggctccaccctcaccgcgggcagcccacctcgcccggcgctcctgggggctccgctcttcgggtgaccttagttgtttgtcgcccacaccccctttggggggacccttctttaactctgggtgggattccccgtgggaagtctccaccgcgtttaaaagaagggcgcccagttcctcccccccacatatttggaggtgttttctgccccaaggtggtcgccccggccacaccccccaggtccccatgggagccacccgttgacccaacccttggggccccccccctggaaagtccaccccggtgttccaagaaaccaagtttccacggtgaagcctcttggtttctccgaaggggtgccccgtaggaggtccccacaccaagcctgcccacgagtgtgtgctgccccacccctcgccaccccgtcgcgctggaatcgctcaccgctcggctgttcccctcgtttgggaaaggaaggccctttccagcgcaccctggccccacttttgcccacggcccttcccccccccgactttggggaagagctctggggacaccctctggcccttttagcccagcgcccgctctgtgtgcgcagaacactgtacctttggggcgcccctctttgaggtgtgccccccagcgcccagatttgtaacccccggggctggtcacgagggcccctcacgcccctctgtcatccccacgatggccgcgccacggccccctctcgcgccttctctctcgagaacccaccgcgcgcccacagttctctccccccgctctcatcgtgcgctatattattttgtctcgggcgcccttggtgccccccacgcccgccccgcgaggccccccacacactcccccacgcagatgagacacacccacggctataccaacagcgtgggcacagcgccctctatactctctgtgagaaccgcgccgagactccgagggcacagccccctctgaatggcccccctgagaccacgggccacacgcgcgccacgctggcacgcgccctgtcacaatcgcgccgcggagacacaccgcgctaccggcttgaggacctgcactccacaggctgtcacgccacggaagccgggcaccgcggaagaaaacacgggcaccacaggcacacagatgcccgcccacgacactctgaaaggacccacatgtgcacggacatttgccacatgcacgctgaggcacccacgcactggcctgaaggggcctgtcttgtgagctgagaccgcagaggggctgcccacgcacagagccgcacgcctctttcctcccctcagagtcccaccccagacccccccggtgccataataaagccgattttaaacgga

SEQ ID NO: 707895 - DNA, 208 bp, Homo sapiens
  misc_feature (4)..(4): n is a, c, g, or t
  misc_feature (13)..(13): n is a, c, g, or t
tccngaattcccnggtcgacatcatcatcatggatttgctggtgcagtacaactaggcttaatagggacatgcctgtaattccagctacttgagaggcacgagaatcgtttgaacctgggagctggaggttgcagtgagccgagatcatgcctgggcgacacacacagactgtcttaaaaaaaaaacgttagaagcttgaattcgagc

SEQ ID NO: 707896 - DNA, 250 bp, Homo sapiens
ccccctagcacgataatttagagtatgaaatcacctataaaaataacagtaccaagaaattacagaacgtaaaagtgaaagatagtttagcaattggtactaattttggcagtatgagttgtagacttacaccaagtggaaatacttgtaatacaaaccgttctggtgattatcttgaatggagcttgactgggttattaaatccatcagcttcaggtactctgagattttgtgtgtcccaatagtaaat

SEQ ID NO: 707897 - DNA, 1015 bp, Homo sapiens
gaccaaacggaggccagtctagccgtcacttctgatcctggtgcatctctgggcagttgagcaccttcgtcgccatgggctttcctcccccagctccagcctctctcatctagggaactctgcgtcagaagtcactcgcagtccccgttacgcccagaacgaagaccgtacaagcacggctaccacgcacactctccggacgaccttgcaaaccaccagctttgccaggcaaccatgcaagctacctactctccatagccagatgcactccaccagccaagacgcatctcgctggggcactcctgcctgctgctcaggcactcactcacacacatgcacattgggcatgcacgcaccatgcaatccagcacaacataggccacggcgcagcatcgcacaccctctcctgcaaaacctggcctccccatccgcaacccactgacaacccgtaccacgcaccacacccccgcccaccacacacggcacacctgcccaaacgcccaccctgcagcactgcgcaccaccacccaagcccgaagcccacagcgcctcacacacatcctgccgccgccccttgccccaccccctcgcactcccctggccacgcctggccgccagccccccccccccccaccctcccctccaccccctgaccctccgcccacggcctcaccgctcccggctcaccctccttccctccccgcccacccctccgtgggcccccaagcaccgcagccaacccacgggcacgcggcacacatcgccctcccctgggcctcctctgcaccccgtctactaatcccccaacggccgccaacaccccccccacgagggaaccctcacccccacggcacacccccacgcaaggccaaaccgcgacaacgcacggcgaaccgggccgcacacaacggccccacacccaccctggggacgaccccacagcgacacacaccctgcccagagccaaccgccaccgaagctaccccccacacacacagcgccacccgacacaacc

SEQ ID NO: 707898 - DNA, 906 bp, Homo sapiens
ggtcttttaccttccaaacatatgcctgtctcagtcgaataagagctcggttgcctctctgaatggcaagctcaaagatgcagagaaacctgtattattttggaacgatctgtgtatagtgaacgggtatattgttggcatctgaatttgtatgaatctgaatgcatgaattgagacagagtggacaatgtatcaagattggcatgatggatgaatagccaatttgggcaaagccttgaatctggatggaatcgattttatcttgcaagccactccagagacatgcttacatagaatatatttgacggggaagaaatgaggagcaagggattgcctgcttgaactatttagagaagcttcattataagaggatgaaagctgggttcctggaatatggaagactgaaaaccaagttcgatgtatcttgcaagaggtgggctatcttaacactggatgttaatgaagactttgaaagaccaaatattgaaaagtctgggttgagaaggtcaacgagttttgggtacttggtgatccggtgctggagactacaggtcaggccaaaatggtgtccagaatacttcaggtggtgggttatctgtcggaacgttccatattaatattcacggtgtcctttaataaaaaccccaaaggttttaaatctgtcctggggttacgcgacaacacagggatctctggaccgggtccttcttgccagaagtttggggccccgttcatacactttgggtccttttgtgcacaccaggcatttccaggcaaggcacttaattccataagaggaagggtgagggaaggggtcccattcagcaacggctaaaccctatagagaacacgctggaaacccccttggtccacacagtggtgccgggccaccacggggggcgcaaa

SEQ ID NO: 707899 - DNA, 156 bp, Homo sapiens
  misc_feature (4)..(4): n is a, c, g, or t
  misc_feature (13)..(13): n is a, c, g, or t
tccngaattcccnggtcgacatcatcatcatggatttgctggtgcagtacaactaggcttaatagggacatgaaatatcaaagttcacaaactatatattatatactgtacatataatatcaaagtacccaaggtatatattctatactgtacaaa

SEQ ID NO: 707900 - DNA, 416 bp, Homo sapiens
  misc_feature (1)..(1): n is a, c, g, or t
  misc_feature (314)..(314): n is a, c, g, or t
  misc_feature (319)..(319): n is a, c, g, or t
  misc_feature (380)..(380): n is a, c, g, or t
  misc_feature (402)..(402): n is a, c, g, or t
nttgataaccaatattgtctctaaacattgctatatgtccccgcagaggcaaaattgtccctggttcagagccactgatctagggtttcttatcattttttaattttcacagtatttatttttgtggtttgtgatgatcttttattgacagcgggcaaatagaaatttctatattatagaaaataatacctggtttcctttcatgagaaatttaagttaattttaagttaatatgagctatctttatactaaataggcagtctcatcccctgccccctttcccaatattatccatgtgggccctgtgtgtgccnggggntccgtgggtctcctcctttcctagggaccttcttggaggcctctggacttgtttcttcttngggccttcgctggggcctcccntggggataaccccc

SEQ ID NO: 707901 - DNA, 140 bp, Homo sapiens
aattttcccttttttgtttttggaaaaaaaaatggggccaaaaaaaaggccaaataaccaacccgggttttaaaaggggttccaaccctttgtttttaaaccggccctccccaaattaaaaaaaaactttccccccccca

SEQ ID NO: 707902 - DNA, 301 bp, Homo sapiens
aggcacccgccaccatgcccagctcattttatgtagcaaagatggggtttcaccatgtaggccaggctggtctcaaactcctgacctcaggtgatcctgcctcggactcccaaagagctgggcttagcggcatgagccaccgctcctggcctccttttggtgaatctttaatttttaagtttgggctttaccaacacgttctgcattgacgcctccttttcgtcctgacttcctacgacacgcagacactggctgacttcacacgaggcacagattgcagggggactcctctagacgtcac

SEQ ID NO: 707903 - DNA, 341 bp, Homo sapiens
  misc_feature (338)..(338): n is a, c, g, or t
tgtattggtggtgctgccagaatttcactccttcagggctcaatattccctgtgtggagatggcgaagtgcttatcccacttgtcccttcatggacactcggggtgctgccaccttctggctcctgtgaataatgctgctgtgaacattgttgctttgtagcaaattctgaaattgggaaatacaagttctccaactttgttctttttcaagatcatttggctattttgggtcccttgaattcccatgtgaatttattttagcatccgcttgtcaattcttgcacagaagtcatccggaatttttatagggattgcactgaatctgtatatgtttggngag

SEQ ID NO: 707904 - DNA, 824 bp, Homo sapiens
agggctaccagtataccaactcgcgcaatccaagctagcacctgtacgcacgtcgcccattggctctatcagggtctatgctctatactctgaggcccctttcggctacatgtcctactgacaactttggatgctccctctccctgtgtggctactatcccacagcagcgtcctagatcttcagtgcattcgatgctagaagcttctcatgcgacctgtgttaaccctacttggaccaattcatgcatgattggtctgcgtggacaacctacctcggatatctacatggttgcgctggcgacaagacatggtgatcatccggcagtcctccatcggcgggtgcatgaattgctcgtgatgtacctgaacggaacaagtgagaacggtttgtcaggcattttcagtgagcactctggagccgtatcacccgccaccagagtaactaacaacgtgctagaaagctgatctctgaggactgaggatcgggaagccacgggcgtcctactgagcattgatggtgaggatggcattgtccgtatggaccttgatgagcagctcaagatcctcaacctccgcttcctggggaagctcctggaagcctgaagcaggacagggccggtggacttcgtcggatgaagagtgatcctccttccttgcctggcccttggcgtgtgacacaagatctctcctgcagggctaggcggattgttctggatttcctattttgtgtcctcttagttgtccatctatgtccctagcatagtgctcagttggaatgctgagtagagtctgggggaggtaccaaacgtccaggacctcctccg

SEQ ID NO: 707905 - DNA, 883 bp, Homo sapiens
  misc_feature (5)..(5): n is a, c, g, or t
  misc_feature (90)..(90): n is a, c, g, or t
  misc_feature (192)..(192): n is a, c, g, or t
  misc_feature (245)..(245): n is a, c, g, or t
  misc_feature (309)..(309): n is a, c, g, or t
  misc_feature (314)..(314): n is a, c, g, or t
  misc_feature (316)..(316): n is a, c, g, or t
  misc_feature (327)..(327): n is a, c, g, or t
  misc_feature (353)..(353): n is a, c, g, or t
  misc_feature (359)..(359): n is a, c, g, or t
  misc_feature (361)..(361): n is a, c, g, or t
  misc_feature (363)..(363): n is a, c, g, or t
  misc_feature (365)..(365): n is a, c, g, or t
  misc_feature (386)..(386): n is a, c, g, or t
  misc_feature (402)..(402): n is a, c, g, or t
  misc_feature (431)..(431): n is a, c, g, or t
  misc_feature (433)..(433): n is a, c, g, or t
  misc_feature (454)..(454): n is a, c, g, or t
  misc_feature (458)..(458): n is a, c, g, or t
  misc_feature (487)..(487): n is a, c, g, or t
  misc_feature (491)..(491): n is a, c, g, or t
  misc_feature (509)..(509): n is a, c, g, or t
  misc_feature (518)..(518): n is a, c, g, or t
  misc_feature (529)..(529): n is a, c, g, or t
  misc_feature (533)..(533): n is a, c, g, or t
  misc_feature (535)..(535): n is a, c, g, or t
acagntcaacccacaatacaacccgcagacgccaggacgccggccatgtacaacacagaccagttctctccctatgctgccccctccccnacaaggttcctaccagcccagccccagcccccagagctaccaccaggtggcgccaagcccagcaggctaccagaatacccactccccagccagctaccaccntacaccgtcgcccatggcctatcaggctagccccagcccgagccccgttggcnacagtcctatgacacctggagctccctcccctgttgactacaacccacacaccccaaactcaancatcnancaaaactccanctactggttaaccactaacattcaanttaaantncngnacacctacctatatacacagntggtggaacaaacagntatcatccacaatatcacagggggtcatntnctctgtgtacctgaaggacantaanaaggttatcaacatttccagtaaacaccnggancctatcacccccaccaanaacaacaanataaaaataancctnancaaggatcgggaagccacgggcgtcctactgagcattgatggtgaggatggcattgtccgtatggaccttgatgagcagctcaagatcctcaacctccgcttcctggggaagctcctggaagcctgaagcaggacagggccggtggacttcgtcggatgaagagtgatcctccttccttgcctggcccttggcgtgtgacacaagatctctcctgcagggctaggcggattgttctggatttcctattttgtgtcctcttagttgtccatctatgtccctagcatagtgctcagttggaatgctgagtagagtctgggggaggtaccaaacgtccaggacctcctccg

SEQ ID NO: 707906 - DNA, 497 bp, Homo sapiens
  misc_feature (106)..(107): n is a, c, g, or t
  misc_feature (117)..(117): n is a, c, g, or t
  misc_feature (140)..(140): n is a, c, g, or t
  misc_feature (142)..(142): n is a, c, g, or t
gagggcagaaaccttgtttgttttattcaccatcatgtacaagtgcttggcacatagtgggccttcattaatgtttgttgaataaaagagggaagaaggcaagcannaaaccccccncctttttaatgggcccccttttnanccaatttcctaccttttgataaaatgttccttttgacaatatacacggattattatttgtactttgtttttccatgtgttttgcttttatccactggcatttttagctccttgaagacatatcatgtgtgagataacttccttcacatctcccatggtccctagcaaaatgctaggcctgtagtagtcaaggtgctcaataaatatttgtttgggtggtttgtgagccttgctgccaagtcctgcctttgggtcgacatagtatggaagtatttgagagagagaacctttccactcccactgccaggattttgtattgccatcgggtgccaaataaatgctcatatttattactg

SEQ ID NO: 707907 - DNA, 113 bp, Homo sapiens
tctgcacacttcttcatttggaacctgattgtggacttcacctcatccactttggacaccatgtttgcgttagtgtgtaagcaagggaagggaactttcctgccttatttaaa

SEQ ID NO: 707908 - DNA, 625 bp, Homo sapiens
  misc_feature (19)..(19): n is a, c, g, or t
  misc_feature (77)..(77): n is a, c, g, or t
ctcctctgtggtctgaganaacttcctgtgaggaaagtgacacagtagcctgcatttttcctttcctcacaggaagnctcctctagattactgaggattgcatgcctgcgttgacgagatcgggaatcgaggatcgcgacaattggctaggctagatgcgtggtgagatcagggcttcactgcagcgctcaacctcccagggcgataattaattaccccccacccatccccactgagtagctgggactacaggcatgtcccaccatgctggctgataaattaatgatatttatatcagacagggtctcactgtagtttgcccaggctggtctcaaactcctgggctcaagcagtcctaccgtacctaacagctcccacaagtgtataggcatgaaccaccatgcctggcatgcagcctgacattttcacagtgatgagggccatgtctgagcccacagcctcctttggatcacccagcacggcatctttacaggccttgaagtcaacctcctcatctacagatgaaacagggacagttcgcctctaacactaaccgatctagaaaacatgtaccgatgccagacactgcttgacgcacatgctttaactcataatcacccttacg

SEQ ID NO: 707909 - DNA, 109 bp, Homo sapiens
acgcacctatgtcgtcacgtggtgcatcttctcgtctcttcaactccagagggatttccgacaagtgtccgctgcctctacattactccttggcctcgccatatgcaac

SEQ ID NO: 707910 - DNA, 554 bp, Homo sapiens
ctgctgcataatattcataatatgcattttagaataaatgtatccgtactcattatttagaggatgaaaaattacaatcattccactgaactggaagttaagacagccacccagccactttgggctcctcacacctctgaatcaataggcaaggaagggagttacagtgttggctggggtaattgatcctgcccaagaggaactggaactgctacacaatggaggtaaggaggagtatgtctggcttaaggagatcccttaggacatctctgtaccctgccctgtgattacagtcgataaaaatgacaacaatccatacaggactatgaatggcccacacccctgaagaatgaaggtctgggtcaccccaccaggtaaaccacgatcagcttgcgagatgagtgcaaagggaatacagaatgggtagtggaaagaggcaaccatgaataccagcaaccaccatgtgaccagctacagaaacgaggactgtaattgttgtatttcttgttttgttacgaatgttttggtgtgaatatctatatatagatatataa

SEQ ID NO: 707911 - DNA, 382 bp, Homo sapiens
  misc_feature (206)..(206): n is a, c, g, or t
  misc_feature (216)..(216): n is a, c, g, or t
  misc_feature (218)..(218): n is a, c, g, or t
  misc_feature (244)..(244): n is a, c, g, or t
  misc_feature (252)..(252): n is a, c, g, or t
  misc_feature (256)..(256): n is a, c, g, or t
ttgcaagataaaaagtcctgtggattggttgcacagttaagttatgtgaatgctgtatgccaactcaactgtacactctaaaatggttaagatggtaaatcttatctttattttaccacagttttttttaaagcatggtaaacaccatttcccaggatgtaaatcggtactaaaaaaaaatgcttccaaatcaaaaaaaattgggnaaacacaggnanaattagagttgaaagagtgttctttnatggcagnaatntaagaagcattacacaaattaatttacactgggaattttcagtgtggagggtctggctcatagcatttcacaaacattatacttcagagtcccaaagcctttaaataaaatgttaaaggtagaaaa

SEQ ID NO: 707912 - DNA, 383 bp, Homo sapiens
cacgactccttctgtcatgatcgaaagcttccgtgaggcgtcacagaagcagtgctatgcgtagcaccatgcttcctgtacagcccccagaagcatgtaaatatcttttctttatgaagttgacccagcctcacatatttctttatagcaacactagattgggctaacacatccctttctccctccctccctccctccctccttccttccttccttccttccgttcctcagcaaccagctcggttggggcctaccatggggcaaggctttggagcttaaaaagactagagctgcggtgacagtcctcaggaatttacctgtccatgatgcaaatagagaagctggacatcaccatgcagtgtggcagtggcagacgctgcagt

SEQ ID NO: 707913 - DNA, 468 bp, Homo sapiens
tcaatgaagtgtaagctccttgagagcaaggacccatcatctaaaatcctgtgttagcagagtcctgaacacagagaaacaaagatgttgtcaaacgaccatggattgcaagtcaggccaactgtgttcagattccaggtctacctatttgatatctggaaagtgacttaatcttccagaactttagttttatgatccgtaataaaacatgtcaaataaatataatgtatcgtgtgaattaagattttgtaaatactttttttttaaagccataaacggatcatctctctcttgccaaacttcaagcacggaatactgtcttgtgaggggcagctggcatatgaacatatttccagattctttagtggttttccttataatcctaccagcagcctccagataattttcctatctccttcactcacaaccaaagcctgaatcaatatctcttctgccatctccatatgg

SEQ ID NO: 707914 - DNA, 701 bp, Homo sapiens
cgcgcttgacccagcaccaggctcgcgggggtccgcgagggtctcgcgtagccgcgcgcccagagacccccgccgcggcccgattctctgagcgccagacatgaaccgcaagaaactgcagaagctgacggacaccttaaccaaaaattgcaagcattgtaagtaagaatgtagtgctggacaggccgaggctcctggaccgagcctgggtcccaccccgtgctaaggtccgctgttgtgcctgcttcccgcctgctgggactctgtgggctacctaccgcccctccaccccggccccttaagcagaagtcagagagggaatcccggggtgccagctccttgcgtttgatcttaggaacccaggcctccgcctctggtgctacctacactctcacacatgcatatacttgcttcttccaaccctctttcttttacctgatagaaacatgtgatgttagcctcactgaggtgtaccataaatgctatagccacgtggtctcatgaaaatgtacacaccaaggtagacggtgcctcaccaggctaatactcgcagttccccggaggtcaggttatggagctaccaagagaccatatgaaaacggtgtcatttccccatcttcgctactgggcctactttgctcgacacttggtggccagtcgccctaccgggtcagggtccagtgatcctcaggccggttggt

SEQ ID NO: 707915 - DNA, 258 bp, Homo sapiens
  misc_feature (20)..(20): n is a, c, g, or t
cgagccggtccgctgcggcntagtgaacgtcacactcttggtgagaggcagtctggtggggtggcagtgtgcttggagttcttgagggattccctgggcttctccatgccttgtgttcgtccagaggctggagccgaggtccacagagtctctgtgttgaatcgtgagctggccatttccgaagccctgcctggccaggttttcgggatgtggagagagtgaggccggtgctgatgcgttcacttaatgccgctagcg

SEQ ID NO: 707916 - DNA, 99 bp, Homo sapiens
ggacgcgtgggtcgcggacgcgtgggtcgacccacgcggtcggaggagtacgcgcgctacgacagcgacgtgggggagtaccgggcggtgacggagctg

SEQ ID NO: 707917 - DNA, 319 bp, Homo sapiens
  misc_feature (108)..(108): n is a, c, g, or t
tctagaggatctctacaccaactctgtgggtatgttcttaaaatccatggagggagaggatgaaattactgccaatatcgcagagggtggacaccctttcttggatantgttcctaatatccgcgggagagcatgatattaatcccaatatcgctgtatacacccctttttgatattgttcctaatatcccttgggggaggggagtctctattactggcaatatcacagggtgtgtacacccgcccctgtgatattgttcctaaaaactagtgagggagcacatgatattacttctgctatcgcaactggtacggcggg

SEQ ID NO: 707918 - DNA, 285 bp, Homo sapiens
gcggaacagtcaaagacgaactaactgacttggatcaatcacatgtgactgaggaaactatcctaaatatatatccaccaaatacgggagcaccagattcaaaaagcaagttcttagggacctagaaagagacttagactcccacacaataatagtgggagactttaacaccccactgtcaatattagacagatcaccaagacagaaaataaacaaggatattcaggacttgaattcagctctggaccatgcagacctaatagacaccttcagaactctcaattc

SEQ ID NO: 707919 - DNA, 164 bp, Homo sapiens
cacagaaggagactggatcagtatggagacaagcatatgtctgtcaagatagtattcagtatgttgtctgaaagaaaaacagcggataatgctgttagaacgaacattgcaattgaaagaagaagaaaataaacggttaaatcaaagactgatgtctcagcagc

SEQ ID NO: 707920 - DNA, 499 bp, Homo sapiens
gggtgtggctgtggctgtggctgtctggcttcccttctattgatacctctggcagcctttgagggatgagagggcgtgggggtttccactgcaaacatgagggagtaggttgagtgcttcgttgttgaggtgagcttccctgatggggttgaaccctgtatatcagaaagaagcccaaccacccttttgctatttcatagtgaagcattgcattgaatctcctggagcagacataaatgaatgttgtggctctggagtggtaaaagagattgcaaacaaacagtcttcatatctcctgggggtgctttttactgagctaacatagctaagctggaaatgtgttttctagtattccattctctgtgtgttgctggccacaaagagacttgtgtgtctaagtcttggaagatgtaagagaaggagctgccattttgtgtgctctgaggtgggtaaagggcaccagatgctgtggcagctcacacaggtctgtcatctgcta

SEQ ID NO: 707921 - DNA, 216 bp, Homo sapiens
gggccagccataaaaaaaccatttagaggtttttgtttatcagggccggagttgggaacccccctgggggatgtgaaggggttttggggctttgaaagaccttatcctctaggctttggttatttttcccttgaaggtccaggcccaggttaaagggttggccggtttaaagcttttccccccccttttaaaaaaaagatttaaaaggggttttga

SEQ ID NO: 707922 - DNA, 422 bp, Homo sapiens
gccatttactttaactgacactatttaaaatcttaatctaatatggtttgaaaaaatatggtgtttgcatgttctcactcataagtgggagttgaacaatgagaacacatggacacagggtggggaacatcacacaccagagcctgtcagggggtcagggactaggggagggagagcattaggagaaatacctaatgtagatgatgggttgatgggtgcagcaaaccatcatggcacgtgtatatgtatgtaacaaacctgcatgttctgcacatgtatcccagaacttaaagtataatgatatgtgtgtgtatgtgtatatatatatgtgtatatatatgtgtgtgtatatatatatatgtgtgtgtgtgtgtatatatatatatatatatatatatatatatatatatatacattcctag

SEQ ID NO: 707923 - DNA, 1588 bp, Homo sapiens
tgtggcaaaaaaaaaaaagttttttatcctcgaaacaaaagggggggtccagctccaaaacacacctctttctccctctcctctctctctccgcggcttcagaaccgcgggccaccgaggtgtagaagcgaaacgagtgtgtgtagaacgccccgctggcgaggtgtgtgtaaagagagttaccagagagacaccccgcgaggttgagtgggaagaggctgtgccgagagagagagttggggggtggtgtctccctctcaccgagagagtggagagagatgaagagtgtgaaagagaacatataaatctcgaggggagcactataagaggcgcgcgcgagagcgcgagagacgagagagatggacgagagaaggtgagtctcccgagtgagcgtgtgggctctcgagaagggtgtggcgcgtgtgtcgcctctctctgctgtgagagcgcctatatgagtgtctctcctctctatctgctgtgcgacaaagatgtggaaagacagagtcatccagcgtctcttacctcacatctcagagtggcgcccaacagagagtgtgtggaaggtctcttgtgtcacgagtctctccgcgataacaagaggggcgcctctataaacgagcgggggggacccgcgtggccctctctctccagaagcccgcgcgtgagacgctgtgtgttctctcacgacggttgtggcccgcgtgtgcgtgtttttcctctctgaggagagatgttgtagtggggttttctctcgtagtgagtctgtgatgagagttgaccctttctcactctctgtgtgagcgacctgtgtgtgccgccaccacaccccctctctcctccagggggggggggcgtgtcgtccctcgtgtggcgacgagcagtgtgtcgtcacagggacgtcgtcacacaacgaagtgggataacacacgaggtagtagtggagaagcaagaggaggaagaagaaggaacaacaccactccttggcaggcgccagccggatctgcgtggcggcagaacagctgtggcggagaaggcgggggtcgcccacccccccccgacgccggtggtaggtgcatcacctcacaaagacgagtccttgcaccgccgcaggaaggagcaccgccgttgctgacaaaaacgagttgtgtaaaaagaacaccctctgcgggtgggggacggcggacgggccaatattaacaaacacccgcccaatgggtgtgcccccccacggatcgtggtagttaccctccccggaaggaaataaaaagcacccgcccaacagcagatgacccgccggtagtcataaccccacaacaaggcggggaccaacacctacgcgacgacagccggacgcggtcgggacaacaccagacgccggccaccccacagggaggggagttgctaacaaaagacatacaagaaacacaggcgcgccctggtacgatcacctagcgagtacaccctgagccagatggtgagaagacgccccccgacctacgcacgaggcaagcgggagataatcacaaagcgggcggcaccaacaagacggaggcgaccatgccacccttgtagggcagcccccccg

SEQ ID NO: 707924 - DNA, 368 bp, Homo sapiens
  misc_feature (49)..(49): n is a, c, g, or t
  misc_feature (94)..(94): n is a, c, g, or t
  misc_feature (96)..(96): n is a, c, g, or t
  misc_feature (102)..(102): n is a, c, g, or t
  misc_feature (181)..(181): n is a, c, g, or t
  misc_feature (193)..(193): n is a, c, g, or t
  misc_feature (212)..(212): n is a, c, g, or t
  misc_feature (241)..(241): n is a, c, g, or t
  misc_feature (336)..(336): n is a, c, g, or t
  misc_feature (339)..(339): n is a, c, g, or t
ggtggggtagttgaataaaattgggcagctaaatttttcagttccatgngcctcccaaataaaaaacagaaaataagtagtttttgtgaattgncntgcagncaaagtagaaactgtgctgcatgatgttattttgtaaacaaatgacattttttggccaggcacatgccatccaattttntgtcaatccccntgttgtataaagcaccaanactgaaggggaaaaatgattgttgtaacncctgaattgctttgcataggttctacatgttgaggagtaattgaggtgtaaagatatcactgcactttctcttagtattttggcaaacatcaganatntattatgagaaaaagatgaaacaaaaaga

SEQ ID NO: 707925 - DNA, 320 bp, Homo sapiens
  misc_feature (49)..(49): n is a, c, g, or t
  misc_feature (94)..(94): n is a, c, g, or t
  misc_feature (96)..(96): n is a, c, g, or t
  misc_feature (102)..(102): n is a, c, g, or t
  misc_feature (181)..(181): n is a, c, g, or t
  misc_feature (193)..(193): n is a, c, g, or t
  misc_feature (212)..(212): n is a, c, g, or t
  misc_feature (241)..(241): n is a, c, g, or t
ggtggggtagttgaataaaattgggcagctaaatttttcagttccatgngcctcccaaataaaaaacagaaaataagtagtttttgtgaattgncntgcagncaaagtagaaactgtgctgcatgatgttattttgtaaacaaatgacattttttggccaggcacatgccatccaattttntgtcaatccccntgttgtataaagcaccaanactgaaggggaaaaatgattgttgtaacncctgaattgctttgcatggtctcatttgaaaaaattgatgtaaaaatcccgacttttttatatttgggaccctccaata

SEQ ID NO: 707926 - DNA, 419 bp, Homo sapiens
gcgagaagaaattgcaggctttcccacaatggtcctagtatagggaatacagttactctgcttgttgattttgtatcagcaagtcatcaaaaaagtaatgtacatgttgtagaatatattataatatgagaaaatattctgtaagaggtgtagagcgtaaaaaaagcaagttacaggccaggcgccatggcttgtgccctgtaatcccagcactttgggcaggttgaggcaggcagattattctgacctcaggagttctgagaccagcctggccaacatggtgaaactcagtctctactaaaaaaatacaaaattagctgggtgtggtagtgcatgcctgtaatcccagctactcgggaggctgaggctggaggatcgcttgagttcaggagttctgggctgtagtgcgctatgccgat

SEQ ID NO: 707927 - DNA, 109 bp, Homo sapiens
tgggcacttgttaccagagtccttccctgagccgatggctcctggctgctgtggcccatgcacagtccctggtagaagcacagcccaacgtggacaagctcgtggagga

SEQ ID NO: 707928 - DNA, 573 bp, Homo sapiens
tgaacgaggtatctggcaacgccgctattgggaacacctgattcgggacgaagcggattttcgtgcgcacaggtagattatgttcatatcaatccgatgaaacatggcttggttaaacgcgtggcagactggccgcattcaacgtttcatcatttggtggagcaaggcgtttatccgaaggactgggcgggcggtgatgaaacagcattggattactccgattgacattcggcgcaatgcccttcggttattgcgccctactgcactctcccacccgccggaggcaagcccacctcagggcacgcttctctctatatcaccttaatcacaccagtcttgcgtaactttgtcacggaagaaatgttctgaatatgatttattagccacgtggtgaaaatggtttcgaaggccatgaagaagcgcgtggacaccgcagacacaataaccttttagggaaaagagcaggaatgaagaattagcaaataacagggatggctaaactgtaaatcccgcgcacagcggcgcggaaggagcgagtcatgaagtctcgaatcgctatgcttggtgcggccg

SEQ ID NO: 707929 - DNA, 90 bp, Homo sapiens
taggggtcccgggggccttttttttttgcttttggttttttttttgggggcctttttcttccggggtttaatgggtgttttttttcgggg

SEQ ID NO: 707930 - DNA, 394 bp, Homo sapiens
cttcaaatcaaaacgtgactattgtgggatgtgcatatctgtcgtgcccgtacattgcagcaattgttgacaactgtatccgtagacaatgatcggtctgtaaggttgaatcaaaacaaaacccacaaacagctgtatttatatatctcaatattacataaaaagctgttagtgctgttaaaacttttaccattaaaggactgaataagagcacattgtagcagactgtgaccaaacttattctaggggcatgcgtgctatcaattgatgtcactttgtcactcataacggcaatacctggtacttgtaaattctacaaatcgcctcccactattgccatattcatagtaaaaaacaaacgagactacccaggtactcgagctaccgagctcta

SEQ ID NO: 707931 - DNA, 908 bp, Homo sapiens
gctctccaggcgtcctcgtggaagtgacatcgtctttaaaccctgcgtggctatccctgacgcaccgccgtgatgcccagcggaagacagggcgacctggaagtccaactacttccttaagatcatccaaactattgcgtatgattatccgataatgtttcattgtgtggagcagaccatgtggcgctccaagtcacgtatgcatgccagatccggcatgtccctctcgcagggcaaggctgttggtgctgatggggcaaagaacaccatgatgcgcaaggtcatccgagggcacctgggaaaacaaaccagctctgtgagtacatgtgctgcctccatatcctggtgggctctgctcggtgcctttgtgcttctcctccgaggacctctctgagatcgcggacatggttgcgtggccgagctaggggtgccatcctgcctcgtgccgtgctggctggcctgtctgccccgttgtgtaggcgctgtggtcctgtgcctagaagacgacctggtcttgcgtgcccgcgatcatcgaatcctcgcttccccgggcttaaccgtttcagcagtatcatctccagtggcttcaccgtggtgaaatcctgtaggtggatgtcgcacggcctgaatcaagaatggagacaaagtgggagccagcgaagccacggctgctgaacatgctcaaaatctcccccttctccttttgggccggtcactccagcaggtgttcgaccaatggcagcatctacaccctgaagtgcttgatatcacacgaggaaacgtctgcttctcgcttcctggagggtgtccgcatgttgcccgttgttctgtcctgccagattgggtacccagagtgttgcatcagttaccccattccattcgtccacggggtactacgagttctggct

SEQ ID NO: 707932 - DNA, 285 bp, Homo sapiens
cggccgatcgttgtttattgtaagatagtcaacaaatatcttgctgcacttcagtatttcagatcatggaggaaccgtgtgctctttgcccacaaaggccgcatgtaagccaacatctaaatcaggtggcctgaatcttccttctttacctcttgtatggaagatggagctgagatcttattaatacgaagctgcagccccagcatataatgtcaatcggctcttttgagatgacagcttgtcatgtactgttgaatgtcaatgcctatttggcaatcatctaaa

SEQ ID NO: 707933 - DNA, 271 bp, Homo sapiens
agaatgatgggggggcatcagctgttggaaacctgggcagccctctcagtggcttcctatcctccttcttgctggagccatgaattgcaggagctcagtgcttcttgtgcagtgcctggaacccaggtatcttacttggggtcttacttgtacccttacaatctctgaggaacccagacctcctgcctgccagggtgaaggggtttggggggcaggagaaccagttgctctgaggagctggtttcctaggcagccacccttttctgttcaa

SEQ ID NO: 707934 - DNA, 215 bp, Homo sapiens
gatgtttgttagaccagaaagtagtcgtagtcgattctgttagctacagattccccagacaggctgcattaggtagctggaggtagtgctggcttacagtgatgtgccaccttcgcgtgcactttaactatatgccaccttgcgtgcagagggctcacgcacgtgttgggccctctcatgcgaggcacgggtgcgcgtatgttcaccgcgacacc

SEQ ID NO: 707935 - DNA, 238 bp, Homo sapiens
gcatgtagagttgctcagtgtagtgtagagactgctctatgttaacactccgccacagaaaaacgtccagaattgttcccattagtatttggtccgaaccgtccaaacggcaccaaatatggtttattaattggagtccgtatctctgggttgccggtttctattaaacaggcttgccaatggtttccaaacttaggtagaataataacttgaatttctggtggccgatggtccgact

SEQ ID NO: 707936 - DNA, 213 bp, Homo sapiens
tcatctagcaggacttaacgcacttggacagtgcagttatcctagctgtgtatcgctcagattagttcagtgttagtagcagagaccacaataagtgattaaacatgacagaagtggattaaagtggtgtgctcacacagtcctcagggctggagcttccatttctaattctatcccttggtttggtctaatttacattccagttgcgtgtga

SEQ ID NO: 707937 - DNA, 136 bp, Homo sapiens
gtccggcgcggcgccgcacagtgccccccgtggtcgctggggatcaccttccggtcgggcggccagagggaggcggaggcgtccatcaacctcaaggccattaacacgtgctccctgaatggcgcccaaggggtac

SEQ ID NO: 707938 - DNA, 816 bp, Homo sapiens
tgcatggagtggccagccactgggcttcagagccaaacaaacctgggctcaaagcccagccctgcccccctgttgtgtgatgtccaggacagtggtgctagtagttgatgtgctcatctgccccacctctgcctggctgtactcgcagctagtacatgtatagtatataagtgcccgactgtatcattgtatgttccagagtggtcagggtcagggtggtcatggctgagctttttttttttttttttgtggagtcctcgtgtgtgcccaggctggagttcgcggggccccattcacgacttcatgtgaagcctcaaattttccttccggccttaaggtgatctaccgtgcctcagcctccgtgagttagcggggactcacagaccgtggaccaccaagccgggctaattttacacacttttttgtaacacagtggggggggctcggggggctctgttgcccaggcgggtctcgagctcgtgggcctcaggttgattccacctgcctgtggggcgggagataccggttggtgacaccattcaaacccaagcttcccttgagctttatatacaaaactcgtccttaggagtaaggtccgggaagatatgtcaagtagggggcataattttgggtttctcaacaaattcctcatcactcccggaatgaataacccaatgtgggcgtaccttcctacccgggacaccagatctccggattaaacagtctgctggggcgaaggtggagagggaacaggggtccacaaacacggcaatgatatgacactcgtgtgtagacaacgccaggggggcacactga

SEQ ID NO: 707939 - DNA, 540 bp, Homo sapiens
ccctcctcttggccagggcactccaaagttaacctgaaaaaccggttcaggctgtgaagagaaggtggagtggacatgcctcatttatgtcctcctcccttttggaattcagcaaagctgaccagcatgaacattaacacagaccttaagtctgattagtggcatttacaatctatactctctgaagcgtgctacctggagtcttcctttgcatgataaaactttggtctccacaaccccttatcataacctagacactcctttctagtgataataactctttcaaccaattgccaataaaaaaattttgaatctacctataacctggaacctccccgctccaccttcgagttgtcctaccattctggacagaagcaatgtggatcttgcatgtatttgattgatgtctcatgtctccctaaaatgtatacaattaggctgtgcccagatcaccctgggcacatgttctcaggccctcctgaggtctctgtctcgggccattggtcactcagattcggctcagaataaatctcttcaaat

SEQ ID NO: 707940 - DNA, 358 bp, Homo sapiens
ttaggtcagcacctctttctaccttactcctttcagggatgttatatcatgcatttgtaacagttaagattcttttgtcactgtttgcattgcatcctggtatcccccaacctcctaattgattgtttaaaattttgcatacatcaggttcactttttgtgcacttctgtggggttttgataagtgcataatgtcatgtatccaccactatagtattatggcaggaacagtttcaccaccctaaaatatcccttgttttaccctacttcaatccccttccacttctttccggaaactttggggtaaccacttatttctggtttttctggttcttggataacttttggcttttttctag

SEQ ID NO: 707941 - DNA, 315 bp, Homo sapiens
  misc_feature (203)..(203): n is a, c, g, or t
atgaggttgcagctgctgtggtcgccttggtgtacaccacaatggctgagcactttctgacgttgctggtagttggcctgccaatcagagaaagattaatggttcccacggaagacttcactcaagtgtggaacacacaccatgaaatgggctcaacgtgctgtaggcttcacccaactattacggatttttgaggactcacncctacttcaaagaagaacatgtgccttttccccccaattctggttgcaattgaacaacgttacccaaacacagagcctgctcaaacaacaagctgggggtacccgagctcga

SEQ ID NO: 707942 - DNA, 333 bp, Homo sapiens
acaagtctgaagaccagtccacctttatatctcatgagattttattctgtgacaagtcaagaatgatgtctctattttagaagctaagggtattctctaaatctgattctgtgtaagcagtatcaaaccaacttagaaatttcacaattatgaaagcagtttacacccatgtggtcccaggagcctctgggaccaggcagaatcatggaagggtcaaaggtacacagttaaagggctgaaggtgagtctataattcactaattcaaaagtttagttaattgacctcaaagtatttatagagtttccttagtgacccttgcctcgtaaaagctg

SEQ ID NO: 707943 - DNA, 353 bp, Homo sapiens
taatatgtcatctttgctttgtttattggcgtatgttaaaaatcaagttctagtccagttgcgtggctcgtgtccgtaatcccagcacttggagaggctgagcaagccgattgcttgagttcaggagttggagaccagcctgagcaacaaagtgagatcccatctctacaaaaaatacaaaaataactagccaggcatggtggttcacacttgtagttacagctacctgggagactgaggagggataatcgcttgagcacaggaggtcaaggctgcagtgtgccatgatcatgccactgcgctccagcctgggtgacagagcaagaccttatcttaaaagataaaattatatt

SEQ ID NO: 707944 - DNA, 908 bp, Homo sapiens
tccccctgtagggtgccacaaataccctccgcccccccccagattttttgttttcccaccaaaaagaggtacagtccacaccgtttagaaacgttgtgggtgggccccccgcacaaaacccacgccccggtggtggtcctaccaacataccccacaccacgcgtttattcttttaaacggaccccccatgagttctttattttcaagccgcccacctttttctcccagaacatctgtgttgaacacactttaagctcctctaataaattgttttcccgaaaaaacgtgggacacacacaaacaccgttgccattatacaacggctctcccatgcgacagcccctggtccacacgccccctgggcaaattaccataataaggtggtttttttgagaaccccccccctttcaagtggagagagcctttctctctttaacattctggggctccacgacatatatatacaggtggccaatagctactcataatgcgccccccttatcggggagatccacccccacgctgtgtgcgctaataacaaaagtggtgttctctatcctcatgggtgcccacaagagatgagccgccaacaattatcttttgtggtgcgcccaaagagcattaattccacaaaaatacttttttcccgcgattaccacaatgactacggaaccacccccttattactgccaccatataagaccaccttagaacgttttcacccccgtttataaaaaccgcgagggaattttctttctccaaaccaccagttctctcttgtaagcagtttatatgctaatgcgataccccaccacgttcaacaataattgctggccacgtttcttagacaacacatttatcttcattcaatgcacccccaaaaataaatttctttctcccacataaca

SEQ ID NO: 707945 - DNA, 884 bp, Homo sapiens
  misc_feature (1)..(1): n is a, c, g, or t
  misc_feature (270)..(270): n is a, c, g, or t
  misc_feature (692)..(692): n is a, c, g, or t
ntccatgggagactactgagagggaggcaaaaagagatgtgggtcccgcccgcccgtcgtggtgggggtgaaaatagactgtgtcggagagagagtgcggcgcccccgctagatcatttcttgtgagagacctgtcgtgggggggtagcagccgcccctccgttgcctggtggataaagtagagggttcgctctcgcgcgcacagcacgcacacagaagggtgttgttgagaagagagtcttctctcgacgacgacacggatcgaccacnccctccggtgggctacgcaactcttgtcgctagtttgtctggggagatatgatggagggagcgaggaccacacacgttcgtgcggaggggggggtgagttcacacgacagagcacaacggtgggaggcacgcagagagagagggcttgtcgtgggggggacgcgggcatcaaggggctaacaacacagatgtggtcgccaccgaaaagagcgctctcagagagaggggctcgcaaatagggcatatgtatgatcctcccgtataagtctcctcgcgccccccccaccgccgctgtcatatcacatgtgtgggacagcaacgcgttctctcagaatcgcttgttgtgttcttctcagtgtggccgatcatttgagagtttgttagttaggtataatagagacgcgggtatagatgagaacacncacaagcatgttggggataccttcctcacagacaggaagaggagaaaatattttgttgtgaaccccctcggatttttttttttggcgtgtggccacgtgtttaattttttttttttaaaccccttttttttggggaccactggcccccaaattttccccagagtttggggcccccttaaaaagttaatagga

SEQ ID NO: 707946 - DNA, 895 bp, Homo sapiens
  misc_feature (231)..(231): n is a, c, g, or t
gttttagcccaaaacttcgcggccaaaaatccctctctaaaaacctttctaaatagaaaataacctctcctataaccctccttaaccttaaccccacccgtttcaccccggcctatcaaaattatacaagccgtccgttgtttaataaaacgatgctccttatagccttactacttctcttggccccccccccctcttgaaccgcccgggcatttaaaggttttttaagcnccgccctatttgcaggcctcatttttccttatttatacttgtcccaagaagtactattcataatgctgggaagccccgctcccataaattgccgcgcccccttgcacaattgaatgatgtgtgtctgtatatggagaaaaacttcagggaggtccaccttgatggacccacaaaacaccctttgttgggaggggcccccacgaccagcaaaaacctcctctggggggtcccccctaagtggactagttgtgtgcgccatagctgcatgccagcccacgaggggccccccctagtccccccggacttgtctttagcccacctcccctccccttagaggagcttttagccttctgaaacacccacactgtgccacaagccacaccatgggccgagaaaacacacaccacgtgcgcggagtagaaagggatgccatttggggagttatatgtcccaccgggcctcttggacatactacataggttgtccccgaactagtcgaccttgtccacaaatacagcttgagccatgaccccctttatctttttttttcaaatcctccagcacccccctctgaacaattttttcgacattctcttgtgaactgccattgcatttacccggtggtgtcaaaaccgttatatgaaaacttacccttccccaaaac

SEQ ID NO: 707947 - DNA, 381 bp, Homo sapiens
ggcgatgggccgtagacatgcgcacctcacacagtgacatgaagctcgagaggagacaccctcacttacgtgattatgctctccgacaacgagcagacctcgaagccgagagtgaataggctgaacacggtggcctttaaggagaatagcaacgagggcctcatgaaaagcagtcctgaagaacgagaaaggatgatcaagcagctgaaggaagaattgaggttagaagaagcaaaactcgtgttgttgaaaaagttgcggcagagtcaaatacaaaaggaagccaccgcccagaaggccacaggttctgttgggagcaccgggagcaacccttccccgcttgttcggggcactcagaacattcctgctgggaagccatca

SEQ ID NO: 707948 - DNA, 252 bp, Homo sapiens
ggggcccccccccccccccgggtaattttttggattttttggaaagacgggggttccccctgtgggcccggaggggtttgatttcccccccctgggatttgccccccccggcccccccaagggtggggattacaggggtccccccccgggccgggggggggggctttttagggaaaacccaaaaaagggtttttttggggggggatcccccgggaaagaggcgggaaaggggaaaaaaaattgttcttttta

SEQ ID NO: 707949 - DNA, 133 bp, Homo sapiens
ttaccttgcagtcgtctcagctctgagctctagagccgatcagatatacagacgttcttacttggaaaacactttgggaccagaaatgttattgaaagatgtctaaactaagagtcaatagggggacgggcat

SEQ ID NO: 707950 - DNA, 870 bp, Homo sapiens
tggaaaccaagtttcataaagtttttactgggaacaaaaaatgtttttacaaaatatctttccaaagaaaatttccccatagaagtcacaattaatccagtgtagctttctctccttaagagaattcacggttagtgcactttcaggaggggcgaggttctctggatatagccaactagccgcggcaaaacctacaagaagaaagttaacttttttgtcaaaagggtgcctttaacatgtggtgaacgccgagttacagtgctacatgggtggaaaatctaattgggacatttttcttaacaacattttccttgttacacaagtgggtgctccaaatatgttgggcttgtgtccacaaattaactcaccaagggcgttggcaacaaataaacgtggccgtggtacattatagagctttgtgaaaaccaaacaaaaacaccaaagtggcgatttattgaacccgcgtatattccccttgtgggcacaagaggtcactatcttccgaaactagtggttcgtgtccccaacgggggctttcccattaaagagggggccaaaacttttagaagaaataattacgcagaaggtggtgttgtgggaccgaggtttattttccagggcagaaacattttcacccacaaacaccaacagcctgggagatattttttacaacggggtcattttcacacaaacccacggttcaaaaccccctgtgagaagttgtactgcttctccaaaatattatcccccacccgggggggtaaaggggggggttaacacaggaaaatcttttggctcggccaacaatcgtggtacaacctcccaagggaaattaccccttttaatttcttccaacacgcttacgccgtt

SEQ ID NO: 707951 - DNA, 181 bp, Homo sapiens
aagcttggtgaaaaagaagaaacattctcctgacttatagattagaacaggtcgaggataagatggaatagccactcctggacaaaagagatctataatgaacagtcttccaccctattgagtgaagacttccttctggatgctttgtctgaagacttctctggtccacaaaatgcttcat

SEQ ID NO: 707952 - DNA, 114 bp, Homo sapiens
ggaaagatcaaagaaaggctgacactggaaaatgggtttttgcactgttttttttttggtttttttgttcttttttgtttttttcctttaaaataaaaacaaagaaaagctctg

SEQ ID NO: 707953 - DNA, 1081 bp, Homo sapiens
  misc_feature (520)..(520): n is a, c, g, or t
  misc_feature (633)..(633): n is a, c, g, or t
  misc_feature (813)..(813): n is a, c, g, or t
  misc_feature (911)..(911): n is a, c, g, or t
tagtatgagagtagaagtggagaagtcaattaatgtgatgcgatgagacagtgagtagctgtagatggtggaagcgcggcggtatgtcgcgcggagggatgaatagatcatggaagatgagtggtgagatctgatgtcgagagtggctaaatcgtagatctcgcttcgatacatcaagatgaggcgtacgtcatcgtatgaatgcgctgcaggtccaggtagcaaagaatgatcatcgaacgacgctgctcgcaccgtgcaagcaaccagtgaaaccgataatcatagagccatccccataacctaatatagatatagtacagtctaggctataaatacaggcacgagggttaaaggtagacagagtagggaggctagaacactagtagaagtaccatagtaggcttaccgcactagccctatactagtagggcgggggagggctagcactagtacctacaacatacatagtataggactagtagacaagaccgccacaccctaggtagcacatatacangctagagctaggataggacagtagaaggaaagcctagtacctaacaggccataatatagctacaggctacaggacaaaggcctacaggtacgtaggggccagctactagacanggatagtaggagtaggccaggaccaagacagcaagctaacgcaatatagcagccacccggccgccaaggcaggctatagggctagggccaggacacgtaggggtagcctagggacgctagctatagccatagcacagtagatacagagagaggctaggggtagtagtacctagtaccggngaccccccctagcctatacctagctacaccctaactactagacctacctatacacgtagcccaggcctagtagggtaagtaggggaagggctagaacnaggacaacctactacatacacccccactatatatagtaacctatacctagctaggggctagcctacgtagcaagaggacacagtagtaacggggccatagcagcctaggcgtaagggtaggcagtaaggggccctaggtagaggggtaaaggacttacagaaacccagag

SEQ ID NO: 707954 - DNA, 238 bp, Homo sapiens
atgtgcggccagtgcggcgcacatcacgcccaacatgcgccgctcacgcggcgcccgagtctgccaccattgcgtaccgcgttgcagagatgccttcatcgcaatggctccagcgtgaacggtgtccgcatgcgaccgtcctcgacttggctgctgcccggatccaggtgccatccagcatccgcaagccgcgccgagagctgctgcaggctggcgtcatcggtgtgcagcaaggtcg

SEQ ID NO: 707955 - DNA, 189 bp, Homo sapiens
ttctgactacgccgctgggcctccatctcagctgggccacagtctccagccagcctgacctgtcaggtcttcttgtggtgaccgcgagccaccatcaaggcccagtgagtggctagtcctcaaggtagctccaagtcccacttcaagaaaataaaggcctgagctttcttgctccctctgagccactga

SEQ ID NO: 707956 - DNA, 127 bp, Homo sapiens
tcaggttgtaagttggaatgcgccccaggctttggggcccctgactcaggcttgaaacctcactgaatcatgtggctgccctgagcctgcgtcctctggagaatgggccgaagcccacccccctgac

SEQ ID NO: 707957 - DNA, 827 bp, Homo sapiens
ggcctcaggccgtgctccaccactgactcaccgaaatgaccttgggctaggcactgccctctctgtgccttggttccccatctgtagaagtggggagggtggacactggcaaactagatgacttctttcacctccaaaattcccttgagtttctatgaaagatattgcggggtaggggggtggcttaggagattgacgggttgagacgacactgagaaattgtccaaagagtcctcagaacctgccttggatgaaatgcgcatgggggtgggcctggtaagtcccaggaaccacaggaagtgagctaaggctcacccagagcagctgggtctccaggctgcctgggctttttgtcctcatgaacaactctggagcagctgtctgtccctcagagggcacctgtgaggcagcaaagattatcttagttcatgttatgtagttgctgctatatttaagagtgtgcaaaaaaatagagcagagggtttctgctgtctccagactgtctaccgaagagaacggcgaccagatgcctcctgggtttgaacgtggggattgcactgtggatctgcatccattactgcagtcgtccagcagagcgggcagtcatggcctcaggcgtggctccatcccaagtggcccgatgaccatctgggtcaagcccttccgaaacgtcccttccagggggcttacccagccaaagccatattcggctaggaatttgggattcaccaggctttatttaatccctgtggaaattcccggttggggtttcacactcacgtttgagcctgagagatagcgcgttctacagggtttcccaaagggaa

SEQ ID NO: 707958 - DNA, 451 bp, Homo sapiens
  misc_feature (32)..(32): n is a, c, g, or t
gagaaattatccaaagataatttctaacagcntgaaactcttggggaaaaacagaagaggcaccccagactctgccgggggggaaaacccattttcctcatgaaaccccaggaattgaaagtggatagatccctctcaaaatctaaggctctgttctgttttgcattgcattatctgacgttttcagctttggagagtatcaggaattacttcatattatgagagagttttggtgtgtaataagtaggtaggaaatatatttttgaggatggctgatattaatagcagttatgggggaatactcagctctttgcacttttagatcagagacacgtgctcttggccacctggaaggtatggaaacatccccctttttctcttgaacaaaattttcatgtaatattaaaaataataaaagattttatttgccttttaaataaactataggaaa

SEQ ID NO: 707959 - DNA, 1081 bp, Homo sapiens
taaattaagtattggggtaaaaccacctttggaagcagcaactatcaagtcgtgaagaaggcaatgtgtgagtggtgtctccattataattgctcttatctcgttgggggtgaaacaccttatagattcatagaggatttaagcactccgtggtaaggtgaagtttaacacataaccagatatctccattaagcagccttttaagtggggagaccatggccggattttaatataattaaaaaaaagagggggggtaaatatttaaaaaaaaaaaaaaaaaaaaaaaaaaaaaaaaaaaaaaaaaaacaaaggggggggacgccacaaaaaaacacccccagaggggccccacacacagcgacaccccacactctgagaaaaagggggccccaaaggggggccacacaaaacccaacaacaccaggccacggacaaaacacacacacaaacaggcacaacagcgcacctacggacacacacggagagacacagacaccacaacacgcgggcgggcgccccacccccgggcaccacaaccccaagaagaaacaacacaccacacaaggcacaacaaaacacctcacagaggcacaaacggcggaacaccaccacgcgcaacacccccagctacacaacaaaaccgcagccacacagagaccaacacacacccacaacacaccaacacacacggagacccacccacgacaaacacaccacaaaacaccacacaccaccaccccccccccaccccacaccaaacaaaaccacccagacggacccacaagaggtagcaacccccagcccgacgccaaaaccgaacacgaaacaccacgcaaccgacggacaacagaacaaaccacacaacaaccgcgccgcgggagacaacccccacgccccacgcccaagcgcccccaccaacgccccgaccagcccaccagcacgagaccaccacacagcacacaaccacgcccaacacagcacaaacgaagcgccacaccacaacacaccaacacaaggagccaacaacgaggaagggcgccgacacggccgctaacacaacggcgcacgccacgccaccaca

SEQ ID NO: 707960 - DNA, 242 bp, Homo sapiens
gtaccgattatagtggaggtctggtatgggggcgtgtctattcactatagacaggatcagcagaagtgtcccatgttccagtagcaactggagaaccattgtctgtggctatgattagggcggtgtacgtgctgttcttcacgtgctctaaatcctccctgtccagctcagcccgaatggaaatggcaccagtgtccggattaatctccagccagttggcagtgtctctccaactcatatca

SEQ ID NO: 707961 - DNA, 549 bp, Homo sapiens
  misc_feature (18)..(18): n is a, c, g, or t
  misc_feature (49)..(49): n is a, c, g, or t
  misc_feature (95)..(95): n is a, c, g, or t
  misc_feature (508)..(508): n is a, c, g, or t
  misc_feature (532)..(532): n is a, c, g, or t
atcaaatttccaacatgnagatttggaaaaggaccagacatccaaactnctactagcctatgcagtagtccccttactcttccaagaaataaggnacattcctgcattaaaatgtataatataatgctgagtgataagctcttaaaataaaagtaaaaataaataggtgaaattaatgttaatgatatattttatttaaccaatattccaaaatattatcatttcaataggtatttaatgtattaataattaatgagatattttaccttcttttttgtactaagatctcaaaattcagcctttataccgtactgcaattcagactagttgcatttcaagtagcccatagccaaatgtggcttgtgggctagtggctacggcttcatacaactgtagagtatctctgtatcaatgtagcaaatattgttttcaattgactaaaacaacacatgtccattaaccaatcaggcatgggactgggttaaaataattttgtgcaattcagggncttgaggaacattaggttccaatngcaacttttcacaatgg

SEQ ID NO: 707962 - DNA, 883 bp, Homo sapiens
ctcttaagaacttactgtctccaaaccgtgggtgctcgataagtcagacagaacagtgaatcctcaatttaaggcctgatctaacccctagaaacagatatagatagcaatggagagtgacaacaagattgacatggaatgatgaaaatcatctgcgcaagctgcgttggaaggtgttctctttgagtcattctctatagagtctagtggttcactggagggtagcagttgaacgatatggttgagagagatgcagccgtctacgggatgtactataagcaagtggcttacattgattacgaatatgattgtaagcgctttgagtgcttggaagagttgatgattcaatttcacgtggaacagttctacaggagccaaattggattgcccgtactggtttgtcacttgcaaaatgaaaaatgagcaccagctgaagatacgaaagctttactctgtaacatgactagtcacctacataaatgtcattgcatgcacgcgaactggctggtgctccgtgtgttatcaggacagagacggcatcatcttttccattcactagtgtcggagcagtagatagacagagtttgatctttaggatcaagaatcgataaacgaaggagaactggtggacaactaagggttgttagtggcgcagcgcgctacaggatatctatgggaattgttgaaagtatgagttcgaagttggacagggagacttgaacgtgataactctagatcgatcattataagaggtataatctagaagcccagaagaggcggcagaacataggcctactaatcacgacaatcagaaaactatagggacctatgcaggacttgggagtacaggaaaatgccgtattctctttgggtgggggtcccg

SEQ ID NO: 707963 - DNA, 317 bp, Homo sapiens
tcagaagacacagataagctcaacaaagagctaagacactacacacatctccacagcacagaggcacatctcaaaagggtctgtccagtagttccagcgcagggggaagggtgatggcctaagccaccagctccagctttcttttctttctttttggtaggagctggagtttggctctggtggccaggctcctgagcagctgggattacaggcatgcaccaccatgcctggctaacttggtattttcaggagggttcctccatgtgggtcaggctgatcctgaactcccgacctcaggtgatccgcctgcctcagcc

SEQ ID NO: 707964 - DNA, 323 bp, Homo sapiens
gctgccgcctactactactaaattcgcaaccgctcgactcatgctgtacagggctctgggtggctgcacccggccacacgtgattctccgggagggtctgcatggccgtgagatcacttgtgtaaagcgtgtgggcaccattaccctggggcctgaatatggagtgcccagcttcatgcagcctgatgacctggagcctggcagtgaggggcccgacttgactgacattgtgatcacatgtagtgaggacactactgtctgtgtcctagcactccctacaaacagctgtgagtgcgtgggctgagcctgtggttgtgtcgacg

SEQ ID NO: 707965 - DNA, 878 bp, Homo sapiens
ataatacggtgatgctggcattagaaagagatgcttgtacgagagaataatggcttagcaaaccgtaggggtgagatgataaatgagcaagactgggaaacagataccgtgtccacagatgaatgaatcagcaccaatgtgccttagatctatgccagtgggatatattggaggctaaggtggagctcaccccagtggcaatccaggcaggaagatggctggctcagaggctctatgcaggttccactgtcaagctgtgactatgaaaatgttccaaccagctgtatttactccttggaatatggtgcttgtggcctttctgaggagaaagctgtggagaagttggggaagaaactattgaggtttaccatagttactttggccattgaatggacgattccgtcaagagataacaacaaatgttatgcaaaaataatctgtaatactaaatgacaatgaacgtgtcgtgggctttcacgtactgggtccaaagtgctggcagaagttacacaaggctttgcaagctgcgctcaaatgtggacttgaccaaaaagcagctggaagcacaattggaattcctcctgtctgtgccgagggtattcacaaacatgtctggtgacccagcgctctgtgggcaagcatgctccagggctggctgctagaggtaacgcccagttgttggatgcttgtcgccaatgaggtgcaaccactgggtcgttgccgtgcccaatccacgggaaatattcacaagaggatgggcctgggaccctgaggtgtcccgtggttgcacacgccagcccctggtcttgttaacacctccgtataataagactcacaacttctcgtatttaaaccaccggcgccataggtttcaacac

SEQ ID NO: 707966 - DNA, 179 bp, Homo sapiens
agtgcctggcccaagagggcccgaggaaacgtcttcatgtaccatgctcctgaaaactacgcgccatggacagcctgccatctgctggccggatgttcaaggtagcctctggggcttcccgttctatcccagcctatgagcgcggcagtttctctctgcgcaggattaatcagcctgct

SEQ ID NO: 707967 - DNA, 142 bp, Homo sapiens
atgcaggatgacatgtggggaggggcagtgtctactctgcgggttctttccaccgcatgcgaggctgggctgcaccttgggcaggacgttagccaacactccggcgggtaggaatcaaggtttgaggggaaacgaccctaga

SEQ ID NO: 707968 - DNA, 132 bp, Homo sapiens
  misc_feature (2)..(2): n is a, c, g, or t
  misc_feature (28)..(28): n is a, c, g, or t
  misc_feature (59)..(59): n is a, c, g, or t
  misc_feature (64)..(64): n is a, c, g, or t
  misc_feature (98)..(98): n is a, c, g, or t
  misc_feature (113)..(113): n is a, c, g, or t
anctgccctggcccaggacggcaggtgnccctggagatgggaaagtgtctgtgtcgagncgctnagctctctctctgtttctccttttttcctctacncctacctatctcccnttttatactaataatctta

SEQ ID NO: 707969 - DNA, 305 bp, Homo sapiens
agcgtaagaaatcatagtctcatacagatcacactatgaacccaggacaaatgcttactttggcattatctaggtcacccctatttttcgtcataggtgactctgatcatagacctatttgttgccaaaccagtccacatcctaccagattaaaaagaagtccctccattgacttcgttagggtgtcaggtagtaccccatgtcccatcccacaccagaagagatcagttcttggcaagaaagctcccaatgtgtcttgatggtgcttgtatggtaggatgcctttaaagccaggctacggttcc

SEQ ID NO: 707970 - DNA, 187 bp, Homo sapiens
gaggatcctatagatcctaacagctcaaagtcaagtaaccagaaaactgctagatcttttacatctttatcaatccttagagattagaaaaatcctatgaatctactatacacaagaatataagataggcagccacagtgggtcacgcctgtaatcccagcactttgggaggccgaggcaggcagat

SEQ ID NO: 707971 - DNA, 117 bp, Homo sapiens
taatatgctgtctcaggataaacgcggacagaatgcttaacacatagcaaggtcaacttagaattatggagttttcaactctagagtttgggtaggcggccgggtgacgtaccgcgt

SEQ ID NO: 707972 - DNA, 193 bp, Homo sapiens
tggcacgagttgagacccttttttttccaattggggtgagtttcctaataaactcggttcattttagctttttggttttacctttaccctaatttttttatttttatggtattggactttatttttgtaaggtggtgagaaatttgttttgcaacaaaatggggtatatttaaataaacccccgatcaaagga

SEQ ID NO: 707973 - DNA, 237 bp, Homo sapiens
gatgcatgctcgagcggctgcagtgtgatggatatcttgccagaattctggcttcagctggatggagcagcatggaggagcgccatctgctgctcaccttgtgcagggcactggcttgccccaggaggacgtggtgcccattggataaagcttggcaggagcttgggagcaagcagcatcttggcttgtgcccgaatccagcccagcgacactccttggcaagcaaatccaggcagg

SEQ ID NO: 707974 - DNA, 209 bp, Homo sapiens
agtagatagtccactgattaccatctggtaggcatcttcaggttactatctgtgagatacttcctgcttacatccccagggtaagagttgtatagagactccttggatgccctgagggagcgggtctagagcttggcttccgtcctctgttttcacaagggtccagcgataggcaatgttctctgacaatccttcttggcactgtttat

SEQ ID NO: 707975 - DNA, 157 bp, Homo sapiens
  misc_feature (12)..(12): n is a, c, g, or t
  misc_feature (63)..(63): n is a, c, g, or t
  misc_feature (107)..(107): n is a, c, g, or t
tggaggggaganaatgcactgataaattaaaagcctggtgatttgcagaaagggactggtagngctgataaggatgcctttggtttggacatgaaccaaatctttgnttacatttcttttatccaaaatatttaggcatctgacatttcaaccagaa

SEQ ID NO: 707976 - DNA, 154 bp, Homo sapiens
atgcgcgcgcgaatttcgatataattcgatcgtccgttattaatattattataaaaagtaaaattatacgcgcgaacgcgacgtcggccgcgacggtcgaacgaccgtaacggacgcgttccggtcgataattgatcgaaaccgatatcgatat

SEQ ID NO: 707977 - DNA, 302 bp, Homo sapiens
ggctctcgtgaactcagtttcttctttacttccctaatactcctcccagctaattctttgtgtttcctcactccttagcagacacgatttcaagcagctctgttgatcgaatagccctgaggctgtcaatcatttcctagttgttttgctgcccgtcattcacactcaaaggagtggcaagaggagtctgaactgcgtgcagatggagaaggagcaggaagggactgattcactgcacccacctgaggctcagcggaagcaggaaccccattctcagcaggctctccagatggcaaagggcc

SEQ ID NO: 707978 - DNA, 889 bp, Homo sapiens
ataaccaaacttcctgatccgatcatatgtatcttctatctacgccctctcctgtgcctgtgactctcacccaaattgcctcgtgttgcccttgaagctcttctgagctaaggagacttcagtccctatcagcgcctcctttacttcccagagaacttcacagagactctgtgcttccatgcagaggcttcctgaaataggtgacgactgactgagtagctcattcttgtgacttacgagtgccaacctttgaaaaacgtatgaaaatgctcatttttatatgacgtatacccataaagaatgctcatattaaatgtacttcaattacacatgtagagcatatctgttatatgtttatgtaactatcaaatggttattgttactaaagctatatttctgatacaaaaatattttaggataattgctacagagggattatttttatgatgctggaaatatgaaatgtattttacaatttcactctggcatatgattatctatcaccatgattttttaaagtcacaatcgcagaatttgggacatttgcatcaatttacaggtaccagtgcgtacatattttaatagaaagatacaccttgtgatttcatcattttattctggtgtggacatattgagtttgccaattatttgtctcatgatacataagcagtgtgtgacgtaaataaggattagttaggatcttgaatgtaaagtgccagggttaatgcctgtttaattgcgaacaaacaaagtttgtatcttttctgtaatttggttttatggagttggataaaacttgagaggtggctctggaaaagttacagggcttgaaaaaaaaaaatcgggcgcggcataaggggggagagaattacaggaagcaagagatatt

SEQ ID NO: 707979 - DNA, 547 bp, Homo sapiens
tcatttcagttcccgagtagttataagagaagtggaaggagaagggatagttttgttcgttgcaggtacaaccatatccagagatctttatcttctgaactattggcatgactaccttgagtggttgttgtaccaatgtttccggggctgatgggagagaacggggatgggacacacactcacaaaaatgagtagatggcacagaaatggtacaggttctatatttaaccatgcagtatattggggccccatactgttgtagaaaatgtgacttgctaggaattatcagaaggtttgttcttatattactcaactttcttctagggtactccccagaatatggtagtggcaaaataaattgagtttaattaaaaaatctcaatagcttggaataacaacgttttagagcataggcacctattccttaaactcagttgtctaatctgctctagaggatgaatcactggctttcagagggaaaaaaacaatagagggtctggggcatacccagggttctagtgacttccaagggtgtattagtccattc

SEQ ID NO: 707980 - DNA, 160 bp, Homo sapiens
taaaaaaaaccctttagatgaaaaattactaatgaaccggggtgtccgtgtctgggcgtgcaacataaaaatacggtaccccctaaggagctggaatctgggtcccggtaaaatttcaaatgggtgggtggtaattaattaaaaaaaaacaaaaccccac

SEQ ID NO: 707981 - DNA, 325 bp, Homo sapiens
tgcagcctctgcctcccaggttcaagcgattctccggcctcagcctcccagggccattagcctcatggtcacatggctgagtaaaatcaaacacacggtgtccagttagtccaaactgagttaatcccatgtatttgtccacatcttgataaggcctctgtgatgaggctaaccatcagctatttgcgtgtgaggaaacttctggatgcgggtgattgggctatggacgatgacatgaaagcacagatgaatggcttttattggaaagccttggatggtttggtaatggttctcacagatgatggtgacgtgatttacgattctg

SEQ ID NO: 707982 - DNA, 609 bp, Homo sapiens
  misc_feature (609)..(609): n is a, c, g, or t
ccttaaaatttgtttcgactcctcctgcaaataaaataaatgaagtggcagatggcaacaaaaaacaaaaacaaaaaacaaaaacaaaaacctgtgtgtgcggcgcgcgcgcccccggcgcccctcgagagagaaaacgttttctttaacacacacacactcgcggtctgcggggcgcgcgcgcgggcgcccccagcgatagggctacaaacgccggcacaccatctgggacgggcatcctacacgcgtgcggtgccccctttaacgaggggagacaccccggggccccacaagagagaaaagagcgcgcgcgagcgaggagaatctctccacccacccacaacattcaaacaaacacacgcccccgaggggcgggcctcacatcacccagagaggggcgttctctgtggtgaaaaaacacaaatctcctcccgagaagatggggagcagttctctatgagagcgccctcacctcatataggtggggggagaacctctatatcctatcaccgcgcggggagagctcctccacagagccgcaggagagccctcgcgaactaatctctccaagatatttttgacccccccccgcgctccccgcgggggatn

SEQ ID NO: 707983 - DNA, 360 bp, Homo sapiens
gaaggatatgaacagacacttgtcaaaagaagacatttatgcagccaacagacacatgaaaaaaggctcatcatcactggccatcagagaaatgcaaatcaaaaccacaatgagataccatctcacaccagttagaatggtgatcattaaaaagtcaggaaacaacaggtactggagaggatgtggagaaacaggaacacttttacactttggtggggactctaagctagttcaaccatggtggaagtcactgtggcaatttttcagggatctagaactagaaataccatttgacccaggatgtgggagtgacccaggatgtgggagtcagacatcctgggtcagtccaacatcctgtgt

SEQ ID NO: 707984 - DNA, 1694 bp, Homo sapiens
agcgggtggggaggaaagtgtgccatggcggagcctgtggggaagcggggccgctggtccggaggtagcggtgccggccgagggggtcggggcggctggggcggtcggggccggcgtcctcgggcccagcggtctccatcccggggcacgctggacgtagtgtctgtggacttggtcaccgacagcgatgaggaaattctggaggtcgccaccgctcgcggtgccgcggacgaggttgaggtggagcccccggagcccccggggccggtcgcgtcccgggataacagcaacagtgacagcgaaggggaggacaggcggcccgcaggacccccgcgggagccggtcaggcggcggcggcggctggtgctggatccgggggaggcgccgctggttccggtgtactcggggaaggttaaaagcagccttcgccttatcccagatgatctatccctcctgaaactctaccctccaggggatgaggaagaggcagagctggcagattcgagtggtctctaccatgagggctccccatcaccaggctctccctggaagacaaagctgaggactaaggataaagaagagaagaaaaagacagagtttctggatctggacaactctcctctgtccccaccttcaccaaggaccaaaagcagaacgcatactcgggcactcaagaagttaagtgaggtgaacaagcgcctccaggatctccgttcctgtctgagccccaagccacctcagggtcaagagcaacagggccaagaggatgaagtggtcttggtggaagggcccaccctcccagagaccccccgactcttcccactcaaaatccgttgccgggctgacctggtcagattgcccctcaggatgtcggagcccctgcagagtgtggtggaccacatggccacccaccttggggtgtccccaagcaggatccttttgctttttggagagacagagctatcacctactgccactcccaggaccctaaagctcggagtggctgacatcattgactgtgtggtactaacaagttctccagaggccacagagacgtcccaacagctccagctccgggtgcagggaaaggagaaacaccagacactggaagtctcactgtctcgagattcccctctaaagaccctcatgtcccactatgaggaggccatgggactgtcgggacggaagctctccttcttctttgatgggacaaagctttcaggcagggagctgccagctgacctgggcatggaatctggggacctcattgaggtctggggctgacaccccactccctgtttgacggcccagcctggacttggggagaatgactttcccttttttgccccataagggctagcataagctgaggtagaacttatctttaagctgcagcaaaatcaaggagtgacttttgtcccctctcctgttgaccctggtttagagccgttaaccacttggtgagttatgtgggtgttgttgccctgggtggcctgtggctccgtccacaagtcatgctgagttttgcagcctctgtgacttggagatgtcccttcacccctcccctttcaccaccatcctcttttcctcatggaaatgtctgctttatgaaactatgcacatattgaaagtgagtacatatagtctttctggtttctggagataacccatcaataaaagctgcttcctctggt

SEQ ID NO: 707985 - DNA, 213 bp, Homo sapiens
ggctggagtttagcgaaaatacctcatcagatggagcaacgggaggacttttgctcaccatgaccccgagccaagaggctaactttgatgcccaggctggaggccagtaagacaatttaattgcaacctcggcctaccggatcaaggcgattctcctgtttcagcctccaggggggctggaatcacagccaagcccccccacaccgggctaat

SEQ ID NO: 707986 - DNA, 1765 bp, Homo sapiens
  misc_feature (1186)..(1186): n is a, c, g, or t
  misc_feature (1205)..(1205): n is a, c, g, or t
agcgggtggggaggaaagtgtgccatggcggagcctgtggggaagcggggccgctggtccggaggtagcggtgccggccgagggggtcggggcggctggggcggtcggggccggcgtcctcgggcccagcggtctccatcccggggcacgctggacgtagtgtctgtggacttggtcaccgacagcgatgaggaaattctggaggtcgccaccgctcgcggtgccgcggacgaggttgaggtggagcccccggagcccccggggccggtcgcgtcccgggataacagcaacagtgacagcgaaggggaggacaggcggcccgcaggacccccgcgggagccggtcaggcggcggcggcggctggtgctggatccgggggaggcgccgctggttccggtgtactcggggaaggttaaaagcagccttcgccttatcccagatgatctatccctcctgaaactctaccctccaggggatgaggaagaggcagagctggcagattcgagtggtctctaccatgagggctccccatcaccaggctctccctggaagacaaagctgaggactaaggataaagaagagaagaaaaagacagagtttctggatctggacaactctcctctgtccccaccttcaccaaggaccaaaagcagaacgcatactcgggcactcaagaagttaagtgaggtgaacaagcgcctccaggatctccgttcctgtctgagccccaagccacctcagggtcaagagcaacagggccaagaggatgaagtggtcttggtggaagggcccaccctcccagagaccccccgactcttcccactcaaaatccgttgccgggctgacctggtcagattgcccctcaggatggtgagtgcctgaggcccatgggagaaggacccaggagctgcttctggagagatggtggtgtccagcaggggtgtcctggcagaagggactgtcatccttttcccatcctgctctctagagctgcccatcattcttttcagtctgtcctgccttcacactttttgtttcctctgtctgcattttcccaacgctcccctctctttctggcaaactttctacccattcttcaaggctcctcataagcatcctgtgtctttttttttccttcaaaaagtggtcttactgtgtccaggctggttccgaactcctgggctcnagtgatcgtccctcattgncctcccaaagtgctgggattccaggtgtgaagcatcctgtcttctaagaagctttttttggtagtctctcttgccttcctccctaggaacctgggcttccctcctgggcttgctctcactgccctggacacagcagatgtcactcagtcaccctgaactccaccagcttcctggcgaagcctgatatttttgtagggatgaccctgtttcaacaccaggaatgataacagacattaccattactgatgcacagtgcatcagtcaagcaactaaggcagaggctgcaaactggcagcccatggcttttccaacagtgtgtctgctttctttgtagacttattttattttattttattattttttattatttttattttttgagacggggtctcgctctgtcgcctaggctggagtgcagtggcgcgatctctgctcgctgaaacctccgcctcccaggttcaggcgattctcccgcctcggcctcccgagtagcttggactgcaggtgcccgccaccatgcccgactaatttatgtatttttagtggaggcagggcttcac

SEQ ID NO: 707987 - DNA, 1433 bp, Homo sapiens
agcgggtggggaggaaagtgtgccatggcggagcctgtggggaagcggggccgctggtccggaggtagcggtgccggccgagggggtcggggcggctggggcggtcggggccggcgtcctcgggcccagcggtctccatcccggggcacgctggacgtagtgtctgtggacttggtcaccgacagcgatgaggaaattctggaggtcgccaccgctcgcggtgccgcggacgaggttgaggtggagcccccggagcccccggggccggtcgcgtcccgggataacagcaacagtgacagcgaaggggaggacaggcggcccgcaggacccccgcgggagccggtcaggcggcggcggcggctggtgctggatccgggggaggcgccgctggttccggtgtactcggggaaggttaaaagcagccttcgccttatcccagatgatctatccctcctgaaactctaccctccaggggatgaggaagaggcagagctggcagattcgagtggtctctaccatgagggctccccatcaccaggctctccctggaagacaaagctgaggactaaggataaagaagagaagaaaaagacagagtttctggatctggacaactctcctctgtccccaccttcaccaaggaccaaaagcagaacgcatactcgggcactcaagaagttaagtgaggtgaacaagcgcctccaggatctccgttcctgtctgagccccaagccacctcagggtcaagagcaacagggccaagaggatgaagtggtcttggtggaagggcccaccctcccagagaccccccgactcttcccactcaaaatccgttgccgggctgacctggtcagattgcccctcaggatggtgagtgcctgaggcccatgggagaaggacccaggagctgcttctggagagatggtggtgtccagcaggggtgtcctggcagaagggactgtcatccttttcccatcctgctctctagagctgcccatcattcttttcagtctgtcctgccttcacactttttgtttcctctgtctgcattttcccaacgctcccctctctttctggcaaactttctacccattcttcaaggctcctcataagcatcctgtgtctttttttttccttcaaaaagtggtcttactgtgtccaggagtttgagaccagcctgggcaacacagcgagaccttgtctcttaaaaaaaaaaaaaaaaaaaaaatgagagaaatcggctgggcatggtttctcatgcctgtaatcccagaactttgggaggctgaggcaggtggatcaccggaggttaggaattcaagactgaaaccttgtctctactgaaaatacaaaaaaaaaaaaatataaacaaaatgccctgttgtgttggggcaaggcccctgtgaaaccccagtaattccgggggagggtag

SEQ ID NO: 707988 - DNA, 305 bp, Homo sapiens
agggcagagtagagaagacgggggacggtcctcatggagcggggcagtgtagatgacaggagggtcgtcaggaaatggcggcggagagcgacaagcaacaagggaaaataagaataccgtgggcagtcaaaagaaaagaggtgaatgcttcaaagggcaccttcaaaaaaagcgagaagacaaccctcagaaggtgagaaaataactacgagtcatatatctgatagtggtatctaggacatataaagaactcttggccggatgcgttggatcatgcctgtaatcccagcacggggctcgtgccg

SEQ ID NO: 707989 - DNA, 174 bp, Homo sapiens
cactagctcggtcatgcatatgcatggacctatgcagctcataaatacaaccatgaacaaggtcattatacaacagtcttttcgtttcttagcccaatgcctctcatgtatttaaccacaacacaaaacgccttttataaaaaaatctaataccagggaaaaaataacccgaaa

SEQ ID NO: 707990 - DNA, 1506 bp, Homo sapiens
agcgggtggggaggaaagtgtgccatggcggagcctgtggggaagcggggccgctggtccggaggtagcggtgccggccgagggggtcggggcggctggggcggtcggggccggcgtcctcgggcccagcggtctccatcccggggcacgctggacgtagtgtctgtggacttggtcaccgacagcgatgaggaaattctggaggtcgccaccgctcgcggtgccgcggacgaggttgaggtggagcccccggagcccccggggccggtcgcgtcccgggataacagcaacagtgacagcgaaggggaggacaggcggcccgcaggacccccgcgggagccggtcaggcggcggcggcggctggtgctggatccgggggaggcgccgctggttccggtgtactcggggaaggttaaaagcagccttcgccttatcccagatgatctatccctcctgaaactctaccctccaggggatgaggaagaggcagagctggcagattcgagtggtctctaccatgagggctccccatcaccaggctctccctggaagacaaagctgaggactaaggataaagaagagaagaaaaagacagagtttctggatctggacaactctcctctgtccccaccttcaccaaggaccaaaagcagaacgcatactcgggcactcaagaagttaagtgaggtgaacaagcgcctccaggatctccgttcctgtctgagccccaagccacctcagggtcaagagcaacagggccaagaggatgaagtggtcttggtggaagggcccaccctcccagagaccccccgactcttcccactcaaaatccgttgccgggctgacctggtcagattgcccctcaggatggtgagtgcctgaggcccatgggagaaggacccaggagctgcttctggagagatggtggtgtccagcaggggtgtcctggcagaagggactgtcatccttttcccatcctgctctctagagctgcccatcattcttttcagtctctcttgccttcctccctaggaacctgggcttccctcctgggcttgctctcactgccctggacacagcagatgtcactcagtcaccctgaactccaccagcttcctggcgaagcctgatatttttgtagggatgaccctgtttcaacaccaggaatgataacagacattaccattactgatgcacagtgcatcagtcaagcaactaaggcagaggctgcaaactggcagcccatggcttttccaacagtgtgtctgctttctttgtagacttattttattttattttattattttttattatttttattttttgagacggggtctcgctctgtcgcctaggctggagtgcagtggcgcgatctctgctcgctgaaacctccgcctcccaggttcaggcgattctcccgcctcggcctcccgagtagcttggactgcaggtgcccgccaccatgcccgactaatttatgtatttttagtggaggcagggcttcac

SEQ ID NO: 707991 - DNA, 1729 bp, Homo sapiens
  misc_feature (833)..(833): n is a, c, g, or t
  misc_feature (1150)..(1150): n is a, c, g, or t
  misc_feature (1169)..(1169): n is a, c, g, or t
agcgggtggggaggaaagtgtgccatggcggagcctgtggggaagcggggccgctggtccggaggtagcggtgccggccgagggggtcggggcggctggggcggtcggggccggcgtcctcgggcccagcggtctccatcccggggcacgctggacgtagtgtctgtggacttggtcaccgacagcgatgaggaaattctggaggtcgccaccgctcgcggtgccgcggacgaggttgaggtggagcccccggagcccccggggccggtcgcgtcccgggataacagcaacagtgacagcgaaggggaggacaggcggcccgcaggacccccgcgggagccggtcaggcggcggcggcggctggtgctggatccgggggaggcgccgctggttccggtgtactcggggaaggttaaaagcagccttcgccttatcccagatgatctatccctcctgagtagctgggactacagctgtgttctactatgcctggctaattatgtagaaatagggtctccccatcttgcccagcctggtcttggactcctgggctcgagcgatcctcctggctcagcctccaaaagtgctgggattacaggtgtgagccattgcgtccgactatgcttgattgtccaaggatctgatttctaggattgtggggccagtctctctccattgcctccgtcctgctgtctcttgcttctacagggatctggacaactctcctctgtccccaccttcaccaaggaccaaaagcagaacgcatactcgggcactcaagaagttaaggtgccaagtgcaggggctctggctgggatggaagagggcaatcngggagggtggctgactccagttgacccagagtcctgtctgcactgcagtgagatggtggtgtccagcaggggtgtcctggcagaagggactgtcatccttttcccatcctgctctctagagctgcccatcattcttttcagtctgtcctgccttcacactttttgtttcctctgtctgcattttcccaacgctcccctctctttctggcaaactttctacccattcttcaaggctcctcataagcatcctgtgtctttttttttccttcaaaaagtggtcttactgtgtccaggctggttccgaactcctgggctcnagtgatcgtccctcattgncctcccaaagtgctgggattccaggtgtgaagcatcctgtcttctaagaagctttttttggtagtctctcttgccttcctccctaggaacctgggcttccctcctgggcttgctctcactgccctggacacagcagatgtcactcagtcaccctgaactccaccagcttcctggcgaagcctgatatttttgtagggatgaccctgtttcaacaccaggaatgataacagacattaccattactgatgcacagtgcatcagtcaagcaactaaggcagaggctgcaaactggcagcccatggcttttccaacagtgtgtctgctttctttgtagacttattttattttattttattattttttattatttttattttttgagacggggtctcgctctgtcgcctaggctggagtgcagtggcgcgatctctgctcgctgaaacctccgcctcccaggttcaggcgattctcccgcctcggcctcccgagtagcttggactgcaggtgcccgccaccatgcccgactaatttatgtatttttagtggaggcagggcttcac

SEQ ID NO: 707992 - DNA, 1424 bp, Homo sapiens
  misc_feature (833)..(833): n is a, c, g, or t
agcgggtggggaggaaagtgtgccatggcggagcctgtggggaagcggggccgctggtccggaggtagcggtgccggccgagggggtcggggcggctggggcggtcggggccggcgtcctcgggcccagcggtctccatcccggggcacgctggacgtagtgtctgtggacttggtcaccgacagcgatgaggaaattctggaggtcgccaccgctcgcggtgccgcggacgaggttgaggtggagcccccggagcccccggggccggtcgcgtcccgggataacagcaacagtgacagcgaaggggaggacaggcggcccgcaggacccccgcgggagccggtcaggcggcggcggcggctggtgctggatccgggggaggcgccgctggttccggtgtactcggggaaggttaaaagcagccttcgccttatcccagatgatctatccctcctgagtagctgggactacagctgtgttctactatgcctggctaattatgtagaaatagggtctccccatcttgcccagcctggtcttggactcctgggctcgagcgatcctcctggctcagcctccaaaagtgctgggattacaggtgtgagccattgcgtccgactatgcttgattgtccaaggatctgatttctaggattgtggggccagtctctctccattgcctccgtcctgctgtctcttgcttctacagggatctggacaactctcctctgtccccaccttcaccaaggaccaaaagcagaacgcatactcgggcactcaagaagttaaggtgccaagtgcaggggctctggctgggatggaagagggcaatcngggagggtggctgactccagttgacccagagtcctgtctgcactgcagtgagatggtggtgtccagcaggggtgtcctggcagaagggactgtcatccttttcccatcctgctctctagagctgcccatcattcttttcagtctgtcctgccttcacactttttgtttcctctgtctgcattttcccaacgctcccctctctttctggcaaactttctacccattcttcaaggctcattcctgtaatcccagcactttgggaggccaaggtgagaggatcacttgaggccaggagttcgagaccagcctgggcaggatggtgagaccttgtctctactaaggatgaaaaaattaaccaggcatggtggcacatacctgtggtcccagcgacttgggaggctgatgcaagaggatcttctgagtccaggagttgggggctgcagtcagctgtgatcattgccactgcactgcagcctgggtgagagagcaagaccttgtctcttaaacaaaaacaaaaacattggccaatgggaatctggcttggtggcccaggcctgatcttgaacctcctgacctcaagcaaacctccga

SEQ ID NO: 707993 - DNA, 1033 bp, Homo sapiens
ggtctttcctacttgcacctcgctgtctttgctccacacaccttggttgcagagtgacgtgagccccatgggcagtcatccctgttgtcaccaagaggagtgatgacgtgtgccccccacgccagggtgccccagagacctgtattggattctctcgtggcgcttgcatgaggccaacatgattcaatggccaagaccgtgcctggaccatcccactctgccatctcctgtacaagcgtgacacaccaaatggacatggtcacttgcctgcagagactcggtcccatgagtgaccacaggactggcagcgcgtggtccagaccaccatgacctgggtgatacacgacaaagcagtggcaagacgccacaacctatgtcaagaccacccagtcagacgaaggggcacagggaacttcaaataccagagtgggcacttgtgagcatactacttgggcacattcatcgcattgcattccacaacttgcagtgacactgtggctgaacaatgaaaccacagagccgagaacactccatgagagccaggcgttccatttggacctcggtacgccataagagtctgagcaaggcgacaccattgccacaccccttatccaatctgcgggctttcaccgtaagcgaaggtagaagcgcagtgaatcagccaagcgcagacggcgacattgggggcccaagccattggcaccacgaatttgtgagacacactttggatagcacccatatattttgggaccacatgagcaattcgacgattggagaagacggaaaacccaacacacgtaccagatatacccacggagcaccaagcgccatttggaacgactatgcggtagcgattatacaagaacgaaaggcatttaggaaacgaactttatctggcgcaggtacaatttcatctaacacaggcgacggtatggactacaccaagaagaagacattaccatagggtagaccaaacaacaaaatcgagtatacgagagtatgcggaccgcacaagtagaaatcgcccacacct

SEQ ID NO: 707994 - DNA, 588 bp, Homo sapiens
gccccacttgggtttgaatatattgtggtttcccctggggcacacagccccacatgtttgttgttctgagagagagccttctctcaaaggagccttattatctccccgcccttttgtggtctctctcttttgtcctgttttctggtgagatatatgagagcccacagagcacgctttccgtgtggtgtccatccaagccagtggaccagcaaggctgctggagctggccaggtccacccagtctgccccagaaagctccagaaggctaaatggatatttatccctttatacctgcccacccccacttttatataccagtggtggaagaacggttctcagaactgtttgtgttccatatggcccatattaagtttagtagtaaaagactggttacatgataaccatagccatcgttaaaaccctccagaaggaaaggagaatagttttgtggacccccttggttttcttttttgcgtgtggcagcttttaagttattagctttttaaaatccgtactttttaatggaaaccacttgacccaaaatttgtcacaagaattttgagaccccctttaaaaagttaaatgaga

SEQ ID NO: 707995 - DNA, 424 bp, Homo sapiens
  misc_feature (62)..(62): n is a, c, g, or t
  misc_feature (72)..(72): n is a, c, g, or t
agacattttagtgatgagatttaagagaatgtgcagcctgggcaacacaaatgaaaccctgncacacgcaanataaaaatattagccaagcttggcagtgtgcacccgtagttcctgctgctcaggaggctgaggtgggagaatcgcttgagccctggagtttgaggctgcagtgagctatgatggcaccagtgcatttcagcctgggcaacagagcaagaccctgtctctcaaaaaacaaaaaaatgaagattctgatgactgcctagggaagagaaattctaagataaaactaagaatttacggtaaattaactgaagagatgatggtgtcattttgaactggaaaacatataaaaaaggtttgaaaaggaatgctctgggttcagatttggacaggctgaatttaaaaagaaagtcgacgc

SEQ ID NO: 707996 - DNA, 375 bp, Homo sapiens
  misc_feature (69)..(69): n is a, c, g, or t
ctggggctcctaggaaagccaaacttttcctttgtcaggggatgaagataggaaccacctacttagcantaggattcccatctcctctctctacctccttctcctccccttcccctgggctcaggtttaaactcttagagggaagcctacttttgggggaggagaggttgcagggagaacttcctagaaacagggagcccagggataagaaagaaaaggaggcagaatgcccgggcgtgtcgctcacgcctgtaatcccagcactttgagaggccaaggtgggcggatcatctgaggttgggagttcgagaccagcctgaccaacctggagaaaccccatctctactaaaaatataaacattagctgtctcaaca

SEQ ID NO: 707997 - DNA, 108 bp, Homo sapiens
  misc_feature (92)..(92): n is a, c, g, or t
atttccttactgcctcttgctggggaacaaatgtgacatggaggccaagaggaaggtgcagaaggagcaggccagtattaaggctagagcangaggcagtaaggaaat

SEQ ID NO: 707998 - DNA, 585 bp, Homo sapiens
gacccccgatcccgcacctcaaggcacctccaaagatgatgatgggttgtggggagtcagagctgaagtcggcggacggggaagaagccgcgtgcggtcccgggagcaccccggagccccaagtcccgcaactccgagccccagtagcccgagcccggcctggacttgagcctgagcccggcggaccgacagcacctcagcgcgcggcacggcagacccgggcggccggaaggggcgggcggagcggcggggcgcggtcggacagcgagcaggcaggtccagttccagcctgaacgccgcactcccccggagcaggtcccagagacagcagactgaggttgcgcaggagctggagatgcccagagctcgaagagcagactggcctgtgggcctgagacgctgcgggcccgaaagcacgggagccacattgatagcatgccgaaggacggagagaggaaccagtgacgcaaaacgtcgcaaccacgaatccagctgacggacaggcaggaggcagcgtgttcccgagcgggcatgacacagtgccccgcgctccaaaggcgagccattccggggaaccatgggtgc

SEQ ID NO: 707999 - DNA, 411 bp, Homo sapiens
  misc_feature (58)..(58): n is a, c, g, or t
  misc_feature (235)..(235): n is a, c, g, or t
  misc_feature (365)..(365): n is a, c, g, or t
  misc_feature (367)..(368): n is a, c, g, or t
aaagtggtcaccaagctgatgccattgggtccccctggaaggcggaggagggaggaanaaagtggcgctgaccacagggctcaggcggaaccggatctggatggacaggagttccccggcaactgtggggtcagggagatggctctgtcccctgctctccgagggccagccctggaccccgcccacatctgcactggctcacactccacatgggagggacacacccaaatgcctnctgtgctgctgcccaaacagactcacggagaaaccaccgacctggacccacccggccggcactgcaccgctgggatggacagcaactgtccccacaaaaacgcacgtgattccctgtgctgagcccgaanannctccgctcccaagctccccatccttcattctgggcctcaggaa

SEQ ID NO: 708000 - DNA, 123 bp, Homo sapiens
agcgagctctctgcggttctctagaggatccggcaccattgtgctggctggcaggccctgtggctgctggctgagggttctgctgtctgtgccaccccattaaagtgcagttccctccgggcc

SEQ ID NO: 708001 - DNA, 104 bp, Homo sapiens
cactggcataaaaattaggtgccctaaagggagctgtggatggaggcttgtctatccctcacagcaccagcacgaattcccttagcaccagcacgaattccctt

SEQ ID NO: 708002 - DNA, 153 bp, Homo sapiens
acgtcgacaggtcggcaacatggtaagacccccatactactactacaaaatacaaaaataagctagggcataggtgccgcatgcctgtaatctcagctatatgggaggctagcggtaggcgactatatctacgaacctatggacggcggacgg

SEQ ID NO: 708003 - DNA, 442 bp, Homo sapiens
  misc_feature (52)..(52): n is a, c, g, or t
  misc_feature (74)..(74): n is a, c, g, or t
  misc_feature (98)..(98): n is a, c, g, or t
  misc_feature (108)..(108): n is a, c, g, or t
  misc_feature (125)..(125): n is a, c, g, or t
gtagccaaaatttttttttcccccccccccataaatagtgttctcagccttnggttttatgttaaagatccctnccctcgagaggtttgcctaacccnaagacctttntcagggtagttacctanggaatctaatatttttaggaagtgctgtaattcattctgataacatagctggagataacttggtgtcccaagtttaattatgtatgtttatcaaactactgaattgaaatttttttttttctcgagacaggagtctcgctctgtcgcccaggctggagtgcagtggcataatcttggctcactgtaacctctgcctcccaggttcaagcgattctcctgcctcagcctcctgagtagctgggattacaggagcctgccaccatgcccagctaattttttttgtttttttttttttttagtagagacagggttttact

SEQ ID NO: 708004 - DNA, 867 bp, Homo sapiens
  misc_feature (611)..(611): n is a, c, g, or t
ggcattggtctttgctctcctcccacagaattgtcggtcatgtgatggcaggcctttgcgggatttcttggctattgtatatgcaggccttttcttcccagccccaaattcttgggtaggctctgtctgcttaaagagcctgtcttcacaaagctgcactcgggtgcctctgtgcgctgtcttagatcctactgccggacccttcaggactccgagccaggaaagaactctccgaacctctggcgtcgagactcctacttgtgtttgtctcagttcttttccttactctcgctccgtccttctacttccgactagtgccgtctcttggtctcggtggttccgctcctgtttcctattcctccgtgtcccaccggatctcgtgaggtggtggactttcttcctatagtcgttgccctctagtgtcccgtttcgtcttttggtccaccttctcctttagtctcgtgtgttcgtcgtggcccttgcttattcctcttcgtggtcgcttgtcgtgccgtccgtcctgcgaagatctgctgatcatcttctcccgtacttccctggtattggatttttgactggtccgtctaaaggggctcacgggctggattcgngacatgcaggtccatggcgcctgggactgatgtgacgcaagtacttgaggtcagccgtgttcacctactcagccgcagaaaggtaaagctgaggcgtgaggccctgaccttggagccggctccagcgcgcctcccggagccagtgctgacccgttgccctggccagcgatgatgcatgtgctgtgggccctgccggcgcctgagggtgctctgcctgaacagtgttcctaaggcgagcccactcccaggactaccg

SEQ ID NO: 708005 - DNA, 910 bp, Homo sapiens
  misc_feature (324)..(324): n is a, c, g, or t
gacggcgcaggtctgcaccatggcggcccggcttgtccgccgatgcggggctgtgcgtgccgctcccctcagcgtgcccgtcgtgggtgtcctggtcgctaggtgtgtccggcgcctcacacagacaccgtgtgatgacgtggtgtgtgtcggcgctggaggcctggtgggcgctgccatggcctgtgccttgggatattagatagttcactttcagtgacaatgaaaatcctgtagctcagaagcaaggtccaaaatgaaacgtactggaggaaaattgtcacgaaaacttacatgcaaccagggtcaggctaccatttcccnctggcttctgaaatggcttctcagtacgttttgagtgcctgcgaaccaatattctgcgacatgaagatacggagacctttgtcggtcgaattgcagggtgtggcgacgcctgtcgtcacgagggtcccctgagtaaatgttgtagactaatggactaacttcaagagttgaccacttggtgcctatattcgtgcggcgacaatgattcccagtcatgacatgggctctccactaactggcttctgaggagagctggctgatcgtagacccgtggtgcccgtgttcctcatacagcgtaggcggagaggccggtttccgcttattcctcctggtgccttggtccagtccctcttgttggaggcggccacttccttgggccctctggtggtctcgagtagtctactcctgttaggctgcactcgagccaaggctgccctcttccgagggagcgctatagactatggtctggacgtcaccgcttggcacgtgtgccgtcacccgagctgccggggatgttacggggcaatcgcccttgttgggggacgtcccggacattgttcgaggcctgggcacaccttattgacca

SEQ ID NO: 708006 - DNA, 158 bp, Homo sapiens
tacatgatacactcgagtgagtacccgataggccaagctgggaggatcgttgaggccaggagttcaagaccagcctggcaacatggtgaaactccgtctctaccaaaaatacaaaacccggctgggtgcagtggctcacaccttttggcccttatgag

SEQ ID NO: 708007 - DNA, 103 bp, Homo sapiens
agtgctccactaaacgatattatggaggtcagcacggtgctcacgtagtacgacggaactagtatcagtggaggcatagcaccgacattggtagaatacacgt

SEQ ID NO: 708008 - DNA, 1048 bp, Homo sapiens
gagcggggcatcaccgtgccagcctgggtggagtgagctggcgcatgtggctcggtgctccgtgctcctgcgggcgtgacgagtgcggctggcggctggcaggaagcggctgtgctggcggctgtgatggcgtggagccgatggagcgacggttccatggactgctgcttaggaacctggggacatcaggagtgccctgcgccctgagcgctcagcatccagaggctgtcatggctgaggtaccgggacccctcctgcaagacactgaccaagaaacatacacccttgaagatctagaacacgctcaagtctggcctgcaaggaagacatccccagcgaaacagagtgaggcgatcacctcctggcagtgcctggtttagcttcctggcgagcccacaaacaagctggagcaacgacgaacctctcctacattgagcacatctttgagatctcccgccgtcctgaccctactcacatatggtggttgactaccagcacccgatgtgctgacaccgtctctgaggcggatgagctggaaccaccaagctaacccgtaatccccaagtgcaaggaagtaccacagacacttatccggcagcacctctgaggcaagagactcactccacactaggctcccaccagcgaacgaaaggcctggagcaacggcgggcggcacgacggacgcgacgcgggcgggcaccctcgaaagcaacacaaccaccgtcgccccgatacacccacaaatccagcgcgagggacagaagggggcgggaacagggggcaaccaccagaccaactcctaaacagcacacgaaaaaaacgccggggcgtcgccatacccccacgcccaaccaggggtgccagagtggaggctggtcgcggtagagacgccccaacgtccgcgacctcggcccaggcccaacaaaacgcccgacgccccactccaccgaccccgccccgaccacacaacggagcaacgggacggaccacagcccacacccccgccgcaccgggccggccgacgccaccaccgcacaccagacccccg

SEQ ID NO: 708009 - DNA, 129 bp, Homo sapiens
ggaccctgagaggataggaaaaagtgtttatgctgtgtaataaattaaattgagtccggccttcaagtagtgatgataacatgtactagctataatctgagagccaggttgcttcggttgcctctcaag

SEQ ID NO: 708010 - DNA, 221 bp, Homo sapiens
  misc_feature (18)..(18): n is a, c, g, or t
gtggacatgtgggtgganaagggagggtggccagccctagtaaaggaggaatagtgcttgctggccccaaggaaaaggaggaggtgtttggggtgagggagttagggaaaaaaaagcaggcagataagttggagcaggggttggtcaaggccccctctgcctttagtccccaaggcctctctctgcctgaaatgttacccattaaacaggattttccagta

SEQ ID NO: 708011 - DNA, 793 bp, Homo sapiens
aggctcacgcgtgtggccgcggcgcgtgcgtctgtgcctctgcgcgggtctcctggtccttctgccatcatgcctgcactgttcatcgtcagcacacctagacgtgccccgcgcctccgctgccggacgggttcctctcctggagctcacccagcagctggcagcaggccaccggcaagcccccccagtacatcgcggatgcgacgctggtcccggaccagctcatggccttcggcggctccagcgagccggtgcgcgcatcttgtcagtgctgcacagcatcgggcaagatctggcggcgcgcagaaccgcatcctacagcaagctgtctgtgcggcctgctggccgagcgtcctgcgcatcgagtccggacacgggtctacatcacactattacgatcactgaacgcggccaatgtgggctggaatcaatctccaccttcgtcctaaagagccgacacgggacccatcgtctgctcgtgcgctggctccagcccgcgtgaatcgccgcgcgcacgcttgtgcttctagggcccgctcgcaccccgaagcttctggtgtgcgggagatacataagacgggttgtacgacgacgtatcacaatcatgatttgccaagcacaagaagaaaataattgcgacggcggactaaaagatgaccgttgacacacttgtgttgaaatgctgctgggatgttatgtgctccaacacaagtattcgatgaacaagaggcggaaattctggctgccctgaagggcgtgataattgcggagaccggtacaccaaaaagaaaaa

SEQ ID NO: 708012 - DNA, 111 bp, Homo sapiens
acgaacgtactatgtagattaggggttgatggcgatctgtttgccccatttttaaaagaaggaaaaaaaaaaaaccccccattagctcgggggaccctcttagaattcgac

SEQ ID NO: 708013 - DNA, 468 bp, Homo sapiens
tgtcttccttctgggcattctgccattcttagccccctggctgggatggcagcacccttcttaccaggcagttgctaccactgcttcgcctgggtgtggctcccttcgtgccgaggtgtggtaactgctttggctggtgtaactgtcttctgggcaggtgttgctgctgcctttttgccatggagtgacagctgcttttcgtggctggtgtggcaactgctaaccttattagtgggggaaacgaccaccttctttgctgaggctgcagcagccttcttgcctttgcttctgaggtatgacgacctcttctccactgctatcatcttcttcatcttctgacatttcctcatcttcactatcttcttctacctccttcggaggaggagccattttcttggggtcaccttgatttttacctgccttcgcgagcttcaacatgatggcggcggagtgtgaagcggacaagtg

SEQ ID NO: 708014 - DNA, 613 bp, Homo sapiens
ggtgacgtcggccgagagtctttcctgctatggccggattccagactcacctgggaaaggctgtatatcaacagaccacatggatcaaggccttaagtaggtggctgaggatacacgcatgccctgaaccatctggagcccaagatgctagagattctgtcagctcaagtggacaccctctggccaccatagcagagaagtctgcaggcaggagtttccaaggcaggacaggacaagagacagagcaagtgccttgtacatatgcagacagaggtgtagactgtgcctctgtcatagttgtgacaagcaatccagatgaccttgcaaggatcttaatgcatgtcatgaactcgaatgcgccgatcaagcctggcattgctgttcacagacagagtgaggaagcgttgtccacacccttatcctagtttgctgaccaactgtgcaatcagaggatgatggttagcatacaaacacacatctgcactacgactcctttaattgtaggcaatcagacctttacaagagtgcatattctagggaggtattgttgcggattagtgaatgatacccttcactctgaactatctctggaacctaacagaggaacagcctt

SEQ ID NO: 708015 - DNA, 675 bp, Homo sapiens
  misc_feature (102)..(102): n is a, c, g, or t
  misc_feature (352)..(352): n is a, c, g, or t
  misc_feature (391)..(391): n is a, c, g, or t
  misc_feature (428)..(428): n is a, c, g, or t
  misc_feature (468)..(468): n is a, c, g, or t
  misc_feature (580)..(580): n is a, c, g, or t
  misc_feature (634)..(634): n is a, c, g, or t
  misc_feature (642)..(642): n is a, c, g, or t
  misc_feature (650)..(650): n is a, c, g, or t
  misc_feature (652)..(653): n is a, c, g, or t
gccactagcggttaaaccccgacggaaagagcattcgaaatcgatagagcacaatattggaccagtcgaacgtgaagaagcgggtggaaagaagagaaccanaagtcactttcccctaaggtagaggagcatccagatcactcgcgaacgaaccattcgcgagctgcaatatcgatctgtatgtctctatagagaggacaagcgcctcacatgatatcttatacagagaggatggcatgctgagtgtcgagtttatcgcatgccagggatcaagtctccgagggaggcgtcgtagtgtggcgtgacacagatgaagctgtcgcccagcatcgtggacggtctaggaacgaantactctcggtcgatactgtcaaagcatgattactcaggncactgggcgatggcggcgaagaaagattcctggcagnaagagccatcgcgcgcgctcctcgcaatgaacgagcccgnagtgaacacggtggtgggaacctcaattgagttggacgtttgaaaggtgatcgtgtccccggacataggagttcccctagatcatcagatgagaccggtacgattgaagccnaggattcttccagagtagtagcatatgcttgatgcgtccgctcaagaggacgtngatcccanggggaccntnnttcgcaagagcttccagaggga

SEQ ID NO: 708016 - DNA, 266 bp, Homo sapiens
aatacaaaagaataagtgttggcaagggtgtggagaatttgaaccctcatacattgctagtagaaaggtaaaatgttccagtgactgcaacattttgacagttcctcaaaattaaacatagagttatcatatgaccgagcaattccattcctgggtatattcccaagagaaatggaaacaggtgctcgaacaaaaccttgtacacaaatgttcatagcagcattatttatttattttttaactttgcagcattatttataatagtc

SEQ ID NO: 708017 - DNA, 522 bp, Homo sapiens
  misc_feature (8)..(9): n is a, c, g, or t
  misc_feature (12)..(12): n is a, c, g, or t
  misc_feature (22)..(22): n is a, c, g, or t
  misc_feature (37)..(37): n is a, c, g, or t
  misc_feature (43)..(43): n is a, c, g, or t
  misc_feature (477)..(477): n is a, c, g, or t
  misc_feature (499)..(499): n is a, c, g, or t
  misc_feature (511)..(511): n is a, c, g, or t
gacacatnnctngtgttttaanatgcctgagccagcnaagtcngctcccgccccgaagaagggctccaagaaggccgtgaccaaggcgcagaagaaggacggcaagaagcgcaagcgcagccgcaaggagagctactccgtatacgtgtacaaggtgctgaaacaggtccaccccgacaccggcatctcctctaaggccatgggcatcatgaattccttcgtcaacgacatcttcgagcgcatcgcgggcgaggcttcccgcctggcgcattacaacaagcgctcgaccatcacctccagggagatccagacggccgtgcgcctgctgctgcccggggagctggccaagcacgccgtgtccgagggcaccaaggccgtcaccaagtacaccagcgctaagtaaactttgccaaggagggacttttctctggaatttccctgataatggaccaagaaaagcttcttatcaaaaagaangcaacaattgccttcgggttanctcattaatctnactgcagaaaa

SEQ ID NO: 708018 - DNA, 424 bp, Homo sapiens
gactgcattggtctatcacttaagtacgcgtaggggatttatagggttctgtggcctgagttagagttgacataaatgtcgatctggacctacaggatatccacaggctcgataggttcatcacttctaccaataaatctacgcaatagaatgctacagattaggttgtactctaatagctgctcttaggtagctggtatggttgcaggggtaataaaaatggctctcggtaaacagtaattggtaattagttcattgttcacaaggtatatgagtaagtccctggtatagtatgagagcttatacttcatcctctgtaccctgcaggacaatcgctactgcgcgaggtctccatctgtgtcagtcgaccccgatatgggcaaagggtgtcatcaactgtggcaaatcgtacgaaagagtgcgt

SEQ ID NO: 708019 - DNA, 148 bp, Homo sapiens
cgcgagggcttctcagcctcatgaacattgtttctattactgctgttagagaactgaatgagcctacagatgatcggatgttacatgtggtgtctgcctcggggtcgtccgagtaacgtcgggggattccggcattcctatggattgt

SEQ ID NO: 708020 - DNA, 734 bp, Homo sapiens
  misc_feature (8)..(9): n is a, c, g, or t
  misc_feature (12)..(12): n is a, c, g, or t
  misc_feature (22)..(22): n is a, c, g, or t
  misc_feature (37)..(37): n is a, c, g, or t
  misc_feature (43)..(43): n is a, c, g, or t
  misc_feature (405)..(407): n is a, c, g, or t
  misc_feature (413)..(413): n is a, c, g, or t
  misc_feature (433)..(433): n is a, c, g, or t
  misc_feature (440)..(440): n is a, c, g, or t
  misc_feature (444)..(445): n is a, c, g, or t
gacacatnnctngtgttttaanatgcctgagccagcnaagtcngctcccgccccgaagaagggctccaagaaggccgtgaccaaggcgcagaagaaggacggcaagaagcgcaagcgcagccgcaaggagagctactccgtatacgtgtacaaggtgctgaaacaggtccaccccgacaccggcatctcctctaaggccatgggcatcatgaattccttcgtcaacgacatcttcgagcgcatcgcgggcgaggcttcccgcctggcgcattacaacaagcgctcgaccatcacctccagggagatccagacggccgtgcgcctgctgctgcccggggagctggccaagcacgccgtgtccgagggcaccaaggccgtcaccaagtacaccagcttccagtaaannnttccanggggagacaacagtttttanacatatntttnncaacagccgtcactgctggacactgtttcatcttgcaaaaaaaccaatgaaaatgagtgatccttgaatatgataaaaggaggttcttttgaacaatcaaagtaggacaaatgatacaccttgctgggaaaaattagctcttctttttatgcataaaactattaaaataattctttcatagaaatttatgacccgggatacatataggactattttaattttaatcaacatcatatcttgctttctagggggtgcgccgctcaccaaattatccctttaggaggtcggc

SEQ ID NO: 708021 - DNA, 328 bp, Homo sapiens
agctccgtacccctcatatgtgccacattcacagccactgggaaagctacggggatgggccgggcgcggtggctcacacctgtaatcccagcactttgagagccaagacgagcggatcacgaggtcaggagattgagaccatcctggtcaacacggtgaaaccccatctctactaaaaatacaaaaaattagccgggcgtggtagcacacgcctatagtcccagccacttgggaggctgaggcaggagaattgcctgaacccaggaggcagaggtggcagtgagccaagatcacaccaccgcactccagcctgggcacacattatgga

SEQ ID NO: 708022 - DNA, 450 bp, Homo sapiens
  misc_feature (8)..(9): n is a, c, g, or t
  misc_feature (12)..(12): n is a, c, g, or t
  misc_feature (22)..(22): n is a, c, g, or t
  misc_feature (37)..(37): n is a, c, g, or t
  misc_feature (43)..(43): n is a, c, g, or t
gacacatnnctngtgttttaanatgcctgagccagcnaagtcngctcccgccccgaagaagggctccaagaaggccgtgaccaaggcgcagaagaaggacggcaagaagcgcaagcgcagccgcaaggagagctactccgtatacgtgtacaaggtgctgaaacaggtccaccccgacaccggcatctcctctaaggccatgggcatcatgaattccttcgtcaacgacatcttcgagcgcatcgcgggcgaggcttcccgcctggcgcattacaacaagcgctcgaccatcacctccagggagatccagacggccgtgcgcctgctgctgcccggggagctggccaagcacgccgtgtccgagggcaccaaggccgtcaccaagtacaccagcgtctaatgtatatcgtttcaatggtgggtctttttctgttatttctctgatatgtt

SEQ ID NO: 708023 - DNA, 431 bp, Homo sapiens
  misc_feature (43)..(43): n is a, c, g, or t
  misc_feature (100)..(100): n is a, c, g, or t
  misc_feature (429)..(429): n is a, c, g, or t
ctcgaatttggggctcaggcgatcctccgacctcagcctcccnagtagctgggactacccgtgcatgacaccctatctggcccttgttttttgttgttgntgttgttctttcttttttcacgtggtttcgcacttgtcacccaggctggagtgcggaggtgtgttgtcggctcactgcaacctgtctctcgggttggagtgattctcgtgtctcagtcttccgggtggctgggattgcgggcgtgtgccaccacgcctggctgatttttgtatttttagtagggacggggcttcgctatgttggtcaggctggtctcgatttcctgacctcgggtgatctgccacctcggcctccaaggtgctgatattgcaggcgtgagccaccacgcccggcccgcatccggctttgatttggttttccttgcccgngg

SEQ ID NO: 708024 - DNA, 131 bp, Homo sapiens
cccccccgaaaaaaaaaaattgaaaaaaaatttgttttttccaaaatttggtttggggggggggggggtttttttaaaaaggccctttctggggggttggggggccaataaaacccttgggcccctcccca

SEQ ID NO: 708025 - DNA, 174 bp, Homo sapiens
tgagcggtcacacgccacggagaaggtaggtcggtcagcaccaggcgcgtgatctcgtgcacgtcggggtcgtcatcgaccagcaggacctgccacgcgggcatcgacaaagaggagttcatggcagagtcctggcggatacgatcgggatgtggccttctccggtggcgtggt

SEQ ID NO: 708026 - DNA, 211 bp, Homo sapiens
  misc_feature (44)..(44): n is a, c, g, or t
gtaaaggcctcatcttcttgattgcagttcaaatacttacgatncacagtcaagtatgaattttatgagccattgtttggttgtaaatgctcgtgtgatttcctacagaaatactggctctgaatatattgtaataaaggtctttgcacatgatgaccacatacgtgttaggtaggctgcatgctctggaagcctggactctagctggagc

SEQ ID NO: 708027 - DNA, 603 bp, Homo sapiens
aggaattacacgtaaacaatggctgtaaatcaccattgcatgcatggctgcgagttgtaatgtgcagatttcgcttataagaacacttctagtatgaatgaaaaaaaaaaagaaaaacaaacaggttgaaaaacgagtgcagtccactgccagacgcataaagtaagtaccgacagaacggaggagggagagcacattaagcacgaaagaaaagctcacgtacgcagaaaagacaagaggacgagcaaagacacaagacgcgaaaaagcagagacagagaagagaaaaaagaaaaaaaagtaagaagaaacaaagcgaaccacacaacacgaagaaaacacaaagacgaacagacacaaggaagaaagaaaaacacaagaatagaaaaacgaacatccacaagagacagaaagagtacaagcacagagaaacagagccaaaagacaagaccgagcagagagaagcaacgagaaaacagtagaggaacagcaacgagaacaacgaggaagacaatcaaaagggcaaaacagataaaaggaaaaacacacgcatccagacgaagaccagtaccaaaaaagctagaactgcgaacaaccgagcaca

SEQ ID NO: 708028 - DNA, 107 bp, Homo sapiens
caagcgacatgcggcatgcgattctaagagtacccccatccaatatggccaacaattcaaaatttttaaaatttaacttataaagtctgagatcattatatacaaga

SEQ ID NO: 708029 - DNA, 371 bp, Homo sapiens
gattacaggtgtgagccaccacgcctggccaaaagatagcatctctatgttagtttccctctctccatttaaaaaaagatatattttaggccaggcaccatgttcacgccagtcatcccagcactttgggaggccaaggcgggcagatcacttgaggtcaggagttcaagaccggcctggccaacatgatgaaacctcgtctccactaaaagtacaaaaaattagcccgacatggtggtgtgtgcctgtaatcccagctactcgggaggctgaggcgggagaatcaccagaacccgggaggcagaggttgcagtgagccgagatcttgccactgcactccagcctaggagactaatcaagactctatctaa

SEQ ID NO: 708030 - DNA, 219 bp, Homo sapiens
ctatgcagccctatctgtcaacaagacctgtctctaagaaaaaaaacattttgaataggctgggtgtggcggctcacgcctgtaatcccagcactgtgggaggctgaggtgggagatctcttgaggccctggaattcaagaccagtctagtctgggaaacacagcaagacccgccttgctgggcgcggtggctcacgcctgtaatcccagcactttggg

SEQ ID NO: 708031 - DNA, 334 bp, Homo sapiens
tgtcgctctagagatccccttcaaatgggccagaagtgcatgctttatgtgaagcccctggagattttcaatgatttgcctatttatatatgttcttttttatcttctttcttgagacaggtcctcactctgcctcccaggctgatgtgcagtggcgtgatcattgctcactgcagccttaacctcccaggctccagcaatcttcccacctcagcctcccaagttgctcggactgcaggcccacaccaccacacctggctaattttttaatacctttttattagaatgtattctctcctttttgtccagactggtcttgaatttctgtgcccgt

SEQ ID NO: 708032 - DNA, 726 bp, Homo sapiens
  misc_feature (606)..(606): n is a, c, g, or t
  misc_feature (710)..(710): n is a, c, g, or t
caggagcagccactctttgtcagagtcctcctatggtcagaccactaggagcccgatcagcccggaactgcactcggcacccctcacccatgtggctcgcgacagttcgagacacttagccagcgaggataccagcagtgccacaccagagctggcgctggatgaacagtctgtccagccctgggagcggcggaccttccccctggcgcacagtccccaggcggagtgtgaggaccagctggatgcacaggagcgagcagcccgctgcactcgacgcacctcaggcagcacgactggccgggagacagaggcagcgcccacctcgcctgccatggaccccctcaagagtcggcatatggtggcagcagccacagctgagcgcccgactcacagatgagcggaagacagacatctagacagactcactaactattggcgttaaagctccagacatctctgcgtatgatattcagacatcatatgccggacattctcacagtttctagtgaacttaaggaatatagatcctactttggtagttatcatactgggaataatgctcgtgctgtatttgaacccatgtggtcttgtgacacacctgagcancttctcccgttggccagaagttcaggatgagaccctgctggcctgagctctgcacatcctctgcactgttgaatcactggacttactgatcttagatgaccccncgtacttcaccctgcg

SEQ ID NO: 708033 - DNA, 1413 bp, Homo sapiens
  misc_feature (4)..(4): n is a, c, g, or t
  misc_feature (70)..(70): n is a, c, g, or t
  misc_feature (79)..(80): n is a, c, g, or t
  misc_feature (1413)..(1413): n is a, c, g, or t
tggncggtctcagtctttaatcgtggcagggcctcacgcacgcgcgcacgtacacacactcaggcttcanatcttgttnnagaaacgctgtgcgagaaatattcagacactctctgtgcacgtgtgcctccttacaaacttgtggtgtgattcttcctctcctctccagacaagttcctgttcccacaccttgtgtttcgttcctctccacccaacacacgctgtgacatctctgtgtatagcttctcgcggatataccgtatagccccagcggggacacccagtctttggaaaggcgccccacagaacacagcccgcgttcacaggctgtgtgatataagacgcccgcacacacacaggtgcctctcaccagctgtgggcccatgtgtgtctcgtgtcttcattctatctccacaaggggcctttgacacatctctcacgacaggagatgtgagaggagaccctgtgcgccaccacagtgtgcgagggctctctctgtgtgggcgcttttctttctctccggggtatactgtgccggtataagccggctctctcttctcccggcgagctgtgtgtgccgggccctctctctgtgtgtgtccctctctctctcctctctattttgtgtgtcacctgttgccacacacacaggtgtctcacagggtggctcatcttcaatatccctctccggtgtcactatctcactccgatgctgtgaggtgtgtgtgcgctagtgcgacgtatatcatatgtgaagagcagtggagaagaggggctcatcaccaaactgttgtgttgcgagccaattgttggggcgggaacataacattaacccggtgttgcactgtagggggcgcctacatagttggtcgtggaggaggagaccccctgtgtgtatgtgatcccccgcttgggtgtgttgtgggccccccaaagtagcgccaagaaagcgcctcttctatatcttctatttctacagaagggcacaagcaggtctttacccaacgaccgcagggtgtgagcccctcatccaccgaaggcactctttatagggagcaggcaaacgttgtcggcacgctcagtgtagtcgttggcagcaaaggtgatccgcttcccctccttgcgtggttgacaccaccaacagacggaggccacataatcgcagacctaacaagaaatcgtctcctctgatgggggtttcttcctccttacccccccaatgcttttttacgccccaagcaggaatcgtcgggtggggcgaaactactccccgacggaggatcgaagaaaacagaagacgtggcctcaccacccacgcgggtgggaggatcccttccccacagacatttagagtcttacgcaccagcgtttaagggaaggtgggcccccccccatggtgggggggcccctagn

SEQ ID NO: 708034 - DNA, 445 bp, Homo sapiens
tttattaatcttcaccgggatggaagtgtctacgagtggccacacatcacgccgccgtgatccaggtacaggatgtgatgctcttcctcaaacacctgccgcccggtgtgaccacagtctgccgtgatgtacatttcttcattatataccaccagctgtagagcccaggttacctgcacccatgatgaggcctggggctggtgtccttggtgtgcacggagcctgatacgtatggatagtctgcccagtgcaggtgcaggtgcaggtggcagtctggaggcttgcagttggttggtttaccattacatgtccatgatgggtggcctcaggtaatcccagtcgcggcccttgtagtaggttataatgcgtcatcactttcccatcaattatatggtttgccaggaagactcctttcacccctctgacctccaggatgtcaataagc

SEQ ID NO: 708035 - DNA, 117 bp, Homo sapiens
ggccatgctcagacagctccagaatatctaagcccaggacagagaaccagaaacttccagagtcagctgactgtttctgcattgtaagcactgggcagcctggtgaaccaggcagtg

SEQ ID NO: 708036 - DNA, 140 bp, Homo sapiens
  misc_feature (60)..(60): n is a, c, g, or t
ctagtcatctaagatccttacgtgttgcaccggtgtatgcctgttcggctgcagagtganaggatacacacacgctatgagatctcaggatctaagtgataactaaacctacatagcttctgactcagtgcgtccctgtc

SEQ ID NO: 708037 - DNA, 129 bp, Homo sapiens
gccatggtcatcaccactccttccagggcatgagcagctcgatttgggacaaagcaatcggacatagagatggagggggagccccctgaggcagcccagatcttgaataaagtgtcgacaacacccgga

SEQ ID NO: 708038 - DNA, 358 bp, Homo sapiens
gaggggtgcccagtgtctaacagcatggtgtctcagttacatggggaaacttgggatccccgaggctttgaagatcaagaatcaccagggacggatggagtagggaactaacgtcagtccccgtgggaattcgcccctcaaatgcgacacccgcaggtggataggagccgtgcaggcaggacagtctgtgcctgcccaggatgagccaactcagaaggcagaagacctgactccggaacctctccctctgtgcttgaccttggacaagtcgctgtctccctaccccagagtctgccgagtctaagcgtccttgcgactctacacttatgtgaaaccttttttcctggaccccctcgtg

SEQ ID NO: 708039 - DNA, 153 bp, Homo sapiens
attgactgactttgacagtggtagtgctccatttaataacagataataagctactaaagtgtttttatttgttaaccagtttaagtggatccttgtggtaatttaatctgttgttctcatcccttatatggggcatttttctttaacacacga

SEQ ID NO: 708040 - DNA, 353 bp, Homo sapiens
gctgttagtacgtcatgctttaaacgtctgtgtaggagagaagtggggtttataatgtgtctctgacgatatcttgcggcttgcagacttgaaactattaagcttcttaagcgcctcgtaccggaaatacttctggggaaagttcatggtcccaaaaggtcatagccatacagcttcactagagttcttggaaccacagctgaaaagagctttgtattattttttaattccctccccagatatcatttaggagtattatataaaggtggtgggcaaaaacaatgtaaggagcctttccagttatcttgagttgcagctctgtagtttcttgaggccaaacacactgtatttta

SEQ ID NO: 708041 - DNA, 125 bp, Homo sapiens
agttgacactacagtatgaatttatttatgtgtaataagatttgagaacggttaaaggcttgccacattcttcacattgtagggtttctctcctgtactgaattatcttatgtgtagtaaggtgt

SEQ ID NO: 708042 - DNA, 403 bp, Homo sapiens
ttttttggccaggaggaagggcagatgctccctccttcctcaagcctccctgggtcattgatccattttgagggcatttgggggtcaaagttgagaccagattgcttcagtttgtataaaattagcattttttatcaccccaaggccccccctgttttttggcctcccaaaccagtgaggatgtaaaggtttgttgaggtggaggaacaaaagtgaaatgagccatttgctccatttagaagtcagtcgcttcggctgttcatttcccctaatatttatttaggccctattttgggccaagcattgtttttcccccagtttgccccaaatatgaaaaaaaaaaaatttttggaactgtgaggcttcaatgtgttgtggcccaatatacaaataaaccaatgga

SEQ ID NO: 708043 - DNA, 148 bp, Homo sapiens
  misc_feature (27)..(27): n is a, c, g, or t
cgcaactactaagagctgcctgtgtangcagcttcaactagaatcaaaaggacagtcagaaatatccatactgctaacttaaggagtagcgaggcagagtaatccaaacactgcatccccttttcttatacatacaatagcctggcac

SEQ ID NO: 708044 - DNA, 368 bp, Homo sapiens
tgaggttcaatcgtaagcatgcctcatatctgctgtcctgctgacagattatacagtatctgggtcccatactttgcattgacgcatagcatatgtcgataggccatacaagcattatgccttcaaaatattgtcaagtattgcttcactaagaaatgagaacatcccaaatcttgatccgcctaagatgtgaaatgggcacttagttaagcaaactaacatcatgatatactggaaacaggtatctctttcctttacccttgtgcctgctgaggatcttattctcagccttgctgttttaaactcaggggtgtgtgtacaacatatttaagcaaattctggaataccaaagccaagcagtcttccag

SEQ ID NO: 708045 - DNA, 128 bp, Homo sapiens
attcgcggccgcgtcgaccgagctatttttatgtataaaatatttcggggagacagagtatgtgctctgaattttaactattgctacatagtgacagggatcatccatctggccctgctcagatgtta

SEQ ID NO: 708046 - DNA, 165 bp, Homo sapiens
  misc_feature (141)..(141): n is a, c, g, or t
atcgtggacgggttttccagcctttgggctttgcgcaaggaacgaacttcggaaggagctggaaaggtcagaagttagtgaaagaaggaggcacacaaagggcgaaggagccccatcccttctccgcccctaggagcgcanaggcaggaccgggagtcaggcggg

SEQ ID NO: 708047 - DNA, 677 bp, Homo sapiens
ggattgggctgaggaccaactagaaaaagtagagcttcgagtatttgatttttttttgagacggcatcttgctctgtctcccaggctggagtacagtggcacgatctcggccttgctgcaacctctgcattccaggagaatggcatgaacccaggaggcggagcttgccatgagccaatatgtcgccactggactccagcctgggttagcagagagaaagtcttgtctcaaaaaaaaaaaaaaaaaaaaaaaattaggggaagcagagggggtatcaaaaccccctcaaaagggggaagacgaccagaaaaccccccccaggatagaaacgcgaataaaagggcgccactttttattaaagcggtggctgggaattcacccagacttggagaagcccgcggcgtccgtgacaccgtcctacttgaagggttatgatcataccccaaattgtgggcgcgctctgggtgtggaagcgtgaacattggccaagaagccgtggggttcaacatattttgaacgccgtgtccattcgggagtaagatcttcacaagataccatattggcgcaaaggcattaattcccatgttgtatatatgcgggaggttcacatccctgggcaattataagttctcgcgtggcacagatgacggtgaactagcggacactgaattcgggac

SEQ ID NO: 708048 - DNA, 559 bp, Homo sapiens
  misc_feature (515)..(515): n is a, c, g, or t
gatctagaggatcccgctgcgcctactactacaacccaccggaagtgcagatcacctgaggtacaaagttcgagaccagccgggccaacacgatgaaactcccgtctctactaaaaatacaaaaattagccgggcgtggttgtgcacgcctgtaatcccagctactcgggaggctgacacaggagaatcgcctgaaccccagaggcagaggttgcagtgagcggggagattggcaccacggcactccaaccggggtaacagatagagactctgtcggaaaacaaaaaaaaaaacctacaacccaatttctgggtggtcctctccaactggttacaccaccaatatcatgcacacttggtcctaagcctcagttccggatctctggctctttccggtgagcggagtggcatgccagcagcctagtgccattctatcaatggtggggggaataaggtgctaattggccccaaggtggtctaggggagacctggggcccagtctgggatgtacagggntctgggaagggggcagccttgggggagaacccggctggaggggc

SEQ ID NO: 708049 - DNA, 474 bp, Homo sapiens
aatgtccagtgattggcctttgcttcttaatttattttaattttttacgtgtgccacttaataacgggcatttttaataaaatattgttacaaaaaatgtacagtactgacaccaccacaaatcatggaagataaaggagagtaggtgtgggtgggtgttttatgggtgtagaggggtaagattggaacagtattttcccattgactacttttcggtcgtgggggtagttgtaaaggggaggtgtaaagggcggggtggtacaagtcgaaggaggcgtggccggcgctggtagtggaggggtagctctccgtaatatgtatattttactcagttttcaacattttgtgaatgttgactacctgaagttcctttttagatgtgctattaacattctgttggattcagagggttccttgaaagttttatgtataaatatgtaaaataaaaattaaaactttgtttcatatcaaaaa

SEQ ID NO: 708050 - DNA, 743 bp, Homo sapiens
caacaaaaaaaacttacgctaggtacgaggctgggtttgggttgtggaaggggcagagctagtgttcgtgtgaaagggtgaagggcctgtgatgtgctgcgtgcggcgaggcgggcctgagagggtgctgtgcgtgcgtgctgtgcggtggctggggttccctgcgccgctggagtccctggccctgatgatgcctgctgtccactgttcctgcctcctgctccctgacgcacctggggctgccgacatgacgcccgatctgctcaacttcaagaagggatggatgtcgatcttggacgagcctggagatgcctccctccccctcgactcaccaaccagcctctacttcgcagtggaagaaacattggatatgtgctagacagattcaaggtcgtcaaatattacgaggagactccactgctgaggaggcagatgagctggatggtgagaatcgactctgcgtaccgtgcacaggagtgtcactgagtacagcggtacagcgcaacctatggcttccagatccacaccgaatggatgctgtctataccttgtcgtgccatgacctcatggcatccgggcggaactggatcgagagctctgatgaaagaaccgtacgtccgaacttcagccccagattgtcaccaagctctcggactctaacaaggagaacgcgctgaacagctacagcacccagaaggggcccccttgaaggcagggaaagcagcggggcggggatctgaggc

SEQ ID NO: 708051 - DNA, 374 bp, Homo sapiens
  misc_feature (138)..(138): n is a, c, g, or t
ccagagtgagagatagggacagtgtgacagcccagcgaggctgggtcgggggtcaccccaggatgttccaaccacatggggcagcatctcctccactccacatgctggccaatgggcacagtagctgcctgtatcgcnctgccaagggggtgtggctcaattgcttgctgccctagtgtcctagtatgggccctggggtgcctgagaacatgacagcaagcctcatggcgccgtgtcctcttgaggctttctctgatttccatcagatgagcgcctccctacagctctgcgtagggcctgggtccagtgcttgtcgttaaatgaatgaccacgatctaaacatggccggggctcccttgcttgactctccgatg

SEQ ID NO: 708052 - DNA, 123 bp, Homo sapiens
cagcatgcattcactgctggcggtcgacgtgtattcaccacggcggtgcatgccacccgtgtacaagttccgtcgacacgtgagcaccgtgcatgagctccaaatatcgttaagcgggagcct

SEQ ID NO: 708053 - DNA, 475 bp, Homo sapiens
cacagagaaagacaggctctgttatagtataagccagagcccactcttagaacctctcattgtacctttccatgtggaaatctatcctcaacggaaataacttctcagtgttctatcgagctattctactactcctcaaggattattcaggccccctcccttccctacacatcaagctcgaggatttgcccccacccaggactggcaaattagctttattcaacatgccctgagtaacaaaaactaaaatacctcttagtctaggtagacactttcactagataggtagaggcctttcctacacggtctgagaaggccaccgcagtcatttattcccttctgtcagacataattcctcagtttagccttcccacctctatacggtctgataacagaccagcctttattagtcaaatcagccaagcattttctcaggttcttagtattcagtgacagactaatggtctattaaaaa

SEQ ID NO: 708054 - DNA, 597 bp, Homo sapiens
  misc_feature (202)..(202): n is a, c, g, or t
  misc_feature (213)..(213): n is a, c, g, or t
  misc_feature (225)..(226): n is a, c, g, or t
  misc_feature (241)..(242): n is a, c, g, or t
  misc_feature (259)..(259): n is a, c, g, or t
  misc_feature (273)..(273): n is a, c, g, or t
  misc_feature (282)..(282): n is a, c, g, or t
  misc_feature (302)..(302): n is a, c, g, or t
  misc_feature (314)..(314): n is a, c, g, or t
  misc_feature (322)..(322): n is a, c, g, or t
  misc_feature (331)..(332): n is a, c, g, or t
  misc_feature (354)..(354): n is a, c, g, or t
tcatatgtctcgatcgttacagcatcactgagtcttagccagaaagacaacttctgccgagttgcctgaacctgtcctctgctttacgaagttgctcctttaaaaaacaagtatcttctttacttgagggtggtaggcaggaaagttctttgcagattttcccttttcagcccaaacattaactgcagccctgccaatctcnttctttgaaantgagtaatcacnngctttctttgttccnncatctaaattttttaanagtctggacctctngacataagncttggtattttctaatttcntgtattcttcanaatgtacncttataaanngttccttttcatctcttctctngtcttcaactgtacattcacagttgttctactttcatagttgtgcctctctatgagtttgtccctttaaacgtgtctaatatcggtttctttttcaacttgttttatgtgttactgacacaatatcttcctcaagctgatgggctttggatgtagcatcactgaacctcttcttaaactcttcattttccatttttaagctttgtgttacttcagtaagacccttttgttctgcttgcagctg

SEQ ID NO: 708055 - DNA, 905 bp, Homo sapiens
gcccctgacgcctgcgtagcgtcgcgagggccgcgagaaccgttcgcgcaggaaagagcgaactagtgttgggatggccaccaactgggggagcctcttgcaggataaacagcagctagaggagctggcacgtgcaggcctgtggacctgggccctggctgagcggagtacttagcttgaggacctcgacgatggagcccacttcctcggaggtggtgatgctatgcccctagttcagcgctctttcccctcactggtccccattgccctggtgtacgctaagcttatgctgtgctgatggacttcaacctgctagtggatgctgtcaggccgagaacgctgccttcctggagacaaactctattgccatcaccagtcaaacaggatgactttaccgctcgtctctttgacatccacaagcaagtcctaaaacgagggcattgcccaggtaaccattcccagtccctactccggtctgtcacctgtccctcccagtctctgtctcgttagtctgttgtagcttgagagaactttggtccaggcccgtcagctcatgggaatctgcctctcactggtcctcactgtggttcatcccagtgtaccaattctaggatgaccagcacagaattattccactgggctcgggagtcgtctgctgggtacctctaatctctgtgtagagttcatggtcacctgtgtgctctgtggctaggtcctacaagtcagtccctgggcaggtactgacaggcgtacaggtgttccccacagactgtgtacctggtgcctgaatcgatcagaactacttgttccaagcgcagcgcaatatggctccacaggcactgtaaaaaagatcgaaatcaacacaatctctgacagactctgggggcctggcactacgtgagcca

SEQ ID NO: 708056 - DNA, 323 bp, Homo sapiens
gtattctgaagacaaggaagaaccaaggatggccaaagaatagcattaacatgtgaagaaaacaaggtgagcagagatgattctggcgctggaatctcctatcccaacattaacgtgtcatcgtttcagacaaacctacagatattccctgacccactgacacacagtaagctgtacattctctaacggactttagtgtgacaactgctgtgtcaactgtatgttcaccatattataaaacaacagcactctgaccaggcacaatggctcacgcctgtaatcgcagcattttgggaggccaaggagggtggatggtggtatag

SEQ ID NO: 708057 - DNA, 923 bp, Homo sapiens
  misc_feature (42)..(42): n is a, c, g, or t
  misc_feature (47)..(47): n is a, c, g, or t
  misc_feature (60)..(60): n is a, c, g, or t
tcattacctcgttacaccaaaaagaaaaaccttcctaagatngacgnacagaagagctgncgggaagaactctgtctgaggaaaagaatccacagctctaccctaagttctagcccagacttctactactcaaaagcggccccgcgaaggggaagccgagggtgccgagaccacaaagcgcccagctgtgtgcgctgatgcgttgcgaactccgcggtttgaacaccaaagacatgtaccttctttcactctgtcatatttcttttttttgagactgtatctttatagactcgattccaactatcggaataactcgctctatcacagcacactgatgcacaattaaaaccctgatggaacctgtccctccctaatcgcccgtcccccccaatacccacatattgccactaaccattcactcccccccatcccaacaacatcaaatcaccatctccattacacgcccatcctaccctacatcacctcctcccccccctccttcgcatcctatcatccctaccactacccaactcccctaccgtcccctctccctctccacaccacttccctccgttacatactcccacaaccgaattatctaaatcgacctccaccataacccccacaccaccacactcacctcctctcccacactccctgccctctacaatcactacacgttcttgccccccatacacacaaataccactcatatccttctaaacctcttctttaatactaattcagtttaccccctactcctattgtaaggcctcctcacacccctccccagtgtatacccttcatattcacccctataatctccctcagctacccacctacacccccctccacccacaccttctcctcgtcactccaccacacaccacataccatattcgccacattattttactctcatt

SEQ ID NO: 708058 - DNA, 430 bp, Homo sapiens
catcgatctcggtacccgtcagacgctgaactatgtgcttattacatcaacctcacctacacaggtattctcatgttcaaatttcagaacaactgaaggcaaatgtgacctttggattttcttaacattatttccctctatcctcgcaaataaatgtagcctgacaataactgacctttttttgtatttttagtagagacggggtttcaccgttttagccgggatggtctcgatctcctgacctcgtgatccgcccgcctcggcctcccaaagtgctgggattacaggcatgagccaccacacacagccctaagtctatgtttagatgtctggggaactgcctgactgttttccaaagtggctgcactattttaaattcctaccagcagtgtgtaaggataatgatttctccacatagttcagcgtctga

SEQ ID NO: 708059 - DNA, 115 bp, Homo sapiens
gttaagaaactgtcattctgtaagagtggccaataatgttagttttatttatcaatttacagaatgacagtttcttttctaacataatattctcattaaattaaagaaaccccat

SEQ ID NO: 708060 - DNA, 127 bp, Homo sapiens
  misc_feature (111)..(111): n is a, c, g, or t
tggctgagataacagaagctgtcagctcacgatgctgagatgtgcggtaaaaactactatgaagtcacaaggactcttgaaggtgtcagaagtggaagaaactggagcttncttagagttgagagaa

SEQ ID NO: 708061 - DNA, 216 bp, Homo sapiens
gtcttgtgatgtaattattatacgaatgggggcttcaatcgggagtactactcgattgtcaacggcaacgagtcacatgacgatgggcatgaaaccgcggtttgcttcacagattcacaagcattgaccgtcctgtctccccggtggggtaacgcgttacgcagcctgccttaaacactcaggctacgccttggcaggaaagggctacccggtgac

SEQ ID NO: 708062 - DNA, 1149 bp, Homo sapiens
ggtgtgaactcgaaccctgcctgctgtctgaccgctggcgtgtggctggggatgctgagagtgttgcctgctggagtgccgtgccttcgtgtgctcccatgtgactgtgtgctgcctgctgtcccgtgcacatgccctgcctgcagatgcatgatgtgaatgaacctgatgcttggaactgtctgtttgcatgtggtgcccctctgtgccatgtggccctgtgcccatgcccctgactcctttcttggtgccctcccagtgatgtacatccccatgatccctgtgtgtcgactggatgtccctgctgggcttgaggcaacaatggcactgtcacgtgtgcccatgtcttggtgcccaatgccccagtgcagtgtgcccatcgcttgtgcccactgtcgaagtgcacttccctgtgctggcgtggctctgtggcttcacacacctgccgagtgccaaggccctggctgcccttgccctgccctgagtgtggcctgtcgctttcgccatgcccccttcttagcactgcacctgccaggtccatgctgctgccaccccagacctgggctttgcctgccacctctgtgggcagagcttccgaggctgggtgggcctggttctgcatctgcgggcccattcagcttgcaaagcggcccatctgcttgtcccaaatgcgagatacgcttctggcgacgaaaagcagcttcgagctcatctgcgggcggtgccacctcctgcccggaggcccggaccttcatattgcggccactgtggcggagctttgccagtggacagctagttgcccacaagcggtgaagtaagctatgcctgacgcaggccgagccaggtctggggcccgtgcatgtgcgccatggtaccgcccccgggccggtgagaatcgtctacgcccctatcccactgagtccgttatgtaggtacacgggtcctggagacacttcccactgtagtcggctcccggcgcggagaacaccgtggagtactgctcacgaaagtccccgaatctggaagcgctcccacacagcgcacttggtcgccacggccccaccgtagaacgccccacagaagtagggagccttctagcaccgtagtttagactacgtccgctcgagcccggcgagcctactctctgct

SEQ ID NO: 708063 - DNA, 951 bp, Homo sapiens
aattctctactatgatccagctggccctccattcctgcttcctgtgacctgtgaatgtagactgtaccctcattggaatccttggtgcctcgtcctcatgtgcatggatatcacgacacagtagagaaaaagcggcgaatgggaatacgcactgtttgagaagatgctacgaggatggaggtgtggagttacgactagatttgatgcatatttagggatggagtctgaatcagtgaatcattgaatgtaggacagactagggagagttcttgtgccaagatcagacatggtatatgcaagaataaatgtgtgcgtgaatcaaaccagaggttgtgttatttcttaatactatatgtattcttgctaacctgactaatccagccagcaaccttacaattctaattatctgactgtagatcctcccaggtgtgtctattgtacataaatgtgtcctcacttgtgaaaaagctaatatctttgtttcttttttttccaatcatgtcaattaatttgtggttattgggttatttatgcactgaattgttgaatggaagaaatattggtgaaaaatattttactgtgttttgattcgaaggacaagctcttaaaattactattaaagtggagttattatgtgcaagttttataaactaaggacattacttgtgtcattctattaagatcttgtcaagttggtcatgcctggtattgacataatttactaatatttaatccttgaataaaattgtgtttgttaatttttatcaaacataaatggtggtttcaatgcactcgattgatgggggggtatttaacccgtggttgtttacttaaggagcacacagtagggaaatgggacaacacaacgcagataacaacagaagggggttgagaatacaagggagaaagaggggtgttatggagagcacagcacaaaacaaaaaatattgg

SEQ ID NO: 708064 - DNA, 395 bp, Homo sapiens
cctatccggtccggggttgagaactgatgtgtgactgatatgactgcctttttatgcgagagggcactggggctttaaaccatgccgcgtcggggcctgcgaaacagctgccctgctccagaggctggagtggaaaggtctcgcggcgagagagacaggagttaggccgttgctcacagacctcagaagcgatcatgagacttgaaacagagctcagcagcacaaatggttccagacacacggctttagtaactgatcacctaaagcagaacctgcctcaccgcggcagtctctgtgcccccattcagaccaccagctgctaagcgacaccccgagaataaccaacatcgtgccctttctgaggaccctgaaacaccaagcccctctgcaggatg

SEQ ID NO: 708065 - DNA, 386 bp, Homo sapiens
  misc_feature (22)..(22): n is a, c, g, or t
  misc_feature (39)..(39): n is a, c, g, or t
  misc_feature (51)..(51): n is a, c, g, or t
  misc_feature (172)..(172): n is a, c, g, or t
  misc_feature (191)..(192): n is a, c, g, or t
  misc_feature (222)..(226): n is a, c, g, or t
  misc_feature (232)..(233): n is a, c, g, or t
  misc_feature (243)..(244): n is a, c, g, or t
gtccacatgcctccgtccctgncgtatggcgccacctcntctggcagaagntggattttggccccacctcgtcggcaggaacaggagtagatccagaagggttgggaacctaacctgagctcagtccagttcaccccgtcacgctccaaagcctggtgggtctccagacacngccaggcccctcaggacgnntggagcctggaggagacagccacggggtgnnnnnctgggnntgaccccacnntggtgggcagcagggctgcccggcaggcttggtggactctgctggcagcaaataaagagatgacggcagcctggctcctgtctgccttgcgtgtgtgtgtgtgcctctttgggccatggtggttaggccttgtgggcattct

SEQ ID NO: 708066 - DNA, 161 bp, Homo sapiens
acttagagggtagagctaaagagtcagctgctctgctgtctgaccaaagtcccctttgagctgcgggagatcagacgaagcatcaggctgataatgtggaaagctctctggcccattaggaggtggcatggtagtatagaaagggaacctcaggcttcaga

SEQ ID NO: 708067 - DNA, 252 bp, Homo sapiens
atgtgtacctgaaactgacatagaggaggagaattgttgaacctgggaggcggaggttgatgtgagcctgagatcgcaccgctgcactccagcctggtgacgaagcaatgactccgtctcaaaaaaaaaaaaaaaaaaaaaaaaaaaaaattaagtttcggtttaagggcctcttttgaaaaaattggctgggaaatttggcttttctcgagagggcgggtctggaggagggcctaagaggagcggggactg

SEQ ID NO: 708068 - DNA, 817 bp, Homo sapiens
acgtcttcacctgctggagatctgctgcccctgtggcaggtcccctgtttcctcacttgcggctcttcgaatgtgctctgtggtgagtgccctgatgttgtgggctggctgctctagtgtgaatgggaccatgtgagctcctgaactacccctcagcatgaaatgtgtgttgtgtggcatgtggcctgctggcaattggagaccctggtgtggggtgggatggagaatggactggtcctggaatggtgaccttttgacatgcatgacccgtacaacctgcttgcccttccctgtcacctttccacgcacaccaatgcacaaaccgtccagaggatccgtcaccaggaatggccactgaagcaataatcagtcttatctagagtagaaaaacaaacttcagcataagagttggtagagggtaatcaatcatacatcatgacttaggataatcaataccatgaatgatagtatggtgctttggaatgttgatgaataacgcgaggggaaggatagaaaggttaggatagtggggagatatacaacgaaaagaggagatgccaaagaaaggtcgcttcttcgtgcagtgacccatggatgtgtggcagagaaacaatccaccacttggacagaaacttggaaagaaaaatggaataagtgagaacaagtaatataacatacaaataagatgtgacaaagtggaaagtggatgaaaggtaatgagaaggaagcaagagctaatagaaataatagtagaagagtaaaagaatgtaggaagaagtaaagagaataagggaaaaaaataaaacagaataaagga

SEQ ID NO: 708069 - DNA, 173 bp, Homo sapiens
aaagacgacatgctggtggcaggacataggacagcaatggttgtatcaactatgaagcgtctgtgaggcgtatcctgtcggggtgacgggcccatgtgggcggagctcgtccgcatggtgctgaatggttgatgaccttcccagtctccccagattccgtgcctttccctgtg

SEQ ID NO: 708070 - DNA, 705 bp, Homo sapiens
  misc_feature (218)..(218): n is a, c, g, or t
agtggggatgtgtatatgcaggcctgaaaagtgatggagggtggggtgggaacaatggttgtgaattgatgatgcggaggatgaagtgctctgcgcgatgcacgactgctggggtccagcactgggtggcagacgagttggcattctgtctattacacatcaagtaaactaagtccccaatgacttatgtgacctgacactacactataaagctcggntcagagttgctggctgccctgcgtcctgtggatccgagaacacgtcgtcgaaggaagtaggtccgtgtgatatgcgtctctgctactgttggggaatatgggtggtgcgtagtgagggcgaggtaacgacatactgatggcaaagtcttgtgatgacatgtagcagagtctcctgtctcactcgcaaaatcatggaagtggtttaacagtttttggttgactaagctaatgtaaaattcaggtattagaaaatttatggtctcaggtggtccataggcatcttgtgcatgagggaaagcagaagtttacctgaagtgatactgcatattgttgggtgcatgcattcccatagatttttagcatctcgccaccaagtcttccccaatttcctttgaactaaacctgtgagaaaaaacccgggacaacatgacaaagagggaaataccatgggaacaccgtgattctcaggcggcaggccgaaattcga

SEQ ID NO: 708071 - DNA, 154 bp, Homo sapiens
cacacgctagtcatcgtagtgtcaggtacattggtggccaattgatttgatggttagggagggatcgttgacctcgtcatgttatgtaaaggcatgctgtatcggatgggagggcgatgagtgactactgattgagcttggtgtgtggtgtgta

SEQ ID NO: 708072 - DNA, 578 bp, Homo sapiens
  misc_feature (575)..(575): n is a, c, g, or t
gtgggttgaccgtggctttgtgcttgttaaacctggtatttctactgatacagtatttgtgtaggtttctcagagtgttcagtttgatatactctaaaatagtaagcaatgcttttttttctcagggtgtcaatattgagaaccaggtagatccccaccacctacagtaaaaaggaccctaaagtaaattggttgaagaaattagatcccaaagattcttggtgaattttgaagtcttcatcagtatatccatattaaaacgagatgccagaagccaaagtaattatgggctgccaggccaactggatcagtttcattaaaaagggcaaacttgaagataaatcttttgaccccagctctttagaggatttaaagtgcccttgatggccagtggaagaaatcccaacatggaattcctcgaataccaatttattgcctttaaataattttgtttaatgctacataaacccaattaaaaaccctttcccctatttttaaaaagtcagcatgtatttttggctcgaagtttttctagtgttttttgtggaaggaataaaaatttgagtttcagttgngta

SEQ ID NO: 708073 - DNA, 759 bp, Homo sapiens
aagatgctgaggaatgggtccagcagctgaaattcatattacaagacatgggatctgacgttattcccgaggatgaagatgaaaaaggggacttatatgatgatgttgatcatcctgttccggtcagcagcccacaaaggagccaaccaatagatgatgaaatttatgaggaacttccagaggaggaagaggacaccgcttcagtgaagatggacgaacaagggaaggggagtcgggacagtgtacagcatccctcaggagataaaagcaccgattatgctaatttttaccaggcttgtgggactgcactggatctctttctgatgagttgtcctttaagcgtggtgatgtgatttacattcttagcaaggaatacaatagatatggctggtgggtaggagaaatgcagggagccattggcttggtgcctaaagcctacctaatggagatgtatgatatttgagagtctgggcagaaataaatcaacatttctactgaagaaaacaaaacttaaatgtagctttccccttttgctggcacagaagtctgtccatctgcaagcgctttggaacacagactgcctggagccaccttcctttgggagaccttcctgcctcagctgtcgtcctgtgtcgtcattcactaaagctcctgacgtcagattaagcaagcagttgatgggttacattagagacaagccgcagagataaggcctgttgctgtttccgcagatgatgatgaagttttaatttacccacg

SEQ ID NO: 708074 - DNA, 237 bp, Homo sapiens
ggtagcaaaaaaaaaatcataatggtgatgcaaaccggctacatctacaatggaaggtgatacataaattatatagatcacaagtttcctttatatactattaaaaacccaattatattggataaatatgtccagaggacaacatgggttcttaatgggatgggctggagtccaaatatgcaaaatatagcttctgggttttggaccatggtggctatggaaacttctaaaacaagg

SEQ ID NO: 708075 - DNA, 100 bp, Homo sapiens
gttcgcgtatcataagtggagtcgtaaagaggtatctttactataaaagctattgtgtacgctcgtcatattcagttgttggctcaggagttttgatagt

SEQ ID NO: 708076 - DNA, 1012 bp, Homo sapiens
gggctttcaaggtggaaggtgcgcagtttgtgctctgtggagtgagtgtctgctggacgagaacagcatgctgatccccatctgctgtgggtggtgccctgtgcgtgtggctggtcctcatctgtcctcatcgcctacctctgtcggcagtgaagaggagtcacgcaggctaccagactatctagcctggtgcacgcagtgcacagacagctgcagtgggcctactgttcctttactctgaggcttagggtcctagtcgaacggggaggcacactttcttggcaaacgtctctcaaatctgcttcatccaatgtgaccgttcatcttgcagcatattactatgcacaacagagtaactatcgaaatgactggtgtaaatttatgctaactgggttcacactattattgctaactgcgttcaacacattcaatcatctacccaaagtacgcgcatttcgagcggtgcgttggtgctctctctgcacgccgctgacgggatgccgctctctctcgactgtgctgacagcttcctacctccctcactaacgacaataaaaaataaagctctatctacagaaaatatagcaacaatctcaacaataacataaaaaacacattacatccacaataacacatcaatacaacaaaaacaacaatccatacaatacccacccaactatgactactttacattcaaaaaaaccacataagcaaaacaaaatccaaaccaaactccaccatcaacactatcaacacaaaacaacgcacacaccacccatacactacaagacacatccaaatcaaacatataaaagaacaacacacaaacaacatatcaatttaacaaacaaaatacaaaaaaacacaaaaacagaacaaactacaggagaaataatactaaaaagagcaacaccaggcgcatggagaacacagcacacgcgagcaaaataaagcgaacaacaggcaagagagaaacaaagcggcagcaacacccacaaaaggcaaaccaacg

SEQ ID NO: 708077 - DNA, 219 bp, Homo sapiens
  misc_feature (10)..(11): n is a, c, g, or t
  misc_feature (17)..(17): n is a, c, g, or t
  misc_feature (34)..(34): n is a, c, g, or t
  misc_feature (36)..(36): n is a, c, g, or t
  misc_feature (74)..(74): n is a, c, g, or t
  misc_feature (93)..(93): n is a, c, g, or t
  misc_feature (124)..(125): n is a, c, g, or t
  misc_feature (128)..(128): n is a, c, g, or t
  misc_feature (133)..(133): n is a, c, g, or t
  misc_feature (144)..(144): n is a, c, g, or t
  misc_feature (150)..(150): n is a, c, g, or t
  misc_feature (219)..(219): n is a, c, g, or t
aaaaggggcnnaaaaanacctcaccccacagaantncttgtgaagatttttagatttagggcataataataggntcaacacagaaacctgatnactaatgaacacccagattaacatcaactannaantttgntttctagtacntatttncatacatgtaaatttaataaatactactttatcttatgtatgatgataataaaaaagttctagaatttn

SEQ ID NO: 708078 - DNA, 1571 bp, Homo sapiens
gcagtgtcgtcggcccaggtgttgggtcgactcggggagggactgggtgttgacctgggtccggggaacaggtaacacttaaggatcttgtgactttttgtcagaggtctgcatggaataggagtgtgtacgatgcgtggtgatgtaggcgatctcttctggacatgaaaatgtccccatatcattaatgcagttggtctctgaatgaaagagtgagagccgcattggggcaaggtagccctgtgtcctcatgaaaagactgaacgccatggactattagcgatctctatggcgaaccgagtgtacctattagcagttgggtcgtctaattgctcttggaaggctcgggacactggagtgccttgtgtatgcgtactccaatggccatggttctatatacagtcctgatgcgtgtcagctagttactgtgtcacggcctacaaagaatcttggttcaatgttcctgtaaatatagtaaacgttcacacagagcatcaacggtgcctaaagtggtaaaaatacctgggccaaacgccctgaatcctgcctaaggcacgtgcaccatccacatctggtgagtcgacacgctcttctctgggtaagagacgtaacatcccactgatttgggcacaatatgtttaccgggggaaagctgtgagtgattgaaccgtgcgtgacatgcgggaaacgagttccaataattctttgtataataattaaacccacggattaaaatggctatgccaaggtgtgaaatatacccaaggggacaccatccactacttcatgagtggcattggcgtaccaacgggtttacggtcccagggcgaccaggattctggtttggactcgcttggcatggccaacattgacctagtgtgggtttcaaccccgggtctgtcccacacgggtggtccgtgggaacacatgacttcggcggggcacttttggtcacatcgggaccaacgggccattggacataaccgccgaatttgggtccaaaaaacacgataaatagaggtcccacaccaagtgtaggaacgcgttggtgagggaccttggtgtgcgccacccttgggtggaacactttgggtggcaacaacgtctttggaggccatgggtggaacatcaatcacattgggccttggtgagacagcgaattctgcgtgaagccactttttctctatcggaacgagacactttgggccattctgtagaagagtttgtgtggcacagctaacacacgagcatcgcgaacacacaacccctctatggagaaacggggcgcagagcaaccggggacgcaagaagcaacgggccagaagacggcgaaccaacttagcaaaaagcgagccaacaaatagaggcccgcgagcaacactcactcactcacaaatataccaccgcgagcgacgaggcacagccaaccagtatgatcgatagacacgtagtcaaacgagcgcggtactgaatacaaagcacactagacgaacgcgacaaccccacgaagcacaacccgcacaaacacataagacaacaccgcggaaccaccaacaccatagtacagcgtc

SEQ ID NO: 708079 - DNA, 167 bp, Homo sapiens
aaccagttcctctgggtgcctcccacttgctagagtttacgtgagatgttgatctgtgcttcctggatttgacttttaaaggagttatcctggcagcacatgtagtattcttggatgatcttgctgctcttatttctcctttggtgtgtgtgtgtgtgtgtgtgtgg

SEQ ID NO: 708080 - DNA, 453 bp, Homo sapiens
  misc_feature (2)..(2): n is a, c, g, or t
  misc_feature (25)..(25): n is a, c, g, or t
  misc_feature (33)..(33): n is a, c, g, or t
  misc_feature (35)..(35): n is a, c, g, or t
  misc_feature (39)..(39): n is a, c, g, or t
  misc_feature (46)..(46): n is a, c, g, or t
  misc_feature (48)..(48): n is a, c, g, or t
  misc_feature (50)..(50): n is a, c, g, or t
  misc_feature (59)..(59): n is a, c, g, or t
  misc_feature (63)..(63): n is a, c, g, or t
  misc_feature (65)..(66): n is a, c, g, or t
  misc_feature (69)..(69): n is a, c, g, or t
  misc_feature (72)..(72): n is a, c, g, or t
  misc_feature (79)..(79): n is a, c, g, or t
  misc_feature (92)..(92): n is a, c, g, or t
  misc_feature (106)..(106): n is a, c, g, or t
  misc_feature (111)..(111): n is a, c, g, or t
  misc_feature (119)..(119): n is a, c, g, or t
  misc_feature (122)..(122): n is a, c, g, or t
  misc_feature (124)..(124): n is a, c, g, or t
  misc_feature (128)..(128): n is a, c, g, or t
  misc_feature (130)..(132): n is a, c, g, or t
  misc_feature (147)..(147): n is a, c, g, or t
  misc_feature (150)..(151): n is a, c, g, or t
  misc_feature (153)..(153): n is a, c, g, or t
  misc_feature (163)..(163): n is a, c, g, or t
  misc_feature (177)..(177): n is a, c, g, or t
  misc_feature (180)..(180): n is a, c, g, or t
  misc_feature (183)..(183): n is a, c, g, or t
  misc_feature (189)..(189): n is a, c, g, or t
  misc_feature (192)..(193): n is a, c, g, or t
  misc_feature (196)..(197): n is a, c, g, or t
  misc_feature (200)..(200): n is a, c, g, or t
  misc_feature (202)..(202): n is a, c, g, or t
  misc_feature (207)..(207): n is a, c, g, or t
  misc_feature (212)..(212): n is a, c, g, or t
  misc_feature (215)..(215): n is a, c, g, or t
  misc_feature (221)..(221): n is a, c, g, or t
  misc_feature (223)..(227): n is a, c, g, or t
  misc_feature (229)..(237): n is a, c, g, or t
  misc_feature (244)..(244): n is a, c, g, or t
  misc_feature (246)..(247): n is a, c, g, or t
  misc_feature (255)..(255): n is a, c, g, or t
  misc_feature (259)..(259): n is a, c, g, or t
  misc_feature (262)..(262): n is a, c, g, or t
  misc_feature (269)..(269): n is a, c, g, or t
  misc_feature (283)..(283): n is a, c, g, or t
  misc_feature (285)..(285): n is a, c, g, or t
  misc_feature (289)..(289): n is a, c, g, or t
  misc_feature (292)..(292): n is a, c, g, or t
  misc_feature (304)..(304): n is a, c, g, or t
  misc_feature (314)..(315): n is a, c, g, or t
  misc_feature (326)..(326): n is a, c, g, or t
  misc_feature (352)..(352): n is a, c, g, or t
  misc_feature (358)..(358): n is a, c, g, or t
  misc_feature (451)..(451): n is a, c, g, or t
tnaaaaaaaaaaaaaaatttatttnaaaaaggntnagtnaaaaatntntntgccaaaanaaangnnggntgngggaaantttcatttcaaantgtatgaagggggnggggnaagggggnccncncctntnnncccccccctttgtgnggnngngggggggggntccccccgagggcnggnganaccggnccnnccnnccngncgaanccccntcncccccnannnnncnnnnnnnnnccccttntnntttggggncccnttnacccccnccccccgggggggngngggnggngaatcgctttancccggggggnngaggttgccgnccccccccccccccccccccctgggngccccnccccccctccccccccccccccccccccccccccccccccccccccgtggcttctttctcctttttcccttctttgggcctttttcccttctncc

SEQ ID NO: 708081 - DNA, 1631 bp, Homo sapiens
agctagtctgcaagggagcccctagacccctggcagacatagctagcttcagtagcccctatatctactactactagctagataggatagtatgatagcactaggaggtctatttagactagacccttagcataggcagcctgctaggaggaggagagagctctagctaggcatagagccacagttatcttgactaggaggccatacaaccctactaatggtatgagagccatatagttctagagccctagacatagtagctatagggcactaggtaggtgccttgggcctatctagcagagtaggcctacctagccctagatacagggcaccactaccaccgacttatcctagggacctactacagattagcacaacagcagccacaaaccaagtgcagtatcaacatcatagcacacagattaagcacagcccttaggcaataatcgcaggctatataacatagcatgtaatatcccacctgtaatcagcatcagggcataccatggcacagccagctagcataggatgggctatgcggcacataccagtaggagagcccaaacgcgtgtatactactaagtactcctaggtattcaacataggtaggaataaagggatacaaccacgtcagtactatatacactaggctagaatagccctatgctaaagagcgagtaactagtagaggataaaagacagctagggcacagcaagggaccacgtcgatggccatggaaactggatacaccccaggacataacgcgacacctacacgcacacgaggcccctagctgagatcccctacgaccataggtagttcgccaccggtgaatagcgaccaacgtacgagaaaggacacaagcacacatgaacaacccaagcctaccggatgtaatcgcccaaaagctatggtaccacgtaggcataggctcatacaaggacagaccagatgaatccacgagcacactagctagacacacaatagtgcaaatgactgcaacaaataaaacatgacattaccatactaggagaacccctactaatcaaacaactactacacgtattataggcgacatgagtacacacagacgataccgtataggagaactacagtggacagtcaccgtgcagctcgaaaagcgggagagaggtcgagtatccacgaacagcgcgactcaacagcgagagagatactacacaatagaaaatcgcaatcgactagaaagtcgaacattatacgaccatctcataacacatctagatacaccccgatgagaacccacatcaccccacgctatcaacatacaatacgagtaagacagaccgaactgacaccaccatataaccagcactagacgtcactgagcgaacaaccatgacctcaccccactcgtcgctcgaccacactagtcagacatacaacacaaactgctcaccagccccaacgcactcagcacaattactcgccacgatacatcgaacatccaaccaatacatacctacatcatccactagctacacctcaacaacacacgcacgctacgtcccacatagccagtccttcatcatctatccaaccactcacaaccacatcaacgcaacctcactaccaccccacgcaaccagcc

SEQ ID NO: 708082 - DNA, 155 bp, Homo sapiens
gacgctctctcggtggggcacagggatatagggtacaggcatagagtagataaggatcaggttaggttaggatatccatcacttcgagtattaaccaggtgtgagggaaccatttcaaagccttttctacgctatttggaaactatacaactaca

SEQ ID NO: 708083 - DNA, 1038 bp, Homo sapiens
ggcgccgagcgatggtgcatctctcgggacaactggcacaatgctgcctgcaaaacctgtgtggtgcaagatgaaatgccctaccacaatgaatgcgtgaatgtatgatgtttgtggtgctgcccatgctgccacacaccaatgatttgtgccccctgacctgctatccatcacatgatcctgtgttgctgtgtggcatgtgtacacacagcacacatcacctgatgcaccttgcagtgtttgtgactgttggcgtgacattatcatccctgtgtgttgctccaagcagttgtattgtcacatcctgtcacacaaccaatgtgaatccatcagacatagtttgtactaccaaattggcaatcatagatacactgactgcttgggtatctgataccaatgaaccacttgggtgacacgaactttgccatcgttgactcactctgagcaatgacgaacaccactggtagcctgaccatgttgtgtcactgcaggtcctcaccgtcattgctgacttgcaccccttgtgtgacctggccaaaggcaacacgtggacatgcccaaatggctatgaactaccgttgcagtgcacagcacaggaagcatttcttaaagaccgacacaacacagcggaattcgtcacgacacagacacatctcgcatgcacagcacaaatcattgcattgcacaaagctgcacacataacagacaaagtcgcccgagagcaaatccaaggcccagactcatcccattgagcatgtgcaagcccagatatcccgagaccaagaggtgcagaaacaggcatttcattcttgccaggtttgacacattcatggcgttatacaaaatggggcccagcgggaacacaaggtgatggttggcggcaccacgaatgccaagcaatttgggccatacacttggttcggcattaagaatgaggcgaccacacacaggaatgattataggggagagttgtcccttaaattcccgttacagagggaaagacaaaataccacaaggtggccccccaggacgagagaa

SEQ ID NO: 708084 - DNA, 367 bp, Homo sapiens
cgtcgacgttagttaccagagagacgagacagaaggttagttaccagagagacgacagaaggttagttaccagagagacacgacagaaggttagttaccagagagacgacagaaggttagttaccagagagacgcgatagaaggttagttaccagagagacgcgatagaaggttagttttatacaatgacgtaggttagactaatacaatgacgtaggttagactaatacaatgatgtaggttagttttatacaatgatgtaggttagactaatacaatgacgtaggttagttttatacaatgatgtaggttagactaatccaatgacggtcgacgcgcccgcgaatttagtagtagtagtaggcgg

SEQ ID NO: 708085 - DNA, 153 bp, Homo sapiens
cgatattgcttacaatgcgagatatagtttaccaggtccacatctgtatttcgaccgtcgtgagacagtaaatggacagtgtttagctgtccattcccgtacatcttgtaaacagtttctttctttgtgcttcaatctagaatgtatcgttgt

SEQ ID NO: 708086 - DNA, 361 bp, Homo sapiens
agtatgcctctgcactgtgaattacatgtgccttctggtgggccagtagccatttccccttcacagtgggactaaagacacttggcatctctcatctggcacatcattccaagaggggctgttgttctcaaggaagagcacttggaagaatgaatgaatccatataaatccatgactgattgaacgctcaccctgtgccaggcactgggaacacagtggtcgacaggcagatgaagcccttgttcttgtggagactccatttctattaggaagacatggacaataaataatacatattgggtattagatgaaagtcagcttccagactcttgctgagcatgactacaaaaggtgagagaaa

SEQ ID NO: 708087 - DNA, 736 bp, Homo sapiens
tgagcggatcgggggtccggagcctgtctgcggctgctaaggcgctcggcgcctgtgttgctgtggctggccaaggctgtgagtccctgccgcggaccggggcagggcaggcgggggacagaggctggaggtaggagcgggacggtccccagcgggtccgagcggagcgggcagccgggtaccccggcgcgcatgccacggggatcgggaaggggctgggagagccctggaccggtgcaaggcggaagccagcggagttgtcactcggagtgaggcccatggtggatcgcttcggtccatatagccacgtgtcccaacagtgttgcaacacagggaacccccgaggtggtccacattccactggttgcacggacaccaagacgggaatctggctaaaagtatccaggcatttcccattgtcatggctcaaggaaatcccaggtagttggcattcactgacctttgaatgccagtggatgggtaaagcccatgcacggggcgccggcttttgccgaggccttgccaaattacgggcccgatattccggaacgtgcaacgacatgtttgtggagtaacccgagggcagttgttggtttaccccaacaggccgtggattcgacaataaccaagggcatcacaccacccgatgtgtatcaccagatgcaagtgttacagaagcagacggtgtggccccccaagtggttgcgtcccccacatacgggtggccgtgaatccc

SEQ ID NO: 708088 - DNA, 358 bp, Homo sapiens
gtgttgacatgacgagacaacatgcacacaggctagccagcctgtggccatgatggctcgaggggcccagtgggctcaggcacccgtccccacacgagggccccttgtgttggcctggccctgctttctactgccaatgttttgccagctccatgttctcccaaataccgttgatgtgaattattttaaagtgcaaaactgtgctctttattttaaaaaacactgataatcacactgcggtaggtcattcttttgccacatccctatagaccactgggtttggcaaaactcaggcagaagtggagacctttctagacatcattgtcagccttgctacttgaaggtacaccccgtcggg

SEQ ID NO: 708089 - DNA, 337 bp, Homo sapiens
gccccttatagaacccccgaccgtgtacacacacacacacacacacacacacacacacacacacgctctatatttacagggcttatctgctgaagctacttgcacgggcagagatgaattctgaaatgcctagcacactgtcaggaacacaacagctagtcaaaggtgtgtggctggttggatgtgagagaaaatagctgcatacgatagaaaagcttacgcctagatgatgtgtatgtcaatcaaaaccaactaaggaagaataagttttaaaagaagattatctgggtataacagagctcggctatagggcaagttacttgggaagctgaggttg

SEQ ID NO: 708090 - DNA, 1090 bp, Homo sapiens
tccagtgattggcatggcagaaggctagtggactacgcagtgtatactccagtgcaatggacctttttcctctggtgagaccagcctggaaggcagtggggctggaaaatgctgacgcctgtagtgtcactagctccaacagcctgggttttggtggtcatttgggtcacgtgtgccagtgcctccctcttgcctatgttgttatggtatcatgcgtgtgctctgggtgcttatctagggcagcatgtcggcctgatttgagcccacgtgcatgggtaacagctccttgcccctggctagtaagtaatctccaggtctggaggtggccctgggtatgactggaggaagtcctgtatcccttctgactccagcctcctattattgcaactgtttccttgtcacctgcctggcccaacgtccttattctggtttattaatgagacacataaatctgatccccactaatctccactggcaacgctggccaggaacgggaagcctgccagaaggcttcagctcttttcagggcagaatggttcagacactgggcgacttgggacgattgtgggtgacggcaggggactacacagtgagacttccttgggacgggtccggggactctttggctggggtgaccgttcgcttactctccctccgattccagatcttcctggactccaaatgacctaagtgagagggcagtgtcttggaatccctcctcattcctggacttcatcctaagtgtgaaggaatggaacaacttgagcttggtccccctgcgacagcttcttggagacaatcccaaggtcctcgcctattgcaattccccctatggcacatggacccctcgaagttaagctctcgttggcccacgaacgtacgtcttatgactagtgaaactgatgctgtgggtaaaggtcattggggcccacattcaagctttggggacctcacggcctaggccgacagttatgtgctcaccagagaacccttgtcgcctggtgcctgtgacttgaactcacaatctgggcggcgtctacgaggcgaccacagtgtaactatgagcgtgctttgtacccccgcgccggtg

SEQ ID NO: 708091 - DNA, 185 bp, Homo sapiens
cacacatatctgtcctggaggtactgtgtgataatactgagaggaaatggcccccgtggagaatcctgtagctatggacttcttcttctcccacaaagatagcatggtcactcttgggctccctcccttgcacaggaattactgccactcgtattgtaacactctggtgacaggaactagcatgg

SEQ ID NO: 708092 - DNA, 895 bp, Homo sapiens
cgctcccgggttcaagtgattctcctacctcagcctcccaagtagctgggattacaggcacctgccaccagcctggtaattttgtacttttagtagagatggggtatgaccatcttggcaggctgctctcaaactcctgacctcaggtgatccgcccacctcggggcctcccaaagtggtgggattacaggcatgagccaccactccctgcctttactttgattaacattcaatataatttcatactggaaagaaattcctaacaaagtgagaagcaatggtggcaaaaacttaaaacaccttatttgcaccagaaaaagcattttatgttctgaggaacacaattataccaaataacaggactggtgaaacacagacataaatatctgtttacaatctttaacaccaagagagttccattactttaataaaaggcacgataaggggcacttactgtccaaaagggtcttctccgcacacacattctcacccccttaaacgtggacgacagacgacctcactcttggaccactggcccttacacaccactacaagagggttgtcagtaccttcacttgacatcacatttactgtgtcaccattctgtccaggcggaaaacctcggcaagcagtggtcaagcttggtcaacattagggccttatctcgcacagcggccgccgatattatcaaggggcaaacactttccaactcatcgaaaaccccggtatagggcaatttgcggtgcccagcgaacatatgcaccgggcgggaacaccatttcacatccgcgccggacacccacaatccgtcactcaccatgccactgaacagcagcacgaccacactttgaacgacgccccgggaccagacacccggcgcatagttgctcacccc

SEQ ID NO: 708093 - DNA, 991 bp, Homo sapiens
  misc_feature (24)..(24): n is a, c, g, or t
ccattgctggtcgacccgcaatantgcatatgtcgaccgagcctcgggccgcgtcgggcgacctgcgagtgcctgggtggtcgggtgcacacatattgggcactgctttgtggcacagcgccctgtgtgtggcagcgtcaagcttctagagaattaccttatcagtgcaggagaggattgtgtctgcttggtgtggatgccatgaagtgtgagatcctccagtgcctttcggtggacaccagggacgtggtgatcctgggccatagctgcccatgagagtgcagtgcctggtgtgatcactggtgggtgatgactcagtgcattcggctgtggcacttggtagggcgtgggtaccggggattgggcggtctcggactcttctgcttcaatgtcccgtaggtagtgccaggtacactcaatggctgtgacttctggactggcctctttgggcgacttgcttggcacgtgaccttgattacagggtgccctgtacttctctatgacgtcgcaggtcaagtgctgggacgcagctgctagaggataacacatttccaggtcctacttgccttgctggagtgcagcttcctggtccccgagcggcttcgggattgtgtgctaatggccaaatggcgaacggtcgtgttccatggttgtcccccatcaacactccaactgcttgctgtggaccagaccctgtttcttgggaaggtgcacagctttgagcttgggccctgacgtgggtcattgagcgagcctccttgttgcttggcatcgggggcccttggcggggtagtagccttgccttagagatctcagacggcaccctcttgtcaagtgccctctttgtcactggaaacggttgtcgggtacctgcatgtcccgcgaagcaatgcgacgaatgggacacatgtcagtgccctatcctacccccagtgacttcttggtgcgtgtgtgacggcggggatttggcttctttctgcgcttcagagta

SEQ ID NO: 708094 - DNA, 818 bp, Homo sapiens
aatctcttacgacctccatgccggggcactccacacattgcgcatgtccacaaaaacgcttgctcgaacggaaccaaatccagcatttcgtagaatgtcgattttggtcatcgtaccttgcttgaaatagtagtcctcgtgcagatccaaatgtaacgattgttagaactccagcgcgagttgcgacggtacaaggcagtgtcgaatctatccgtattacatccacctcgacacgcccgaccaacctcttgggcatgggatcacagtgagccttcgagggtagcaccaaagactttgaggcaaagaaaaaaccacctgtagaaggaaaaggctggatactggggagcgcctctgtctgctttgctggccatcctcttcttcaacaacaaaggacacgctaattctatgcagcaaaagtttccaaacacgttagcctaagaatttcgagtcatgcaaaaaataaattcccagagtcacagggttaacaaaaatcagattccaggccccatccttgttgttcctgagtcagactccccagtcaaactgccagagaacctcttctttgaacaaacacttcaggcaactttcccaggatacagcaagttcagaaactctcacacagcttcttaggtatctcagatatggctctggccctccagatgttaccaaatgaaaacaagaaatctggtcccaacaagcaaaagcccagagagacctcaaacacaaagatgcaatccaaccattcagtacgagcaataatgagccggacgttgtacttcggtcgggggctggactgaggtcattacctgcaagcgatg

SEQ ID NO: 708095 - DNA, 867 bp, Homo sapiens
aatcccagcactttgggaggccgaggcaggcggatgacctgaggttgagagttcgagaccagcctgaccaacacggagacaccccgtctctactagaaatacaaaattagctgggcgtggtggcgcatgcctgtaatcccagctattcaggaggctgaggcaggggaatcccttgaacctgggaggtgcaggttgcagtgagccgagatcacaccattgcactccagcctgggcaacaagagcaaaaccctgtctcaaaaaaaataatcatcaaattccactgtgatggctttattttcttgagaaaagctaagaagtaacaacactaaagttactttaaaggagagtagactctgcaataagagtcgtgagaataaagtgaaactctccagttcatctttaaaattagaaaagaggctggatgcagaggctcacacccgcaatcccagcactctgggaggccaaagtgggaggaatgttgaggttaggagttaagaccagcctgggtagcataataacaccctgtctctacaaaaaattaatttaaacagattactgggtgtggccaggcacggtggctcacgcctgtaatcccagcactttggaaggccgaggcgggcggatcacaagtccaggagatcgagacatctggtaacacagtgaaccctatctctataagaatcaaaatttgtgggctggtggctgacctgtagtccagtacccggaggtgagcggagatcacttgaccaggcgatggggtgcatgaccagacctgcctggctcaagtgtaaggagcgtcaaaaaaaatggggtggcgcttcccctggcgcggggtttcccctgggtttcctgcgccccttttaaaag

SEQ ID NO: 708096 - DNA, 127 bp, Homo sapiens
tgactggaacctgtactggaaccagctttgctacgtctccttggaaacagagactgggcctccaaatggagataggatcccagagtcttgtagggaccctggcgactgttaggggactttactatct

SEQ ID NO: 708097 - DNA, 164 bp, Homo sapiens
ggtgatctagaggatcttctgggtgatgatgtgaaatcacctgggatcttgtaaaatgcagattctaattcagcaggttggggcacaggctgcagattctgccgggatgtgtgtgtgctgtgatgtgatgctgtgtgctgtgtgatgacgacgggggtctcacc

SEQ ID NO: 708098 - DNA, 190 bp, Homo sapiens
ctgacaacagagttttactccttcttaaaaaataaagaggatgaagccgattgcatactatatgcaatacacaggaatgaagagaagatgctattgacactttttgtatttgagctttcatagactttttcttcccttaaccactgcagcaaaaaatcaccatgtaccagcctatccaaacttatccatg

SEQ ID NO: 708099 - DNA, 493 bp, Homo sapiens
  misc_feature (37)..(38): n is a, c, g, or t
  misc_feature (113)..(113): n is a, c, g, or t
  misc_feature (339)..(339): n is a, c, g, or t
  misc_feature (343)..(343): n is a, c, g, or t
  misc_feature (345)..(345): n is a, c, g, or t
  misc_feature (353)..(353): n is a, c, g, or t
  misc_feature (355)..(355): n is a, c, g, or t
  misc_feature (391)..(391): n is a, c, g, or t
  misc_feature (398)..(398): n is a, c, g, or t
  misc_feature (401)..(401): n is a, c, g, or t
tttttctcccggggttttccagtttcccccccccttnnggccaaagggggttttttttgggccccaaaccaccggggtttctcaaaatttgtttaaaacccccccccctttcnccaaatgggggggggggggttccggtgggggttttttttaacccgggctttttttttgaccccccggtttgccggggggcccccccccccctttttttccccccttaaagaaacccggggggggttcaccccccgggttttttttttgggcccggggggggtttccctttttcccccgggaccccctttgccccttgggccctttttggggccccttttaacccgntttntnccaaaaancnggggggggccgggccgggttttccggggtttttttnccccccnggnccggcccccttttggataacttgttgggaaaattccctttttttttttccccctgtttttaatttgccgaattaaaatttttgggcccccca

SEQ ID NO: 708100 - DNA, 119 bp, Homo sapiens
agatactaggcgatacccttcacaacgatgcttgcgagaaagttttggccaatgtcctcaaaaggaatggcaacaagaagcaaaaattgacaagtgggacctaattaaactaaagagct

SEQ ID NO: 708101 - DNA, 191 bp, Homo sapiens
  misc_feature (2)..(2): n is a, c, g, or t
cnactctagatgatccacttcacctagtggatcccacaccggggctgctggtggagctgcctgccagtcctgtgccgtgccctcgcattcctcatcccttgggtggcactttccatagtactacaatgtttagcgggcctacggtgttgtgagtgtaaattagtgcgatgagtagggcaagggagcctact

SEQ ID NO: 708102 - DNA, 1095 bp, Homo sapiens
tggctggcttaaggatcagtgctagcaacgggttcctccacaggaggataaagatcaccatcaactggtggtatacaagctatctgacagattatcagctgtcttgtaaaaagtttttttatcaaggggtttccaagctttccataacacagggcaggtctactaatttggaggccaagggaacacgggtccattcctggacagattccatggacgcccatcaggattgaaactcaattggtcagtctggtccttgaggttggttaggaccaaatctggtactggcccttctcacagtaaagaggcattatcctgggaggcagactgtaaaataaaactgggctctccagttccgtggaggagctatcattcttgggctttaactccatctttaatttcccttgtggattccattttctccaataaatggctgggttaccactaaaaatgttccagctactggcgaatatgtttcaaaaccaccagtttggctatgatttggaacatcttttaattacaagaagttctcgggtagatcagcagctaaagcgtctaatttggcctaagtttccaatttaagctccagagtcttttctctaaatattgcggtgaccgaaataccagtcgttaacacaacgggctgattcacagaccttagttccttaatcgatgcaatgccaagtcccaacctttaggtgccgttgctggacaaagcgaaaagagctagctagctagttaggacacaggagagcaattggggcgttcccggaacggtttctcggacaaaaagccgaagagatcttcacgtcaaaatttcccggaaaagaggtcaaaatcggggtcagaagctctggactaaaatcggaaagagggcagtaaaaaaacccccggggcccaatatcgtcccccctttataaaggggcccaatggaggataaaataagacggcacggtaaacacgttgggcaagcatcgggcttataggagcgtggggtgatggaacccacaagcagaaaacaatggagatcgtggagagtacaacgcagtcgacaccgactatccacacggtatgaaccagtagagggggggggtgtag

SEQ ID NO: 708103 - DNA, 597 bp, Homo sapiens
tgactctagaggacccctcttcacccctgacatggtttactatacgaagggtaagggctgccactcacattcagcagatggcccgtcagagtatggtggaggagacaggataactcacagggcctgttctctatgacctgacgccgtggcctggatacaactgaagaagaacatggcccagtgctgtcttcagaatctccacaagcaccagcttgtgtacgatggaagcgatgagaacagaacggcttggaggacaaataaatttaggattactacattaaacaaaacctaacagtaacccttaatgtaggacttctcaaagcctttaacacactaagagggggatccaggaggtagtgcttataagttcactacagagcactggcaggactatagtgttctttgaagcaggaatttaaaccactattagaacttaattacacatggacgagtatgtcttcaaacaaactgacagcatcagaaatgatgtatcagaaatgtattcgaactgatggatggatctagaagaaggggagtccatgcaagataatcagtgcagattccttactcttccaaaagtgtcaggggagaagaggg

SEQ ID NO: 708104 - DNA, 175 bp, Homo sapiens
agttaatgggtgttgactgtagtataagtccagctttctgtagcctaagatttgattatcccatacttacttcacttgtgatacatcactgattatttgggttacactggactcatttcaagcagttagctaacgttcacatcgtgatgagacaactaatactgtaaattgattt

SEQ ID NO: 708105 - DNA, 135 bp, Homo sapiens
gggacaatgtgaacatggactcgaagacatggccctttctctggagttgattttttaaatgggccattattgtttttaaaaaaaaggaaaaaagaaaagcaaacaaataaaacccctttaagaggcagaaagaga

SEQ ID NO: 708106 - DNA, 118 bp, Homo sapiens
tctacagatcccccgcagctccatagaattgaaaattatcttctgcatctaactcatatgaatattcttctgcatcttctcatataatatgaaagcggccttgactactctattaggc

SEQ ID NO: 708107 - DNA, 507 bp, Homo sapiens
  misc_feature (323)..(323): n is a, c, g, or t
aaggatccccatatgtggatggggaattcctggttacatttctttacactcaaatggacccgggacaacagtagtctagtctccgggaagacagggtggcaaacagaatggcatggtgggtgggtatactcatagtcaaggggggtgcacaagtgagggtccaacttggtggaagggtaaggatttaagggtggttgggccagaacaagagaaatacctggcagaaaacacttatggtgggaaaccatgcgctggtgacttttcctggtagcctatgggagtggacagagggggtaacccaagatgtttttaagacggacggnactaagaatgacgtacttatagccaattactttccccctaatgtgactgaggggattcataatggtcacaattagcattagggttaagtatttaagggtggaggtctaagctcacacttgaaaggtattatctaatgggcacggggtcaccaggttcccaccctagcattcattgctaggttac

SEQ ID NO: 708108 - DNA, 373 bp, Homo sapiens
accttctaccccacggaagaaaatgagaaatttgctttttttcatatcgaaggcttaaggatgcatcatggctgggatacatatggccattatacctttcctcaaaaaaatacgtattaccaaattaatgtataatagtcttctgaatatagacataaacgccattattttacatgattgttgatagacctcttttcatcaaccaaatctaatgaacaatttgactctgtttacactaaaaaagctagtgcttatgcccaggagatagtcaaagagcctagattattatcttgatcccttattagctgattgacattaagatacttaaactttccattctgcagtttgcagctgtaacattaaaattatctat

SEQ ID NO: 708109 - DNA, 107 bp, Homo sapiens
tacgaactcgagctggtaccgatctcatttctgcatccctttggaaatggatctctttgaatacggttgctcttgttacggataatgcagtttatcactggagatat

SEQ ID NO: 708110 - DNA, 753 bp, Homo sapiens
cgcaactggctgatcttggcaagtccgagctgggtggactgaggggggcttggctgagtggactagactgagacgggcctaacagactgagctgaggcgagctgggtgggctgagagggctaccctgtcccttagaggacaggtggccaagctgggctgtcctgagccaggcgatcggggctggcccgggccaggcgggtttagctgagttgagtgagtggactgggtagagggaaatgagctaggctcagctgagctaggcttgagctgggttatcctaagccctaaggtggactgagctgggctgagctggacttatctggggagcagggcaaagtcaggctgagctgaggtggcctgccctgggtggtccaggattgagttaagctgaattaggctgacctggacttgactggacttggttgaaataagctgggccgacacaggtagggacaagctacagttctctacttaggataaaatgggtgctcgtggactatccgggctgaaggagaccaagctggggtattacatgctgagcttacctgacctggcctgagttcagcagggctgcgctgagctggacagacctgagccaagcttagctggttgggctgagtaagctgggctgagctaaatgggattgagctgaggagggctaggctggggagagacctgacgacggacagggttaaaagctggagtgagcaggccttaaattattgaactaaattgggctggggtgatctgaaa

SEQ ID NO: 708111 - DNA, 87 bp, Homo sapiens
tgctgcttcgagtgcacacggtgcctctggatgcccaggatggcaatgaggtggagcctgatgatgaccacttctccattggtgtgg

SEQ ID NO: 708112 - DNA, 138 bp, Homo sapiens
actgtgctgcggtagctcatcacgactccccggggacgggcgctgtcctcgtcgtcccgtgggcagcgagcggtggcggcgctggcccttcttctccttctccttcctctttttctcctttggctgggcacttctcct

SEQ ID NO: 708113 - DNA, 122 bp, Homo sapiens
  misc_feature (43)..(43): n is a, c, g, or t
  misc_feature (46)..(46): n is a, c, g, or t
  misc_feature (84)..(84): n is a, c, g, or t
  misc_feature (90)..(90): n is a, c, g, or t
  misc_feature (112)..(112): n is a, c, g, or t
  misc_feature (119)..(119): n is a, c, g, or t
ttctgaggataaaggcatggtcaccaaaaatcacagtacctgntgntggtaaagttcatgccaattcactgccttagatcaggngaaaangaaaagggctgtggccaaagtnttaaggncaa

SEQ ID NO: 708114 - DNA, 228 bp, Homo sapiens
tctgatcgctgggacgctggttctagaggcagctgtcacgggagttcctgttaaaggtcaagacactgtccaaggccgtgttccattcaatggacaagatcccgtttaaggaccagtttccgttaaaggtccagataaagtccaagcccaagagccagtcaaaggtccagtctccagtgagcctgggtcctgccccattatcttgatccggtgcgccatgttgaatcc

SEQ ID NO: 708115 - DNA, 1231 bp, Homo sapiens
atacgcctcacacatcattactcaaaccccctgacaaaacacatagcctacccacatatccttgtactatccctatgaggcataagttataacaacgactccactctgaaaacaaccaccaacagcacacacaacaaacacccgcaagacaagaaaaaaaaaaagaccaaacacacaaagcaccagaggtgcgggcgggcgagcgagacagcgcacacagaaaagcaaacaaacagcaccccaacatcagagaggcgaggcgcgcgaggaagaccaagtcaaggacacacaacaccagaacacgagcagacacaggacaagacagaggaaccaagaacaaataacccacgcaccgtcaccgaaccaaaaacaatacaagacaccacgacacacccacccccacaccccaaaacacaaaagaaacgtgacgcagagcaacaaccggacatgcaccaacgcaacacagaggcgcacacacaccgaccaaaaaaccaacacaacaagggacaaaacacacagaacacagaaaaaaaaagggaaccgaaacacagaccagaaaacaacacacacaccaaaacacagaacacccccagccgagaccagccacccagcgacgcgacacacacccagacagaaacaaccgccaccacacccaaaaaccagacagcgaggaacgaccccccgcaacacactaaacacaagcagacgcaaaaaaacacaagacgccacacgccgcgcacagcaccgcagaagcacgcaaacagcaagaagaccaaaagaccacccacaacaacacaaccaaccaaagagaccgacggaagcaccccagacgacgacaaaccaaccgcgccaaccacagggggaaaacaaagggaacacaacaagaccgcaaagaacagcggcagccagacacagaaacaagcaaaccaacacagcaccaaggagaagaccgaacgaacaacgacaagaaagcacaaaaaagcacagaagccaaacaccaagacgaaaacacagcaagcggtgtccagagacaaaggcaagaagagacaggagaaacccgcgaatcgacaacgcagaaacccgcaaaccgcgagcggaaacacgcacacactgaagaacggacaagaaggaagcaagacacacgaccaccaccgggccgcgaagaagacaccaaaccagggacacagacagaaggaagggcagacaagagaccacaccacagagtcaccat

SEQ ID NO: 708116 - DNA, 106 bp, Homo sapiens
taatgagctggtccatctacagcatactgatcctacttcgcactagttcggtactatgcctattgttcaatatcaagggaatgatagcattgaaggactcggggat

SEQ ID NO: 708117 - DNA, 278 bp, Homo sapiens
tcagggtgggggccctgcccctcccccgaccatgttttttcccctcaaccggaattcagggggcaattcccactacccggtgttcgccaaccttgaacttaaacggcaggtgcaaaaaaacaaaaccaggtcccgcttcctgcccccgggtttcccctccccctttaggcccctttttcccaggagcccgacccagaaactccacttacccccaggcggatttggggtgttgggcagggcatggagggaaaggaataaaaaaaaacaaagtcccggga

SEQ ID NO: 708118 - DNA, 129 bp, Homo sapiens
tgtctagaggatccagcgtgatatactaaaatgcgttaaatatgtaaccacatacattatgtgctgtgatttaaaatctacttaattttcatgatattaagatgtgttagtattttttttttactttgt

SEQ ID NO: 708119 - DNA, 180 bp, Homo sapiens
gtgggaattaaattcaagctacaatctcaagctcctctgaagaagtccctgtaagagttcagcccctgtgttataatccatgtgtgaattttcaggcctcgaccgtaggctattaccatggctttacctggcaggcctcgtggggaaatctgcctttccctcaccagactttattgccca

SEQ ID NO: 708120 - DNA, 169 bp, Homo sapiens
cggagattccttgccttttaaactcgtggtttttctctcattttcttccctctctccctccatctctgaccaccgcaggtaatacacgaagaaacaactatgaaatagtgtgtgtcgtcgtgtgtgtggcgggtgctgcggttcggtttgggtggtgggtgtgtttgtg

SEQ ID NO: 708121 - DNA, 255 bp, Homo sapiens
ctgcccctttccatccagtggctgctgtttcccaagacgggctaagcgtttcttatctgaaatgcttgggacaggagtgttacagattttggattttttcagactttggaatatttgcatatatacataatgaggtatcttggtaggtctcatgtctaaacatgaaattcattcatgttttatatataccttatacatgtagcctgaaggtaactctatacagtattttaaataattttgtacatgaaacaaaaa

SEQ ID NO: 708122 - DNA, 215 bp, Homo sapiens
ctggctacttttttatattttcggttgagatggggtttcaccgcgtggccaggctggtctcaaactcctgacctcaagtgatccgcctgcctcggcctcccaaagtgctgggattacaggcgtgagccgccactcccagcttgttcatccagtttttattgagcatctattatgtgccgatattgaggtagactctgggagtcacagcagtgaat

SEQ ID NO: 708123 - DNA, 468 bp, Homo sapiens
  misc_feature (7)..(7): n is a, c, g, or t
  misc_feature (80)..(80): n is a, c, g, or t
  misc_feature (122)..(122): n is a, c, g, or t
  misc_feature (161)..(161): n is a, c, g, or t
  misc_feature (226)..(226): n is a, c, g, or t
  misc_feature (267)..(267): n is a, c, g, or t
  misc_feature (309)..(309): n is a, c, g, or t
  misc_feature (385)..(385): n is a, c, g, or t
  misc_feature (413)..(413): n is a, c, g, or t
gaacttnaatgtagacgcacaaaaagctcacattgtaaacaggattaagctgctcttgatttagcccgtaacatcaaggnttcattttgctcagcctgagatctcgctcaatttcaaactgnctgtgatccatcggtcgaggaaggctttccggtcaatgnacccctctttccctcgattatggatggccagttctttaccaatcccctctttcttcttgaagctnttccagccaggttggacttcttaagggtgcttaatttctgnttcttggcaccaaatttcccaaggctgctcatgcacttggantttttaaccctgcccggcaaggagtgatggcagacttgaaggaccattaaccctgggggttttctttctcatctgntttgaataaggatttggctctttagaangagcatccctttcttaggtacccttacttttttaccagctccccccttggggttt

SEQ ID NO: 708124 - DNA, 172 bp, Homo sapiens
gttttctactcttttcaagattcttctagcggttcctgcttgcctacttctgatagtgatattagaaagtaagagtttttttagctctgcctccagattgctacagtagtgagattgttcctagatcctctcagcacatagagtatacatgtatagtaactttggtcgacgc

SEQ ID NO: 708125 - DNA, 450 bp, Homo sapiens
  misc_feature (77)..(77): n is a, c, g, or t
  misc_feature (81)..(81): n is a, c, g, or t
  misc_feature (85)..(85): n is a, c, g, or t
  misc_feature (87)..(87): n is a, c, g, or t
  misc_feature (108)..(108): n is a, c, g, or t
  misc_feature (148)..(148): n is a, c, g, or t
  misc_feature (158)..(158): n is a, c, g, or t
  misc_feature (161)..(161): n is a, c, g, or t
  misc_feature (164)..(164): n is a, c, g, or t
  misc_feature (184)..(184): n is a, c, g, or t
  misc_feature (195)..(195): n is a, c, g, or t
  misc_feature (240)..(240): n is a, c, g, or t
  misc_feature (280)..(280): n is a, c, g, or t
  misc_feature (358)..(358): n is a, c, g, or t
  misc_feature (360)..(360): n is a, c, g, or t
  misc_feature (369)..(369): n is a, c, g, or t
  misc_feature (385)..(385): n is a, c, g, or t
  misc_feature (393)..(393): n is a, c, g, or t
  misc_feature (395)..(395): n is a, c, g, or t
  misc_feature (442)..(442): n is a, c, g, or t
cctctccgtctcctgcgggcgcaatggaggaggaggatgaggaagcgcgggcgctcctggcaggcggccctagaagnggcngacngnggtgccccggccgcccctggngccctgccggacctctgcgaccccagtcgcctggcgcacnggcttttggngcngtnactgatgtgcttccttggcntatggcagctnttattgatcaagcatcctcactgactgcacttacgaactccacgnatcccacgcaactcatgacacacgtgccatacacacccancccatatcctgctgaatagttacatgcctggtctacttggacacaccctgatcgttttgtgtttcataggtggctttntnctagaccgnatcttaggcaatcaancaaggggncncctccattatttcgatgattagtttgccttggcccagttgttattgncctgaggt

SEQ ID NO: 708126 - DNA, 146 bp, Homo sapiens
tccacagggcaggcatatgtatgcatttagttcacactgtatcctgtgcctcgaagagtacttagtacatagcaggacacattctggttgactaaaattatcgggaaatattcattgcctccactacaatcaagaaggagaattag

SEQ ID NO: 708127 - DNA, 1440 bp, Homo sapiens
ggcccgacggagcctgtacgcgtcgactgcccagagttccgctggaatccatctgtcatccggaggcccgatgccggactcctccgcgatctccagctttgctcttgcccttgtgaaatacatcgtaacgaataactgtacaacgtgcaaattcagtttgtgtactaggagtccatagtcagctcgtgtcgaatgcttggaagacagggaattcgtagctcatgattgcacctcaggtccctacaatatattcacgtaacgtgtcaacactctatgacagagagaaacgggagtcgcaatgctgggatgtaaaggctgcgatgaagacgtcgacaggtacgcacaaggggagcacatcagcaggtgattgactaggggctcccaaagagcgaccgtcatatgtctcgttgtggaggcaggaaccgcaaagtgccctcatggtactgcgaggtcagacacagatggagtggtaacggacatgccaaacgcctgtggtagaatcctctgacggagagtataatcttctgacagcaagcatacactattccgatgaagagtggcgtcaccacaccattagaagaacaccacaaagcttttggcttgatgcgggaacaagatgggaggtctaacgggaacatacgaatcttccttgggtttagggttaaaacgtctatgggcatgtggcttggaatagaaatggcaacggggattgtgggattgaaaggcttgagagcagacagatttcaatagaaaaagcctggaattgccagggtttccgaggattaagttcagctatcaagatatttggtggagttaggagttatttgcacaaaataataaaaccgtttagtgggggctatggggggtcacacgacaagggggaactttccatttggtgggaaacccttcttacggaacactgtgggcgagggaaagcgtgggtcttgtgccggtaggacgcttaaccaaatgctcaacaacaggacacgtgtggacacttggaataccacacgggtccgacgcccaacgagccagcggggccaccctgggtgtggccactcgggacacgagaattgggcgcgtaatgagggagaggccaagcgacttaggaacctggtcgaccgaaacgatcccagcggcggggggcgaaagtctgcggcacaaccgcgcggcgagggcacaaggggagccccccaagccgccggggtgtaaaacagggcgtacatctcctgggccaaagctctgggggaaaagacccgagaccctgggcactctgggggcgttcaacgacacaacatagaagaatagacccacccggagcgactcggaggctggggtgaaatcggcgtatcacaaaaacaagaggtcgagcaccagcggtcaccgaagacatccctgacgagaacaggcagcgggttcacctgggccgacggccacaag

SEQ ID NO: 708128 - DNA, 945 bp, Homo sapiens
atggtgaaaccccgtctctaccaaaaataaaaataaaaattatccaggcgtggtggcatgtgcctatagccccagctactcaggaagctaaagcacgagaattatgtgcatcctggaggtgaaggttgcagtgagccaagatcacaccactccactccagtctggacaacagagtgagaccctgtgtcaaaaaaaaaaaaaagaaagaaagaaagaaaaattggctttatgggcccagtgcaggggttcacacctataatcctagcacttggggaggctaaggcaggaggattggcttgaggccaagagttcaaaacaagcttggggcaacattggaagaccccaattctacaaaaaacgaaaaattagccggggagcggtgatgtgtgccttgtagtcccagtactcaggagactggagggggggagaatcattggagcctggggaggttgaggctggcagttgagctggtgtttataccatttgactcccagcccggggggtaacagagcaagaatccatctcaaaaagaaaagaaaaatgttttgtacataatgaggcaggaaaaaaaaaaaggtcctgtgggaattctttgacaatttggcaaggtgtatggctttgtaccagtgtaatgggtctacgtggatttttaagagatttaggaccggttttattgtgggaccatcgaaactctggaagtggagggtcccttaacacgattatcatatgccgcgggtattggatgatggcccggaatgtaccccaggtggtctggttgtcaaaaaaagtataagcgggggtgtttaaaaaaaagggggggttaagtccggggcaggtggacacgttggaggccaaagtgtaaaagggcggtaacggggaacgagttgaagacttggatagacagaacgaaaatatgacctggatagaagtaacgcacgtgtgaag

SEQ ID NO: 708129 - DNA, 232 bp, Homo sapiens
cacgaggataatcagaccaacggtcatttctgcttgacctcctaagtgcatcaggcattgattcactgaccttaatgtttgtgcgacattaaaaagggtgcaaattctctggaggatttcttataccatgaaggatacacatgtatcagcatccatggagatcgttctcagagggatagagaacaggcccttcaccactttcgctcaggtattagcccaattttaacggcta

SEQ ID NO: 708130 - DNA, 100 bp, Homo sapiens
attaccaggcccggcttcatagctgtaatccccagcaaactcccgacagctgaggcaggagaatccctatggtctcttgagtccacggagttttgagacc

SEQ ID NO: 708131 - DNA, 1411 bp, Homo sapiens
ctgctttacggctgtggcgggttggtcagtacgggagaggcatctgggttcggactggggccgggcactggcgtgcacaagtgaactgttgtgcacaaggtttgacagtatgagcacttgtaggccggagatgaccttgtacagcgggtctatgcatgcagcgcgcttgacacactgggccatggaagaaccgatgcaaatctgttccctggcagtttgatctgcgttcatatcacgaccaagacctctagacacgattggctcgcgcctagtagactgagagacgctctgtgtataggaacggacattgttagggtcgtagagagccaatgacaaagcatacgactcaggcatgtgagcgccagcagtttaccaacaacttggtccgagggtccgtatcagtggtttgaccgaataatgctcgggagtatgcactgtacctcatacccatgtctgccaagagaccaactctctcctatctcagtggtcacatggtagctcttgagctcttgctttggggacacacctgggaactcggggctggttcggtgaatacatgatagttcgaggaactatattgtgatcgattttcgatgtggggcaaacgagtgggactctggacaggggaactagaaccaagaggttttttggggaattttacaatacggcgtttacaaccacgcaacgttgaggggaaagggaaaggcgtccggtatatgccgaaagagttttcgagagcaaacaaacaagaagcacgaatgtccacttcgagttaaccaccctagtaatggggtcacccaggagtgggtaggttgcttgttgaggctctttacattgttttaattactgccggttcgttccttcctttggcgccagtggggaaagcgggagcattttgggccttaataattggaaagcgggccaatttggttccttagaacggaagggggacaaaattttcccccacggtttgcgccaaacatggccaaagcgtggacgtgacccgagtcggtgcaaatggccatgctggtggtgcactgggacaacctgcattacaaacttggggtctattccaaccttaatggttccaagaataacagctcgaagggttcgaaaagaatcccgtgggaattcacggtgtactgtgattggaaaggttaatgggggaagacctcaaagtgggttcaacacaacgtctgggcaccatttcgatgggagcctggcctttccacggggaggaactttctgaattcggaaattattcacatccctccattgatgctgcattttcaacgtgttaccacatcatcacgccatgaaccgggatttttcccacagaatgggtcttcaccagataatctgttaccaagtggtgaatggatatcattatacaccgatgtctgagggcata

SEQ ID NO: 708132 - DNA, 1230 bp, Homo sapiens
gcctcttttccttgcctaaggcagccatggctcgtggtcccacagaagcatctgaagcgggtggcggcgtccaagagctatcggagtgctgggattaagacttgagcgcggtgtgttgtgctccgtcgtcctagtcctatccggtcctcgccacaaaggttgagacgaagtgtcgtcacgcgccgtcatccagtttgtcccatgaggaatcagagcgttaagtactgcccagactagggacgatgacaagtagaagacatgattgcgcatggcagcaggtgtcgagttgaaagatcggatcggccaaggtaccgaggctggcatagtacacctaccactgcatggacttcatcgcgaggtcagtcagcattagacatagaccggcgcatgacgaactcttacggcgtcgtgatctgatcgcacaaccaaaggagtgcgctgtagactgtagcagtcggatacttagcagccgtgacgggaggtccaagatacaagagtcgatgcgaaacagtgaggacaagactcgtcggtgtgcggccacaaacaggcaagtgccttacatcgtgggtgaacgtcactgatgactccgacgatccatgccgggtacgcacgagtccccctcgagtgcaaagggtgaacaatggataaccgagttgcacgacatggagttacaggaaggagcttgggcacatagatgtaactggagtttgcatcacagcatacggacaagcttggttaacccatgatgataatggatggacttgtgaagtgttgctgaaacacctaagggaaacggacaatcgggcacggagacacaagcccaagaccacgaggacggcggggcaacacatagcgaagtcctctcgacggaccgacacggtgtccacggttggagacagaattggccacaaatcaggggggagaacacagccttaaaggccgagacaccgtaacattattcacgaaaccaatgacgacggggtcaaacggggccacatcggggcaagagaaacagccaaatggacattgtacagtcctgtccaccaccggagaggaaaaccgagaacaatcacggaccatcacaacccaaagtgggccacgaaagctacgcaaggcagaacacaagtagaaaagaagagacggagcacaacaccaagagacggcggaggggagacgacaaaacttgacgctacccacgggtgtaggaaccaagtggtcgagagagacacg

SEQ ID NO: 708133 - DNA, 630 bp, Homo sapiens
gcagttcatgctgcaggtgacctataggatcccctgtacctgacgctgggatattttgtgtgtgtgtgtgtgtatgttttgtagtgtgtagataaacacgtcgtctccaggccaggaagggccccttggaattaggcccacctgtctagatcctctcctcagtggtgggtcctgggctgaaaccagcttccacatcatacccccaaaggaagaatgggggtctttctggaatggaagacgctgacttcaagcattcttcaaattactctcgttccccagctgagctttgttgctgagggggttggggacaagccacaggggcacttgcatagcaggagagtagaatggggataaggcatatggtgaggacaggggagaaggggaagggcatcatagctgcaggtgaagggggcctccaaaaggcagctcctctaccccctcatcccctcaaattgctgctgggttgaggagtcagactgaggcagtataataccctcccccatccttaactctagaaccccggtttggtggggaggaggtgggaagctgtggagctatggaaaggcctcagttagtgagtcaagctgtgatgtgtgtgtctgaacacaagtggctcccttggtataccgg

SEQ ID NO: 708134 - DNA, 1372 bp, Homo sapiens
gactctgtaggagtcggtgaatatatcaagcactgcagagctaccttcacaattcgtggaccactacatatatctgtagatcgcttctatcttatagtctttccgacatcatgttggaagagtgttaaatggaggcgacatgaagtacaattcgaatgtgcatatcagtgccctacctggcagctctacatagtagtaataaaatcttgttcatcatgtctcatcatctattagtgctgtgagttcgcagtgtccatgagtttttgaactgggaagtgccattctacttcttcaacgtccaacacatacccatgggatgttcaataccgagtaattgtagtactccgttcacctaggtcttgtggacacaagactattaacggtacactacgactatggccagtaatgtgaaccttcttgtcctcttcctggccgatcgaaagtgtcctaaattgttattacactttctggcaggggccgtcctgctagttaccctgatcacatgcctattcgtcatgcccctctacttgcctatttaatgttgggagctaaggaacgcaagaatcttgctaatgcctgagtcatgaagtgcgagtgacaatacctttcccgttatgaactagtaacctcttatgctctgctatcaccaacatttggctttggtcacgaccttttttcaacctggtcgagttctgggtcgcagtcaaattttcagtgccatgggggcttaaacaaggcttcgttaaccaaggcattatttatatactttaggcgtagcatgggtgcggagaaactaattgaatttggcactggataacgtgtaacttggactttgttaagtaaacggaaatggcaaggtacacttgtggttcagcttttgtggatttcttgtttgaatccagataatggggggcacttccgcgtaagattatcgttacttccttgttcgaagttactttcttggggctttatatccttgaacatttcttggcaatacttactgctcagaccgcggaaaaacttgcctttaggggggttgagttcgctaagcaaaaagggggatgggaaatagccgggttcagtataccaccagcggcgctccctatttccaaacaagtgcaacatttctgggccgccatttcaaattagggccccggaaaggatggaggtatattttttccataactgttcggtagatcacgggacaatattttcagtgctggaaaggcggggtaagcacacagttaccagcagtggtaaggggaagaggagtaatactgtgtttggccgtatcgcgtaggcgaagtcgggttgctgcccaattacccagtggaaagaaaggtacgctcattgcggctgatctccatgctac

SEQ ID NO: 708135 - DNA, 471 bp, Homo sapiens
gagtcactgcgccctgatcatgctagacagccggctcacactgcgagggtcataaagacgcaggctgtgatgtcccaacaacgatatgaaagagcttgtaggatgaagtctacttcagaaagaaggcatttctgtgttgaaatctcatagagtcaatgagctctcaaatggaaaaaattaatcccagaggcttctataagtactagtagaagtctgcctgtcagagctctcgcatgttctgaagtatgcggaagttgacatggattcattagccaaggctgtaccagagcccttgaagaagtatactaaatgtagagagctggctgaaagactgaaaatagaagatcggggctgctagtcgcatacccggagtaacacctgccgccatcatcaatctgctgagatttgtgaagaccactcaacgacgacagtcggctatgaatgaatcatccaggcatgatcaatactcat

SEQ ID NO: 708136 - DNA, 175 bp, Homo sapiens
  misc_feature (136)..(136): n is a, c, g, or t
ttgaggtcaggagtcgagacatctggccacaggtgaaacctcgttctactaaaaatacaaaaaaattagccgagcatgcggcacatgcctgcattccagccactgtggagctgaggcagcaaatcacctgaactgngaagggggaggttacagtaagccgagattgcggtgtttg

SEQ ID NO: 708137 - DNA, 901 bp, Homo sapiens
  misc_feature (839)..(839): n is a, c, g, or t
aatcgctcacagctgctggattcgcttttaccgcgtgttgcggccgttcgagggcacatttggagcattttgggggtatccagtgcgtcacacaataggtgtaatacgtgttggcgggggtcacctaatgtctgcagtgcgtctgcgagcgttaacaaccattgggcacatttgggaattataacaaagtcaaaacacaacatggagacgaggtgacaacccagctttaccgcgtgtgcacgttgggttaccggcaacgtgcttggccgcccttgtccttagcgcacctttcgcggccccccattggacaaagccgtgcaggggagattgcgcgaacgtggggcaacacgctagtgaatggcaaagaggttctccaagagggtgcagggagagacgacggtgaacccacgtctgggcagcctgctttttggaggccactcttccataggttatgcctcccaagcattaggcccaacatattgggctcactcaattgccgccgtgtgcctataattcgggggcagacccacatgggtggtgctcccagatactcacctctcgcagaggagcccctactcgagagggagtcttccagtcctcgtgcccgcacatcattgctaacgtatgtttcgcaaatgattctgatgacagtcattcatggcctacgtcttaacacggcgaacatatggtactccgacacaattccttaggcccaacccttaggcgtaccggtccagcactagggccgccaaagcgagctaatactttagttgagcacataattgagaaagattggcaacacagagtttgttatttgaactgcaacaaggcgttacaanagaagtcaggtacgttcagactggcggtatcccctctagcggccactcttttgcgaacatca

SEQ ID NO: 708138 - DNA, 382 bp, Homo sapiens
catgcgggggggggtgtttaagggggtggctagggaataattgtctgggtttcctaggaggactggtgagaataggggggggtcattaaggagagaaggaagagaagtaagccgagggcgtctttgattgtgtagtaagggtggaaggtgattttatcggaatgggaggtgattcctagggggttgtttgatcccgtttcgtgcaagaataggaggtggagtgctgctagggctgcaataatgaagggcaagatgaagtgaaaggtaaagaatcgtgtgagggtgggactgtctactgagtagcctcctcagattcattgaactaggtctgttccaatgtatgggatggcggatagtaagcttgtaattactgtggcccccc

SEQ ID NO: 708139 - DNA, 206 bp, Homo sapiens
taatagacctatctgaagcctgttgattctttcttctgacttctccagtctgctgctgaatacctctagtgaattttcagttttagttataatacttttcaactccagaatttctatttggttcttttctacaatttcaatctctttattgatattctgtattggatgagacattgctttcctaatttttttgttctctgtccatg

SEQ ID NO: 708140 - DNA, 243 bp, Homo sapiens
ataaccgatacccgcgcaacaactgcttagaataaggggttggcgtaatcaacgcatccgccttttgatatagcgacaccaaatactgcttaaataacggtgcaatcagatttgaaccggtaaatgaatttctaaagtcttcataagtggagtggccatgatagacaacctttttgcccattttatgagccgcattcaccatgtggtggctcttcacgccgtagtatttgatgtgtaagacat

SEQ ID NO: 708141 - DNA, 128 bp, Homo sapiens
tcaggttacgaccacatctacaatcgttatcgtcacagcccaatgcatttgtactaatcttctacatagtaatacccatcataatcggaggctttggcaacatgactagttcccctaataatcggggc

SEQ ID NO: 708142 - DNA, 141 bp, Homo sapiens
agcatggagaggtgctgtttagtatatatacatctcaagacggtgtaatatattcaggccaaggatcaactcagctcgacctccatctccagatccttcttgttcttcttttgcctccttcctgttgcacattcttccaag

SEQ ID NO: 708143 - DNA, 517 bp, Homo sapiens
  misc_feature (116)..(116): n is a, c, g, or t
  misc_feature (435)..(435): n is a, c, g, or t
  misc_feature (460)..(461): n is a, c, g, or t
  misc_feature (471)..(471): n is a, c, g, or t
  misc_feature (500)..(500): n is a, c, g, or t
  misc_feature (516)..(516): n is a, c, g, or t
tgctgctggggaatttggagcctgaggaggccaaactgatccgtgtccctcttcaacgaatccaccttggacacagaatcttaaacccactgaatggatgggaacagctggcagantttctaggacctccacctctggtgcaaacccctcctttgtgcctctctccaagttcatgaacacccagtattttggaactattggtttgggaacgcctcctcagaatttcaccgttgtctttgacacgggttcttccaacttgtgggttccgtccacgagatgtcatttcttcagtttggcatgctggtttcaccatcgctttaatcccaaggcctccagctccttcaggcccaatgggaccaagtttgccattcagtatgggaccgggcggctgagcggaaatcctgagccaggacaatctgactaatcggggggatncacgatgcttttgtgacatttggannaggctctgtnggaagccagcctgaatctttgctttaagncactttgaatggatcng

SEQ ID NO: 708144 - DNA, 533 bp, Homo sapiens
  misc_feature (249)..(249): n is a, c, g, or t
aactggtcgagtctgtgggcatctctgagatgtctgtagagatctctggagcctctctgagactggtggtgctatgatctttggaggcatctgactccccacaatctattagcagcacagatcagctttttgaagggcagggtcaacagacactgcgtttcttgtcatggctgtctgaccattgctgaagcagctgtcttcttttttggaaggaggggtcttccaagtgccatcgaccgtaggagtttnccctttctttgaaggttccgagtgcaacttaggcgccttgctaagggggctggttctttttactcagaaagcctctccgttctaagagcctccgcttcttgacaaaatttcggtgcttggcatttccttctaatgcctttttgggaggaggttccccaaaatccagattgagcagtaaagtagacatagggacaatggaaggcggaagagtagttgggaagagtggcttatggatgaacagaggatgtgggactcattctctgctgaatcctactgtccacatg

SEQ ID NO: 708145 - DNA, 107 bp, Homo sapiens
cgaattctcctcctactgaattctcctcctcttcatcctgtgagaagcatgagttgggagcatcacagaggagtctggcactgctccccggaaagctcctctcccac

SEQ ID NO: 708146 - DNA, 1123 bp, Homo sapiens
  misc_feature (1)..(1): n is a, c, g, or t
  misc_feature (696)..(697): n is a, c, g, or t
ntcaggataagccacagttgtagctcgacagcagcaccatagctgccgtctccgtccccaggcactttttggttatggatagtaccgtaccaccgtatgagaagccacagactgtctttggctcagcatgcgagatgaagcgctgatcctgtagtcacctattttcgtactgaaacatcgcttttacccacttctcagataataatgcgggaaaacaggcaacgtgaccttgtaacctttattgcatgaaggacttctttttgtttctaactataaacttggatcacctatggtaaaaccttatttcacgctccacatcattttagaatgtattttcgaagaggaatagagccaatgttttattcactcgggctttttttcttccccctctttctttaaagaactgatcaatattcaatctgttgtgaagaacctgattagcactctgtagtgcttacagaaacaaagagactctaatattgacactcttacacttactgcatgtaaacagattacaaacacgtattgcccacacgcattcaactctgtcccattcatagacacgctaacgcagaacactggcctatgatcatgcaagactgtcagtgccaaccaagacaatactaaccgcacatcgcacagtgtattgccccgccttccacacatgcacacatgtacagccacattgcgcgattnntaatgagcgcaccacgacctccacccagcacccttcctatatgccacaaacacgctcgccgtccgctcacctccagtaccacgcgcctcgccgcgcgcatcagcgctcccctggtacctcccctccgccgataccgccgcacatacgcgccatactccccgccccgccccacgcccgttgagttgtctttgcccgcgtatggcgcccgcatgttccccacccccatctcattccccccttccgcccccttatactcccgtccgcgcctatccccgcctctcgccccctcccccattcactgttactcgccatacctcgcacaattagttctcgccccgacggcctcacggcgccaatcccatcccactgcaccccccgcgcgctgcgcttctcgccgctccctcctctcgcgcgtctccctccccc

SEQ ID NO: 708147 - DNA, 681 bp, Homo sapiens
gcaacgcggctgcggaaacagcagactcaagggcgcacgggacagcgcttcgagccacacaaaaaactcaatcacgtaggcgccgacgccggccacaacagcggcgcattgaacacctggccccagaacgcacgcaggcgaaaaccgccatcgagttgcggcaaacggtccacgcccaatttgaaacacagctggccaatcacatcgaggacgatggaaaacgccagtaacaacaccacggtcagggtcacgggaacagttcctcaaacaggtcgatcaaggcttcattggttgccgcattacgctgcaagtcttgcgggctccagcgctccggtggcggctggtcggacttggcttcccagcgcttgaacgcgttgctgaatgccggcgtagcgaactcaccgcagacgtcgatgccaatgatgcgtttacccgccgccaacgcccgcagggcctggagcacatgggtcaggcgcatgccgccctggtcccagttggtggcggcgtcttcactggcgagcacatctttgtcgatggtgatccagatcgcctcggtgggcaggctggcaatcatctggtcgaggaaggcgcccaatccaggtcgccaggttggccagtgcagtggtttcctgttgctggtggcgggccgaccccaccgacccagactggacgggatgcgca

SEQ ID NO: 708148 - DNA, 370 bp, Homo sapiens
aacgatggtcctcagctcatcaactctgcctcccgggttcaagtgattctcctgcctcagtctctcgagtagctgggattacaggcagtgtgccatcacgcgcggctaattttgtgtttttgtatttttttgaagtagaaaggggggtttcgccgtgttgggggagaccgggcttgaacttgtgagttcgggggatctgcccgtctgggtctcccaaagtacggggtattatcataatcgatttggagacaggatctcacttggtggcccaggctaaggggcgaggggcacaaacacagctcatggcagcctcgacctcccgggcgcaagggatcctccttgcgcagtcccctggagtagctgggcctac

SEQ ID NO: 708149 - DNA, 259 bp, Homo sapiens
gggggctgcatgcacaggtaattagatcagaaccaaaacaggacagggattttcacagtgcttttctatacgtaatgtctgtaatctatagataacataaccgagtaggtcagggatcgatctttaactaccaggcccagggtgtggcgcggggctgtctgcctgtggatttcatttctgccttttagattttacttcttctttctttggaggcagaaattgggcataagacaatatgaggggaggtctccctttgagc

SEQ ID NO: 708150 - DNA, 122 bp, Homo sapiens
gctgtttctgcttgctgatccggactgcagcagcagaggaactgcaccatggagtttggactgaggtggattctccttgtaggaatattaaaagggagtgcatccgccccaacccttttccc

SEQ ID NO: 708151 - DNA, 845 bp, Homo sapiens
cgactcatcttgtttaaagagcctctgtatttcagaatgatatgagtctgtttcttttctccatgtctccatgtctcttccatgattcccttctctttttttttgggttttttttttggtttctctgtgaagaacgggagttttggcctctgtgttcgcccgaggctgtggaggtgtacatgggccacgactctcggcctcacgcgaaaccttccgccttcccgaggtttcagagcaacttctccgtgcctacagcttccccagatagcggggattatagggcattattgccaccagtgccgggcatagtttggatatggttttttctaagtagaaaggggggtttctccaggtatagtcaggcgtggtctcgaactccacaacctcgagggtgatccaccgtggcctgcggcctcccaaaggtgcggggcattacgggctactgagccaccagcgcgggccaatctcccttcttagagtcacagaagggaactcaggaaagcagctctaagggaacgagaacacccataacgtaccgtgcctccgccgcgctgcggcgtcacaactccctcaacgtccttctcaaacagcaccctactctctacacccacgcggcccccacacctgaccaccttcacccctgtgacctcaccccccttccaccctgcctgaaacgctgaacacgccgtgacgacactcaacctcgaccggtccacagaccctgggagcccagacagctcaccgggataccacacaactcgtggcactctccccaatgcgagacccgccgcgcaccaccccacgacaacccccaccgcgcacaaaccccacagaccacgcacacc

SEQ ID NO: 708152 - DNA, 1029 bp, Homo sapiens
  misc_feature (396)..(396): n is a, c, g, or t
  misc_feature (419)..(420): n is a, c, g, or t
  misc_feature (423)..(423): n is a, c, g, or t
  misc_feature (452)..(452): n is a, c, g, or t
  misc_feature (457)..(458): n is a, c, g, or t
  misc_feature (488)..(488): n is a, c, g, or t
  misc_feature (501)..(501): n is a, c, g, or t
  misc_feature (507)..(507): n is a, c, g, or t
  misc_feature (539)..(540): n is a, c, g, or t
  misc_feature (622)..(622): n is a, c, g, or t
  misc_feature (624)..(624): n is a, c, g, or t
  misc_feature (686)..(687): n is a, c, g, or t
  misc_feature (800)..(800): n is a, c, g, or t
  misc_feature (813)..(813): n is a, c, g, or t
  misc_feature (832)..(832): n is a, c, g, or t
  misc_feature (844)..(844): n is a, c, g, or t
  misc_feature (906)..(907): n is a, c, g, or t
  misc_feature (909)..(909): n is a, c, g, or t
tttgtgatgtgggttgggtgaggtggtgaaatggtattgtgagtgggggtctcaggggtgttatgttgtgttgagagggttgtggtgtgaagtgtggttagtagtggtgagtgttttgggatttgtgagatgttagttgaagctgttcggtacaaggttggagtggaagtcgtgtggatgatgtgggtgggttttgtgttggtgagtaggtgtagatagtagactcgtgtcgggtgtataggtcgcgtgttattgtgaagggcttgtaggaggttttttggctcatgaatctagcatatgatttgtgggaagcggggtgatcctgcaatggttttgatctcttgggcaacatcttttggcccaagtttgggcaacattggcccaagtttgggcatntttggcagtagctgtatgggagnnaanagagtaagaggaaatattcccacagccangaagnntgaaagggcaccttggcctagactagggcngcctggtcagtcncaggangaggccaagggctttctggccatctcaggganngggccaccaggttcctcccctcaccccatattccatcaccttcctcctctgctctgggtggtaagggaagccctcctggttncncacaggactatgatgctgcatggcagaggcaggtataacacagcactacatattggaaattnntatatttttctaaataccaatgcagttttgctacggttacaattttgaaatattaactgagcctcaaaatcaccctttctgtcaagcatatcttggcctctcccatgtctcantgttgcctgcatntctcccaggacttgggggnggggtgaaaagngtacagagaagatactgaaaagggctcctggggtacacaagcccagcaggtcctgagtgaanncngtgggccctccaaatgctcgttttatagcaacctctctctaccctagttctccaaattcacattctgccttcctcaggtttgatatctggcaggttaatcatccagaggaaattaaatat

SEQ ID NO: 708153 - DNA, 103 bp, Homo sapiens
agcacccaagattcagcgtcttgttactacacgtgtcctgtcagcacaaacggcggcgtattgctctcacggaggagcctacccaggagactaaacgaccgcg

SEQ ID NO: 708154 - DNA, 551 bp, Homo sapiens
cactacatctctaaatgtggttcactgcagtggtcacagatggctggcactgctttttccttgagagatgctgtctatgtcccctgcccttgagctcggccggctcctgcgaaattgtcactgctgagtattggggttattgactgaaggacatgccgggcttgagtttgcaggctcagctcctaagagatcatagcttcctctcccacctcttggaacacttgcttttggaagccacaaggagacccatggaaaagactgggcccttcaagctaaactgagctctcaggacagcagccggacctgcatctcctgagggcctccatcctggccctgcaccctccagctccagtgaccaggcctggcttgcgatgagccaccccggacagaagctctctgggtttcagatctgcagacaaaataaatgattggacttttgtgaagccactaagttttggctaagatttgtgatacagcagtacatagttggaacattaagtgttggatgtttttctaacaaaggaatcgtatacaccaatattttattttac

SEQ ID NO: 708155 - DNA, 1068 bp, Homo sapiens
  misc_feature (788)..(788): n is a, c, g, or t
  misc_feature (1005)..(1005): n is a, c, g, or t
gcgagcgcggacagcacgccatgtaaggactcgggacaagttacgagagtacaaggtagtgggtcgtagcctgactacccgcaaatgccacaagccgaaccctcgtatcgcatgcgaatctatgcagccctgacatcatggtacgatcagcggcatagtcccagttgcctgggtaactgtggtgatctccagttagacgaaagatgcaaggacatgtcttccaggggcagagtagtaccggtactagtgtggcagcgtagtgacgtacgaagactcgtcactgaatggtcgagaaacattatcggagaatcctggaatgctgcatcattgaatcccacaggaagccagagaagaagctctacacaacatggtaacccagagggacatacctggagatgctagagcaactcggtcgcaccgacgacttgtatatccgcaagatggttatcgtggagcatcattgtgtgtggccactgggacaagcaagtgtccaccgaatgcgcagaaatcagaggtcccatgaaagtcattgacaagggtgtgacgactggtagcaatacacgctggtctacaagagcagacgatcgacgccgagcctggacccggtgcttagctccgaaggaccaaggggaacgccaagccggaacaattccacaaaaggcaatccaacaggtgtacctcgacttggaagctcgcacaaccgggaagatccattggggagacacagttaccatgtcaaacacacgaaccaaacgaggagcgtttaaccaacgcccaacgaccaaaancggagacggcggcccccacaggacacacagacaacggattttcgatcatagcataacgagaattgggcaaaaggggggccccgatcaagaccacccagggcggtaatgagtttgggacacgcggaaaagagagtgtacagaacgatcccaggtgacaacagcggagccgacccaaatacataagctaacgcacaaagcacaaacgacacacaacagnacgcgaaagaacgacagtagcccaacgagagaaaaagcgaacagcaacacaaaggacaggcag

SEQ ID NO: 708156 - DNA, 918 bp, Homo sapiens
agcggaggatcctcagaagaaggaattgcgcgttcgtgcgtcctagattcgcagtgcagcgtggagggttgaaggcagcgtgttctgattcttgagcgggacggtgaggcgcatacgtggcttggcgccgccgggggctatcgcaggccttgagatggccgagctaggtcggtgctttgtttgacctcgagctgctacgaagctttcatggtccagtgccgggtgctgggcagcccgtgaccctctgcgtcgcatccactcgactgtatgagtgcgtagtcttggaacacggtcttcgtgggttaacgcccgatctttagacgcgattctaaaactgatgaaggaacaccttcacacgtatggttcgactacgctttactggaaatgaacttggaacaactccatgaagacaaggcatagacatatacactagtaaataggcgtatagaagcacttgtacgaaggaaattgtcagcggatcacaaggcatgagaagcagtttagcgcaagcgattcacaatgcttctggattgtgaagtgggcaaagaagtacaataaagggcgatgcgtggagattaaaacaggtgtccttagaacgtaactattaagttgaaaacactgaacgcctccgatgaatcgccgctggtggcagggttaagttggaattgcttaagaccattaagggaaggaggttcagtcaaaacgagataccaagcctgaaaattccttccagttaataattcaccactaggttcgctgtttgttttaattggaaacttaattgaggaagcggaattccggtttcacaaacttgggagtgggattaaatcccctgggggttagaaaccacgttgaaaatgggcaggctaatgtagtctggggacttggctcaccagcctggtctccgatactccatgg

SEQ ID NO: 708157 - DNA, 994 bp, Homo sapiens
agccgcaggtcctgtaggcagccatggcgcccagccggaatggcatggtcttgaagccccacttccacaatggactggcagcggcgcgtggccacgtggttcaaccatgcctggccctgtaagatcctgcagactgtaatggccctggcaatgccaatggctgctgcctgcatctgcccctgcgcccctgcgtcgggtcccatcctggcccatctgtgctgctgccccactggttcggtaccacactgaatggtgcgctgcctggcctgcggcttcagctctggatggatgctcagtggtgtgcctggcattcacaagaatggtggccctggaccatcggcatttcttgtggatccgaggaggcggaacaatgtccactggatgtccctgcatggccaacgtgcagcggctgaacggagtacctgctccaaactcatcctcttccccaggaagccctcggcccccaagaagggagacagttctgctgaagaactgaaactggccacccagctgaccggaccggtcatgcccgtccggaacgtctatcagacaggcgaaagctcgagtcatcactgaggaagagaagactttcaaatgccttcgctagtctccgtatggcccgtgccaacgcccggctcttcggcatacgggcaaaaagagccaaggaagccgcagaaccaggatgttgcaccctgaaccccctaaagccctcctggggacttgggaactcagtcggcagtcatgctgggtctccacgtggtgtgttcgtggggacaattgggcctgggatggggcttcactgctgtgacttccctctgcaggggatttggggggcctttcttgtaacggacggcccaggcccttgaacactcaatatgtctatatcaataaacaactccggcgcgcactaacaacgcccggcacaacagtgctttacacgcgccctggacacaggatatctcacccaacttttgcaacgtggaccaacggggac

SEQ ID NO: 708158 - DNA, 330 bp, Homo sapiens
tcattccagcattactcatccagtccgtgtggtcacactagtctcattgcagtatccatctacatctagttacggttgaaactactatggcacagttctacctgactgataatattctccacctgtgatgctgggagattgaactagttgtgtgcctaccctctagagttgaggtggacgcattggctcatggctgtgatctccgcactttgagcatactgactgcaagagtcctggagcatcctggctaacacggtgaaaccccgtctctactaagaataaaaaaataaaaacattagccaggcgtggtggcgagtgaaattacggcca

SEQ ID NO: 708159 - DNA, 232 bp, Homo sapiens
cctagagacacacgtttcccgggctagtccacatagaccagatgagcgcttgggccgccgatgctgggcaagcaccgctaaggcatccgccttacctccatgcatattgagatagaccgggagcagcaaagacagaaaactgacgccagaacctcctcttcacgatcccaaaacatgggcaccatcatcccatgataagagacttgccccatcaatgccgccaatgctccgg

SEQ ID NO: 708160 - DNA, 1056 bp, Homo sapiens
  misc_feature (237)..(237): n is a, c, g, or t
  misc_feature (720)..(720): n is a, c, g, or t
  misc_feature (733)..(733): n is a, c, g, or t
ggctaggtagcgaggctgggtttgaatcggccgagggctctctggtgtggcgctgcggcagctggggcctgactggggcagctgcttatccgcttcgttcgactccttcaatgaggccgccatggttctggtctcctgtgatcatgctggtcacgcccctgctgggcctcactgtgcctgtgtggctggcgaagatcgcggagatggaggatgtgggtttactcttgcccgcctggnaagtacattctgtgctgcctgctgggtcacgccatccatgggctcctggtactgcccctcatctacttcctcttcacccgcaaaaacccctaccgcttcctgtggggcatcgtgacgccgctggccactgcctttgggacctcttccagttccgccacgctgccgctgatgatgaagtgcgtggaggagaataatggcgtggccaagcacatcagccgtttcatcctgcccatcggcgccaccgtcaacatggacggtgccgcgctcttccagtgcgtggccgcagtgttcattgcacagctcagccagcagtccttggacttcgtaaagatcatcaccatcctggtcacggccacagcgtccagcgtgggggcagcgggcatccctgctggaggtgtcctcactctggccatcatcctcgaagcagtcaacctcccggtcgaccatatctccttgatcctggctgtggactggctagtcgancggtcctgtacgncctcaatgtagaaggtgacgctctggggggggggcccaaaaaaaaagggggggggaaaaaaaaaacctttccccccctttccccaaaaaattacggtggaccgtacggagtcgagaagcacagagcctgagttgatacaagtgaagagtgagctgccctggatccgcttgcatccccactgaggaaggaaacccctcctcaaacactatccggggggccgcagggatgccacggtcgctctgagaaggatcagtcatgtaaacccccggggaggggggaaccccttttttttttcccccccccctttttttttttggtccccc

SEQ ID NO: 708161 - DNA, 1001 bp, Homo sapiens
  misc_feature (237)..(237): n is a, c, g, or t
  misc_feature (720)..(720): n is a, c, g, or t
  misc_feature (733)..(733): n is a, c, g, or t
ggctaggtagcgaggctgggtttgaatcggccgagggctctctggtgtggcgctgcggcagctggggcctgactggggcagctgcttatccgcttcgttcgactccttcaatgaggccgccatggttctggtctcctgtgatcatgctggtcacgcccctgctgggcctcactgtgcctgtgtggctggcgaagatcgcggagatggaggatgtgggtttactcttgcccgcctggnaagtacattctgtgctgcctgctgggtcacgccatccatgggctcctggtactgcccctcatctacttcctcttcacccgcaaaaacccctaccgcttcctgtggggcatcgtgacgccgctggccactgcctttgggacctcttccagttccgccacgctgccgctgatgatgaagtgcgtggaggagaataatggcgtggccaagcacatcagccgtttcatcctgcccatcggcgccaccgtcaacatggacggtgccgcgctcttccagtgcgtggccgcagtgttcattgcacagctcagccagcagtccttggacttcgtaaagatcatcaccatcctggtcacggccacagcgtccagcgtgggggcagcgggcatccctgctggaggtgtcctcactctggccatcatcctcgaagcagtcaacctcccggtcgaccatatctccttgatcctggctgtggactggctagtcgancggtcctgtacgncctcaatgtagaaggtgacgctctggggggaaaaattacggtggaccgtacggagtcgagaagcacagagcctgagttgatacaagtgaagagtgagctgccctggatccgcttgcatccccactgaggaaggaaacccctcctcaaacactatccggggggccgcagggatgccacggtcgctctgagaaggatcagtcatgtaaacccccggggaggggggaaccccttttttttttcccccccccctttttttttttggtccccc

SEQ ID NO: 708162 - DNA, 417 bp, Homo sapiens
aagcggttccattgcgggcacccatgtctggacaggagaatgcggtggcacccggaagcttggggacaccaagaaccacacagagccccaaacagggtgtcacagctctggctcggggagctcctaggtctgggcttcctgaagggctgcagctcttctcttcttgtcacccacaatgtggaaagcggggcagggcatttcagccttatttgtgttacacctctttcagtcccaccattcggtgggtcccgagttcttgtcctgcggccaggaagaatgaggtatgcagacagctggagggtgagcaaaaaggagaggagctttattgggcaacagaacagttcagaggagacccatggtgggtagctcttcctgcaggcaggtcatcctgacgagtatccagctctcagcagagag

SEQ ID NO: 708163 - DNA, 149 bp, Homo sapiens
aagaccctcggtttgtttaccctggtgtttacatttattcgacatgacattgccaccggacttctactttgaggaatatctgtaacagtgagtatgaagcagagtgaagtgacatgaggtatgtctgtagctgttgcagtgtgcttccg

SEQ ID NO: 708164 - DNA, 782 bp, Homo sapiens
gggcagcggtgtgttacctgccgccagcatgatgcgaggcaaggtccagccgttccgcccggcatacgagcttatggagcagccccctttgaaggtctccaagtggacttcacagagatgccaaagtgtggagggtattcagaacaatattataggaggggtgtacaccctctgcgatattgagagtcatatcatcctctttcgctctggatattaggaacaatatcacagggttttgtaccccacctgcgatattgggagtcatatcatcctctctccctgtggatattaggaagagtatcacaggggtgtggaaaccccctgcggtcctgggagtaatatcagcctctctccctctgaaaataggaagattttcacaggggtgtgttaaccccctgcgatattgggagtaagatcatcctctccagccaggaaaagactaacaaggtcacggggggtgaccttgtaaatcccagcactttggaaggccgaggctagtggatcacaaggtcacaagatcgagaccagcctggccaatatgtcaaaaccccatctctactactaatacaaaaacttagccgggtgtggtggtgtgcgcctatagttccagctactcgggaggctgaggcaggagaatcgctgaagctgggaagcagaggtagaggtcagcaagatcgtgccactgcactcaagctgggtgacaaagcacgagtccgtctcacaagatacacaacaaaaaaacaaaacaacaaccgcacgacaaaaacgcacgcgagcgcaaa

SEQ ID NO: 708165 - DNA, 1357 bp, Homo sapiens
gcgacgagaacactgactagacgattcggtgcgcggcgcgggacaagaaggtaacataacctgatcatgatgctgtagccatagtgagagtgtcatgtgatcaatgatgtaggggcttggacattcatcatacaataagacaagtgcgcggagggaagcggttggatacaagaatcaaaatctgagagtggagatggtgagtgatcatggtattgtgattatatgagagatggaagtcgaaggcgagatatgatagtcacggatgtacgtgccccggagccgaaaggagagagagaaaggagagagagaagaggagagagaaaaaacagaagcaaaagaggagaaaaaaggaagagaaaagaaaaaagagggaaagagaagaaaagagagaaggagggagagagagggggaaggaggaaaaagagaggaaggaggacagaagaaagagagaagaggagagaagagagaagaggaggagcaccaaataaagaaagaaacacaaggagaaacgaggaagaagaagaagaaaggcgagacaacagacaagcgcagaaagacgggagaggaggagaagaagaaagggaggagaaaaacgaaagaacagaagcaggcgaagaagaaaagacgaaggagagggagaaagagccaggagggaaagagaaagatagaaaaaagaaaaacaaagagaaagagaggagcaacaggaagagaacaaaaaaagaagaaaacacagacgaaagagagaccagacaagcagaccaagaaaacagaacacagaagaagaagcagacagcgagacaaacgagacgagcaacaagaaagaaaaacggacgaagcaacgaagcaggagacaacagacaaagagagcaaggaaggagagaaaagaaagagacagagaaggaggaaggaaagaagagcggaaagaacggaaaacagacaccagcaggaagaaccagagcaagaagaagacaagagagacagagaagagcaaaagccaaagaggcggagcgcagcgacagaagagaaaacgaacaggcaagaaagaagcacagacagagaagcgcgagagaaacagggcgacgcgaaacggacatgaagaacggaacagagcaagagaagaaaggaaaggacaacgaaaagacaaacaaaaaaggagaagaaagcaggaacaaggaacagaggcgaacacaaaaggaagagaacagagtcaaagaaggaacagaaaacacgaaagagaaagagagcagagagaaacaacaggaagagaagaagaagaagaaaaaagaagaacaggaaaggaaagcgaaaaacaaaagaagaaaaggcaagagaacacgaagagaagaaagaaagaaga

SEQ ID NO: 708166 - DNA, 942 bp, Homo sapiens
  misc_feature (130)..(130): n is a, c, g, or t
  misc_feature (418)..(418): n is a, c, g, or t
cgtgtctcctatgtgttgagagaaattttaatatttatgtggaaatgtgttggaaaagtgggttttttgggacgccacgagtgaggaatttttgggtttatatggttataaaaggagccccacatctgcntttcttttagcccttaattagaaggacaaccccagcggtgtgattttaatgggctccaaaaatgtggggccccgcgcgattgattttggggagaatttagaatgttgaaggtaaaaggtgagccccatcccgtgattgttagattggggaaaaataatctctaagccccccattaaatctcgagtttaggaatatttccgctaatgaataacctcttccacacccaaatttcccccccatatagctgcccttcaagccataatgggatagttttaaatttctcttgcnctcgtttataaacccagataattctaaatacccccacgaaattatcctcgagtggtgtaaaattgagaagttgtggtaaactctgtgagaatgttttataaccacaaggtgtttaaaatagattaatgttaaattcttaaagatccactttaaaagagacttaatgttggccacctcgggtggcacaccccatgggctttcttcccacctataggcacaccacgagagagtgaccccacacaataatatattaaagacgcacaaatttgttcactcttctatattacacacttctgcctttttagaaaccactctttagttcactattctattattttttctaaacccacgtaactccctcttgttgaggggtaattattagtaagttaaagtttttaaatggagaatataaaatcactgtaatgcttattctttgctgtaaaatccaatgaatataaattgagggaaactttaaattgttgtaggatgactagtagtaaacatcatcttaatttttaaccata

SEQ ID NO: 708167 - DNA, 277 bp, Homo sapiens
catgtgtgttcacggagactgttggggggtcaggagactgcggggtccagagatgtgggggtcggagatgtgcgggtctaggagatgtgcagagcaagcgcacatgatgagctgatcggagatgcccaggtccggggatccaacggggtccggagacgcgcgggtccggagatgcgttgggttccttgcagacttcgctccgcccgggacattctccggaacctgcacatctcccatccacatattttcagacttgcacatctttggacccggacat

SEQ ID NO: 708168 - DNA, 886 bp, Homo sapiens
ggcgggtaggcgtctgcgctcggttgagggctcggcgcggggtttcctgttccttcttctgcgcggtgccagtcgggacttcggcctgacccagcccccatggcttcagaagagctacagaaagatctagaagaggtacaaggtgtgctggaaaaaggctactaggaaagggagtacgtgatgcccttacagctgaaaaatccaagattgagacagacactcaggaccaagatgcacagaaactcacagaagacagcaggaacttcttgatttatgaaaacccagctgcttgtggtgtgctcccatgaacaaccgggctatacggtgaaacatcagtaacttatggatgggatcagtcagataacgtttgtgaaaatctacattaccttactgaagtcctcaagttcccacctgagaaatgtgcaggtgcattccacggaggaaggtctttgatccttttggtaaagaattctaaatgggaggagttactccatgattgtgacaatctcttgaaacccatctctgtggaaggcagtcacaacacagtcaggactgataccgtgcttatattgtggcggaacggacaagtggaaaccccaaggtggattacctgacccagttgaaaggactgcaagaacaaagaggagcctcctatgagtgaacaggatcccagggaggatggtcgatgtccaacggcacttttgcgcatgcgacgaggctagaagcggccctacaaagccgcggagcaacagaagcagcccgggggcggatgcggcactcagtcgcggaccgcggggggcacacgggcacaggaagcgcggtaaaggagacagaaaccagcaggagacctggggggaaagtgaccgcgggggcgcgtgaggggaga

SEQ ID NO: 708169 - DNA, 231 bp, Homo sapiens
cgagctcggtaccccccgtgttgcgctcccgcccggtgttgcgcttccgcggacgctaccccgcgacgaataagagggccgctgcggtgagccttgaaacctaaggcgccggccccggtggaaccgccgcaagtgcagatcttggtggtagtagcaaatattctaaccaaaacttctaaagccgaagtggagaagggttccatgtgaacagcagatgaacatgggtcaatc

SEQ ID NO: 708170 - DNA, 305 bp, Homo sapiens
tataacgcgtcagggtctgcaactccactatccctttcagcttggtcttctgccataagttcaattagtcacaacactcacactagatgtgagtgtccagataatccttatgctaaaagcttctgcgaaatgtgtccacatttattgtttggaaatcgcaactcccagctccaaaggggttaatgtctgaacagcattctactgcgactcaagattctcattttcaccaagctgtgtaaggtttccttctgtacctttgtcatcttcccaacttgcagccaactgtgtcgactgttcagcatcac

SEQ ID NO: 708171 - DNA, 811 bp, Homo sapiens
  misc_feature (52)..(52): n is a, c, g, or t
  misc_feature (71)..(71): n is a, c, g, or t
  misc_feature (77)..(77): n is a, c, g, or t
  misc_feature (84)..(84): n is a, c, g, or t
  misc_feature (86)..(86): n is a, c, g, or t
  misc_feature (92)..(92): n is a, c, g, or t
  misc_feature (99)..(99): n is a, c, g, or t
  misc_feature (113)..(113): n is a, c, g, or t
  misc_feature (115)..(115): n is a, c, g, or t
  misc_feature (123)..(123): n is a, c, g, or t
  misc_feature (135)..(135): n is a, c, g, or t
  misc_feature (145)..(145): n is a, c, g, or t
  misc_feature (155)..(155): n is a, c, g, or t
  misc_feature (158)..(158): n is a, c, g, or t
  misc_feature (160)..(161): n is a, c, g, or t
  misc_feature (164)..(164): n is a, c, g, or t
  misc_feature (213)..(213): n is a, c, g, or t
  misc_feature (215)..(215): n is a, c, g, or t
  misc_feature (226)..(226): n is a, c, g, or t
  misc_feature (235)..(235): n is a, c, g, or t
  misc_feature (239)..(239): n is a, c, g, or t
  misc_feature (248)..(248): n is a, c, g, or t
  misc_feature (251)..(251): n is a, c, g, or t
  misc_feature (266)..(266): n is a, c, g, or t
  misc_feature (269)..(269): n is a, c, g, or t
  misc_feature (274)..(274): n is a, c, g, or t
  misc_feature (282)..(282): n is a, c, g, or t
  misc_feature (285)..(285): n is a, c, g, or t
  misc_feature (293)..(293): n is a, c, g, or t
  misc_feature (304)..(304): n is a, c, g, or t
  misc_feature (316)..(316): n is a, c, g, or t
  misc_feature (322)..(322): n is a, c, g, or t
  misc_feature (385)..(385): n is a, c, g, or t
  misc_feature (418)..(418): n is a, c, g, or t
  misc_feature (425)..(425): n is a, c, g, or t
  misc_feature (446)..(446): n is a, c, g, or t
  misc_feature (454)..(455): n is a, c, g, or t
  misc_feature (469)..(469): n is a, c, g, or t
  misc_feature (477)..(477): n is a, c, g, or t
  misc_feature (484)..(484): n is a, c, g, or t
  misc_feature (494)..(494): n is a, c, g, or t
  misc_feature (509)..(509): n is a, c, g, or t
  misc_feature (513)..(513): n is a, c, g, or t
  misc_feature (556)..(556): n is a, c, g, or t
  misc_feature (574)..(574): n is a, c, g, or t
  misc_feature (593)..(593): n is a, c, g, or t
  misc_feature (719)..(719): n is a, c, g, or t
  misc_feature (803)..(803): n is a, c, g, or t
tcgcagaaatgcaaagacgcctgagtgatacaacttgcaattattattttcnagacagaagtgccaacggnggtgcnttccagngnatcagnggttgcnacattctccttctngncttcgggnttcatggcaggnaacagaagtncttccttgangtngnnggngtccgtgagaaacatggcgactcgatcaatgcccatgccccagccagcngnggggggcagcncatatgccngggnagtacagangtnttcatctatgaacanggnctcancatcaccngcngccttggncttggcctgtncttcaaaaagcngccgcngccgcatgggatcattcagctcagtatacgcattgcatatctctttcttcatgacaaacagcncaaagcgctcagtcagaccctctttagagcggngccattnagccaaagggctcatgtgtcngtgggtgnncacagatgaatgtnggattgangcaagtnacttccaggnactccccaacaagcntgtnaaggagcctggctgtggtccgaggtggagggcattcaacagcntttgccacacgagatatnatcaagaattttgcgagtntcttcagtttcaaagaggttcgtttctggcagcttcatccccagggctttctcaagctcttctaccatgttgattcgccggaagggtggggtgaagtcaacatcgtaggcttggccctctgggcantctggggtggtaggtgaccttgtaactgcctgtaatatgcttcaccatccctgaaaccatcttctccgtgatttccatgagatngtgatagt

SEQ ID NO: 708172 - DNA, 219 bp, Homo sapiens
  misc_feature (38)..(38): n is a, c, g, or t
  misc_feature (96)..(96): n is a, c, g, or t
  misc_feature (102)..(102): n is a, c, g, or t
  misc_feature (115)..(115): n is a, c, g, or t
  misc_feature (180)..(180): n is a, c, g, or t
ggcacgaggtgaagtctactagtaggaatagacctcanttgatcctcaaagatggtgagtattgagagagtgtttatctctaacttagcctttgtntttctnttcacagaatttnttcaggttgaattacctagaagtttgtcactgacttgtgttcctgaactatgacacatgaatatntgggctaagaaatagttcctcttgataaataaacaatta

SEQ ID NO: 708173 - DNA, 1944 bp, Homo sapiens
ggagaactgaagactattctcagccatcagactgtcgacattccatgaaatagtagtcgagcattgactctgcagaggtggacgcacaggtgtatcgagcaagggcccgcaggaggcaatcgcctgcggagtggactttcgaaatcaagcagtcagatgtaggagacatcgatgctcttgcgttgcgtaaagatacaatacagaatacgaggctcctgggattgacaaaatggtggaggtaaactgaaatggaactctggagtgaccgttctcggagcatactgtatgatatggtccatgttagcatgaccagtgagtcaatagggatgttatagaatataggtggcgttcacgacttgaacaatgagtgaaaggtcgtggtgggtacgtgcggtcaagctttttcgcgcaggtaacatagcgaatttggttttatatacgcaaagggacagaagatcgaggggtactactattgctccttgaagacattgcgcggaaaaagtgtctccctattggggctatgcaatacacaatttatacattccggagcaaggggggtactccggggacatagaagtgaccaccagagcgatttagtcagacttcgcggtaagacaggagaaatatacctacgaaacggccccgccatgggaacacaaggacgtagagaaagcggaaagggtgccccctacggtacaaagggaaaaaagcagatgaaaccccacattaatggaaagcgcacccaagagattgcgggcgaaacgacactattcaacccacccgacgtgaccgtgatgagaaaaccacattccaaagtacgacatatggcacacagagccacaaaggaatgaggaatatatcaaaataacgcacacacgcggaagctcactgtccaagcaggtaaaaccaacacgggtgcacggcaagaagactgggggacaaccttcagtgaaaatatgggctacagtaccttcgcacacgacaaccacaacggcggtcaccaagccgtctggacacacacaaagagggcgcgaagcagggatcgtcgtagacgatagcacaccacatcagcagagaaaaactccactaaacatagcgagcaagcacggactacaccccaaaggggaggagtacagcgagacacaagcatgggaccacgcgacaacgtagatccacagccaacatggacaccaccaactcagacaaggaaagcacacactacacctctatgcacagcggacatcaacaacaactaggacgaacgagcatcggtcaccaaataacacacagaatgaaaccccgtgagactgaggagacaccctggggaaaagacagaacccacagaccagagaacaagacaccaagccgaacagcacagacgaacaccagacaaaaaccgcagagctggcacacaggacaaccacagaacgcagcgcaccagcacaacaccaggaacacccccacgagaccacaaacacgaggcgtcaccacacgcacacccagcagcaccacacgcgatgcgactcagaacacaaaccacggagacacaaacacaccaagagaaacggaagcaaactatcccacaagagaacacacagagtgcgcaagacacaaactcacctgaaaacagcacaacgcatagaccccagcacaacacatgtgagccgcgacagagaagagcgggcaaggacaaccacgccgaacagcaacgcagacaggtcaacgccagagaccagacgcgaaagccaaaagacgacgaaaagaaaggcgaaacacacggagagaacgaccgcaaacaaggaagctaacagcgaagagaagcaacccaggaggaacagacacaacgcagacgaaagagaagtggaaacaaacagcaaaccggagacaaaacagaacgacatacccaggagacagaacgagagacaaccagacataacaaaacaa

SEQ ID NO: 708174 - DNA, 200 bp, Homo sapiens
gttccagctgcttctctcagaggctgtgagccgcgcagctaaggcagccggagctcggtccctgacgagcccagagagcctgagccgggacctggaggtaccagaggttcaggagagctacaggcagcagctccggtctgatatacaatatcgacagtgggaagaccctgctacagtccccagcgctccccctcatcggc

SEQ ID NO: 708175 - DNA, 118 bp, Homo sapiens
taactggctaggcaattgcgagggaaactgggtgctactagagcttctcatattagatggcccttagaataccttctagttactagttcctaattatggaaccagacttcttgatccc

SEQ ID NO: 708176 - DNA, 572 bp, Homo sapiens
  misc_feature (26)..(26): n is a, c, g, or t
  misc_feature (34)..(35): n is a, c, g, or t
  misc_feature (54)..(56): n is a, c, g, or t
  misc_feature (226)..(226): n is a, c, g, or t
gatacccggcacgctatcggttcaanggtggatnntgtaatcctagcactttgnnnggtcaaggcaggtgtactgtttgagcccaggagtttgagaccagcctgagcaacatagtgagaccccatctctaaaaaaatacaaaaaaattagctgggtgtggtgactcatgcctgtactcccagctacttgggaggctgaggcaggagaattgcttgaacccaggagncagaggttgcagtgagccgagatcgtaccattgcactctagcctgggtgacaagagcgagactctgtctcaaacaaacaaaaaaagagcagctggaggctgggcatgagccaccacgcttgatcggaagtctccatttgtaagggttgtcttcctttctgtaccaggaaaagcaggatgattctaaatcactaggaactcatcagtagagatggctctggcttaaatctgtgcagcaaacctcagtcttgtttactctgcttttcctggcggctccctcattatcagccttctccgcagccttctttctctgtccagcaaatgatagtattgaaccggatagcttg

SEQ ID NO: 708177 - DNA, 930 bp, Homo sapiens
cacggtggctcacgcctggaattccagcactttgggagagcccagagcaggcagatcatgaggtcggtaagtacatagaacagcctgatcaatcgggaaaaacccctctctctactaaaaaaaacacaaaacttaggctcgggcggtggttggctgatgctgcctgataaatcccagcctactcaggaggctggaggcaggagaactcgcttggaaacccaccagagagcgggagagtgttgccaaggtgtagacttgcagagtactgctagccccactgtcgatcatctccacgaccctgtgggcgcacacgaagagacgactcctactcgtcatcaaaaataaagtaaagtaaagaaagaatgaaattaataggcctgagatgtgccttctaggtttgggattcgcatccatgactgttagcatgggcccaggcggcccgtcctcgatggaaccacgagcagcaataggaaccaacagctccaaaaagtggcaacaagaggtgtctatcaaatacgcccaagttcatcagtagagataatattctgaaaacaggggccagtgtgactcgagaattcattgccgagatgacatcctgtctagtatcggaaaggctgaagtggtggagtctgccctaagcccattgagggtgtagtaaaaccaagcattgagcttctcccagggtggtatgccattccctgccagtgtttaaacatttgggccgggtcttgtgtgacacgctgggggacgtacttgtgaggcctactgagctaaagcggttgggtgcaccggtgcgcttaggtgcccctgcccgatacaatttcttagctgtcccattataagccagggcttgatttgatgttatatggggggcatcggccatctgtatcccacctgtcgcgggggttccctagaagtgaatccccccgg

SEQ ID NO: 708178 - DNA, 196 bp, Homo sapiens
gacagtaaacggggggagggagagaaaaaaactgttgggtactgggcttagtacctgtgtgacaaaataatctgtacaacaaacccccgggacatgagttcacctatataacaaacctgcacatgtaccacagaacctaaaataaaagtttaaaaaaaaaaaacgttactagagatgcacctgaggtgtaatagag

SEQ ID NO: 708179 - DNA, 152 bp, Homo sapiens
tagaatgagcctggtcctggcttttgcgcggctctttgggttgcccctagtggggctcttggggtggctctttgtgtggctcttcgggtggctcgtcgcgggatctcagtctttgtgcgccgcaggtcatccccgtgcttccccaccaagcg

SEQ ID NO: 708180 - DNA, 702 bp, Homo sapiens
atcaagctgaacggatgccagagcaaatcaggctgaaagttggtggtgtggacccaaagcaggtggctgtttacgaagagtgtagcttgcaatgtctccttggctgtcttacctacaaatgacgttaagtcagcccacgggatttttagcccaggccgatgaagcaagcttgggcagacagagtgatgtagctcagatttatgataagtgttttacagaactggagcgacatctacatgccatcccaccaaatattggccatgaaccctcaagctcaggctcttcgaagtctcttggaggttgtagtattaatctcgaaatgtctcgggatgccatagcgtgctcgttggattgctccgaaaaggctgtagagggcttactagatgccacaagtggtgctgatgctgaccttctgctgcgctacagggaatgccacctcttggtcctaaaagctctgcaggatggccgggcatatgggtctccatggtgcaagaaaagatcagcaaggtgccgtaattgaagtgtcgagatgaatataaatataatgtggaggctagtggagctgctagttccgcaagcatttggttaatatgcagcagtatgatcttcacctagggcagtcgaagggaggaatggttgtgctacgtggcctgtggcattgttatgcagttagtataaatcctgctggtggatgaaaggagt

SEQ ID NO: 708181 - DNA, 913 bp, Homo sapiens
ccacgcgtcgctcttctggaatcgcttgaacccaggaggcggaggttgcagtaagccaaggtcatgccactgcactctagcctgggtgacagagcgagactccatctcaaaaaaaaaaaaaaaaaaaaaattaattctgtaccatcacaatttttcacaacgatggcaagccttatgtttggggaccctgtttggctaggcaaagttacaagtgacctatggggacgctcaaatgtgtgtgtgtctctctgtgtgttggtgtgtgtgtgtgcactcaagacctcttaacagcctcgaagccgggggtggcatcccggccttgccattagcatgcctcatgcatcatcagatgacaaggacaaccctcatgacgaagcaacatgaattagggggcctctgggccttggcccaaaatggtcatcagaattgaccttagggactccagagcagcggggactgtctgtcaaaagactctgtatatcttcggggggtgagtttggttgagagaccgagagccctttgtccctggcaccagggctctccatgacacgggagacttcctgggcgggtgccagacgtggcatttctcctctcctcttgctgctcagacgagcctggattgcgcccgaggttgagacagaaaagccggaggagaaagatgtccaagacccactaatcatttttttgcaatcttcccagggtcctgggcgtcccgttggcactgggcacctttctcggatccgcctcttcctggtgccagctcctggaagtgccgctgggtggtgggtctccgccgccacgtcctattgcgttgccagccgtggaaccaccagccggggcggcggggggcgtcccgggaggacctcgcgggtgtctcgccctcaaacacaaggcgctctccgcccctttgtgg

SEQ ID NO: 708182 - DNA, 800 bp, Homo sapiens
  misc_feature (24)..(24): n is a, c, g, or t
ggggccgctaattctaaagttttnctttcttaatcaaggaaagtgaagtacaagtccttgcttgtggcaacttgtatggtttgttacatgagtaggcatctaaaacaagcttgcacattgcaagccacccagtgaagggtcattgaattgctattttaggactaactataccaaaaatgtttactcttttgagtcttgatttctagtctcctggactaaataggttccctgttttcctcccggttcagtttccagacacatcgcagaattataagaatattaaaagctcaggcttatacctacacaggattttctataaccctctttctgctttgagctcctaaagctatttcatagaaaaatgaccttatttttaaatagagggggcagttgaaaatcagtgaatgggcctaccccctaatgatttttttctcagacctaattataataattagccttatgaagtgctgattatctttgggcccagaggagctgcacaccacagacagaggtccgcattaagtaaagtggatttcactttcttcagttgtgagatttctcttttttcttctttggaatgatgcaaagatatatcttccaccaagctctcatttaaaagcttttttcagttaaggaaactatctcttggccatccacagccaggttgcatatttaaattatggatattccaagaaattgtctttcctttggaaagtggcaaaactttttgtgaaatgtttgttttatagttccaggccagtccctagaatctgggtagaattaaatgcttcacttttcat

SEQ ID NO: 708183 - DNA, 134 bp, Homo sapiens
  misc_feature (50)..(50): n is a, c, g, or t
  misc_feature (95)..(95): n is a, c, g, or t
caccgcgccacgtcgacacacgtgctgactcgcacgaatgcgcggcccgntcaggcgactgcgtcgacgatgccgttcagcgttgcgctcgggcntggcctggctcgtcaggtcgacgttcggacggaagtagc

SEQ ID NO: 708184 - DNA, 190 bp, Homo sapiens
tggttacccacctccccaagctcctttaaccaggacagcttccctcccagagtgagctacgtttgaggagagattgaagcaggaaggtggcagtaggctagagttagctcagatcggctacagatgaaggcccagagagtcaaagacatttagctcaccacacactgagtctaggaacggcactagtgca

SEQ ID NO: 708185 - DNA, 295 bp, Homo sapiens
ccgggggttttttcccttttgccggtaaatggttaaataaaggagcccgcccctttttggtgggccgggtatttccaaggggtttttgccccctctcccatttttagggaaattttatggggaaatggggggtttttttcccccggggggaccaagaaaacccgtttagtggtgcccctttggctgggggttgttttgtttaagccgctgggcccccaattttcccttttttttttaaaaaggtttagcctttaaatttggttttttttggctgtgggattaaaacctggattga

SEQ ID NO: 708186 - DNA, 142 bp, Homo sapiens
caggatctatagtaatattatcttattctaacttgttttgtatagaaatgcaacttattttggtaaactgatattatagtgaaataaatagtagctaaatactcctatcttaactaattctattatttctatttatatatga

SEQ ID NO: 708187 - DNA, 374 bp, Homo sapiens
atatcgaatcctcgtggacttcaaagaagcagtgtctatcatattgggtttagatgattcccgaggattataagtgagtgtggatcgcttttactcagcgtgtttgccttcggatgtttgtgtttccaccttgagtgtaagagtgtcttccaaagccgtgtagaccctgtgtcaacttgggtttgataagtacacaggaattctgcaatgccacaggtagtgtggccaatacctccggattctttcttataagatcgcaccagttgtctgtggtacgcacacatatgccacacgtgttaaagagagaaataaaagacgcataagagtagagatttatatcgcgggggcgcgaggcccctctcaagatgtcagag

SEQ ID NO: 708188 - DNA, 1130 bp, Homo sapiens
atagttacgctattgaagttgatcctgtacttactgtagaagagaagtacccttatatggtggaattggtatactaaatcacatggtttgtttgtcaggcaagacttataccataagactgtagctttacaaagaacattagtcggctaagcaattctgacggattgatgctcataaaggaaggatatgagaaattatcgttttagaataatgcatccagactaagcatagcgatcccgcgtgattcaatatcttcttcggcctggcaatcgtgcgaagtgttactatgaggaagttattcgtcaagacttgaggtgttctatcagtctccacatgctcagacagtgtgctgtccgaaattcttgtattggcagtgtcttgcagtggacaacctggggggtgcgtccaaacagtgatcttcaacagggcaggaacctaacttccactgctacttttacacgagagaccatgcactggcttgcctgtgtagcgtaaagtaacaacgcagataatctcttcgagacttctacatcgtcagagacatggatccatagttatgctacaaccaatctatacctttcctattcctaggcgtacgcacatgcgccgccaaagggcaggacctttaacagcaaaatctggtcaaggaattggcaagttgagccccaacttgtgttgaaagcaacaaacttgcgtgtaaaaaatctgggaagtaatctttatacagcgtgaattaagcatgcacgtgtcactgcacgccgctctgttgtagcgaaaaaaaatgaataacctattggggaacagtcctttatctcgaattacctatgtcttatctgaaacggctaacgcacaagcagtgcaaaagtccaagtttgggaaacgctaagctcacaagccgttcctagttatttcacaaggacaaggatgtttcctattataaatgatacgggcaattttcttcctagatgaattggaaaggctgtcctccttccctggttggggggtgccataggttagaaaacctggtttacattcccggtgtccctctgtgtgcctggacgaagtacttctcatccttaataaactaagttctctgctttacactccttcgaaacggaggttgcccccat

SEQ ID NO: 708189 - DNA, 111 bp, Homo sapiens
gaagcgaaagacctgcccttggacaccagcgagtccagctcggacacagagagcttctacggcgcagtctagcggcctgtgaatctcagcctttccccgtacgccttgctg

SEQ ID NO: 708190 - DNA, 781 bp, Homo sapiens
agcggggtttggatactgagctgcatttgcctttactgtggagttatgttgccggttctgctccctaatcttccttttctgacgtgcctgacgcatgtccacattgagaatctgtgacataccgtacctgaataaaggttatatagttgtcatgagactgccaagcagtccggacactacggggtgcacagtaatcactgaaggggacaagatcacagaatagactatgggctttctacggcacattaaagaatgattttttacaaaatgacaagagacaagttggaccagtggtactgaggtccgactcttatttcttggggaaagaaagccactgcataatagtctcatgaactatatcataggtaccagctgggcttgtacccatcgttcatgcaatcatccaatcaacttattgagggacctcacgagcagccaatggccaagggcaacagatgacgccgaattacatctgtcgcagccacctacatggccatccgaggaatggctaaacatatgttatcagagctggagtgagaccagagaaatcgcttgcttctcagatgaactcattgatagtagtgaaccagctgcaagtaagacatatgatgcaagtgatagaaccccagtttcaacgagacgacagttgtcattgctccctaaagagttggcactctatgtgctttcattcctggaacccaaaagacctgctacaagcagctcagacatgtcgctactggagaaatttgggtgcagacaagcttctctggagcagagacat

SEQ ID NO: 708191 - DNA, 221 bp, Homo sapiens
cggatatagagcagagagatgaagaaagggatgtgggaacagatgaagaagaagaaacagcaaaggaatctacagctgaaaaagatgaatggtaaattatactctcaccattgggatccggtgtggagagggaatgtgaaatttacatcatttcttttggggagagactggtttgggatgccccctaatccccgttctccccggcctctagtgtcagtttt

SEQ ID NO: 708192 - DNA, 149 bp, Homo sapiens
gtcctacggccgctgatacggcggcggcttctgcgattgctacgcggattgagcaccggtgagtacacccgctcgctgttccagtgtggtgaccatcgcgctggtggtgtcatggatcgcggcggtgctgttcatcccgtacctgggcg

SEQ ID NO: 708193 - DNA, 341 bp, Homo sapiens
tcatgcatgatagtgaggcctctccagaccatatggaactgtaagtccaattaaacctctttctttcgtaaataggtcagtcttgggtatgtcttaatcagcagcatgaaaatgaccaatacgtcccccacaacattaacactaacatatgcaggtcagttaggaaaactacattgccctctagtactttattcatctttgtaagttgaaatgatattaattcccatcttattctttaagaatgctgtgacagaataatcaatgctttgcatagaatcatttttcattaattaaaaatccttcattcatgatgactgacacatataaaaattctcaagctc

SEQ ID NO: 708194 - DNA, 104 bp, Homo sapiens
ggagacggagttttgctcatcacccaggatggagtgtggaggttgcagtgagccgagatctagtcactgcactccagcctgggtaacggcaagacttcctctca

SEQ ID NO: 708195 - DNA, 791 bp, Homo sapiens
gcttaatcataatcgattcagcagccagagaacataatcatatattatatctatcttgcgaagaccacactttatccccgaccttgtgctatcatcatccgatgaggcaagcagccagaacgcctgagcgcaggcacatacttcctattctacaccctagttaggctcccttcggcctactcatcgcacgaatttacactgcatcaacgaccctaggctcagtaaacattctacatacttcgacgtctcactggccgcaaggaactagtcaaacgtcctgagccaacaagcttaaatagtgagctacgcttagcacagatagcttttcatagtagagagagtaccttctcttacggtacatcgcacgttatgacatccctagagagaccgccagtgtttcggataggtccactcgctatactgtcgtgggaggtgcagagtaggttaacattcgcacgactagttatcatgcgtatcacaaatatcattaggagtcggcgtcatcaatggcgtaatgacaattaccgggcgctacgaacaagactcaatgtgcgttcaaactcccgcacatgaatcgaataaccaatcaattacgtcccttagctccacttatcccatatgctatcttaattccactaatgcagagcaataaattgatgagagcttaagctctcattcttgccatacgaacaaaggtagacgcatgagaagatcagttgcgattgcagtactctctcgaatgcgagtcacataggccctcagtagttaacagccgattactcaatccaaga

SEQ ID NO: 708196 - DNA, 158 bp, Homo sapiens
tccaggcaaagagggttttttttcctccccccaaaggatgtcccccccatcccctttgaaagcacttgcaggaaggggggtccccgtggtccccgtttgtgaacaaaattcctcaaaaaattttttgttaaaaaatggccttcatgtaaactgtttca

SEQ ID NO: 708197 - DNA, 308 bp, Homo sapiens
  misc_feature (2)..(2): n is a, c, g, or t
  misc_feature (13)..(13): n is a, c, g, or t
  misc_feature (43)..(43): n is a, c, g, or t
  misc_feature (71)..(71): n is a, c, g, or t
  misc_feature (77)..(77): n is a, c, g, or t
  misc_feature (80)..(80): n is a, c, g, or t
  misc_feature (83)..(83): n is a, c, g, or t
  misc_feature (88)..(88): n is a, c, g, or t
  misc_feature (99)..(99): n is a, c, g, or t
  misc_feature (117)..(117): n is a, c, g, or t
  misc_feature (119)..(119): n is a, c, g, or t
  misc_feature (128)..(128): n is a, c, g, or t
  misc_feature (134)..(134): n is a, c, g, or t
  misc_feature (145)..(145): n is a, c, g, or t
  misc_feature (178)..(178): n is a, c, g, or t
  misc_feature (181)..(181): n is a, c, g, or t
  misc_feature (200)..(200): n is a, c, g, or t
  misc_feature (206)..(207): n is a, c, g, or t
  misc_feature (225)..(225): n is a, c, g, or t
  misc_feature (244)..(244): n is a, c, g, or t
  misc_feature (246)..(246): n is a, c, g, or t
  misc_feature (284)..(284): n is a, c, g, or t
  misc_feature (305)..(306): n is a, c, g, or t
cnactgaactcanagcctgagcgacagagtagagactctgtcnaaaaaaaaaaaaaggctctacaaagtgncatgtncancanaaaangggaatagagnacagggtgaccccaagangntcatttgtnacactnaaactctccanatatttatcccacgtgggtctgatgcgggactnagnactaaattaactgtatgtngaaagnntcaatatacagagccttnatgtatcgatgaggcttcngncacttatccatacttagcccccttgcctcttccttggnagcatgctttctattcctatnnaa

SEQ ID NO: 708198 - DNA, 145 bp, Homo sapiens
ccctgagaggcaggttcccacgaggcaggtcccactccttgcccatgcccagattggaacagcttcgtcttgaggaggccatctggctgagaagatggagtcagactgtcaggagtgtgccaagggtgagacccctgtctccaca

SEQ ID NO: 708199 - DNA, 370 bp, Homo sapiens
ggtgggcatgatggcaagggacaaagctacaacttggcctgtgcctttggaagctgaggcaggaggaccatctgagcccaggagcctgagaccagcctgggcaacatagagaatccgtctcaaaaaaaataaaaaaattagctgggtgtggcagtgctcacctgtagtcccaggtgctgttcgggagactgaggcaggaagatagcttgagcccaggaagttgaggcttcagggagccatgatcacactactgcactccagcctgggcgaaagagccagactctgtctaataaagcaaacaactcagactcaaggttgcttgttgctggctctcagttaaaaaaacagcgtgtagagacgattaaagttc

SEQ ID NO: 708200 - DNA, 352 bp, Homo sapiens
gagcttaacggctgttacccaccactgagattatctccaactccggaaaatccgcttcactgcgccgccacgtcataacgcaacggcggaatgtcccggttctccttgggcgacacccctccagaatcgcaatccgcgcatgcactggtaaaacttggtgcaaccggcgttcttcaccgtcccgacgaagtcacacaactcggcataactgtcccgaccattgatgccgatacggtgcttcaccgtcaccggaatcgacaccgcatcgcgcaatgtgccttcacacagtccgccacaagggcagggtgcgccatgaaggatctgcgccgaatcattgttgttcctgcaccag

SEQ ID NO: 708201 - DNA, 172 bp, Homo sapiens
cagagagaacgtttctatggctgctgcttctaggagtctctcgctcatagaaaaggcacacactgaaagaggaagcagatcccattgctgtggaagtcccattgttaggaagctctgcttttctggagttcaaattcgcattcatgatgctttaaaccgtcaagctgggtgg

SEQ ID NO: 708202 - DNA, 159 bp, Homo sapiens
tcggtaccgccactatctatgctaattggttataatcaatgacaaaataaacttttcacatcttcatgacaggaggtagttttgcaacttgacaccaggtgcctgctgaaggtagactctcagtctcctactacaatggttgaatagggctacatgcat

SEQ ID NO: 708203 - DNA, 257 bp, Homo sapiens
aagagtgtcactatctaacagagcctgtattctgacacgggggccagatgctggcctgcagcagtgtgctttggatattaacgtttagtttacagaaaagctctgacactattgttatgtctcaaaatcggcccttacaatctcacgtgcccacctcttcagcaatagtccccagggctagagggattgaatagttttaatttctggtcctgtgtctcataaaagcagtttattgtgattgttggtaaagaccgtcg

SEQ ID NO: 708204 - DNA, 271 bp, Homo sapiens
agagtttaatgatcaacctggtaacatagcaagactctgcctctaaaaaaaaagtggcttggccgggcgcagtggctcatgcctgtaatcccagcactttgggaggcggaggcgggtggattacctgaggtcaggagttcgagatcagcctgggcaacacggtgaaaccccgtctctactaaaaatacaaaattagccggacgtggtgacacatgcctgtaatcccagccattcaggaggctgaggcaggagaatcgcttgaacccgggag

SEQ ID NO: 708205 - DNA, 590 bp, Homo sapiens
gttctgcggagaccaagagaaggcgtgtgagcaacccacccactggaagatcacctactgaggaggatcctccaggaccgtccccggaccgacaggcgcgggtggatgcaggttctgtcgcctgtggagtcaccgtctactgccagccggggagctgggcggacaggaccgtccctcgcagggtccatgtgcccaggaagatggccccacggcctctagagctgggctccggtcctcggcgttgccagcctgccattggcctgactgaagaggctccgcatgctctcggggcgcggcggtctgttttcagcgcacgcgtctgtgaacccacaatgctctgggttgccatgcatgtgccccgcagttgttgtacccagaacgcagggagatgtatgtcacagctcccgctctggcctttccagccacctttcatgtcttcatattttaagctgcattgaggatagatgcaagcggatgagctgccctccgtcaggtggacacgggctgacattaccctgggagcttggtgcaagggagaagccgtcattttaaactgtctgcagagcgaccaggaggctcactgaaatccc

SEQ ID NO: 708206 - DNA, 902 bp, Homo sapiens
ggtgctcgttctcttcgcgaccgctgcgcgcgacccgtgtccccacggcggcagcagcgtgggggcgggctgaacgcggagggggcggagggagcccgggggcggcagcagctacagcgaaatggcggacgaacgtgttgacaccgggggttgatcaccaagccgaagaacctgaaatgacgctaaggacccccccagcactttcctcgaagatcgatgtgagcaaccccgcaaaacggtgtggggggcttcgcgcggggcccgttttccaccatattcacgaaacattcggggctcagggcaacttcttccctaatttcaaggctgaaagcactctacgttgtagacagaagggatacgggtgactttgaaatgcctgcgcagggtgatttaagaacggagaagagccaggggtcgttgttcccccagctcctgggaaaagcgtttgtggcgtcagctcccttttaggaggagagactggtggaattattggagtgcaccacttttttgggggaaagggacaacgaggggtgtggacgcaggtttataacaaggggcggggtcatccttgtggcagaaagaaggttgtctccccttggtttttacagggtgcatatggataagaggtatacgtccattaaaataagacttgctgaaattgggcagcaggggcaaaccgggcttcttatgttggatcggcccgtgacagagtctacctttaggatgtgacagaatgtatactgctcgtattatacccatgtccagttgttgtgcaggcaaagtattgtggaacccatccgcttaaaagcttcgcgtaggggcgatcccaccgttccggcgggggaaagggggtttcccggtggtgttaaaattccttgtgcttggcctctaaggccaggtgc

SEQ ID NO: 708207 - DNA, 109 bp, Homo sapiens
tttcctccccgtgacttaaggaggatccaaaggaaggagaaagaggttgatggtctgttgacttcagagcccattgggtctccgtctctccaagacagagtccgtattc

SEQ ID NO: 708208 - DNA, 174 bp, Homo sapiens
ggggggggaaaagggggggggaaaggggggggggtataaaagttccggttggaaaacccttttaaaaaaagtgggcctccacaaactttaagtctccaaggaaaagggttaagaggctcaacccctctttcagcttcaatgtggtgttgaaggtgctggtatcgtgttccccca

SEQ ID NO: 708209 - DNA, 793 bp, Homo sapiens
agcggattagtcaaacactttacagaggcagacagctgatttttaccacttcattccagactgggtcggtcaagtttccttgctttccaagtaagtaggggcttgtgaacccaactttgacttacgtgagagaccgctaactccgcctaagttgacctctaatcccaatgccatccttcgagcctgagatacctcgaaccacatcatccctaatggttcgtgccaactcagatgctgatcgtcgtcttttcctttggctttggaggctgagtggctttctatcaggtatcgtcccattgcggggactttggccagaaaacgatgtattaccatggacacccaatcatcttacccaagtattagccttctgaggtcggcggagtctttcgtcaactattgatcccttccactggattgccatgaagcgatgttcacaggcaaagcggcgtgcccaaatccaggacctccatagcggaaggttcttgtgatcatggctgcaagattagataatttcatgggttgctgtcatttgagggatgtgatcgcctcagaggatatatatttcttgaacacggaaggcatttgcctcctttagggatcatgtcaaccagttgaaccaaacaaaatgttctgtaatctaatacttgcgaagtaatggtcgaattcacgtgatcactcccaatatctgcatgctcatgtcaatgctgtggcacaggggacagaacggatcagacaggcttgctagatctgttacatctcacattgtgcgagaatggacgggaaatcaagcact

SEQ ID NO: 708210 - DNA, 433 bp, Homo sapiens
ttccaactctaaatctctgtctcatttcacctctttgtaaataatcattgctattatgttaaatatcacaactactgtcatttcttgtttacccactacattctaagcttggtgctgacatctttgtatttattatataaaattctcaaaattactctgcccgttaggctttcttatcacttattccaaatgcaaaaataaggtccagggaagataattatgtaacttgttcatgattggagagctaataagtgtcagagatgaattgaaccaaagttggtgtgacaaagcctctgttttaagcaaaagggaaaaaaattctcattaactccaaggattatcatcaggagtccaacagggttcccaatttgggaactactatatcattatcatatggcaaatggtccactatgttagatgagaggacaaaaaa

SEQ ID NO: 708211 - DNA, 341 bp, Homo sapiens
catatgggtaaggagatttgggcacccttttgcaggctgatgaaattttggagcctaaattgtaaagttactgggcctccctgctgggtaaaattcttttggaatttttgagcggcaaaagagttggttgcaggagccccacttgggtagtaaaaggtcacctgagggggattgggggctagggaaggaaaaaccttaaaaaaaaacaccaaagtaaaactagggttggtgggtgcaccaaacccccatggcacgtgtgtacctatgtaacaaacctgcatgttctgcacatgtaccccaaaacttcaagtataataaaaagagaaaatttaaaaaaaaaa

SEQ ID NO: 708212 - DNA, 359 bp, Homo sapiens
  misc_feature (78)..(79): n is a, c, g, or t
  misc_feature (83)..(83): n is a, c, g, or t
  misc_feature (121)..(121): n is a, c, g, or t
  misc_feature (125)..(125): n is a, c, g, or t
  misc_feature (129)..(129): n is a, c, g, or t
  misc_feature (133)..(133): n is a, c, g, or t
  misc_feature (178)..(178): n is a, c, g, or t
ttgcctcagccaagaattgccaggcttgatcgttttatcgttcttcagcacatcacttttgcccccacgctgtgacgnngcgnaggagcactagtcccgacacggcttaagcagagcaagngccncccnggtnccccgctgcctgttccatgaggactggtcccttccttttgttaangtgatgtgccactatatttacacgtatctcttggtatgcatcttttatagacgtcttttctaagtggcgtgtgcaaggtcctgccctgcccctcgggggctgtggtggctccccctctgtttggggtccagtgcattttgtttctgtatatgattctctgtggttttttttgaatccaaat

SEQ ID NO: 708213 - DNA, 415 bp, Homo sapiens
  misc_feature (134)..(135): n is a, c, g, or t
  misc_feature (139)..(139): n is a, c, g, or t
  misc_feature (177)..(177): n is a, c, g, or t
  misc_feature (181)..(181): n is a, c, g, or t
  misc_feature (185)..(185): n is a, c, g, or t
  misc_feature (189)..(189): n is a, c, g, or t
  misc_feature (234)..(234): n is a, c, g, or t
cacgcgtccgctaaacttgtactttatttttctgatagaaatggtgtgtggcgcgtttgaccctttaggggaaggggaaaaatcgtagtagcggtcttcacacatcacctcttggctcgcgagtgctgtgacgnngcgnaggagcactagtcccgacacggcttaagcagagcaagngccncccnggtnccccgctgcctgttccatgaggactggtcccttccttttgttaangtgatgtgccactatatttacacgtatctcttggtatgcatcttttatagacgtcttttctaagtggcgtgtgcaaggtcctgccctgcccctcgggggctgtggtggctccccctctgtttggggtccagtgcattttgtttctgtatatgattctctgtggttttttttgaatccaaat

SEQ ID NO: 708214 - DNA, 399 bp, Homo sapiens
actgtccctactgtatcctagagtttaaaaaaattcgatgcatgttgataagtggcttctactgtatggctgtccacagtaactctgaggaagatgttacggaaacatgacatgtgccaggagccagtggaaatcgagaatcttggcttctgtttctggctttccttttgatttgtgtgatcagttacattctcttttcaggccagatgccattatgataaactacaaggggtatatagtattttgttctgaggttttgccattgtgctcaaaataaataggttatcagctaaggcttaaaaatatcttttggaattacagagatctggggtttttcctgtaaggagcttgacttaaattttttttctgtagctctgttgtttttgcctgtgtacctct

SEQ ID NO: 708215 - DNA, 167 bp, Homo sapiens
catctataaaaaatcataaatggtgtttacaattcagtattaatgcatagcatattttgcatgtatatttatattgtttgtcaaattctttacatattaatgaattgtctttatctttcattattaaatatcttgtgtcaaggtagtatgaaaaacaagttatgttt

SEQ ID NO: 708216 - DNA, 1398 bp, Homo sapiens
ggaagtacggagatctcgctggtcttaacgttcagcctcggtgtctggagcatcctccgctcttacctcgtcctacgcgacgtagacccagtggtctacgaagttcatccattgtctagtactcaagatcctatgcctagtggcagagtcttgtgactcttcgcgtgagaaatcccatctgcttgtagagattgagtcctctttcacactcgaaagaggtactgcttcgagaagtcgtagtctgatagcccagctcgtgtgtcgttcaacattgggtactctattgcagggcctctgagaagactaccgggtgaagcaagaatgtattacacgactcggcttattattgaggagacagggtgttccgtcaaaggggcgtgatatcgacgcaactaatcaaagtatagaagcgtagtgtgccaagccttagcaccagttgtggttacagacaaggtagaaagcgtgaaatctggtctacgattgagagcaacgacggacggcgactttgaccataccagcattgagtggagtcggtacgattaggagtcggaaacacacggcaaatctacaaccgtacgaaagtccttacagagttttctcgcacctaggccggacaaacgggcacaagatatacttagggaaagcagcattgtatcccctcgatattgtggaccggatcattgaacagaaaaagcttgcgtgagaatggacccatgtaatagttagagaatataggcgcggatggcatacaccctcctccgttgagctataccgcctggggccagaacagacttccgggcatttggtaaccatatatagcaggacattcggtgtagacaaagcgcgtctccgtagtcaaagcggcactcctaattcgccattggcacccatatattgcaccctcagtaggcaggttacaccacaagagtgggatcagaaatccacagatttgggcacaagggcctattcgttccactttggtcacttggggacaccacaccaaaaagggacattgagaggcagcaaacatacacacaagaagcaaggctatacaaaatgtgaacgatccccataccccctaatgtagtcaggcgagacgtccaggaacaaacagaactaatacagaggtggacaaaggcccaacatagcacaggccaggtatggggacagccacagggaagaagggatccaatcgcgcaaaaaatacagccacctatggaaatcgcaccactgggcaccgatccacaagggagacagcacacagagctacttcgggagcaaacaagtaccgggtcccaacccacacactggaggcagcagccaccttgcacacggcacgggacttagaccacaccacaaaccgactaccggggacacacaagatagaagcacatgagg

SEQ ID NO: 708217 - DNA, 212 bp, Homo sapiens
tagcagcggtgactaacgtgtgcagacaacagggctactctgtgtttccagcgcgggcaaaaaccacagcgttcaccatggaggttcctccactgtggtgcgtctggattcagcgatcgattctatttttccatccgcaacgcatttttctcaatatgtatcgtatacaactctagttttctcacctcaaatccatacttgctgatttatac

SEQ ID NO: 708218 - DNA, 482 bp, Homo sapiens
  misc_feature (100)..(100): n is a, c, g, or t
gacctgtctcatcgtactcggttattaaatggcctagctcagcaaatgatcagccttgctaataatcacagattagctgtaattttaaccaatcagatgncaacaaagattgatagaaatcaggccttgcttgttcctgcattaggggaaagttggggacatgctgctacaatccggcataatctttcattgggctcgaaatacaaaggttggcatcattgtacaagtcacccagccagaaggaatgctcagtaatgtttccaatcaaacctcagggatttagagattctgttgttacttatgcatgttcattgcaaacaaaaggttccttgagcacccggaaacggtctctagacccagagtaagaattatatacccagaaactaatctcaaagtggtcaaatttattgatgttgtgaaatcaatgtgtacaagtggacttgttaccttaaagtataaataaaccctctatggcatgaatg

SEQ ID NO: 708219 - DNA, 148 bp, Homo sapiens
gtctgactctagagtatcccagcggattgaccgacacctgtcaggcggattgaccgcacattgtaaggcggattgaaccgccactgtcagcggattgaacgccactgtcagcggattgcaacgccactgtcaaggcggattgcaacgc

SEQ ID NO: 708220 - DNA, 1116 bp, Homo sapiens
  misc_feature (326)..(326): n is a, c, g, or t
  misc_feature (627)..(627): n is a, c, g, or t
atgacccaccatatcacatgactatcagtatagtaaaagccagagccatgagcccgtaacaggggccctctcagcccgtcgcataactggacctccggcgctagaccactgtggagttgtcatctgttccattccgagtaacggctcgctcaatagcataggagcctacctacatctgatagacatctaggactcatatacccaaatgaagtggcagcgactgtgacaacgagcaagagcgacgatgatcgcataggcacatccagaagaaccgatctagtcacgatgacatgggcgttcgaatacgggactaaatcctaatttanttacctatcaagaagctatttgtttatcctatccgtgagcgagttggtgcttggcgccatatgtataaccggaatccacgacacatgggacaacttcctagcacacgcacaatacttcacggacggggacaagcctaagggacaacgcactctataccatgtgccttgcgaaactcttcagccacaaagatctcactccgtgataaaaaaatgccctccgtcatgcccttgaaaagctacgatacccaggtaattgaacatacaggcgattctacggaagttattctatagtccactccangactgtctgctactccagttaggatccggtatatgatgaccaagggaaatctgaccaacctagggagtgacttgaacggcaaaggccaccatgctgctgtcactctaaacaacaggtaaattcaatcttggcggtggtacctaccttaatataggggtacaccccttcgcgtatcgcaagaccccgtgcagggacgatcaccctgggtcaatacggttacattcacgcttataacaggcagagttggctccgcagaatgggactacttcttaacagaagtatttcgcaaccaatttatgtaaaggggtcatggcccccaccaagaggctttgacccaggctggggggcacttgggcatcgggtatcgcactctgaatttgtggtggggtcccaaaacccttttgcccttccagcctaattgacatggcgctatacattccagtgccaaaacatacaagtaactttttcaacgttcaaagagatacacac

SEQ ID NO: 708221 - DNA, 104 bp, Homo sapiens
catcatctggtgagacttctgccctctccctctgccacgtcaaatccagttccctcatctgcaccattctgagcagcttcccaaactactagctttgtcccaca

SEQ ID NO: 708222 - DNA, 4525 bp, Homo sapiens
  misc_feature (2702)..(2702): n is a, c, g, or t
  misc_feature (2723)..(2723): n is a, c, g, or t
atgggggcggccgaggtcggaggcggcccgaaaagacgaagcgccgacggggaccggtggagtgacacccccgcaggtggccctggctgtccgggaccattcgagctgtttctcacactgacgttaccaagaaagatttgaaggtttgtgtggagtttgatggagagtcttggagaaagagaagatggatagatgtctacagccttctaagaagagcatttttagtagaacataacctggttctggcagaacgaaaatcacctgagattcctgagcaagttattcagtggcctgcaagaatgtacaaatctctactagacaaagctggcttgggatccataacttctgttcgcttccttggagatcagcaaagtgtatttgtttccaaagaccttttgaaacctatacaggatgtaaacagtcttcggctttcccttactgataatcagacggtcagtaaagagtttcaagctttgattgtaaaacatttggatgaaagccatcttttacaaggtgacaagaaccttgttggttcagaagtaagaatttatagcttggatccatctactcagtggttttcagcaactgttgtacatggaaacccctcatccaaaactcttcaagtcaactgtgaggagattccagcgctgaaaattgttgatccagcactgattcacgttgaagttgtacacgataattttgtaacgtgtggtaattctacaagaattggagctgtgaaacgcaagtcttctgagaataatggaagttcagtttctaaacaagcaaaatcttgctctgaggtctctcccagtatgtgtcctgtacagtctgttcccacaacagtgtgtaaggagatcctgcttggctgtactgcagcaaccccatctagcaacagacagcagaacactccccaggcagccaattctccacctaacattggagcaaaacttcctcaaggatgtcacaagcagagtttaccagaagaaatttcttcctgtctaaatacaaaatctgaagtactgagaacaaaaccagatgtttgcaaagcaggattactttcttcaaaatcttctcaggttggagctggagacttgaaaattctgagtgagcccaaaggtagctgtatccagcctaaaacaaacactgatcaggagagcagactggagtctactccacaaccagtcactggccttacaaaggagtgcttggttacaaagacttcctctaaggcagaactggacaatgccactgctcctgaactgcagaagcgtctagagcacacagcttccacacccgatggtctttcagacaagccagaagtggaagcaggtgtcactaggcttaatagctgttcagaaaagaaggttggaccttcagatttaggttcgcagtcacagaatttaaaggaaacttcagtaaaagtcgatcatgacagctgttgtacaagaagcagtaataaaacccagactcccccagcccggaagtcagttttgacagacccagataaactcaagaagctacagcagagtggagaggcctttgttcaggatgactcctgtgttaacatcgtggcacagctgcccaagtgtcgggagtgtcgattagacagcctgcgcaaggataaggaccagcagaaagactcgccagtgttctgtcgcttttttcacttcaggaggttacaattcaacaaacatggtgttctgcgggtagaaggcttcttaacaccaaacaagtacgacagtgaagcgattggcttgtggctgcctttgaccaaaaatgttgtggggaccgatttggacacagcaaagtatatcctggccaatattggagaccacttctgtcaaatggtgatttctgagaaggaggctatgtcaactattgagccacacaggcaggttgcttggaaacgagctgtcaaaggagttagagaaatgtgtgatgtgtgtgacacaaccattttcaacctgcactgggtgtgccctcggtgtgggtttggagtgtgtgtagattgctaccggctgaagaggaagaattgccaacagggggctgcctacaagactttctcttggataaggtgtgtgaagagtcaaatacatgagcctgagaacctgatgcccacgcagattattcctggcaaagccctctacgatgttggagacattgtgcattctgtcagagcaaaatggggtataaaggccaattgtccctgctccaacaggcagttcaagctcttctcgaagccagccttaaaggaagacctgaagcaggcatccttgtctggagaaaaaccaagtctcggcaccatggtacagcaaagctcccctgtgttggagccagcagccgtgtgtggggaagcaccctccaagccagccagcaatgtgaagcccatctgtccagccaacacatcccctttaaactggctggctgacctgaccagtggcaatgtcaacaaggaaaacaaggaaaaacagctgactatgccaattttaaagaacgaaatcaaatgccttccacccttgcctcctctgaacaagtccagcactgtcctccatacttttaacagcacaattttgacacccgtgagcaacaataattctggttttcttcgaaatcttttgaattcatccacaggaaagacagaaaatggactaaaaaacacacccaaaatccttgatgatatctttgcctctttggtgcaaaanaagacgacttctgacttatcnaagaggcctcaaggactaaccatcaagcccagcattctgggttttgacactcctcactattggctttgtgataatcgcttgctgtgcttgcaagaccccaacaataagagcaactggaatgtgtttagggagtgctggaaacaagggcagccagtgatggtgtctggagtgcatcataaattgaactctgaactttggaaacctgaatccttcaggaaagagtttggtgagcaggaagtagacctagttaattgtaggaccaatgaaatcatcacaggagccacagtaggagacttctgggatggatttgaagatgttccaaatcgtttgaaaaatgaaaaagaaccaatggtgttgaaacttaaggactggccaccaggagaagattttagagatatgatgccttccaggtttgatgatctgatggccaacattccactgcccgagtacacaaggcgagatggcaaactgaatttggcctctaggctgccaaactactttgttcggccagatctgggccccaagatgtataatgcttatggattaatcactcctgaagatcggaaatatggaacaacaaatcttcacttagatgtatctgatgcagctaatgtcatggtctatgtgggaattcccaaaggacagtgtgagcaagaagaagaagtccttaagaccatccaagatggagattctgacgaactcacaataaagcgatttattgaaggaaaagagaagccaggagcactgtggcacatatatgctgcaaaggacacggagaagataagggaatttcttaaaaaggtatcagaagagcaaggtcaagaaaacccagcagaccacgatcctattcatgatcaaagctggtatttagaccgatcattaagaaaacgtcttcatcaagagtatggagttcaaggctgggctattgtacagtttcttggggatgtggtgtttatcccggcaggagctccacatcaggttcataacttatatagctgcatcaaagtggctgaagattttgtttctccagagcatgttaaacactgcttctggcttactcaggaattccgatatctgtcacagactcataccaatcacgaagataaattacaggtgaagaatgttatctaccatgcagtgaaagatgcagttgctatgctgaaagcagtgaatccagttttggcaaaccttaatctccctgcacattggaaatgaattacaggcagctgttcaaactcttcaggcaggattcctgtggactttgagattcatgttacctcatcttcttttttaaactgtaccccaacttgtgagggtactctgtctaatgtatatttctagtgtttacagacagtaaatgtgtatatgtagtaactatttacagaacatgcatccttaaactgtgacttctcacctagtgcagaacttttaccaggctgtaaaagcaaaacctcgtatcagctctggaacaatacctgcagttattcttcagctgtttggacaacttagattgggtttataactattaggaatcactgcacagtttatttgggttgtgttttgtgtctgagtcccctccctcatcccttagggtccagaagagcaatggaggaagtgacagctaatgttgcagttcttattgtatggcataggactggcattatatagcagaaatcaactactgtacaatttcttggggttaaccatctttagttaaatggaattttaatttaaatgacgctttgctaattttaagtgttaagcattttgcattaaaatattcatataataaaaaaaaaaaa

SEQ ID NO: 708223 - DNA, 446 bp, Homo sapiens
gcttacatctatggtgagcgggcttacacttaactatgaaacctaaaaatacacacgtagattcacagtatttaacgaattacaaataacaattcaggggagaattaaggaagaagactatgttgtatatcttctctatttcatttcatttagctgttattttttcttttaatatagcctataattcgtatgctcaacatatacagaattaatgctttattaaaagatgattcaaaggaaaaaaagggggagatgtaaaaactgcagttcatattaaagatggttgaaaatagcaacatggagtggtaaaaatattaataaatagaaaacaattcaagcacacatttaaaagcagcagtgggagaaatggctgacaaggcaagtgggaatcagatttgaggcattcacatgctaggcttaaaaaaggtagatttctgaagaaagtg

SEQ ID NO: 708224 - DNA, 134 bp, Homo sapiens
ggtgtacctgctctctgcagcccctttctcacccctgggtcccactggcccctggctctctcccctctgctagcatctcgctgcagggattggtggggagtggggtggtcacgcacctgggtggcgatctaggt

SEQ ID NO: 708225 - DNA, 361 bp, Homo sapiens
ccgcctggaaaaggggagctacagggaagggtgaaaaagccccgattacatctcagctcctaaaactggaattcgatttacatgtatagtcatgggacgatgtttttgatatcttattaagtggaaaaagaagatgaaaaaaggagtgtacataggcatccaccctgcgaacatttgtgtgagtgcgaagagacagagaaggtgggagaaggacaaacacccagaccccgaaggtcaggggcgggcgttcgcatttcacgacaccctctggtgtttgacttattttttagggttggaatatccttgatatgtcatgtctatgaggcatccaagtctgacaataaacttggcagttctctat

SEQ ID NO: 708226 - DNA, 106 bp, Homo sapiens
aggctccagcttaacgatatttggaggtcagcacggtgctccacgtgtctgacgtgaacttgtaccagggaggcatgccaccgcaatggtaaatacacgtcgacca

SEQ ID NO: 708227 - DNA, 865 bp, Homo sapiens
tcccagcaagactgtcacgcagtacagcaagtaagcctgtggcctttcttctatgtgactgaccacataccccactctccaggacccatggagtccttcagactcaaagagactggcactgtaatgcagataagaacgctactgagataatcatggcgcgtatctgctctgtggactcatctcttcttataatgagacaagcagctgacgtgcatagatgagctctaccgtgtgtccaaggtaggtacatcggcgacgagcgcgcgcctccatggcccggacgcgcgttgatcccacgtgtagcctgcatcgaagaggtgtgcccatccaaggtgcgcgtgtgcttggctccgaccaattggctccttttggcctcctagttgaacgctcggccctggtcgtacccgctttcgccagtaagactgcggcccgggtgccatgcacgcgcacttagctttgctgaggtagacttacactcgttctaggctgctgtttctggctggcctgctgaccgagtgccgggatgtgctgctagagttggtggaacaccacctcacgcccaagtcacatggccgcatccgccacgtgtttgatcacttctctgacccaggtctgctcacggccctctatgggcctgacttcactcagcaccttggcaagatctgtgacggactcaggaagctgctagacgaagggaagctctgagagccctgagcctagcacattccaccttgacaaaatggttgactgagaaaacacagactatgggcttcctaaccctgtcaccttggcactaaacacttttcaatcttcaaggcttcattccttcccaagagtgctttttgactctgagaccagtccaccc

SEQ ID NO: 708228 - DNA, 1137 bp, Homo sapiens
ggtgtgaaccgccgccaggtcgctgttggtccacgccgcccgtcgcgccgaccgacccggtcagtcgtccgtctggcgacatgggacgtgcatggtggaaaccatcttccccagtgagactgggcagcaaccttccctcaatgcgctggccagacctgcgtggtgcactacaccgtggatgcttgatgatggactagaactttgattcctccgcggggacaagaaacaaagccctttagagtttatgctaggcaatgctaggatggttgatcctgaggcttgggacatgagaggggttggcccagatggacgtgtgggtcagagagccaaactggacttatatctccagattagtgcctaattggtgccacatgggcaacccaggtattcaatcccaacaaatgccagtctcagatcttcgactgtgcgcagcttctaataactggaagtgaccaggaatgggctcctcccttagaatcccttgattcttggaatctgccgggtggagggatctggtgcctccagacatgtgcacatgaatccatatggagcttctcctgatgttccacatccacttgtgtatagaccatcttgcctgactgaaatgtgttctgtcgactcagctttgcgttccgaaagcatctgtgatccatcttccccgtttctcctcgtatgtgtagtttacctaaactatattgccataaaactcaagttacctcatttgatatgtaacatttgcgggtgaagattcagaattccaggcatttaggagtataggggttcccatcaggtaccatggtcaagtattaacaggacacagtggacgttaacatagaattggatggggtacgaaagggagtaataaagaaattaatagaaaaaatgagagacagacagcgacaatatcgcactagtgaggggaccgggagcccaatgactataagagagagaggagaaagagaaaccaaagagaaacatgcaggaaaatagagagacaaaaaaggaggagaggagacgcagagaaaaagcagcaatagacaaacgtagaaaaatagagagagaacaaggaagagcaaacgatgataatactagaagaagacataactgatttgtcttctcctctttctttcataggag

SEQ ID NO: 708229 - DNA, 613 bp, Homo sapiens
actcacaaaaaagtcaaacattttattaccatatattaaggaccaaagctaaaatgtaaactcctaaaaaacgcgagtgcgaaataacctgggtgcccccggccctaagggccgaaatcccggcgccctacccaggggggccccccccccaaaaaaaaaaacatgctcgtccaaaattcgaaccctggcccaaaaaagggcaaagcctcctcccggggaaacaattggccccctcccaattgctaaagccctttagattttccgcgcccgcggcccaaccaaaacaccccatgaaaatccccccgggaaaacccgggtaaatcccttcccgggggtcctgctcaataaaaccctacccgactttccgttatgcccccccccccggcaggaaaagctaaaacaccctcgaacttcctataatggccccccaaatagccttggcgcaataatccgtcataacacggtcccctgcggaaaaattttaccccgctcccaaatccccacaaacaaactagctccagcaccatatggtcaacccccggggcctcccacagaggaaggccctccccacctaaatggccgtgggccaccaccgcccactcttacaaagacg

SEQ ID NO: 708230 - DNA, 406 bp, Homo sapiens
  misc_feature (3)..(3): n is a, c, g, or t
  misc_feature (23)..(23): n is a, c, g, or t
  misc_feature (41)..(41): n is a, c, g, or t
  misc_feature (55)..(55): n is a, c, g, or t
  misc_feature (150)..(150): n is a, c, g, or t
aanggtaaatccccacgagttgncctttatccttccttatncccctgtttataancctagcaacctgcaatcctgcattcctattgtccatcacctgcacctgaaccttacctccttacctaaaatcacctaaggaggcctgggtgtggntgcttacgctggtaatccccagcactttgggaggctgaggtgggcggatcacaaggtcaggagttcccagacccagtctggccaatatggtgaaacatctccaccaaaaaaatacaaaaaaattagccgggtgtggtggcgtatgcctgtaattccacctactggggaggctgaggcaggagaattgcttgaacccgggaggctgaggttgcagcgagcagagatcacgacactgcattccagcctgggcgacaga

SEQ ID NO: 708231 - DNA, 941 bp, Homo sapiens
  misc_feature (1)..(1): n is a, c, g, or t
  misc_feature (202)..(202): n is a, c, g, or t
  misc_feature (223)..(223): n is a, c, g, or t
  misc_feature (352)..(352): n is a, c, g, or t
  misc_feature (384)..(387): n is a, c, g, or t
  misc_feature (424)..(424): n is a, c, g, or t
  misc_feature (432)..(432): n is a, c, g, or t
  misc_feature (527)..(527): n is a, c, g, or t
  misc_feature (541)..(541): n is a, c, g, or t
  misc_feature (596)..(596): n is a, c, g, or t
  misc_feature (598)..(599): n is a, c, g, or t
  misc_feature (605)..(605): n is a, c, g, or t
  misc_feature (610)..(610): n is a, c, g, or t
  misc_feature (613)..(616): n is a, c, g, or t
  misc_feature (621)..(621): n is a, c, g, or t
  misc_feature (627)..(627): n is a, c, g, or t
  misc_feature (648)..(648): n is a, c, g, or t
  misc_feature (660)..(660): n is a, c, g, or t
  misc_feature (675)..(675): n is a, c, g, or t
  misc_feature (708)..(708): n is a, c, g, or t
  misc_feature (752)..(752): n is a, c, g, or t
  misc_feature (842)..(842): n is a, c, g, or t
  misc_feature (844)..(844): n is a, c, g, or t
  misc_feature (855)..(855): n is a, c, g, or t
  misc_feature (866)..(866): n is a, c, g, or t
  misc_feature (880)..(880): n is a, c, g, or t
  misc_feature (900)..(900): n is a, c, g, or t
ngggaaacttacacaccccccctcaaccgcacgaccaagtccagattggactctttctggatgttgtctttagacagggtccgtccatctcccacctgtttcccacctaagatcaacctctcctgaccaggaggcatcccttccttatcttggatctttgcctttacattttcgatggtgtcactcgcctccacctcgaggnttatggtctcaccattcaggntcttcacgaagatttccatcccacccctcatacggagccccatgtccagggtggactctttctggatttcttttttatccaggtttcttccatttcccacccttctcccatccaatatcaacctcttcntttcatgaggtattccttccttttttttcctnnnnccctttacattttcaatggtgtcactcggctccaccncgagagtnacggtctcaccagtcagggtcttcacgaagatctgcatcccacctctaagacggagcaccaggtgcagggtggactctttctggatgtcgtagtnagacagggtgcgtncatcttccagctgtgtcccagcaaagatcaacctctgctggtcaggagggatgcntnncttgtnttggntcnnnnccttnacattntcaatggtgttactgggctcnacctcgagagtnacggtcttaccagtnagggtcttcacgaagatctgcatcccacctctnagacggagcaccaggtgcaaggtggactctttctggatgtcgtngttagacagggtacgaccatcttccagctgttttccggcaaagatcaacctctgccggtcaggagggatgcgttccttgttttggatctntnccttgacattntcaatggtgtnactgggctccaccncgagagtgaagggcttacanttagggtctcacgagatcttcatccactctgagaggagtca

SEQ ID NO: 708232 - DNA, 124 bp, Homo sapiens
ttgccacaatgatgacgcatacttgctctggtcagtgacacgtacagacgcctgggtcattaaaaagccattgcatggtgctcgttgggccggacaaagggaaggatgatgaagtccttctcgc

SEQ ID NO: 708233 - DNA, 781 bp, Homo sapiens
  misc_feature (24)..(24): n is a, c, g, or t
gaccaggtgagtaatccagaggangagagcctacccgtagtccagagagtcttgcccacactatgactacgtaggggacgactcaccagaaccctacttaggggcggggagccactatgaggcctctgctgagtaccctgatcattgtagggccctactcgcttacctactgtgtcgggctgattatagacacgtatgtttaacatctctgtgcctgcacccgcactcatacatacacttctagaaatacatattatttatatatgctgcatagacttctatcattaccatatcttttctgtatatgtgcattgttgagaggatctgacctgctgatcaacaggtacttcactggatgtccattccatctgagaacacgctgctgtagcttgaagcacacactttcaaccttctagaaacaaggagaacatgagagactataggacgatctgtctatatctctctgggcgtgggcgagtgctctctgctgcacctggagtacgaggacaaggcatgccacaccacttaactatatatgtggatcaccggcactatcactcttgtcgctgtagatctctagcccactacaacagctcgtgagatccagaaccgtaacatttattattacactgaccctgatcgtaagatttatctgcttattcagttgatgtgctttgaggggttgccctactagctgaataactcccacttccagggcaggatttgaggcataatagagcaagggggcgtagactcctcatcctgttggccagatgccccc

SEQ ID NO: 708234 - DNA, 85 bp, Homo sapiens
  misc_feature (6)..(6): n is a, c, g, or t
  misc_feature (36)..(36): n is a, c, g, or t
gctcgnaattcaaagcttctaaccgatgtacggggnacatgtgataattcaatttgtacaataaattatgaacctggaaaaaaaa

SEQ ID NO: 708235 - DNA, 140 bp, Homo sapiens
cctggtatccaccccttggtgagttgagatgacagccgtttctccctcacccagactgcggcatgaatgtgcaccataaatgccgggagaaggtggccaactctgcggcatcaaccagaagcttttggctgagcgcttga

SEQ ID NO: 708236 - DNA, 613 bp, Homo sapiens
cctttgagccattcaaaagcaaggagttaaaagatagcagatctagggaagtctccatggccctttcagtaattctcccattagcatgaactgtggaatcatagtcagtgcctgttaaagacagctgtatgagcacatctgcataggattaataacctatagtcatgtgtgctctaatttcacagccagtgcaagtagtatcacatgttactcacctgtcatatctcccaacagagtagttgtagtgcactatcgggttcttgttgtctaagagtgtaacgagcgtagctaatgcatataggcttgccgccggcgaatgtttaatgtggtaggtgtagagtcagtcaatcggtcagcatgcacatgcgctctcagtgtacactatcctcattcatatgcaagtaagttcgtaacatatcctgcagttaatagcagtggcagatcctggttcactagcttctcataacgccgcgctctacaagcatcgttcatcagtgaggttcagacttcacatagtcaggtcacactggcagccacctgtcattctaactctggtccagtcagagggcacaggtcccagcgatgctgagcaatgtggcctgggcggcacgag

SEQ ID NO: 708237 - DNA, 283 bp, Homo sapiens
agcccttccacttctcacttcatacaaagaagtctccttactgtccagcctctcttattatgatctcaacctaaatgaggtgcttttccacctaagttcctcttataagttatacattagttctgcttatttatcttttccttatgtatcttatacactagttctgcttatttatcttttcctggctctatattatctcccttttcctttaggctccagttcaaattccatttcctacatgttacccttaacagcttttttttttttgtgagacagagttagg

SEQ ID NO: 708238 - DNA, 733 bp, Homo sapiens
  misc_feature (342)..(343): n is a, c, g, or t
  misc_feature (346)..(347): n is a, c, g, or t
actggcgcgggttgagttccctgttgcccttggtctcggggtcgctgtcggcgctgaggctgcagctatcatggtgaacttacttcagattgtgcgggaccactgggttcatgttcttgtccctatgggatttgtcattggatgttatttagacagaaagagtgatgaacggcttaactgccttccggaaacaaaagaagttattgtttattttaaaaaagggggaatttgccaaccccaagtgaagaagtttacttggaagtaaagactggctagattatcggatgtttacattttaaagttttggaggaataaaaacctgagaattttaaaaaaaaaaannaannaaaaaaaaaacatgttgggccgtttggcccaatcaatttttgatttagaaaggtttttcttgcggcccgaaatttgggctaattgggccaatttccctttaaaggggggcgatatacaaatactgggccggggttttaacaacggggaatggaaaaaacccgggggttacccaaatataaaagcgttggagaaaaaacccctttttcccaaatgggggaaaaaagaaaaaagccccccccagattgcccttttcacaatttggggccccctatagggggaaagggaaaattagggcgcttatttttttttgaaaaacgcggaaaatattttgtaaaaaacaatttttttatacacaaaggggcgagagggggaactcttttaaata

SEQ ID NO: 708239 - DNA, 151 bp, Homo sapiens
cggatcataagatcacagtctggttagaagctcgtagtattatcttatctctcatctctcgggtttgctctacatcagtcagttaatcattagttagtgggatacagtagtagcatttatctagttgataatatgtcagtcttccttttga

SEQ ID NO: 708240 - DNA, 182 bp, Homo sapiens
  misc_feature (45)..(45): n is a, c, g, or t
  misc_feature (135)..(135): n is a, c, g, or t
  misc_feature (151)..(151): n is a, c, g, or t
ctgctgcccccaccccagtattagcctagctttctaagctgtggnttagaggatagttggcttcttgcttctctcctttaaaatagcaagtttgggaaatcttggggtgagtggagtcaccccactcccagttgntggcagagactgagantaaagcatcacttaataaaccccccaagccc

SEQ ID NO: 708241 - DNA, 140 bp, Homo sapiens
gagcgggactctggcagggccagaaacgcgcgcagcgggggcgggaggtcggtaagctccccgccctgccgagacccgccggccgcccgcttttcgcctcccctccgcagtacggccccgcctcggcgagttatgtgacc

SEQ ID NO: 708242 - DNA, 100 bp, Homo sapiens
ctggaaggcgctgttgatccccccttcagcccatgcaggtcctagggggcaaggccttgaacactgccggcacagcactgccctgtcgggctagtcgggg

SEQ ID NO: 708243 - DNA, 156 bp, Homo sapiens
gactgtctcagtaaacaggtacacgtatctcgatgagaaccggaagtgtaatcataaatcttctaacatacaaaaaagaacaatctctacccaagtatagcttcactggagagatctaccaaacattgatcaacatacaataaataaatacataac

SEQ ID NO: 708244 - DNA, 285 bp, Homo sapiens
tttccccccagggacccccgcccctccctgtatttgggcagcagcttgtgtggctggaagccctgtcgataagcttcccgccctggcttgccagtttttcagctttaggacttgtagctttaaccaaacggtgtggcatgggttgagtgtggccccctccaggatgtgcagggctccctcaaaagctggctggggactttagcctttgtgttcataaaacccttaaaaaggggatggatgttgttccttttttgaagttgtctttaaagtgggggccccccccca

SEQ ID NO: 708245 - DNA, 876 bp, Homo sapiens
gcgaggcccgcctgcgccgcgagtacctgtaccgcaaggcccgggaggaggcgcaggctcagcccaggagaggaaggagcggtgcggcgcgcgctggaaaaaaccgcctgattcccactgagttacgccgagaggctctggccttacaggggtccctggagtttgatgatgctggaggtgaaggtgtgaccagccacgtggatgatgaatcccgattgggcaggagtcgaggatcccaaggtttatgatcacttacctcccgagaccccagtttcccgcctcaagattgtttgcaaaaggagctgacagctggtgttcccgggcgcccagcggaattgaagccgaggtcgacattgaagttgggggcgcactgttgcgagcctgcaagggccaagggggtcaccgaatctgctggtcgtcacgagcctcggggccacaccttgtgggggctcatcgtcagccacctgccctttggtcctactgcctacttcacgcttggtgcattgtggtcagtgcggcttgacttcccagacctgggcaccttgtcggaggccagccccaccttcatcgacacgcgggtttctcctcccgcctggggcaaagggggtctctgacatcctccgatacttattcccgtgccccaagatgacagccaccgggttcatcaccttcgcaacccaggacggagtaccttttcatttccggcccatgtgtttggaagacaggccaccgcacgttggagcccactgaggtcgggcccgctttgagctgaagtgtacattatccggtctgggccccctggacggaggccccgcgacgtgagggggctggccctttaccattccggggcaaaaagtttctggccggtgggcctcc

SEQ ID NO: 708246 - DNA, 202 bp, Homo sapiens
atctgtcatcgatggcactttgttgcgcttggtggtgctggtggacggaggggaggtgatggaccgccgccccaggctcacctggttgatgttgtgtagctgggactctccaggtccgccagggacgaagttgggccctgagtgctgttgcaacatggagtctgtgatactctcaccagtctccgtcacattccagtacccc

SEQ ID NO: 708247 - DNA, 405 bp, Homo sapiens
gaatacatgtattacaaaccaggaaacgcatcccattgtgtgatgtgtcacgatgcatctagcaccaagttaggtatttctgtacaacaggactcatctgtcagagtgcagatgacaaatcaggcagggaatcgaaacgacagcgctggaggagactcagtgaagcagaggcgtccctgccgactgcccttgacccgtgcaggcagatcatgacccttactgacagcctcttggtgctctgagtaatgagggatgaccagtcttgtcctgagaaatgttatctctttagtctttgaacttcaaagactaacctgtagcaatcagactttccaaaagggggttctccattttttgtagttttgtctaaatttttactgaccatttcctggaatcagtttattatac

SEQ ID NO: 708248 - DNA, 390 bp, Homo sapiens
gtgcaaaagatgtggcttcacagaaatagagcgggcaggcactggtggtcacgccggtcataccaacagttcgggaggcgaggcaggcagataactagaggtcaggaattcgagaccagccgggccaacagagagaaaccctctctctactaaaaatacaaaaattaggccaggagtgatggctcatgcctgtgatcccagcactttgagaggccgaggcgggtagatcacctgaggtcaggagttcgagaccagcctaaccaacatagggaaaccccgtctctactaaaactacaacattagccgggtgtggtggcacatgcctgtatcccagctactcgggaggctgaggcaggagaatcccttgaacccaaaaggcaaagattgtgg

SEQ ID NO: 708249 - DNA, 274 bp, Homo sapiens
  misc_feature (170)..(170): n is a, c, g, or t
ggatcttctctctctgtatgtttgcgcgtgtgtcttctgcgatcctataaagttgctggtctataatttgtatatgtgtaatacacgtgctctgtgagctgcttactagctgtgataacaatgttgtccaacaataacaggaattttattttgactcgagttgttctaanaataaaaaaaagttcacatgaaaccctctctctactaacaatacaaattagccgggtgtcatgggcgcctatattccagctacctggagactgatgcacgagat

SEQ ID NO: 708250 - DNA, 1074 bp, Homo sapiens
  misc_feature (587)..(587): n is a, c, g, or t
cgtctcctcgcacagaaaagaacacagcgcaaagagagcacgagcgaccacgacgaagagggtcttcaattaaacgcggtgcacacagctccgccgcccacgcgcacacaaattgcggccgtcgatcaagtgacttctcaccaaccggggggggccccccggcacccacccgggccccaagaccttggaccagatttccagccccaccaagacgccgctggtacacagggttttcttttcacgccaccgggagccgcttgcctggggtgagcccgaggcgagcaccgtttgtgcccttggctgatgccggaccaagcaagatgtccccttccccgactttttggccttcttggaacgactaacaccattgtctggcgcctggaccttgcgttcccgagacaacccagcctggtgggccaacggggcccccagactgctgtccccggggcttgttcgaccttatgggcccccccccccccggggatccttgagctttctggccgggccggctgggacacgttctctgtacgccagagcttctgccagcgtggcttgaccggccccgccgaagcggccttctccaggancctggagccaagaaaggcgagagctcccaagggtggcacccggctagccgggccgccgggcctataaactccgctgcacaccacagaccacagcgtcacagccacaagtctcccggtggctcacaccggccggccaaggcccacagtggctcccacagtttctgcacccacctggcaatggatggcggccactgagtattctgggaatgtgaagagcttggagtcacgccctgaaggacctccagagtcacaatgacccgtgaggaatatgttgccctcaatcctagctgtctggggacaaccgcgggagaaggggtcacgggaggggctaaatggttgctttgctggaatagttttctggggtacccatacgagattcccctaggggctgctccctccaaaagggaggggaccagatggggagacttttcttacctatttcacaggcatacctgccctttttctttaaagctttccaacttaattg

SEQ ID NO: 708251 - DNA, 165 bp, Homo sapiens
tgtttcgcagcctgctgagttacatatggactcttattcttatttatggtggtagcggtgacctgtgatattgcccccccgttttaaaatttcgacagtctcacgctgattccttttcaattacaaaaaaagccccccaattccagggattctcgtggctaaatt

SEQ ID NO: 708252 - DNA, 198 bp, Homo sapiens
tactagccgcgatacaccactgcacctccagtctgcgcacacagtgagacttagtctacacacaaccactaaaagaccaaacgaaatcatacctttatggtgttcagggtattgtgtataacccatatctccagctcctggctcatcttgggaacgtggtcccagagaaaggttgaggattgcctaggctgggtctcc

SEQ ID NO: 708253 - DNA, 334 bp, Homo sapiens
ggatgaccttgagcccagaaggagccccagattccttccctcttcagccgaagatcttggtttgctctttgatgctcttgatcaggccgttgaaatccaagaggtcactctggggaagttatatgaagcctcccgtaaagtctgtcgccaacagccggtggcggctgtggacccgtcagagtgtttgtcactttcagggctcttggaagccaacggggccttttaggattaaagagaaaccaggagaacccctttgaccaaggtgtttttccagattgaagagaaagaaatagaacctgctctgaaagataaagctttaattggaaatatctta

SEQ ID NO: 708254 - DNA, 510 bp, Homo sapiens
cccccgaggtttaccactttgggcccccgctggaaccctaatcctctttccggcaattcttgttctatagccctaatcaccatgtgcactgagataatctgttccgaacctcgtagtccccagtcaccacatgggggggaacatttggcgctggaatacacgcattcaattctcaagtgctttcatggcaggtgcacccccattcccgattgttccaatgtatgtcagacgctacaattgcgatcattcgctccactttccttcaagagctcacaagtagtgagtacggcgcaatataaaccatgtctgaccctgatgaacgtccttgataaccctcacatgtgaatctaatacgcgtaaaggtaaaaacattccaatgtggggtctaccccgatacagctttggataccatcgtcctctgggagagcgcgcttttcacatatccctgtgccccccccgggcccctgaaaacatactggttctctttggcccaccccgcattcatgtcag

SEQ ID NO: 708255 - DNA, 879 bp, Homo sapiens
gatttccggtgcaggtggggaaaatggcggtgtctacagtgtactcgagttcgtcgctgatgcttgcctctgtcagggcacagccctattgtctcctttgctcagtgtgacatcattcagacgcttctacagaggtgacagcccaagagattcccaaaaggacttgattgaaatccctttgcctccatgggcaggagagaactgatgaatccatagaaaccaaagtgagcccgcctgctctatgagaaggcagaaaagaggggaaatgttggaaacagtgcagtcttctaagtcttttggctaagagaacatctggagcaccatgacagaaaagcagttgaagctctatgaccgctgattaacggaggcctaagtaaatgactgggatattaaacctactgggccaccagggtgactgggggtaccctggataattgtgatcgactatcttctgagtgttctatgaaggatgtgactggatgaacttggaattttacctttgtgtaaactgacgtaaagcagtctggtcccactaaccgcggttggggccttccactgttactctagctcaacggcttttgacttccactcaacgtacgcctttaccgcttctcggccacgtggactgcgcaatctttctgcctggttagcccttccctactggggaccacaggtttctatcctggcttcagaattcgctggcgaaccgtggcctctctgagtctcaaggctgggttggctgtgctctcgcacttcttcggtctctacggtctcagcgctggcctctttcgccccctgcccccgcccttgcgcgcgctgcgccacccccctgcatctggatcgccgcccattgcggggccaccctttctcgcgggcggc

SEQ ID NO: 708256 - DNA, 100 bp, Homo sapiens
agtgatggtgactagagaaggtatatagtggtggtataactactattcatttcatggaaaggggtgaaagactttgtaaatacatatctatataagtgga

SEQ ID NO: 708257 - DNA, 410 bp, Homo sapiens
  misc_feature (1)..(1): n is a, c, g, or t
  misc_feature (304)..(304): n is a, c, g, or t
nggtcttatacaaacacttgactctccagaactctgcaaggtcttgtcttcaaagcaccagttctatatacagccagcatttcccccagagaaagcaatgttctacaagcccagtacatgatatgtgtcacaacctagacccatgttgctatcgtcagctcgagtgcatagcagagacttagggttatctgaggtaaacaagcaatggaggagagacttacagagaatggcctcatggtcttaactgcttctcggtaccagttccgtcatctattttaaaacccaggtttgaggctgggtgcangcgctcaagcctgtaatcccaacactttgcggggctgagactagaggatcatatgatgccaggagattgagaccagcctgggcaacatagtgagaccccgtctctt

SEQ ID NO: 708258 - DNA, 190 bp, Homo sapiens
caaaaactgtccattcccccccctttgttttgccatttgcaaaagtttggaattgtcaggtctcagcttcgaaaagtcctggttcccctgacaggacccattctttagtgggaattaagccccccaaagtttagtttgtatgtaggtataaagggaattttttaaataaattgaaaagctgtgaccacca

SEQ ID NO: 708259 - DNA, 528 bp, Homo sapiens
  misc_feature (471)..(471): n is a, c, g, or t
gtgctgcccaaaggatgccctcgccctgctgcagccacaatgtccacacctttgatctgaagctggtgtgggtggatcctgggcaggacgggtgcacgtttcacctcctcacgcccgaagaagagttctccttttgtgccaaggactcccagggccaggcagtctggcagtggaaggtgacctgggctgttcaccaggccctgcatgggaagaaggacttccccgtgctgggggctggcctggagccctcccagcctcccgactgccgctgcgcagaatataccttccaggcagagggccggctctgccaggccacctacgagggcgagtggtgcaggggccggccccacggcaagggaaccctgaaatggccggatgggcggaatcacgtggggaatttctgccagggcctggagcatggcttcggcatccgcctgctgccccaggcctctgaggacaagttcgactgtnacaagtgtcactggcgagaaggcagcatgtgtggctacggcatcctttgtggcagca

SEQ ID NO: 708260 - DNA, 491 bp, Homo sapiens
  misc_feature (485)..(485): n is a, c, g, or t
cagctgatctgcttagcgcaaaaaaaaaaaaaaaaaaaaggccaatattacccccaaagggtgctttgagccacttacagttttttcccccttctgcctctttcttctttctgacccttagttttctgtaaaacagtgagcagcccataactgacttaatttctgaaatgggttaaaagcaattttctgaagcttgccttttaaaaatagattttgtttttttcaatttagttcttgtgggcagaatgtgttttaaaattaattaattagcagcttgcgacccaagtgatggtaaaagctcatattgggtgatctcatgagaagttcttctcgaacccaaattccgaacatttaaaaagggggcgaagaggggagaaatctcacttgtgcaaattattttctgtgcataggttatgagaataggttacttatacccgttaaaagtggtaggaaagattccccccttccccccacctttaagcggnatcagg

SEQ ID NO: 708261 - DNA, 670 bp, Homo sapiens
agagaaggaagaggatgatggccttcggaaatccctggatagattctatgaaatgtttggccatccacagccaggctctgcaaactcactctctgcatctgtctgcaagtgcctgtctcagaaaatcactcaactaagaggccaggagagccaaaagtatgccctccgcagttttcaaatggcccgggtgatcttcaaccgggacggctgctccgtcttacagaggcattccagggacacccacttctacccactggaggaaggaagtacatctttggatgatgaaaagccaaacccaggactgtcaaaggatattactcatttcctcttgcagcataatgtaatgaaagacctgtaactggtgccgggtggtgtgcagggtagtaatggaagtgctgtgccatgaccatcagtgttggtggccacccaaatcccctagggtctttggccaattctgagtgcccaattccaaattaagtgctttgaggttaaaaggctggcacccttgtggaccttggtattggatcccagtcagtcctcttatggataagaccgtcaagggtctggcaggtttttccgcaactcttgtgccaagggccgttttactgtactggggcttaccaagtacaaaaagtcccaagcttacctttggccttaaaggaaaggtaca

SEQ ID NO: 708262 - DNA, 156 bp, Homo sapiens
cggacaggcaccaaatgctgacagatgaaggactttcagataaggagctcatggtatcttctcaggccctaagagaacttaacgcagaaacgcccttttgaagtctgaaaattctttggcagcctctttctaacctcctccttagtcctaccattg

SEQ ID NO: 708263 - DNA, 451 bp, Homo sapiens
ctgcactccagcctgggcgacagagcaagactccgtgtcgagaaaataaaaaacaaaaacaagtaggtgaaaattccttataaatccaggattggttctgaaagaacgggtgtaagattcaggaaggaaacaaaaaattcagaatcctacaaggtttggatgacaattagggccaaaatttaggaggagatgtaggatgcaggaggaacaataaaagtgttttctttatatcagaggaggaaatagtaaaggtcaagtgaaggtctggggtagggaaacattcagactggccattgccatggctgtgcgagtgagactgcccttaagcctgggtcaagacttcctgggccataaaatggggcatccgtgatgctaggtaactgtgggaacaacaatgacagttagagcacgcatgggtgatgttaggcggtaaaacacactacacgcgtta

SEQ ID NO: 708264 - DNA, 212 bp, Homo sapiens
gccgcgctctccaagacggccgtggctccgatcgagcggagtcaggctgttgctgcaggtccagcacgccagcaagcagatcgccgcctactagcagtacaaggtgcatcgtggactgtattgtcctgcatccccgaggtagcagggcgtgctgtccttctgagaggggcaaccttgtgcaacgttcattcgttagcttccccactcaagac

SEQ ID NO: 708265 - DNA, 300 bp, Homo sapiens
tttttttttttgggggaccataattttttatggggcgggtcaggagaagagccgggggtaaggggtcccttccttcccatccctctacccagaagacaccctcaaagggacagcagaagcccaagagccggttgcctcagaggacctggggggcagacaattggtggtagtgatcttctggtccctcgagcaggcggcggtaggtggcaattctcgggctccagccggcgattggattgtccattgagccggtgggtactccttggatctgccgctcacatatcagatccggagaaatat

SEQ ID NO: 708266 - DNA, 175 bp, Homo sapiens
cacaactgactgtcttcgttcggtttgacctcaggacggctggggacgctgagacgacctcagagtttgaggtttccggtctcgatcttgacagacgtgaccggccttgcgaaaacgtcactttggcgctcatggctgcgggcagattgatgcgctgccatccacccgaggacga

SEQ ID NO: 708267 - DNA, 832 bp, Homo sapiens
  misc_feature (160)..(160): n is a, c, g, or t
  misc_feature (205)..(205): n is a, c, g, or t
  misc_feature (358)..(358): n is a, c, g, or t
  misc_feature (365)..(365): n is a, c, g, or t
  misc_feature (367)..(368): n is a, c, g, or t
  misc_feature (373)..(376): n is a, c, g, or t
  misc_feature (383)..(383): n is a, c, g, or t
  misc_feature (385)..(385): n is a, c, g, or t
  misc_feature (391)..(391): n is a, c, g, or t
  misc_feature (398)..(399): n is a, c, g, or t
  misc_feature (403)..(404): n is a, c, g, or t
  misc_feature (408)..(410): n is a, c, g, or t
  misc_feature (418)..(418): n is a, c, g, or t
  misc_feature (427)..(427): n is a, c, g, or t
  misc_feature (429)..(429): n is a, c, g, or t
  misc_feature (436)..(436): n is a, c, g, or t
  misc_feature (441)..(441): n is a, c, g, or t
  misc_feature (443)..(444): n is a, c, g, or t
  misc_feature (446)..(448): n is a, c, g, or t
  misc_feature (451)..(455): n is a, c, g, or t
  misc_feature (457)..(459): n is a, c, g, or t
  misc_feature (461)..(463): n is a, c, g, or t
  misc_feature (466)..(466): n is a, c, g, or t
  misc_feature (468)..(470): n is a, c, g, or t
  misc_feature (472)..(475): n is a, c, g, or t
  misc_feature (480)..(481): n is a, c, g, or t
  misc_feature (483)..(483): n is a, c, g, or t
  misc_feature (485)..(485): n is a, c, g, or t
  misc_feature (487)..(488): n is a, c, g, or t
  misc_feature (490)..(491): n is a, c, g, or t
  misc_feature (494)..(494): n is a, c, g, or t
  misc_feature (496)..(497): n is a, c, g, or t
  misc_feature (499)..(499): n is a, c, g, or t
  misc_feature (502)..(502): n is a, c, g, or t
  misc_feature (506)..(512): n is a, c, g, or t
  misc_feature (514)..(514): n is a, c, g, or t
  misc_feature (516)..(521): n is a, c, g, or t
  misc_feature (523)..(524): n is a, c, g, or t
  misc_feature (526)..(526): n is a, c, g, or t
  misc_feature (528)..(528): n is a, c, g, or t
  misc_feature (530)..(530): n is a, c, g, or t
  misc_feature (532)..(535): n is a, c, g, or t
  misc_feature (537)..(538): n is a, c, g, or t
  misc_feature (540)..(542): n is a, c, g, or t
  misc_feature (544)..(546): n is a, c, g, or t
  misc_feature (550)..(550): n is a, c, g, or t
  misc_feature (554)..(559): n is a, c, g, or t
  misc_feature (562)..(563): n is a, c, g, or t
  misc_feature (565)..(566): n is a, c, g, or t
  misc_feature (568)..(572): n is a, c, g, or t
  misc_feature (574)..(576): n is a, c, g, or t
  misc_feature (578)..(578): n is a, c, g, or t
  misc_feature (580)..(581): n is a, c, g, or t
  misc_feature (583)..(584): n is a, c, g, or t
  misc_feature (586)..(589): n is a, c, g, or t
  misc_feature (592)..(593): n is a, c, g, or t
  misc_feature (595)..(599): n is a, c, g, or t
  misc_feature (603)..(603): n is a, c, g, or t
  misc_feature (606)..(607): n is a, c, g, or t
  misc_feature (609)..(611): n is a, c, g, or t
  misc_feature (613)..(614): n is a, c, g, or t
  misc_feature (616)..(616): n is a, c, g, or t
  misc_feature (620)..(620): n is a, c, g, or t
  misc_feature (622)..(622): n is a, c, g, or t
  misc_feature (625)..(626): n is a, c, g, or t
  misc_feature (629)..(629): n is a, c, g, or t
  misc_feature (631)..(632): n is a, c, g, or t
  misc_feature (634)..(636): n is a, c, g, or t
  misc_feature (665)..(665): n is a, c, g, or t
  misc_feature (740)..(740): n is a, c, g, or t
  misc_feature (749)..(749): n is a, c, g, or t
  misc_feature (753)..(753): n is a, c, g, or t
  misc_feature (763)..(763): n is a, c, g, or t
  misc_feature (810)..(810): n is a, c, g, or t
cgatggcggcacggcaggtggaggggctggcgcggcccgctccctctcgcgcttccgaggctgcctggctggcgcgctgctcggggactgcgtgggctccttctacgaggcccacgacaccgtcgacctgacgtcagtcctgcgtcatgtccagagtctngagccggaccccggcacgcccgggagtgagcggacagaagccttntactacacagatgacacagccatggccagggccctggtgcagtccctgctagccaaggaggcctttgacgaggtggacatggctcacagatttgctcaggagtacaagaaagagggtgagagggggtatggtggtggagtagtgagtgtgttnaagaagntnntgaannnnaaatgtngngatgtntttgagnntggnngggnnnagtttaangggaaaggntnctatggnaatgnanntnnnatnnnnntnnntnnnatntnnntnnnntatannantntnnannatntnnanaantttnnnnnnntntnnnnnnanntnananannnntnntnnntnnnttanaatnnnnnnatnntnnannnnntnnntntnnanntnnnnttnnannnnnagtnttnnannnannantttntnaannaantnntnnnggagatggaggatgtggagggtgatgggnagtgggtgttggatgggagggagttggggatggaggagggtggatagtggaggggggtgaagaagattggagagnttgtagagnaggnatgggtgagnagggaggaagtggtgtgtgaggtagggaatgggattggtgggttttnagtgggtaggcagggagatgta

SEQ ID NO: 708268 - DNA, 313 bp, Homo sapiens
acaccaattcagtgcagccagcagtggtcagggaagttaacccttaagcaggacttgtaaagcaaataagattggcagaccaagcgggttttttcacgaggggaggagttccagaccagcctggccaacatagtgaaaccccgtctttactaaaaatacaaaaaaattagccaggtgtggtggtgggtgcctgtagtcccagctacttgggaggctgaggcaggagaatctcgaacccaggaggcggaggttacagtcagctgagaccgcaccattgcactccagcctgggtgacagagcaagattccgtctc

SEQ ID NO: 708269 - DNA, 117 bp, Homo sapiens
ccagctggcaggcgcgcgtaccgtattgaaccccattcgtaatggggcatcggcaaattgcacattcattcccccatgcagacgatgcattcccagtaagtagcgggtcataagctt

SEQ ID NO: 708270 - DNA, 432 bp, Homo sapiens
gacctctcagcagggcagagcttcttggagcaaccctcccgcactggccagtgagctcacacctgctcctcagcacccagctcagtgtctggtgggcatgcaccaaacgtcctctgaatgagttagcaggaagttagttctccaccatcaggccccccaagtcctccccggatcataagagctgcagaccccagccccctgccccaggcccaggcgtgaggtcctgtgtgtagctcctggcacctgtgtgcagcctgtgtggtgatgggcaggagcctgtgccccagacacagcccagcagagcccatacccagggctgccctcgggcctcacttgcccggcctgtgggcccctgcccagtatcacctcaggggttgcaggctcctgtccactccatgctggtccctgaggcccagctaccccaccccatgc

SEQ ID NO: 708271 - DNA, 848 bp, Homo sapiens
  misc_feature (554)..(554): n is a, c, g, or t
  misc_feature (711)..(711): n is a, c, g, or t
  misc_feature (715)..(715): n is a, c, g, or t
  misc_feature (723)..(723): n is a, c, g, or t
ggctctctggccgggcttgggctgcgtggagaatactttttgcgatgcctactggagactttgattcgaagcccagttgggccgaccaggtggaggaggagggggaggacgacaaatgtgtcaccagcgagctcctcaaggggatccctctggccacaggtgacaccagcccagagccagagctactgccgggagctccactgccgcctcccaaggaggtcatcaacggaaacataaagacagtgacagagtacaagatagatgaggatggcaagaagttcaagattgtccgcaccttcaggattgagacccggaaggcttcaaaggctgtcgcaaggaggaagaactggaagaagttcgggaactcagagtttgacccccccggacccaatgtggccaccaccactgtcagtgacgatgtctctatgacgttcatcaccagcaaagaggacctgaactgccaggaggaggaggaccctatgaacaaactcaaggggccagaagatcgtgtccctgccgcgatctgcaagggcgaccactggaccacccgctgnccctacaaggatacgctggggcccatgcagaaggagctggccgaggcagctgggcctgtctactggcgagaaggagaagctggcgggagagctagagccggtgcaggccacgcgacacgacagggagtatgtgccgcgagcctggcgacgggccagncgcnggggggtncatggggccaccgggagcggaaaaggcccccggggcccattttgaggcggggaaccaccgggggctccggctggcccccggaaccggggggaaaagggccggggtccacccccggagagggccgg

SEQ ID NO: 708272 - DNA, 479 bp, Homo sapiens
  misc_feature (132)..(132): n is a, c, g, or t
  misc_feature (144)..(144): n is a, c, g, or t
  misc_feature (166)..(166): n is a, c, g, or t
  misc_feature (324)..(324): n is a, c, g, or t
cacccctcaggggcgctgccaggacatgggcggccttcacgtggacagtggttttgtgctttccaccagcacaaggtccacggcggcggctgctgcgggctccccagcagatggcagcaaagcgcctaccanccccagcgtctngtcccggccacctgtctcactnctgctttctgactaaagtggggacagcaggctgtgtcccatctgggaggcgccacctcaccccctggaggggaaaccggcccagtaggcaggggcgggggatggggggtgctagcgtcatctcaacaacccatgccccgacacaagatgctggccccnaaactcctctccccagagatttctcatccccaggacggcggttgcaggcagaagggtttggaaacattaaacgtgaattattccaattggtaaaaaacaaaacaaaacgaaacaactagatcctggttactttataatatataataatcaaagga

SEQ ID NO: 708273 - DNA, 322 bp, Homo sapiens
tcgattggcgggcacttcaaccttactgcttctctcttcttcttcttcttcttcttcttcttcttcttcttcttcttctccttctccttctccttctccttctccttctccttcttttctttcgacagggtctcactgctgtcatccaggctaaagtgcagtggcaccatcacagctcactgccgtctttatctcccgggcaccaatgaccttcctagctcaggcccctcaagtagctaggactacaggtgtgcaacaacatgccctgataattttggtgatctttgtagagatgaggtctcactaagttgcccgacaatcg

SEQ ID NO: 708274 - DNA, 240 bp, Homo sapiens
  misc_feature (211)..(211): n is a, c, g, or t
  misc_feature (216)..(216): n is a, c, g, or t
  misc_feature (233)..(233): n is a, c, g, or t
aacagccatggcaaacacgaacagccacggcaaacacaggccacagcaaacacgagccacggcaaacacgggccacggcaaacacgaacagccacagcaaacacgggccacggcaaacacgggccatggcaaacacgaacagccatgcctgaacgggcccggttgcatctgattgcggaggctaagcagggttgggcctggttagtacttngatgngagaccaactgggtgtntcaggtg

SEQ ID NO: 708275 - DNA, 101 bp, Homo sapiens
ttatcgaggacctggaagctacttatcttgtcggtgacgtcggtgccgtcggtattaaaagccctagtcaggccgttacatgtcaacgcgaaggacgggcg

SEQ ID NO: 708276 - DNA, 87 bp, Homo sapiens
ctagaagattcagcaaagtacttttgtgctcttggggaactagtttatgtctgttcctactggagggatacgaccgataaactcact

SEQ ID NO: 708277 - DNA, 135 bp, Homo sapiens
ttgagacctggaaaacatcatcgccactgtataacaggctgctgagttctcagagctgcaggctgtttccgggaggagctcatgtactccttcaccaggtgcaggtgcaaggcctccatgagctcctcccggaaa

SEQ ID NO: 708278 - DNA, 172 bp, Homo sapiens
  misc_feature (41)..(41): n is a, c, g, or t
gcctctctctgggcaagttcatggcttctgtgagccctttnactgacctccagacactgttaggctggagcctcggtagccgttcctcctgcccactggaccttccaacaggccctcctcccctccttgaaccggcccttcctggcctttgaatagagtctaagcgaacgac

SEQ ID NO: 708279 - DNA, 474 bp, Homo sapiens
  misc_feature (1)..(1): n is a, c, g, or t
  misc_feature (411)..(411): n is a, c, g, or t
  misc_feature (439)..(439): n is a, c, g, or t
  misc_feature (444)..(444): n is a, c, g, or t
  misc_feature (464)..(464): n is a, c, g, or t
natagctaaaggaaatacccacacttaaataagttaacatcacagacttaattcatttttcttgacattttaaggagaattagttcatttagactagtgtttattgaacatacttttcatgatatctatattaaggaaagcgatggttgggggagataaagaatagtagaattttagaattggaatgaacatcattttaaaatgaggaaactgaaagccaaagagtttactagaaatttcaagttacaattagaacccaagttttatagtgcttattttttactttcctaatttccttctaatgtattttacctagatttggctagaattagtagataccggttgtttattatttcaggcaattggactatctaaatagaactctatcctgtaggtttacctttgtggganttttggaagtaataatagacatatagcnaaagncaaccgactatttgtaatgnttaatttatt

SEQ ID NO: 708280 - DNA, 326 bp, Homo sapiens
cgggcagatcacctgaggtcaggaggttgagaccagcctgaccaacatggtgaaaccccatctctactaaaaatgcaaaaattagaaaggtgtggtggtacgcacctgtaatcccacctactaaaggaggccgaggcaggagaattgcttgaacctgggagtcggaggttgcagtgagccaagattgcgccactgcactccagcctgggtgacagaatgagactctgtctcaaaaaaacaaaaacaacaaaaaacaaaagcctgtgcttcaatctgactcttcaggctatggttctccccgtactgtcactgggtcttaggacctt

SEQ ID NO: 708281 - DNA, 222 bp, Homo sapiens
  misc_feature (217)..(217): n is a, c, g, or t
ttttatttttttttaagtttaaaagaaggaattaaacccaaattttgggattgtttccggggcggggtttttaaatttttttcccccagttttccccaagaaaatgtttcaaaaactgaatttgtttaaccattgaaagcctttgttaaaggcccaattaatccccttggttggtctttgaaaacaaacttttttaaaaaaaaaataaccctttttnaccca

SEQ ID NO: 708282 - DNA, 195 bp, Homo sapiens
attcagttttttaattgacttttttctggctgtttcactttggacatatctccacactcagcctcctttttcttgtgctcaattggagagaattgaaatagatcatctttcataccctttcaaatataatatttcaaaactctgatattcacttgtacaagcgtccttcaggctatgtaatgattctttcttgca

SEQ ID NO: 708283 - DNA, 528 bp, Homo sapiens
  misc_feature (465)..(465): n is a, c, g, or t
aattcagtgtgtcttccatttctctacggcagggaccatattctgtctcccgcttggactcggaggagaagttctgggtatctgtgctctgagactcgtagtcaactttgtagcgctggctgtctttagcatgccctttcttgatgatgattatctttgaatggagggcccccccctcgggcccccacaccgcgcgcgtccctggacacgccccgcccctctcccccactgccgccgctccggtcttcctccgactcactagcatttcctggagctggcggcgctggcagcaggtaggcgcgcaggcggctgacggcactagcgttgacgcagagcccgcggccgtccagcagcgcctgcagcggtcgcgcctcgtcgggcgacggctggcagcgaaggccggagccacagcgctcggtgtagatgccgcacggctggccctcgctcagtgcgcacgtcaggcancctaaacatccgtacaagattcgtcacaaccgcacgcccccccccactcttccgcaccaccct

SEQ ID NO: 708284 - DNA, 117 bp, Homo sapiens
aattcgcggccgcgtcgacgtgcttaggcaaattaagtatgatcaagtcttctttattgtgtgctgtaaaaatggagtggcggcaagaatgtaatacagggcatctgactgctgagc

SEQ ID NO: 708285 - DNA, 142 bp, Homo sapiens
ccttgctaggtcgatctctacacggatccccccctcgaaacccatgtcacggaaccagtgttttgattgtaagctaggactgtaggagcatagccagtcaagtcagctatcttcgatggtgcaagcatatgatcacagagct

SEQ ID NO: 708286 - DNA, 332 bp, Homo sapiens
  misc_feature (133)..(133): n is a, c, g, or t
gactgagtctcaccctgttgcccaggctagagtgccatgtcgtgatctgggctcactgcaacctccacctcccaagttcaagcaattctcctgccccagcctcccgagtagctgggattacaggcgcacgcanccacacccggccaatttttgtatcttttgatagagacagggtttcaccatattggccaggctggtctcaaactcctgagctcaagtgctccgcccaccacggcctcccaaagtgctgagattacgggaaaccacacccaggcctgatttattttttggaaaagtagtttgattatggaggttccattaggttaaggaag

SEQ ID NO: 708287 - DNA, 1783 bp, Homo sapiens
  misc_feature (150)..(150): n is a, c, g, or t
  misc_feature (398)..(398): n is a, c, g, or t
  misc_feature (836)..(836): n is a, c, g, or t
tggggcataaacaacaaattttttgggggcccccagcatcaagtttctctttctcgcgtggcaacagttctgggtccccgcggaagaacgttccagtccgcgggcgggacagacaagtgagaaccacatttgtggcggcccagcgagggngacatctcgtggcggagtgggtgggagggctatgccagatggtccgtgggtggtgtggccaacctctcacaaagagggatgtgcctccaagaggattctcgatgtggcacacacacccgcgtatactctcgtgtggcccagaagaagttctcctctcttgtgtgccttataatattgtgtgttgggtataccgccgcgtgaccacagccttctacagaagagtgtggtttgtggctcaacattcgtgngcgcaacactctctcacagagacacaccacaacacgcacaaaacacacacgagggctctctgtgtgtgtgcgctagtgagagagagagaaatcacccctcttctctttgtgagagcgcccgagagaggggggacaacgctttctcacacaggggggggtctctatatctggtgggagctcccatcagcaggggggtagagggtaggggacaagaaaaaagacgggcgcggtgcgcaataataaagatcatcactcctgtgaagagtagcccccggagcggcgcaccaaagcgtgtgtcgcgcacgagaggggtctctcctcacaagaggggtgttattctcatcacttcatcacaggaagggggcgaggaagacacacacacgagatagtcgtgggtgtcaccccatagaaagcttctcttcctaaaagatatcccgngcgagaagagcgggaccgcgatgatctcctaagagaagaagataaatccccctcgtcaccgagaggggggtgggcccccccaagaaggtcttataaagcgggctgataaacccgcgaggtgtttatcctcgtgttgacaaccacagaggggggtggcgcccccctaaataagaggggggacggtcgcgacaataataaaaaaaggaccaaagaggccaatctgggtggcccggatgtctgttttttaacacaaagcgtgttcggtgcacgcctgtggggacaacaacgtggttgtttaacgctgcgaggaacaccctttgtgtgtgggcagaggggaaaccccatttatattatcgtgggggggtgtgttgaaccattaatgtcttggggaccaacaattaacccatacagggaagagattttaaaaaggaggctcctaacgagggggaaaatttcatacaacacatttttcacaaggcggggcactacacacgcgtggcggtgttcaacactcaactacgacgggcgcaacatatatgaccagtcggcggcgctactgaggaaaacaacctggggcgcctccaccggagacgatagtgattctttcttgcaatacatttgtacagggagcgaccacgagtatcatactacatcatacatcagaatcccggcgacccgaaggatcagacggcaggacagccagcagccagggccagacacaaccgagagagtgagaggagacaggaacgacgagcgacggcgaggcacggaggcaagatgaacgccagacgcaacgaacaacacacaccaccacgagaacaacagaacgacaccccacgacccgcagacttcacgacgcccggacggcgcaagcgagtgacagaccgcagacgaagacaacaaccgacaggacagcgaaagatgcgacgaccgacggaacacggagt

SEQ ID NO: 708288 - DNA, 825 bp, Homo sapiens
  misc_feature (15)..(15): n is a, c, g, or t
  misc_feature (193)..(193): n is a, c, g, or t
  misc_feature (222)..(222): n is a, c, g, or t
  misc_feature (229)..(229): n is a, c, g, or t
  misc_feature (250)..(250): n is a, c, g, or t
  misc_feature (269)..(269): n is a, c, g, or t
  misc_feature (285)..(285): n is a, c, g, or t
  misc_feature (343)..(343): n is a, c, g, or t
  misc_feature (353)..(353): n is a, c, g, or t
  misc_feature (366)..(366): n is a, c, g, or t
  misc_feature (453)..(453): n is a, c, g, or t
  misc_feature (463)..(463): n is a, c, g, or t
  misc_feature (553)..(553): n is a, c, g, or t
  misc_feature (578)..(578): n is a, c, g, or t
  misc_feature (612)..(612): n is a, c, g, or t
  misc_feature (794)..(794): n is a, c, g, or t
ggctcagccccggcngcagcgcgcgccccgctgccagcccattttccggacgccacccgcgggcactgccgacgcccccggggctgccgaggggaggccgggggggcgcacggacgcgcggtcccgcgcactgagccccgcggcgccccgggaacttggcggcgacccgagcccggcgagccggggcgcgccntccccgccgcgcgccgtcctgcatgccgngccccanctccgggcgccggccggagcncccccccgccgcccccganccccccgcgccccgcnccgcgccgcctacctttccatgcaccgctttattggggtcaacagcaccgccgccgcnttcccctgcnaccccaatttctncttcacttgtctcaattcaaacactcttttttccataacatggagatcacggagctggagtttgttcaaatcatcatcatcgtggtngtgatgatgntgatggtggtggtgatcacgtgccttctgagccactacaagctgtctgcacggtccttcatcagccggcacagccaggggcggaggaganaatatgctctttcctcaaaaagatnccttttgccctcggagagcacagtgtcaggcaanggaatcccagagccgcaggtctacgccccgcctcggcccaccgaccgcctggccgtgccgcccttcgcccagcgggagcgcttccaccgcttccagcccacctatccgtacctgcagcacgagatcgacctgccgcccaccatctcgctgtcagacggggaggagccccaccctaccagggnccctgcaccctccagcttcgggacccgagca

SEQ ID NO: 708289 - DNA, 455 bp, Homo sapiens
aatcatctgatcctttggcaaatgtggaatgtagcattcacacaaaatgactgtaacagcagtctgaaggcactgaagcaggaccagaagggagtctctcaggagaactgacttctgcagctgggtctcctactattactcattcagcataacacataagaacaggaacagacaaagcaggacacacagactcgaatgcctcaccagcagactagtcaatcatgggccagattcataagcaaaatgagctgccagcaaatagcaagccacatgttatttcaaatagacaatgttttaattttaaacagcaatacaaatcaagggtccaaactatttaattcaatcacaagcgcatagtgacgaatgcatgtaatcaagggacttaatctctgtgccattcttaaaggcttagataagcattaaataaacaaatcaaatgtaagcagggaccaggt

SEQ ID NO: 708290 - DNA, 777 bp, Homo sapiens
  misc_feature (14)..(14): n is a, c, g, or t
  misc_feature (625)..(625): n is a, c, g, or t
gccattatggccgngtgcagtggctcacacctgtgatcctagcattttgggaggccgattcagaccaatcacttgagctcatgagttcaagaccagtttgggcaacatggtgaaaccctgtctctacaaaacacacacacacacacacacacacacacacacacacacacaaagcagggtttggtggcaagtgcctgtagtcccagctactggggagactgaggtgggagaatcacttgagcctgggaggcagaggttgcagtgagccgagatggcaccactgcactccagcctgagcaacagagcaagactctgcctccaaaaataaaaatttgatttcttaagtaaatttcaaatatagaatgtatatgctagcgataacacaattaacactgtttatgcaagtctgcaataggtagatgtgaagttgataggtgcaataagcataggcaaacacataggaacatttgacctggttttttggtgattttacaacattgaataattgcgaagctcttacatctcttaattcgagcaactagatgcctgtatttatctccttatattaacaaactattataattatctttccacatatcaaactccaactgctcttctccatttntctttatacttaggcgagaatcaggatttgatcgatcttccatttttgcgactactatgatcagcctcgcctccgcttcccttctgattaggatctggagggctttcatacggaatgtaccggtttccaactagaatcccgggtgcttcccg

SEQ ID NO: 708291 - DNA, 448 bp, Homo sapiens
ggtgggtcatatggtaggtgtattagtccattcttgcactgctataaagaaataccaaagactagataatttataaagaaaagaggtttaattggctcacagttctgcaggttttataggaagcatgattttggcacctgctcagcttctgaagaggcctcaggaaacttaaaatcatggcagaaggcgaagggggagccagcacttcacatggccagagcaggaggaagagagagacgggggaggtgccgcacacttttaaacgtccagatctcaggaacaccaccaggagagcagcactagagggatggtgctaaaccattagaaaccaccctcatgattcagtcacctcccaccaggctgcagcattggggcttacatttcaacatgagatttgggtggagaaacagatttaaaccatgtcagtaggtgcatgtttacctttgta

SEQ ID NO: 708292 - DNA, 121 bp, Homo sapiens
  misc_feature (98)..(98): n is a, c, g, or t
  misc_feature (112)..(112): n is a, c, g, or t
gtgttaccaatctgaagtcgggaagtggccatagattgaccgcatttccatgacctaacttgtatttcacccccttttccttccctactggttcttgncccaccccaagatnagttgaaac

SEQ ID NO: 708293 - DNA, 363 bp, Homo sapiens
atttttatttggttaaaggtcgggggctttccaccccctcttctaatctttaaagggattggttggcaatttggggggaagactttttttatggggactttttctttgaggttttagggggcaatttgcctttttaatgaacatgtgaagttatacggggggtaggcaccggctttcccctacgggggttttactttgggttagggccaaaacagcccccgggaggtttacttttccccctttgggtggccccttttgtttcccccaggtcccatttttgttttaagggcctttggttttaccggttccctttttccgggggtttttactggggtttttttttaaaaaggcctaaaatcctta

SEQ ID NO: 708294 - DNA, 116 bp, Homo sapiens
gggagtggagagagaacgggtgtaaatacaatggggcaggtgacatttgatacctttcccaagagtagagataggatttcataaatggacctgtgtgggccagacgggttggacat

SEQ ID NO: 708295 - DNA, 346 bp, Homo sapiens
catatggtgttacagatcgtgaaatgtagatgaattctctaaaaatactagatctaaagataggaataatggactagaacacagcggctcacaggctgtagtcctaaacactttgggaggccgagggcggatcacgaggtcaggagtttgagacctgcctggccaatatggctgaaaccccgtctctactaaaaatacaaaaatagccaggcatggtggtacatgcccatagtcccagctactcaggaggcagaggatagcagaattgcttaaactcaggaggcagaggttgcagtgagctgagatcccatcacgcacttcagcctgcacacacataatggaggga

SEQ ID NO: 708296 - DNA, 529 bp, Homo sapiens
  misc_feature (25)..(25): n is a, c, g, or t
  misc_feature (45)..(46): n is a, c, g, or t
  misc_feature (58)..(58): n is a, c, g, or t
  misc_feature (73)..(74): n is a, c, g, or t
  misc_feature (97)..(97): n is a, c, g, or t
  misc_feature (138)..(138): n is a, c, g, or t
  misc_feature (229)..(229): n is a, c, g, or t
cctgaataacggaatccacagcccnaaacaccagagcaagctctnntgaccaagtganatctgctcccatcgnngatgtggatctcccagtcctgtntgccctcaggaagtcctcctttgcttaagagagaccctgtnaactccgtcaacactccagaaaagccacactgcctcaaaaaagactgactaacaatgccagtgctcaggaaacattccatgtcagtgacanggcaaacactgcccagccacggagagtacaactccaccaggataaagacaacaacaagaaagatgaagaagctgagaaaccacccccagttaaaccaacaggagaactcacctaaagcagtcaacaatgaaacagatctctgcagttttgacagacctggacttcaaaagagaaccagtgaagatactgaaggaattaagagaagatatgaacagtaattcagacaccctcagaaaggaactagaacatataaggcggagcccagaaaaactagaccattcatttgcgtacttaggggtt

SEQ ID NO: 708297 - DNA, 256 bp, Homo sapiens
ctcggtaccgtatccataccacgtacgtctctaccattatccggtttagtcatccaacaagaagaaacaaatctgaaattccagcagtaagaaatgaacaaaatgagttcccatcgtggctcagcggttaacgagcccaactagtatccacgaggatgcgggttcgattcctggactcactcagtgggttaaggatgtgatgttgctgtcagctacggtataggtcagcagctacagcttctattcaacccccagc

SEQ ID NO: 708298 - DNA, 1631 bp, Homo sapiens
cgacgtgttactgactccgtgtcctgtgtgtgttgactgatcaaccacctcgtgctgttagacatcactcgcctccaacggttgcctcttttttctcacgggtgacggacaatattgatcaaccctcttcgtggggggtccctcccttccctcccccccctcttgttggttgtggcccccgcatatttcacggtgaactattatatgtcgtgtttacttcctggctcgtcgctggaccacactgggtccaagttcgttcgctggagtcttgtcgtgtggagccgccggccccccctcatgtgcgggtccgcctgcctgcccttcgcctccccctctcatagtggcggcttccacgggagggggccgccccaactgactctaatggaccacacgtcctcgtgttgctttgcttccacccgggcgggtgggttctctctgtaaccacaacgcggtttgctgtgtctcttggagaataacgtcctttttttagcacccacgtgtgttgacacccagccgttgttgtggcgaaaccaacgtgtcgataaataaagtttatatatatggccgggtgggcccaccccgttgtacacccaaaatgtggttgttgggggacgccataatatacctggtgttgaaaccccccccccacggccctcctatacctcccgaacgcccgtttgggaggaatatttcgcggaacaacaagtgtccccacgagggcggcccgtgtatggcccctccccccaacaggcgacccaccccgaggggcccccctgggggccccccggccccacaccgggcctttcgtccccactcattttctcgctcatccagggcggaacagagttttggtagaacccacgcggtggacaaataggagaccccgcggggggggccttaacaattgttgtcccttcgtccctcggccacgggacacactcttgttctcggtagatctatgtggagagaaagaacggggagaaataaattgccgccttgccaccgtgttcacggccacaatgcccgcgagatattttttcgttgttttgaaccacaggaattgttccgtgttctgtcccctatggtggtgttgaacctcaccaccccgtttggtggcctgctccgttttcacagagagcggccccaccccctctcacgagatcacagaatggggaaacacacaccacacccccgctggaataaatggtgtgtcacattgggtcacgagattttctggtggcttgagattcttataagaacatggagaatctgttgggtaattctttccctctttctgttcttataatggtaatccgttaaacactgttttgccctcgtgtcacgcgtgcgtgttaccacaaactatggtgccgcttgagcgggcacccgcgtggtcccacagtcttttagagaccctctgttatgccacgagccgagggtcgtcctggtcacccgtttcacccactcacatcgctttgaatgttcccctcgtctttccctcttctgctttcaagaggccaaagggtaaatttaaggagccaaagatgaagtccctgtaaactaatctgtccttgtttttaccttccttttctttttccagtgccagaaagtttaaagtaagtataaagcca

SEQ ID NO: 708299 - DNA, 354 bp, Homo sapiens
gcggccgcctactactactaaattcgcggccgcgtcgacgggcaaacggtctctacaaggagagctacaaaacactgttgaacaaaatcatagattacactaacaaatgaaaaaacagttcatgcttatggattaaaacaatcaatatcattaaaatggctagactgcccaaagctatctacagattcaatgctattcctatcaaactaccaatgtcatttttcacagaataaggaaaaactattctaaaattcgtttgaaaccaaagaagagcccaagtagccaaagcaatacagaagccagaaataaagccacacacctatagccatctgatcttcaacaaaggtcgacgcg

SEQ ID NO: 708300 - DNA, 237 bp, Homo sapiens
tcggacgttcattcctgcagctccatcgggatgtctgatccaacatctagctcgtacaccctattgttgatatggactctagtaataggattgcgctgttatccctagggtgaagggtgtcccgttagatcaagttattgagatcaattagagtatagtagttcgctttgacttggtgaagtcttagcatgtactgctcggaggttgggttctgctccgagcagcagggaacagaca

SEQ ID NO: 708301 - DNA, 123 bp, Homo sapiens
ctcgcacgagaccctcatcaatagatagagacgtacagaaatattctaaccacatctacaaaatgctctgtatcaagcggcggcttctaaaccaaagtggtgtttggatgtagcgtgacatat

SEQ ID NO: 708302 - DNA, 826 bp, Homo sapiens
  misc_feature (112)..(112): n is a, c, g, or t
  misc_feature (149)..(149): n is a, c, g, or t
  misc_feature (171)..(171): n is a, c, g, or t
  misc_feature (212)..(212): n is a, c, g, or t
  misc_feature (215)..(215): n is a, c, g, or t
  misc_feature (233)..(233): n is a, c, g, or t
  misc_feature (240)..(240): n is a, c, g, or t
  misc_feature (259)..(259): n is a, c, g, or t
  misc_feature (317)..(317): n is a, c, g, or t
  misc_feature (337)..(337): n is a, c, g, or t
  misc_feature (355)..(355): n is a, c, g, or t
  misc_feature (410)..(410): n is a, c, g, or t
  misc_feature (412)..(412): n is a, c, g, or t
ggctcgccgcgccgtgtcgccgcacctcctctgatctacgaaagtcatgtacccaacaccgggaggctggcaggatgtacagtttttatcacaggtgcaagccgtgcattgnaaagctattgcattgaaagcagcaaaggatggagcanatattgttattgctgcaaagancgcccagccacatccaaaattctaggcacaatctatactgntgntgaagaaatgaagcagtntggaggnaaggccttgccatgtatgntgatgtgagagatgaccagcagatcagtgctgcagtggagaaagccatcaagaaattnggaggaatggatatctggtnaataatgccagtgccatntagtttgtgaccaatacatttgacacacctaccaagagatgggatctgatgatgnancgtgaacaccagaggcacctaccttgcatctaaaagcatgtatccttatttgacaacaagcacgcaaagttgctcatatcctcaatatcagtccaccactgaacctaaatccagttggttcaaacaagcactgtgcttataccaattgctaaaggtaattgggattgtccaatggtaattgtgccttgcgactggcccgacacacattcaacggttcacctcgcccgtcaaggcattatgggcctaaaacaagcctacacaatggatgcactggatatgctgggaggacctggatctgcagcccgtgtcacaaagttgcttcatgcccctgcggctattcattccaaagcaaaatttcctggcactctgactgcccaatctcacacacgattaacttgcttgctaccacacctg

SEQ ID NO: 708303 - DNA, 890 bp, Homo sapiens
ctgcaagggaggatggagccttacttggacatgccatttcctgatctctgtagcacctcttattgatatttcatactcaacccttgattccatctagccttttttctttccactggttcctgctaatgcaagccttgacttttcattcctattatgcattcttcaatagtgggctgtgtcatggattgagagcgcctggcggagccctggatacatggcagtttttcaataagcagttgtcggcgggcagccctgagagtgtgaattatgagtactagcaaaaggcaaggttcatttgcataattataagctgaagaacggcagaggaaatgaggtactgaactgctttggaattgttctggctgctccagtatagttcacattaacaaattttatcgttaaaatttaaatattccaaaatgtaaatattccaagtggaaatttctggaagagaagtgatatgtgtcgtgtggaaggggttacaataacatcccaaaaaccccagccagtctgcaaaatcccagcaaatgcaatttaaagagtgctaggaaaaacgttctaaggtacatcccagtttggattaaaccatgtctgataccattatactgagggtcttaactttagaattaagaaagtcctgtgggcttaaccttttagcgggtttgttgaaactcccagggcgttcgccatacattccctatcctcaacactttgttctgggcaccctgggtactccaacagggcgttacaccggttgtccaactcctgaccgcggggttctgagacaatacgagggaaggagtgcggtcgctcccaaaaccgtgtattactgggggccaaaataaataacccagacaaaagtacctgggcgaacataacgaccacacctg

SEQ ID NO: 708304 - DNA, 86 bp, Homo sapiens
gccttcctcggctggatttaagacggcgctttgtcatgggacctgtgcggttgggaatatgcttttcctttttctgtcgtgccgtg

SEQ ID NO: 708305 - DNA, 238 bp, Homo sapiens
gccccgtatatggcgtttcccgtataactacagtaagcgttctgactcttacctccctctctcctacgtccgtgctcgcatctgctacagtggagggcggagcaggagacaggttgaacagtctatcctcccttaggagggaactactcccaccctgtgagcctccgtagacctaagcatcttctcgttgcacctagcatcgtgtctcctctatcttaagggcaagcggccgcaaggt

SEQ ID NO: 708306 - DNA, 903 bp, Homo sapiens
gaaaaaaagccaccctagcggccggggccggagctaggagccgccgctagccgccgccgccgcggccgtactaggagctacccccgcgcggacgatagcctagccgtagcccgcctaggggctacggggcggtagaggcccggggctgcggggtaagctaatatgctgacgtgcaagctgctgtgccctgctggctgcctgcctagacagtgtagtagggccccgtgcgtgcggctgtgctgtaggagctagcatagtaacgccacagggggtggcacagggtatacggcctgtagccctaccgacagcgcaggcccgcgagaagttaggcgctagtacgtatatatagagtaacctagctagcacatacgtgtagcccatgaagtacagcccgagacctatacctagtactagagataccgatagggagaacgaacatacacgctagggggagccccctaggggtatacctagcactacctaggtaggtagcgtactatactagggcacctagtaactagcgacggctgcctagacaggaacgcgaggcctagcgagcactaccggcgagggcccaaggccctataccaggactaataagtagctagcagtccgtcccccagatccccgtaaatagggggagtataggccccaggtagacacaataggccgccacggctacccataggcgtgcttgatctaaactataccacggcgggccccccacacaccatacatcccaccacctacatccaccacatcatcctccatacctccaactaccctctgcctcccacacaccaccaccaccctcactactacctcatccccccctccactcactcacaccacccctcacccacccactcaatctcccctcacccaaacctaccacaccaccta

SEQ ID NO: 708307 - DNA, 533 bp, Homo sapiens
gggaaaaggcgggaaaaggccctaaattttttgagtttgggggagccgcccatggttataagggttccgggaaggcccaggggggttaaagcttttccaaccatccccccttggggtggttttcgggttgggaaattaaaccaaccggttgggggggggttttcaaaaccgggggcaaaaagggtggtgggggtgggcagggtccccagtttgccccgaaaggtccagagggttaaaggaatttttcccctaaacccgccccccccctttttaacaggggggggaggacgggttccaaaccgtttggttccattggcccctttaggtttggggggaaaagctgggttattaaaaccaaggcttggtaacccctcccaagggaaggggaatgttttgggggcccccttgggttttttttttgggggggggcggttttaggtttttggtttttaaaaccgggcttttttaggggaaccacttggcccaaaatttggccccgaatttttgggcccccttaaaaaggttaatgggga

SEQ ID NO: 708308 - DNA, 522 bp, Homo sapiens
ggaagacaggaaagactcagagagacgggagagagaagaagagtgggtttgaagggcggatctcagtccctggctgctttggcatttggggaactggtgactccctgtggggaggagagtgaaagctggaatgtcctggagggacagggtcccagtaaggaggggacagaggagctgagagagtgggggcatgtggcgttggtgcaggggtccctcgttatggcctcctgggggaatgggggctgcagctctgtctgagctgccccctcgtagcgctgtgtactctggtgctgcaactgagaggtgcagcagcatcacatcggaccatgacactgaccccgagagaacttggtggagctacaagggataaatcttccaagggaaaactttcgatgccagggcctcctttctggggcctggtgaatgcaggcgtggacgtctgtgtgctgtggggaagcggcagcagccccgctggattgtggagctgacgcagggttcctttatgaccccgtttctgccccc

SEQ ID NO: 708309 - DNA, 103 bp, Homo sapiens
cctcaccacacctgtcttctaacctccctgttcttatcaattcgaagcagtcgatacccccgagttccgctgcaaaccaggtaccgctgacaaaccatgtacc

SEQ ID NO: 708310 - DNA, 163 bp, Homo sapiens
cacgaggagaactattcaatcatatcacaggaacattatttcccattagaagatcgcacatgataattgattagcaactcgtgatgattcacaagaccacattgatttatcgaaagataatgctcacaacagacgagtattaactgaaagacaccttaaattt

SEQ ID NO: 708311 - DNA, 375 bp, Homo sapiens
cttggggagctgtaaaagaagggcgagtgatgagggcatggcggacgttgatagacggaatgtagtaacatacaaagagagaaacctcatcaggcagttgcattagagacaacctaacactcgggacatcagacagtgcaggagaagaatgtgatgcggaagatggggctgaacactacatccatacagaggtgtcatccattctttcgcttcagagaaaccttattacacagtctccattccttattccactaggactttcctatagcaaagaaacccatacatgtgtatggaatcaactgtctatagtctcttcacactgcagcgaagggaaaacttcattccttgattcgtgtttgtcttggccttcctggc

SEQ ID NO: 708312 - DNA, 585 bp, Homo sapiens
  misc_feature (49)..(49): n is a, c, g, or t
tcagtgactctaaggatcccagctcgatcaaacttcttccatcaggtangcgatgcacgggtcggagttgatcacgatctcgtaggccaggcccatctggccgcgactgtaggacttttcggtactgaggatctgcttgccgtaggaccagtggtgatagcccagcggcatgccgaccgaggcgtaggcgttcatcatctgctcggcagtgatgacctcgatctggttggggtaggtgtccagggcataacccgccgcgatacggctgatttcccggtcataggcctggatcagttcgaaggtccactcggagccagtggaaatgggttggcgcttgttctcttttttggcggtcatgttactaacctgcgctggaagagttcacggaagaccgggtagatatcgccggccgagaccagctgctgctgggcgaacgtgtcggcaaaggcttcgccgatgcgctcgtattcgaaccacagggcctggtgctcacggggggtgatttcgacgtaagtgtagtactgcacgaacggcatgatctggttgatcaaaatgtcccggcagattggggagtcgtcgttccag

SEQ ID NO: 708313 - DNA, 352 bp, Homo sapiens
gtacagcctggctatctattttaccctctggtacagcctggctatatatcttaatctctgatacagcctggctatctatcttaacctctggtacagcctggctatctatctaaacctctggtacagcctggctatctatcttaacctctgatacagtctggctatctattttaacctctggtacagcctggctatctatctaaacctctggtacagcctggctatctattttaacctctgatacagcctggctatatatcttaacctctgatacagcctggctatctatcttaacctctggtacagcctggctatatatcttaacctctgatacagcctggctagtcgacgc

SEQ ID NO: 708314 - DNA, 517 bp, Homo sapiens
gcactagcaacctgggtcattcatttaaagaactatctttaatatttactctcatgactaattgcccatgtgcatgtgccaaggcaaaacacaaaagtgactgtttccaaatgactgtcttctggttttaattcctacttgccttcagatctaacacaaggtccatcctgttctttcccaaaggattgatatcattgaggatcagggctgtgattatttaaatgccattggattcatggggggctatgcagttctgagtcaagacacaccccgactttcacaccaacgcggggtattaaattataaggtcaagggcaaacaggctaaactgttttttaacaacaaggtttaccacttccagaaagtgcttctaaggggaaacccggaaatttttccccgagaaaagggggaagagtaatacacaaataaaaaattttttattatcaaaattaacaggtataacattggaaaagtcccccatgccctgggaccggggaaaaaaggtgggggtgtaaaa

SEQ ID NO: 708315 - DNA, 817 bp, Homo sapiens
  misc_feature (345)..(345): n is a, c, g, or t
agcgggagagccggcgccggaggagacgcacgacagttgactttgctcttctgccgtctacgactcgtgacagatggtctccaggagccgttctctctccgtggtgcgaaaatggggaactcgttgaaggaacacaagctcataggacctagtctgcgggaaggaagtaggcataagcagatccatagacacactaaggatctactgatagctgtgaagtgtttggtaacaagtgaggctagtggactgctgtgcgtatctagtcagtacgtgggtaacagtctcatgtgctctgatgaacgttgcatctttgttggcactgatcccttggaaggactatacgcnttcaacaaggacgaaaaatgatcggagtcttgctagcagtggggaagcctctcattatcattcaagcacagcctgaagaattagtccggcacgcagtgaaacgaattgatctcctgctgtaaccgctcagaattcataagcatctgctacggtggtacacttgccaaggagatctcgtgcaggaacggaaggggacgaggtcgtggctccaatcgtggatgcatgagtgaaatgttcaattgtcgttcagagatttcattattcgctcatgagtcgtcaaagttagcagtcctgagtggcgatcatagagttgtggtttccaataccaggtggactacttcttacgttatgtgaccgtggaaactaagtggattacccgaaacaccgctgtgattggaagttggatgtaatctggatgctgctaggatatcgctaaccttaatgggtggaaaaaacttggcgattcatcccc

SEQ ID NO: 708316 - DNA, 367 bp, Homo sapiens
acagcgcgggctctagagctgggcttcgcagctccatactagcattggtcccctggacccatcttatgcactcttgtcttttctcattcctttgactccgccggacttcatagcccccacagtctagtgttgggtctgatcaccccaacagtcaggagttcgagaccagcctggccaacatggtgaaaccctgtctctactaagaaaaaatacaaaaattagtcaggggtggtggtgcatgcctgtaatcccagctacccaggaggctgaggcaggaggatctcttgaacctgggaggcggaggttgcagtgagctgagatcgtgccagtgcactccagcctgggaaacagagggagattccatctc

SEQ ID NO: 708317 - DNA, 130 bp, Homo sapiens
agtctggaggcgcactagaggatcccaccaacatggcctcgacccttaggtgtgttcgatgtagcgctgcatcgagcggttgatgtgtggaaacatgcgcgaattggcgtcatgcagggtattgtcgagg

SEQ ID NO: 708318 - DNA, 1377 bp, Homo sapiens
  misc_feature (1315)..(1315): n is a, c, g, or t
gtcctttttcgttattgttgggggggtaaaaaatttcccccatgtgattattgtgaacaccttgtgtttgtgggtcactgtgaacatttggggggtggggacagcggatggaaaagtaacaactagtgccacatgtgccctcggtggatctgtgcagcagcagctggtgcagcaatgtgatgacgtcttttgttgaatgcaaaaggtgtttactgagtactttaaaaataataatttagatgacgacctcactattttgggtgggtgcactctttttttttatagagcagctgcatctttaaaatgggtgggcgtggagatttcccacaacccaccccccaacaataataaacactaaagatgttacatatatttcagcgagtccctcctgtgtgtgggagcatcatataagatagcgcgattctcctctgtgtgtgggagcatcagtgggcgcacaaataaactgtgtggcgaaaactattgtatattctggggtgggagtaatcctctgtgagtgaggtgtgtgtggagagagtctctcatataggcgctggggagaagaagaatttctctcactcatatcactaattatttctcagtgagcgtgtaataaattaaaagaacagtgggaggggaatatatattgagagtgagtgagtgtatatgtggcggaaaattagcggtgttgttgcgccccctcaactatattctcctaacccaacataatattcgtcagtgagtcgcaggtgtgcgtggagacgcacacatacaatgggcgggggtgcgggagccaaaggtaacctaaacccaaagggtgtgcgagctaacatagcgggggatggcaggtagatttattacccccgggaagaattctttggattgtggggggagggccaaaaggatcgttcttactctataattaccacggaaaattaaaacccacctgtgtggggggtgtatttggtggaaaacaggttgaaacgataacaattggctgttggaaagaaaacacaattttggagggtcaatttcattttcaatttctgacgggaagtaaaaatattttctttcccacgcccttaattaagtgaagcttttgtaaacgttgggtcggcaactattgggggccctaaagatggatcgtcaaaatataggagtttgcaaaaaccctttctggtgggccacaccaacttatttctgtttgtatcccatcttgcgttgttgttgacccacccttggggtggttgtgtcgcacactttgtggcgagagaagaaaagagcaggtgttatcacccaaatcttcacggagtgaggnagatagatgggcggctaatgatctatgtcgaaccaggtgttgttggcccacactacgcaaac

SEQ ID NO: 708319 - DNA, 190 bp, Homo sapiens
  misc_feature (2)..(2): n is a, c, g, or t
  misc_feature (63)..(63): n is a, c, g, or t
  misc_feature (129)..(129): n is a, c, g, or t
  misc_feature (168)..(168): n is a, c, g, or t
  misc_feature (172)..(172): n is a, c, g, or t
cncccccccccaaataggggaactggagaaggtgttaaaagcccataaggtctcccttttccnctaagaatataaaaaccaaaaagaagaactgttttaaaaaaaataggagatgccattattttggantgaggttcataccataggccccagcagaccagaacaaanccanaaaaagtcactcatgcta

SEQ ID NO: 708320 - DNA, 290 bp, Homo sapiens
catggaatcatccagcaaagaactcagacgagaatgcctcccaacagagattgtcacactcctcatgtccagtacagaagccgtaagttacgctcaactattctgtagtcagtgaggtagccatatggtgtgtgcctcccaatccctggctccaggtatgtaggcggatacatgggagtaggagcccacctccctatccagcatggtgccgggatggaaggggggaaaggcgttgccgttcgggggctccttcggcgagtacagctagaatgactttgaggaacacccag

SEQ ID NO: 708321 - DNA, 214 bp, Homo sapiens
tattccccatcctgcccaatgtttacatgtcacccactttgttctcatcaaccttccctagtacaaatttatttacatcatcttactgcatagctactgactttactgaatctattccttgatttgatgttacctttcatacaaatcacagtcgaacaacgtatgaagttttttcaatacagccaagatgctggcttctcacctgtgcatatag

SEQ ID NO: 708322 - DNA, 968 bp, Homo sapiens
  misc_feature (23)..(29): n is a, c, g, or t
  misc_feature (36)..(36): n is a, c, g, or t
  misc_feature (38)..(44): n is a, c, g, or t
  misc_feature (58)..(58): n is a, c, g, or t
  misc_feature (60)..(60): n is a, c, g, or t
  misc_feature (68)..(68): n is a, c, g, or t
  misc_feature (74)..(74): n is a, c, g, or t
  misc_feature (77)..(82): n is a, c, g, or t
  misc_feature (115)..(115): n is a, c, g, or t
  misc_feature (188)..(188): n is a, c, g, or t
  misc_feature (194)..(194): n is a, c, g, or t
  misc_feature (197)..(197): n is a, c, g, or t
  misc_feature (386)..(386): n is a, c, g, or t
  misc_feature (496)..(496): n is a, c, g, or t
  misc_feature (522)..(522): n is a, c, g, or t
  misc_feature (539)..(539): n is a, c, g, or t
  misc_feature (564)..(564): n is a, c, g, or t
  misc_feature (580)..(580): n is a, c, g, or t
  misc_feature (655)..(655): n is a, c, g, or t
  misc_feature (896)..(896): n is a, c, g, or t
  misc_feature (968)..(968): n is a, c, g, or t
tccgccgccagctccagcctttnnnnnnnctccganannnnnnnccccggagcggagnancctagggnccctcntcnnnnnncccagcccagctacccgttcagaccagcagccncggggggcacccccccgccagcctgcctccctcccgctcagccctgccagggttccccagccatgaatctctnccgatnccngggagacctctcccacctcctcgccatcatcttgctactgctcaaaatctggaagtcccgctcgtgcgccggaatttcagggaagagccaggtcctgtttgctgtggtgttcactgcccgatatctggacctcttcaccaactacatctcactctacaacacgtgtaatgaaggtggtctacatagccntgctccttcaccacggtctggttgatttatagcaagttcaaagctacttacgatgggaaccatgacacgttcagagtggagttcctggtcgttcccacagccattctggngttcctggtcaatcatgacttcaccncctctggagatcctctnggaccttctccatctacctggagtnagtggcatcttgccgnagctgttcatgggtgagcaagaccggcgaggcggagaccatcaccagccactacttgtttggcgcaaggcgtgtnaccgcacgctctatctcttcaacgtggatctggcgctaccatttcgagggcttcttcgacctcatcgccattgtgggcaggcctggtccagacagtcctctactgcgatttcttctacctctatattaacaaagtcctaaaggggaagaagttgagtttgccggcatagccccggtcctctccatctctctcctcggcagcagcgggaggcagaggaaggcggcagaagatgaagagcttnccatccaggggtgacttttttaagaaccacctcttgtgctcccatcccgcctcctgccgggtttcagggggn

SEQ ID NO: 708323 - DNA, 203 bp, Homo sapiens
tggtcgacgacagcatgaagtcggaaatgcgcggcacgatttcggaacggaaccgcgaaccgttgaacacgccgtaatgaccgacgcccttctgcacgtaatgcacgcggcggtgatcaggaatcgacgtgcacagcgcatgcgtcgcttcggtttggccaagacccgagatgtcatccttctcgccttccaccgtcatcggc

SEQ ID NO: 708324 - DNA, 1325 bp, Homo sapiens
gatttctcccagacagtgcttgagcaatgggcgcacaggcacaacgatacatacttccccaacctcaaacccgatttgtggcaggacgacatggcatacagaatgaacatcgcctcgtgctcgcgataccagttaccgcaggctggaagcttggacgatgactattgaccgatattgtccgatctgctgagcacgcatggcgtcatgacttggcagcccaacgggcgaacgtgtccgttcatcaacgatcacagacactcaactgagctgcgcgattccagggcaccctgctaaatggccgattggacctagggacgatcagaaacgcctggcacctcttcaaccagaagcgcggcctgctcaatataggccaacaggaaagcctgcacaagaaaacaaaccaagcccttaacaacgattctcggagccacgcgaattgagaacccatgacatagctggcctgctatggcactgggccatgggacatcctcgccagcctaaacccttccaaaagccctctggcgccacaatcggttgtttacttacgaagagtaacacgaacgacttggaaaacaggaacgttcacatacaaacgaccccaacctgcattacaaattccccattaagggaccaaccccaccaaggccaacgactagtccaacacgcccgccattacatcattggaaggctcatgcggcccccaggagcaccaaggtaactcgaaaagccccatgtgagaagacaccacgacatagagcaacaagcaaacaaatagggcctcaccattagagtcgagtacgcacacttcctataacaaagcccaggacccgtacgacacggagttcccaaggtccttgcaaacccgagattcacttgggccccacactgtgcaaaaaggcgccctcttggcagccaacctctgcacaacgacgggcgaccctaacaactactggttaaacaccccccattacctaaagatttgcacctctttttccgcaaacactaccgggaaaaagccgccacccacaaaagaacacgcaacacaagcgccccaacggagggagattccaacaaatagcccgagggactatggagttttccgtttataagaccaaagagaccgcccggtacacaccgccaattggtacaactaggcaggccctaaacaacccccaatgacatccaacagggaccctatacccctatggcaaacctcgccacacaacgtaaacttagggaacagcgggcaacaacgaggcagaacaacggaaaaacagggagccaaggcggtaaaaacaggcgaacacataccgaacaataagcgc

SEQ ID NO: 708325 - DNA, 428 bp, Homo sapiens
gtacatgcagcagtgcatcatgaaattccacttttcgtgttttacagatcgtcttgactgcaaaatccctcgcggagctcactaaaatgctaattaggctaaaacaggaggtaaagaaatagccaatcatctattgcctgagagcacagggggagggacaatgattgggatataaacccaggcatttgagccggcaaaggcaaccccctttgggtcccctcctgttgtatgggagctctgttttcattctattaaatcttacaactgcatactctctggtccgtgtttgttctggttcgaactgagctttcgctcgccatctaccactgctgattgctgttgttgcagacaccaccactgacttccacccctccggatccagcagggtatctgctgcacttcagatccagtgaggcggggcccattgc

SEQ ID NO: 708326 - DNA, 172 bp, Homo sapiens
ggatcttactgcaagggacgtgacagaagaaaaagcacgtgcttttgatttctttcctctgcctgactagacaatgatgttactaaatgctacaaggctgaagaatctaaatgtcgtcttcgactcagagtaccgtatcatattattgttatgctatactttacttgtgtgt

SEQ ID NO: 708327 - DNA, 1023 bp, Homo sapiens
ggcgcacgtgtattccacaggtgggaggagtcggagaggcaggggctatgcgtttgcagccccagtagacaagcatgttgctacatgtgcctcaagccgccagagtggctcagcctgtccagatcctttgaggatatctaagggacaaagtgccgcaagtcttttctctaccttgggggaactcgtggaacttggaaccggcttctcctgtcctagctcttgatctgttctgggccaggtcccaggctttgagctgccatctgagatttgggctgtgcggatctctggagtgagctctgtttcggttgatccaggtcatggagatggaaacgggtgaggccccatgtggtctgttctgtgaagaagacagactctcctggcaatagggccccagcagtctccctcactgaaagccaggtggccgggtcctcggactctggttcatgttgcggtgagacctctgcccaggtgtgcagggttctcggcttgtgggctgcttgctgctcatctgacttttggtcccagtagtccctgcgttcttcattcaaccccttgctgggacttcagctctggagagcaccatcccgggggtcagggcctcgcaccacaggagccctgcagtgtggtagcgccatggctgtctcagaacaatgcagaggaacggccctgagagcttcacgctaaccatcctcgagcattgctggtggaaggcctccctggactgtgcccaacctttgcacccagtctccagatgcatgtttccaagacgaccttttaactctggctttggattgactctgctttggaccaggactccagacgtgggtgtaccgagaagaagcgtcggcaagaaggcactctaacccggatcctaggccgtgcctagggactggaattcccaaaaatgacgatacacgagaggcccgcgctattgaagggacccaaacccaccattacacctggttattcgaggttaaggtccacaactcttttgtgtgtcccctttttggtccacaccatacc

SEQ ID NO: 708328 - DNA, 144 bp, Homo sapiens
acattaaatttcctggctcctccatagtggtgctttggtctatttccttccttctgataactccctgaggtaaaggcttaggtcatgggtatagaccttcttttctaatacaatcacataagggggtatcctagggtaccgagc

SEQ ID NO: 708329 - DNA, 1041 bp, Homo sapiens
ccttgtctagacttttaccgtctcatgaaatgtttacgttgcttaaaggaaagcttttaatctctgaatgtctgtcctgtcccgatcccccgttacctgcagctttttcccattcatattggggttgaaatcttaactgtacaaaaggttctggccaccaaatactgccacattttctccggatggtcacattaataactactttgggacaaatagctggggggtgtctggaggttccagacctccttcacaggccagagttccatcggtcagatgatgcactggagtacctggtgtgtgaccttcttccagaagcacgggcacaggagcatgttaaaggccctgaaaagaccagtggcaaaagaaactcctttcatggttgtttaatccagagtttttcaagcttatttaactatagaacacttttctgtgggtttcgtagcctctttctagcacagtatagtgatgtgggaaaggccctgactgagagtcaaagattctgagcaggaaccatgatctcttcctgcctagtatgtgacttgagcaagacacttttcctctccccaggcctctgaggtctgcgagttttcctccaccctttcctctccctcagtttgcacatccgtattgacgtcagcctccaaactagcggtgggcctgtcaggacgctctgactctgcctcgagacagccagggaaacaaagcagcacaaccaggcagatgcagttagtgtccaagtcggggcactcacagcctagcaaggaaggcagcaagtcaaacctgtatagctctacacaagtgatgggtatcaactaaaaggctaagtgtcagggtaggcatgggagagatgaggttggcagagcgctttagcctagtctagcggcgagagccacaggtggcacaccaactgccagacggagagagacggcattcataagcatctgtggatgtcacctgagaattaaggagtgttggccggaccacggtggcttcatgcctgtaatcccaagcactttgggaggctgcttccaggcagattgc

SEQ ID NO: 708330 - DNA, 125 bp, Homo sapiens
caacgcgttgggagctctcatattgtcgactgcaggtcggcggaatacactagtgatatgtgagctgagatcgcatccggctataagacattttattaatggtttcagactattatcttaatgtg

SEQ ID NO: 708331 - DNA, 215 bp, Homo sapiens
tctctgatatgctgctcagagaaagctctaagaaaatctgctttaacaatctgttctcctaacctgtgtggtccatctgcaccatatgagcagcaggaaagaagcatcatgggcttgacagagacacagctgctgcttctctccaggcggagcaccacagggcaacctgaactaacatgtatgccatagaaagtaaggatttacaaaatatacac

SEQ ID NO: 708332 - DNA, 1089 bp, Homo sapiens
  misc_feature (658)..(658): n is a, c, g, or t
ctctggctaatcatgacgagcactgggtgcttgtacccgctccggtggactaactctcttaattgtacattattcagtcgaggacacagggcaggacgtttctccgaatcactttggccctcccatggaccacatgttccctgggaggacccttcgacgtcttggactagaaggcccgtggagtaaggatgacgcggtagcatgtcgaagacgagccacgggttacttaattcccttcaagcgaaaccaattgaaggccgtatgccatatatggggcagactaattatagctgaatgaggaggcacaccatgtgacgggacaccctggccaagtacgccccagggatatgtgtctggggcgcgcattctggatcgtattggcggagacatgagagagcgcacgacgatcacccgtgggggaacactggagagccgtcgtatcgcacacaatgtgtgtgcctgtggatatatcggggctaagctcgactgtggttggagtggtagagcgtacagatggcattccctgcaatttcttgtgcgacgtgttgaaaagccaagaggcggttcatcctcggggaactgtgcgtctaaaatctccctatcacaaattcagaggctaggcctgcatgatctcattacacgagatccctaggaaacncacaattactttggcccacaccaagctggtgtctgtagaaacacttggtctgctgagttcaacgagcctgttcatggagcaatacccgaacctcaagagagcgaagaattgccgaagagatgtgcgaccacaggacgtggttccttcggtgcaacactgttagagtcccaaaccttccagaacgaaggtcctactttgctgtgcgcttgggcaaggagtaccctggtccaatcagtacgtacaacttaagatttaacatccactagccagtggggacagtgatactgccttctaccaaagtcaatatatggcattgtgtgccaataacaagaataactagtcaaggaaattctaatacacttaactcgatatgaaactttggggtggctcattgaaccaggaccggagtaaggatgcaatataccccccag

SEQ ID NO: 708333 - DNA, 306 bp, Homo sapiens
taaaggatccccgagttatcctgcaaatgcaggaacgtgggtgcgtctcggaggactggaggtggagacaacagaaagagggtgcaagctcctgaatagtggtctaggggttaggatgtgcctatgctatgtgatgtcatgtggggcatctcgaggaacacagacttcatgacaggctgtaggggacacagtgagcaaggagctctagggcaatacacaatggcacaccagaacccggagcctgacaaagtgaatcaaaacagggagatggatatctacaagaggagcgaaggtgggtcccagacc

SEQ ID NO: 708334 - DNA, 138 bp, Homo sapiens
gcggcatgaagacccttgagttgctttccctgaagacgtacagtagcagggctcttgaacattccgccctacaagggcaagatgaagaggatcgccgtccaattccaaggcggacaacttggttcgcttcgggtggaa

SEQ ID NO: 708335 - DNA, 240 bp, Homo sapiens
  misc_feature (77)..(77): n is a, c, g, or t
  misc_feature (124)..(124): n is a, c, g, or t
  misc_feature (138)..(138): n is a, c, g, or t
  misc_feature (219)..(219): n is a, c, g, or t
tcgtcgcctaggaaggtctccaatttctgggctcaaagggatcctcacaaagtactgggattacaggtgtgagccancgcacccggacctaattttcgcatgtttagtagagatggggtttcancatgttggccaggntagtctcaaactcctgacctcaggtgattcgcccgtcttgggctcccaaagtgttgagattacaggcgtgagcaaccatgncaggcctcagaatggctctta

SEQ ID NO: 708336 - DNA, 1413 bp, Homo sapiens
  misc_feature (580)..(580): n is a, c, g, or t
  misc_feature (725)..(725): n is a, c, g, or t
  misc_feature (727)..(727): n is a, c, g, or t
  misc_feature (750)..(750): n is a, c, g, or t
  misc_feature (767)..(767): n is a, c, g, or t
  misc_feature (774)..(774): n is a, c, g, or t
  misc_feature (1056)..(1056): n is a, c, g, or t
aatcgggggcgggtagtctacaaagggtgtgtcggccctttaggaatgttggctctcccgcttctttggggcccagatgggtttgtcaagcgcggggtttggttcagatgcttacatgtggtgcccccggcgtttttttgttgctctgagattggcggcgtctgtgtgcgtacacgaaggggttgtcggggggccccccggcgtaatatttgggtcgtctgtttaataagtttgggtgcagttggttaatcccctcttccccacctggttgtatttcttctgcgtcggaagttgtgtgaatagttgtgtgtcgccaccagggggggtccccgcgggggggggccgctgttaaattttttgttttaacttttcgcacacccccgccgtttttatgttgtaccacccgggcgtcttcacaccacaagatgttagaataacacagttatcatcgccctggtaaatggggtatatctcagatcacagcaccacagctcatcagagaatgttttatgaggtgcacacacactcaatgagagacacactctcgcaaaagagatactcccctcacacaacacgagtntttggtgtcacaccacaagaatatacgaccctagacgacgcttgtgtgtgtaataacacacgcacccgcgtcgcccacgagtatatcacacctattataccccggggtctcctctatagagggtgattacgccgcgagaggcgcncnctggtgtggtgtgcgcgagaatnttcttcgcggcaccacncgagagnggggttatatagaggtgtgctctctccacccttggcgcgccaacaacaacactcgcgccctgttctcgctctcactcgtgggtggtgagatagtctctgagaggcacacaatgagagggcctcacacagccacagagagagtactcacacacacggcacagctctctctctcaacacaggggagagaggccacagtgtgttgcccactcttcgcctctgggggctcgttatttcccgtctctctgtgggagatgtttatcaccgtcgcgagagatttattanagagagggggtgcacacagaatctcccgcgcagaatgccctccgagacacccacacactcgctttgtgtagagccctcatcactcttgtgggagagatataaaggagagatatatatttgggttctttctcggagatttgtgaggccacacatcacgccgcgaccacgccactgtgaaagaatgttgttgcttctgggctcggaatataagaagaatgggacacacatcacattcacgctcacactatggttggaatggcaccaaggctcttcaccaacccactctgtagcccgaatggaaccttgtactaacttatgatagaaatgtatccagaataaaagtttttaacccctgta

SEQ ID NO: 708337 - DNA, 164 bp, Homo sapiens
ggtgacgtccgggtacagtatgtgaggtcagacgccgtgcagcccagtgactcagcaccgggtgagacgagttgttgaagagccactgcccagtgtcacgcgaactgtggtctgcatggcgcaccatcagtggatgggtggtcgggatctttcctacgggctgg

SEQ ID NO: 708338 - DNA, 123 bp, Homo sapiens
tcctttaacttttttaagggggccccaaatttcgggacaaattttggggccaggttgtcctccataaaaagatattcgttttaaaaacatcataatcacttaagaagagtgcccagcagccac

SEQ ID NO: 708339 - DNA, 200 bp, Homo sapiens
ccgagatcttggatgtcttccacagttcaaaagaccctttcgtcacccaacctgggtataacactggaaatggtattcaagcttcctggcacttctggtcagcaaaccaagtgttgggcaacaaatgattttgaggaacatggttttaaggcggaccacaaccggccacaaacgggcaactcccataaaggcataaagcc

SEQ ID NO: 708340 - DNA, 117 bp, Homo sapiens
agctggaactggtgcagtggctcacacctgtcttgggcaacttccccatcaccttcgcctgctatggggccctcttctgcctctcggcctccatcatctaccccaccacctatgtcc

SEQ ID NO: 708341 - DNA, 458 bp, Homo sapiens
  misc_feature (8)..(8): n is a, c, g, or t
  misc_feature (46)..(46): n is a, c, g, or t
  misc_feature (237)..(237): n is a, c, g, or t
gccaccgngcgagatgtcagatctcgtgtacgtcgattgaacacgnagacgaatacgtactcccaatttaattgttggtattggaagtaaacttcaagtttccacataagtcctaggagtttcgtaaaattggaacggcgaattttgggttaaatggcactttacccttaaacgacgtaacaatttgacatcacctttggtacgatatcattatttccaatatattctctctttaantttaatttacacaaaaatttaaagtttttttttagttagaaatcctactgaatttttaactaaacggtacattttacatagacgtaaaaaatgtgttttgaacaaaaatcgtattttaaaattttgacatgatgaactacataatatgtaaaacttggtatacataatttggtatttgtcatattacaacaatattattttgtccgttgtttaaatattta

SEQ ID NO: 708342 - DNA, 118 bp, Homo sapiens
atggatcacatcgtccacattatcatgtccatctgcaccatgctgtgcaacaaggatcatgttattcatgatctgttcagggctgtgtacccgttccctggccgccagaagattcaca

SEQ ID NO: 708343 - DNA, 233 bp, Homo sapiens
gatggaagagaaggggagcaaagcggggcctggaggctgcgggcaaggctggcctggccaccgccggccccgggctgctgccgcggaagccccctggcctggccgccggccccgcgggcacctacggcaaggccgtgagcccgccaccatcaccccgcgcatcccctgtggctgccctgaaggccaaggtcatccagaagctggaggacgtgtccaagccacccgcctcgcct

SEQ ID NO: 708344 - DNA, 233 bp, Homo sapiens
agcaacaagcatcagaaaacacacagggcaagaggacacaggactcagagggcgacagggaaagacctcagccaatcaggaccatgcggacaagcatccgccccacatgggcccgtcagcccgaccaggatatgcctcacaaacgcatcagagttgacacaaccatggctgacctcatgcccagccatcggcatctcgtctcttctcttgtacatctcgtctcttcttcttgg

SEQ ID NO: 708345 - DNA, 823 bp, Homo sapiens
gtagttataattatttcagagcttccggaaatactgtcctaactggctatgttaggatcttggttatctctgaagacaaagaacgaagctaggactcttaatttgggggtgcttctgtgactcttagtggggaaactgaaaatatttccacacttttacccacgtcaatggcatattctgggaatcaccaccaccacacaataccacagaaagaggctggaggctctgtaccctgttcattccttaagggccctgcttcccttaataagtaagtacagtggtctacggccctaaatatgcaatgagagctgaaggttttctacaaggtcgcccacggacacgggcaagggtttcccacccctgctttaaaacttgattattacatctctgcttgtatcctatgtggagcagagtaaggatagaaccaacaaggggctgagtacctgagactgggggcacccaaagagtgacacatacttttataccagaggcagcggtgagcctcatgcaggacaattactcattgtaaatggggtcaaataatacaattttgacattctttcactccatacacaaaaaaaggtcaggactgggtgtaataaacgtggtgtgatttcatccatcgtgttgtcttgaaatacacaagcctagaaggaatgaactagtgtactgaactggttacataatttgtgtggtaacaagtacctgtgggtatttttcacaattaaaactttgtgattataatgttcttacttttacaatgtacgtgtaaaattacataaactaaatgtgggggttcaaacaccggaagggatttggcaag

SEQ ID NO: 708346 - DNA, 421 bp, Homo sapiens
cagagctgttcctatttggccatcttggaatgggaaaaactcttttttttttttaccccattaattcctttatgtaggaagactgaaagtttaaatgtctaaaagacagacaacagataaaaggcaagagaaaagtaatttttttttatcctggcatcacaggcttaatcatgtcaagtttcaaaacaaccccagcagccatctgaccctgttcctgcagttacctagtggaagggtagtgtcaagagtgataaaagtgtaagaatatttacctgtggtttccttcttaaaataaagtggaagccaggcacagtggctcacacctgtaatgccagagctttgggaggccaaggcaggatgatccgttgcggtcagggtttcaagaccaacctggacaacatagcaagacctcatttctaca

SEQ ID NO: 708347 - DNA, 117 bp, Homo sapiens
tgggaataaaccggggtttggttttttgaatttttggaaatttggggaaatgttccccctatgggggccttgttttcccccaaggggtgcctcttgtttttttgaaataaaaactga

SEQ ID NO: 708348 - DNA, 177 bp, Homo sapiens
  misc_feature (35)..(35): n is a, c, g, or t
  misc_feature (109)..(109): n is a, c, g, or t
  misc_feature (166)..(166): n is a, c, g, or t
gattgctattcactcttttcctccccttgcttatnactgtggctagtttcccatttttcttttgttgttccggttttttttcggttttgatttttggcggctgcgtggntggggtggtcgggtatgtcggcgggggggtgtgggctgtgcgggggcattacaaaanaacccccaagg

SEQ ID NO: 708349 - DNA, 1346 bp, Homo sapiens
actatctacttcgagtagttacgagaaatgaaaactggcgccgatcactggttgactgacacgtgaccggtatgtggtgtgtcctcccatcatgtaatcactaggtgtagcgcattgagtaggtgctgcgatataggctacgggcaacgtgccacgcaagaattggttcacccgttcaatatgcgtcgcataatttacatattgccaggacataataactactattgtcgtagcaatgcatatacagcgggaactactaacatcttaaacagactatcatataatgatttatagcatcctctaatgcggcaagctatcacactaatcaagtgcactattaacttcttcaatcgctcacctgaacaatgagatcaaacagggcgtttagcggggcgacttaataggcttattggctctagttttcgtgtagctctaagtcgacatggatagtgtgttcatcgcatacccagtaattctcatcgcaccggggtcacaaagatcttcttgactcccttacgtggtaggacagcggaggactcatgccttaagagatcttattaaatttcccactagtattaatgcctatggctgggtggacatgcaacggtttcctggggacatgtcccccttggccattcaactttgggttagaacgcatgttttgacttggcttcaagtgctccccatttcgataatgtcatgattaacggctatgcgagcttaaactaatgttctccacaccacttttagccactcattttcggtaaacgccacgttgacgaactataccctttgcacattcatgacccttcagaggacactccactgtaatttacctattgtgagggtagaaataaaacgatgtcgcatgaatctcacatcttattcatcggaagtccataacctcacccttgtggtattctatactggaaatagcatgtcccttgtcaactttctccactgtggtcgatccgttggccttactttgctcgtcctcaattgaccctttttcacagggcacctacttcatacagcgagaccgtccacaagcgtgtgcatacggggaaacctatacgctatcttggacctcagggactaaactgggtatcacgctcccagtacttcgcgtaacttatgagccgagttgtgtcgctgtgatgtgcgctacttcgacacaggtacaggaagtctatcgaccactgataattcatcaactgcgcatcccgtgtgtctgtgacgtttgttcgtcccgacaccctgtgcgatcaatatgtccatcccgattctcagtacgatggcccacagacatttgagatacgagacattcgtgatttagttgctcatct

SEQ ID NO: 708350 - DNA, 284 bp, Homo sapiens
gtgactagtgtttgagctctgtacatgtcgggtcggagttacgcgtatcgatggcgcaggtgagggggcgcaatatgcatcctaggcctattaatattcgggagtatacgtagcgggataaggttaacaagcggtacctctagaactatagctagcatgcgcaaaatttaaagcgctgatatcgatcgcgcgcagattctgtcagtgatgactcattgcaatgtggatccatcttatacgggccgggggttatacattccctcagggtcgactgtcccagtggc

SEQ ID NO: 708351 - DNA, 199 bp, Homo sapiens
  misc_feature (17)..(17): n is a, c, g, or t
  misc_feature (128)..(128): n is a, c, g, or t
  misc_feature (183)..(183): n is a, c, g, or t
gcaccaaccagcgccanccagcaagaaagcctcaaagggcaaggggctccgagggcgccaaagatttggtccaagtcaaattgaaagaactgtcgtttcctccctggggatgtggggtcccagctganttcctgcctcttaggagtcctcaaatacccttctgtgcccctggcagctgataancctaggttcatgaccc

SEQ ID NO: 708352 - DNA, 335 bp, Homo sapiens
ccctgagcttttattgaccagtggactgtgacttttgatgtaattttatttttgagagagggtcttgctctgtcacccaggctggagtgcaatggggtgatcttggctcactgcaacctccgcctcacgggctccagtgattctcctgcctcagcctcccgagtagctgggactacaggtgcacaccaccttggctggctagtttatgtaattttttgtatgtctgtggagacagggtttcaccatgttgcccaggctggtctcaaactcctgaactcaggtgatctacccgccttccaaagtactgggattacaggcatgagccaccataataa

SEQ ID NO: 708353 - DNA, 275 bp, Homo sapiens
cgcgtgatgtcttgtttgaaagccgtgcagcttgagaccctgtggggaagctgatgttcctgtttgagagctgtgcagctggagatctggctggggagctgatgtccagtatgagggccgtgcggctggagacctggtggggagctgatgttccagtttgagggccgtgcacctggagacccggcaggaagctgatgttccagtttgagggctgtgcagctagataccgggggtggcgctgatgttccagtttgatggccattcaacgcctcccg

SEQ ID NO: 708354 - DNA, 300 bp, Homo sapiens
  misc_feature (5)..(5): n is a, c, g, or t
  misc_feature (26)..(26): n is a, c, g, or t
  misc_feature (44)..(44): n is a, c, g, or t
  misc_feature (282)..(282): n is a, c, g, or t
  misc_feature (288)..(288): n is a, c, g, or t
gcacntatataaatacatatatattntattataaatttataatntcttatatctgtgattttcatatatatgaatcagatctatgattttcatatatatgaatcggatctgtgattttcatatgtatatgaaagatgaaagatcgtatatatatgaaaatcatagatctcctgcccttctgtggtatgtttcacctcctgagacacactgaatattttcctaaaatttaaactaggattatgttcacttttaatttgcatgcctgggtaacaatgtcactanccaaanctactcctttat

SEQ ID NO: 708355 - DNA, 294 bp, Homo sapiens
aggatccccatgttgccccctatgggcggggtacagtggtgcgatctatggttcactgtcaagctcagcctcctgggttcgcggcgattctcctgcctcagcctcccgatctcgctcggtactacaggtcgccaccaccttgcctcaactaatttttaagtattttttagttacagactaggtttcaccgtgctctagccaggatggtctctatcttctgactctcttggatccgcgctgcctcagcactctcatcgctgctgggacttacaggctgtgagccacccaacggcc

SEQ ID NO: 708356 - DNA, 593 bp, Homo sapiens
cttcttcgggaggagcggattaagagggcttgggcaagggaccagaaatttgaagaactttacgccaggtggcaatagggtgccgctgccgcagcacgcccctctgggacgcagaagggaatgacccatcccccaccttctataaaaagaagaggcgcttctgttctgccccgtgaagagggttggagcctgttcaagatccccaaggggtccttgctaaaaatggcaccagaggagtgaggggggctgcggtagatgccccccccccttttattttagaataaattccccccttctctggctttctatgcggttgggagggaaaaaaaagaatgggcccccctcccaaagctttattccccgggggggtgtggcatgtttgaaatggggtctgtttaaaggggcaatcccagatcccgttggggggggcagatctttccccctgaatttctctcgataacccccagggggggggggtcttaaaaaatttgaaaaaaacttccttctcgggggtcctttaaagggggccaagggccccccggggacttagggtttcggtttgattcttttttaaaaaacccctctttgtttta

SEQ ID NO: 708357 - DNA, 174 bp, Homo sapiens
gactgtcgacaggttctgatccagtataacccagcagcttcttgcacacttcgcagaagccccgtcctttggctgagtcacgtgaacggtcagtgcaggcagcgcgtgccagagcaggaggtgcagcatgctgcacaccaagctcagggctgacgctcctccagcgaggatgga

SEQ ID NO: 708358 - DNA, 422 bp, Homo sapiens
  misc_feature (13)..(13): n is a, c, g, or t
  misc_feature (55)..(55): n is a, c, g, or t
  misc_feature (57)..(57): n is a, c, g, or t
atggcttccacgngggcgagtcgagtcttgctgcgtctccgcggccgccgcaggncntccctcgcgacaggacaagtactcggtgctgttgccacctacaacgaacgggagaacctgccgctcatcgtgtggctgctggtgaagagcttctccgagagtgcaatcaactatgaaattataatcatagatgatggaagcccagacgggacaagagaagttgctgaacaactggcagagatctatgggcccgacagaattctcctaagaccacgagagaaaaagctgggtctcggaactgcctacattcatggaatcaaacacgccacggggaactatgtgatcatcatggatgctgacctctcccaccatcccaaatttattcctgaatttatcaggaaacaaaaggagggtaattttgatat

SEQ ID NO: 708359 - DNA, 224 bp, Homo sapiens
  misc_feature (41)..(41): n is a, c, g, or t
  misc_feature (58)..(58): n is a, c, g, or t
  misc_feature (79)..(79): n is a, c, g, or t
  misc_feature (172)..(172): n is a, c, g, or t
  misc_feature (198)..(198): n is a, c, g, or t
  misc_feature (202)..(202): n is a, c, g, or t
cttgtgggcgtgtcttggccgtgtgtaaggcgggacacgcntgagaagggggtccccntgtaccgccacatcgcagatntcgctgggaaccctgacctcatactcccagtgccagccttcaatgtgatcaacgggggctccatgcctggaaacaagctggccattgaggaantcaatgattctgcctgtgggagccantccnttcaaggaagcaatgggaattg

SEQ ID NO: 708360 - DNA, 955 bp, Homo sapiens
gagtccgagtggagagagggagctgagtggttgtgtggtcgcagtcgtcggaaagccggtagtcgctgcaggcaatggaggtgagccaagcaatggaagctgagaggagtcagatcgtcagaaattcaccaggaaggctattgtatcatgtagttcgaacaaagtatggtgagtggaagcgtatgaacaacgcataaggacatcgggaaactgatacaatgagagtctcttgggacagaggtcccgcagaagcagtaggttatcaggacatgattaatgaagtagactgcgtgaatggtaaggggctgcaagttgagattcggaatgaaatttgcgtgagcaatgatggtcggagatcatgaaagacacagatagctgaacgaagaaggtgagagaagcattcacgtgtgtttgataaaggaggggaatcggctatattagtgtggtggaagttcgtcatgttgaggacaaatcgtgtggagagaagtgaccaggatgacgaagttgactgacatgatcagggcaagcggtgatggtggtgcaggtgacgttgactatgacgaggtgtgtccatgtgtctgccaggcccagggaaagactgggacagaatcgggtgcattcctgcccacactgctaataagcctttctgggggacttactgctgaagggtctccctactgggacaaaatccgtttgtacatagggacgtacaaccccagggggtgttaccccaaacttaaggagaggttctaaaacccttttgataggtccacacacgggcgtgcgtgtaacaacaatctaaattctaccaggacaaaaaggaaagaacggcaggcgcatacagaatgaaaccagcacgatgagcaggaacacacaacaagtccgctctctctgttctgcgatccaggcttcattctttttgtgaaaacgataaacagcagaaacatgaacaaac

SEQ ID NO: 708361 - DNA, 314 bp, Homo sapiens
  misc_feature (10)..(11): n is a, c, g, or t
  misc_feature (80)..(80): n is a, c, g, or t
  misc_feature (94)..(94): n is a, c, g, or t
  misc_feature (188)..(188): n is a, c, g, or t
  misc_feature (192)..(192): n is a, c, g, or t
  misc_feature (230)..(230): n is a, c, g, or t
tggtcatacnntgtgtttcaaaagcaatatgatggagctaaaatcgtacatgtggttttaattgattttacttactgttngcatcctcacaganacaaaggcatgtgcaagggagaaatagaaatctttttcaagtgatcttgacctttttttgttgagtctagtacaccgttaggaaaaggtcacanttgntcctagaacttttctatcaaccagtaagtctgtgtgtnaattagtaatttttttgaaaaaccaatgtttgaccacaaaatggtagcttattttcacctagtacacataatggggtatcctaa

SEQ ID NO: 708362 - DNA, 210 bp, Homo sapiens
gctgtagttaaatgatagcgaactcctgcagcatataatactagtggaagggtgcggacagcatgagtagctgcagcggctgagctgagcgacgtggacccatagtctagtgtatgatgtagtaagcaacacggctgtggtagaaatagactacgtggaaccttgtgaaggaagctggtctcatagtaactcacatggttggtctcagga

SEQ ID NO: 708363 - DNA, 793 bp, Homo sapiens
tgccaccgccggagggcaggcgcggtacacgcgacggacaggtccctgcggggaaaaattggcagaaacatcccgctgccaccccaggggggtgcgaggaaatgcatgtccgtggccgcgtcgcactcggtaggcaccccccagagtgaagcgaggggaggccgagccgcccgcggagttggcgcccgagtcgggggacgcacctctcaccaccgacggagagaaaccgccctgtgtggagaggccccccccccatctcacctgggagcactagacgcgcgaggagacgcgtgctcccacaggcgagcggagccgggcacttgttcacgcgccacgcgggttgccccccccgctaggggatctattgctcgccccgcgagaagggtggccccctgtgggatagcgcccgcgcgagtagatgtgcgggagcatgcgtccacctgagtggaatatgtttgtgaggcacgccccaccaagaggagagctggaagagaaagggcccagactgccgtccccacagaagaagagacgggccccacgaatgtgtaggacgccgcgaggagacaggaacgcgcccgcgggcaatcccagaggagccgtggccaccgcaaatgacgccgcggcagacagagccgcaaatgggcgcgcctcactgtgtaaaaagcaagagagcttcacagagaggttccacctcccccgcccaacaccccgcacagagagtctccagcgggcccgggtcgaccccacgccgcgcgttggacaaaaaagcgccaccgccgccccaacatgatac

SEQ ID NO: 708364 - DNA, 104 bp, Homo sapiens
  misc_feature (101)..(101): n is a, c, g, or t
gagaggttgggaagatggtgtggtgaggctgggcgcacagaggctggggctgcgtccaggcatggggagcgaaaaaagagacctcgtagctgggttgagcncac

SEQ ID NO: 708365 - DNA, 117 bp, Homo sapiens
agtggatgcagcgtgcattctgtagtaaaagatgggagtggggagagagaactaggccaaaaggccatggcagctccaaggctgccctggtcactgaccagcacttgtcttgaccct

SEQ ID NO: 708366 - DNA, 186 bp, Homo sapiens
agctgtgtctttccgtattaggaataaccaagtgatggagtgtatacccaatgcccagttgaccagttctggcgggtgcatgcctgcagtcatcaacactgcctacgagaggaaggatggcaaattcgtcttcttcaaaggagacaagcattgggtgtttgatgaggcgtccctggaaccaagcta

SEQ ID NO: 708367 - DNA, 126 bp, Homo sapiens
  misc_feature (71)..(71): n is a, c, g, or t
gcttggatcagtctaggtgcagctgccggatccttcagcgtctgcatctcggcgtcgcccgcggtacccgntggcccggcttttccgtccggttttcccgggggtttcgggggcacttggggcccc

SEQ ID NO: 708368 - DNA, 1170 bp, Homo sapiens
tgatcaactgttcagggtctctctcttacaaccaagaacattatcttagtggaagatggtacgtcatgctcagtgtccagtttaattctgtagaagttacgtctggctctaggttaacccttcctagaaagcaagcagactgttgccccattttgggtacaatttgatatactttccataccctccatctgtggatttttcagcattggaatcccccaaccagagatgttaaagtgagctgtcccaggaaacatctccacccaagacgtctttggaatccaagaacaggaagccaagagagtgagcagggagggattgggggtggggggaggcctcaaaataccgactgcgtccattctctgcctccatggaaacagcccctagaatctgaaaggccgggataaacctaatcactgttcccaaacattgacaaatcctaacccaaccatggtccagcagttaccagtttaaacaaaaaaaacctcagatgagtgttgggtgaatctgtcatctggtaccctccttggttgataactgtcttgatacttttcattctttgtaagaggccaaatcgtctaaggacgttgctgaacaagcgtgtgaaatcatttcagatcaaggataagccagtgtgtacatatgttcattttaatctctgggagattatttttccatccagggtgccatcagtaatcatgccactactcaccagtgttgttcgccaacacccacccccacacacaccaacattttgctgcctaccttgttatccttctcaagaagctgaagtgtacgccctctccccttttgtgcttatttatttaataggctgcagtgtcgcttatgaaagtacgatgtacagtaacttaatggaagtgctgactctagcatcagcctctaccgattgattttcctcccttctctagccctggatgtccacttagggataaaaagaatatggttttggttcccatttctagttcacgttgaatgacaggcctggagctgtagaatcaggaaacccggatgcctaacagctcaaagatgttttgttaaaacagctcaaagatgttttgttaatagaaggattttaatacgttttgcaaatgcatcatgcaatgaattttgcatgtttataataaaccttaataacaagtgaaaaaaaaaaaa

SEQ ID NO: 708369 - DNA, 180 bp, Homo sapiens
ttcctcgttgtcatctgatcccactcttaccgcaggacgtcgggcgtgctgaatcgactgagctgctgtcgctactagggtaccgatgctcgatacttcgtaaatcttagtcagtaggtttttcctgctttgaaaatgcctggtcgatctagaacggttcttaactggaacaacccttgg

SEQ ID NO: 708370 - DNA, 169 bp, Homo sapiens
gtatgaggaattgcttaatatatacagtgaacttgagtaggattcgtcgtactcaaagacttctcggggaagtgtccagaattgaccacacaggtgctagacggtacgaaagaacacagacccaaaaccctgatctagatgcattaactccaattagcccatgaggttc

SEQ ID NO: 708371 - DNA, 232 bp, Homo sapiens
tacccacggaggtccccagagtctgctgcggcgtacttcctgtcatggtgggtatccgcaggttcctggacatgtgcctgtctgagagccgcacctcgatgttgggcagatcgcgccagtctgagcctagggtcgaggggatgtgccgcattcgtgcatgcagcaatgcgctcatgtgcttagagatctggtccctgaggatgggcttgtactgtgcaagccgggctgtgtg

SEQ ID NO: 708372 - DNA, 415 bp, Homo sapiens
tcaacgctttatacttcgagattcttaatgaaggagtcaaaagacctctacaaagaaaacgcaaaacactgctgaaagaaatcgcagatgatacaaacaaatggaaacacatcccatacccatggatgggtagaatcaatattgtgaaaatgaccatactgccaaaagcaatctacaaagtcaatgcagtcaccatcaaaatgccaccatcattcttcacggaattagaaaaaacaattctaaaattcatatggaaccaaaaaagagcccacacagccaaaggaagactaaacaaaaacaacacatctggaggcatcacattacctgatttcagactatactataagccatcaccaaaacagtgtggtactggtataaagataggcatggaagtataaagcgttgaggggtaccg

SEQ ID NO: 708373 - DNA, 417 bp, Homo sapiens
gatcctcgctccacctgacggggtgggattacaggtgcttgccaccatggctggcgtaatttttgtatttttagtagagactggggttttgccatgttggccaggctggtctcgaactcctgacctcaggtgatctgcccaccttggcgctggggttgcaggtgtgagccaccacacctggtcacaggtgcagttttgttacatggatatattgtgtagtggggaaatctgggcttttagtgtaaccatcaccaaaatactgtacattgtacccaaaaggtaattgctcatccctcaccccctcccacctttccaagcctccagtgtctattattccacactccatgaccctgtatacaccctgtttaactcccacttataagtggaaacatgtggtatttttttttgtttctgagg

SEQ ID NO: 708374 - DNA, 412 bp, Homo sapiens
aatgtttctggcaatttgctgaccagatgggatacctctacttcagctacgaggttcagcgcattctcgggatgtcacatgaccgccacattgttgccacggcacataccccgcagggtttccttattgacacttcccaggatgtaaggggccagattaactttgctacacaagaaacaggcttctatcagctttgtctaaaaaatgagcagaatcgcttcagttctatacaagtgtatctcaactttggagtcttctatgaggggcccgaggtggatcacaagcagagtcaaaggaagcaactgaacgacactctggatgcgattaaggacagcacacaaagggtggagaaccaagtttttcacatgtggtgcttctacaactatgccaggatgaggaaagtggctgactt

SEQ ID NO: 708375 - DNA, 338 bp, Homo sapiens
tagttgatatgtcctggcagcccatgtgtgtgagagcttctcagactatccacctttggtcgcttcgcttgttcgtgatatgagacagacagttgcggtgggtgtcatcaaatgcagtggacaatgaaggctgctggagctggcaaggtcaccaatgtctgcccatgaaagctcagacaggctaagatgaatattatcccataatacctgccacccacactctataatcagtggtggaagaacggtctcagacactgttggtttcaactgggccatttaagtttagtagtaaaagactggttaatgataacaatcacatcatgaacaatcacatcatg

SEQ ID NO: 708376 - DNA, 306 bp, Homo sapiens
  misc_feature (234)..(234): n is a, c, g, or t
  misc_feature (240)..(240): n is a, c, g, or t
  misc_feature (300)..(300): n is a, c, g, or t
aattatcctttcaaacatgaagaagtaaagacttcctcagaaaaacaaaaattgagaaaattctttttccaatacaactgccttgcaagacatgttaaaagaagttatttagaaagaagaaaaattatacaaatcaaaaactgggatcaacataaagaaaggaagagcatcagagaaggaacaagtgaagttgaagtattctacaatgggaaggacaaaaaaaggaaaaagganaagganaaggaaaacccaattcaagtctgtggggttttgaggtatggggtcccttgaggaaagggntttctt

SEQ ID NO: 708377 - DNA, 449 bp, Homo sapiens
atccggtaacacatccggggccaaggtccacctgctcccgcccctgttggaggagctggccctgaacgagttggttacactaaggtgcctggcacccggtttcagccccaaggacgttctggttccttgggtgcaggggtcacaggaatttccccccgaaaagtactttactttggtatcccggcaggagcccagccagggcccccccccctttcctgtgcacagcattctgggggtggcaaccgaggtttgtaaaaagggggcccccttttcttgcatggtgggccacgaggcccttcctctggctttttcccaaaaggccttcgcccgcttggggggtaaacccccccttgtcaatgtgtttgttttcatgggggggggggggggcccctggtttttagccgcccgcctgtccccccccctgaataaactccatgttccccccagca

SEQ ID NO: 708378 - DNA, 170 bp, Homo sapiens
cagctagcataacaggaatactttctcacagtttctactccaaagaccacatcatcgaaacgcaacatatcatacacaaacgccggaagcctattcgcaggatttctcattactaacaacaatttcccccgcatcccccttacaaacaacaattcccctccggcctaccg

SEQ ID NO: 708379 - DNA, 468 bp, Homo sapiens
ctggtgaagatgatagaccaacaggagttcttgtccataggtgatggtactacagcatggcacagtcactttgaaagacagtttgaccgtttcttataaaattaaacatcctcttaccatatgcatccagccatcccagttccttggtattaacaaaatgcgtccaaaacatcatatctgtacacaaacctgcacactgatattacatagcagccttatacatactttcccaaacttggaagcaaccaacatatccttcagtaggtgaaagcaataacttctggcgcacctagacaatggcacatattattcagcactgtaaagacctgcagctatccatcacctgaaaggccatggcaggaacactgaactgcctcatttctaagtgaaagcaagccaatcatatgcatcccaactctctaacattctggcaaaaggcaaacctatggagacatacaaaagatcagc

SEQ ID NO: 708380 - DNA, 819 bp, Homo sapiens
ctagaagggtcctgtgttgggccaaccccggcatattgggccattgcgaaatgggctcctatgcccttgtatctggcctattatttactcgcaactttatggtgtcttgccgtgctccactggtcccagaccccccatgggctttctaaggctctttgtggccccaacaaagacttatgcccaagatgtttctcagagccttttagcaatttgctattgcagaaacgggcttttcttgggtgcaacaacatttgtcttgggacccggattggaaatctcgagtgaccatgaatgtttctgtctcatgcaaggcgcaattggaatgccgccctgttgtaccagtgcctccggagagaattgatggtgcgcacccggggcacaaaaacacttcctcacgtgaatgcccctcggtattttacttctagatggcaactaacttcctgtctgtgtgaaggaacactcggaacgcacgcctgcctgacctatggccgcccgcatccccctgggctgaaatgggaaaaccgcgatttcgtgaggtggatgcccagtgtggtacactggagatttgctccaagtactatttatgacccagtgcccagacagatggctggatatggcccccattgagccagctccccagacttaccaaccggatctcgttagcggctatgttttggctgcgcttttttaggcgggaagacctatgtaagcaagagggcagggccggggtttgtggtcccccccccaccacacaaaacagcactttggcttctttaacctgtgccaacaggtgaccccccattaaatcctttgctgaga

SEQ ID NO: 708381 - DNA, 133 bp, Homo sapiens
ccgaccgatcgcgtttctctgccggtcgcaatgcgcaccgaagagatcgccgcgctggtcatatgacaatggctccggcatgtgcaaagctggttttgctggggcacgactttcgctctctcctcccctccct

SEQ ID NO: 708382 - DNA, 189 bp, Homo sapiens
cccccctcccccccccccctttttggtttccatggcccgcctgtaaaatgggggggtttttgtttcagcttttaaagggggggggggggtttttaaacccccaggaatggttgccccgtgacccatgttttaagaaggtttttttttagcccttttcttggaataaacatttgggtttgggtttggtga

SEQ ID NO: 708383 - DNA, 283 bp, Homo sapiens
ccgacttgagaaactcaaaaatgtcatccacaagatcttttccaagttttgggaaaatcacaaatgatttttatcctgaggaggatgggaggccaaaagggaatattttcctggagtacgcgtcccctgcccacgttttggatgctgttaggaacgccgacgtctacaagcttgcacaggcagcacacattccgggtcaccctctttccggattttgacatgtatatcgcgtcagtcacgattggtatatcccagagaaacagccttccaaagacctggggac

SEQ ID NO: 708384 - DNA, 200 bp, Homo sapiens
aatcgcaatacagagagcatagccaggagcttatatggccctggatggtacaggataatcacctgtagccgtgaacccagctgcttccattaggtggatcatttcatgcagtcaccagacaacgtagccaagcacaaacataccttgacagacacatacttgaacataagacagcccacatcgtaccccaggaaaaagct

SEQ ID NO: 708385 - DNA, 724 bp, Homo sapiens
ggttggtccgcgcgttgctgcgttgtgaggggtgtcagctcagtgcatcccaggcagctcttagtgtggagcagtgaactgtgtgtggttccttctacttggggatcatgcagagagcttcgcgtctgaagagagagctgcacatgttagccacagagccacccccaggcatcacatgttggcaagataaagaccaaatggatgacctgcgagctcaaatattaggtggagccaacacaccttatgagaaaggtgtttttaagctagaagttatcattcctgagaggtacccatttgaacctcctcagatccgagtttctctactctcaatttatcttccaacacatagagactgttgggtaagagagtgatgtcgtgcgagtgattgtcctcatatagtccgccactaaggaggtgctatgagagatcattcctcatacatcgctaactgtgtggacctctattcagctgctcatgtcagaacccaaccctgatgacccgctcatgggctgacataatcctcagaatttacactatcataagccagccttcctcaagaatgccagacagtggacagagaagctatgcaagacagaaaacaaaaggctgatgaggaagagatgcttgataatctaccagaggctggtgactccagagtacacaagtcaacacagaacaggacaggccagtcagctagtaggcattagaaaagaaattcatcctg

SEQ ID NO: 708386 - DNA, 607 bp, Homo sapiens
cgggggagcgatgacaatttttttttttccaggggaccctaccggtctgagggggaatattacagatgcggctacccgcctcctatggtgaggaacgaaggggactagcaccctaaaagaaaggtgtgccgcaaatagattagaaactggcttgagaggaagggataccaactttggaaccgagtttccaccccatgctgaatacggcagaagcgttgacgtaaacgggacagcacagctaggggaatctacaaagccggacatgcgaagaacgtaaggtttttaaaagaactgactctggaatctgggatgagaaggaccccaacatgtggtaaatttgcataagaacacttcttgcctctcaagaatcgagctgacctagggcgattacggattttttaataaaccgcggtgaacacaaaacgccttttgacgtcccatctctttctggttttaaatttgggggcctctggaaataggttttccttaaatgcaattgtgggggcgggtgcattcgggtaaagggaggcctttccccatgatttcaattataaaaacatctttgtaacggagttcgggttctttctaaaggcgcgcgtttttaagc

SEQ ID NO: 708387 - DNA, 574 bp, Homo sapiens
  misc_feature (272)..(272): n is a, c, g, or t
  misc_feature (276)..(276): n is a, c, g, or t
attcccattttctacagttttttccgcagacttctttctgcaaattattcagcctccaaatgcaaatgaatgatataaaaataagtagggaacatggcagagagtggtgcttcccagcctcacaatgtgggaatttgacataggatgagagtcagagtataggtttaaaagataaaatctttagttaataattttgtatttatttattctagatgtatgtatctgaggaaagaaatctggtatttttgctttccaataaaagaggggggggngggngggaatttccaaaagtaatggtttttctctcagttctctaagctggtctatgttatagctctagcagtatggaaatgtgctttaaaatatgcttaccttttgaatgatcatggctatatgttgttgagatatttgaaacttaccttgttttcacttgtgcactgtgaatgaactttgtattatttttttaaaaccttcacattacgtgtagatattattgcaacttatattttgcctgagcttgatcaaaggtcatttgtgtagatgagtaattaaaaaatatttaaatcacaaaaaa

SEQ ID NO: 708388 - DNA, 957 bp, Homo sapiens
  misc_feature (2)..(2): n is a, c, g, or t
  misc_feature (142)..(142): n is a, c, g, or t
  misc_feature (158)..(158): n is a, c, g, or t
  misc_feature (248)..(248): n is a, c, g, or t
  misc_feature (403)..(403): n is a, c, g, or t
  misc_feature (407)..(407): n is a, c, g, or t
  misc_feature (411)..(411): n is a, c, g, or t
  misc_feature (417)..(417): n is a, c, g, or t
  misc_feature (421)..(421): n is a, c, g, or t
  misc_feature (425)..(425): n is a, c, g, or t
  misc_feature (461)..(461): n is a, c, g, or t
  misc_feature (466)..(466): n is a, c, g, or t
  misc_feature (476)..(476): n is a, c, g, or t
  misc_feature (495)..(495): n is a, c, g, or t
  misc_feature (516)..(516): n is a, c, g, or t
  misc_feature (518)..(518): n is a, c, g, or t
  misc_feature (525)..(525): n is a, c, g, or t
  misc_feature (536)..(536): n is a, c, g, or t
  misc_feature (546)..(546): n is a, c, g, or t
  misc_feature (548)..(548): n is a, c, g, or t
  misc_feature (551)..(551): n is a, c, g, or t
  misc_feature (565)..(565): n is a, c, g, or t
  misc_feature (604)..(604): n is a, c, g, or t
  misc_feature (635)..(635): n is a, c, g, or t
  misc_feature (640)..(640): n is a, c, g, or t
  misc_feature (644)..(644): n is a, c, g, or t
  misc_feature (653)..(653): n is a, c, g, or t
  misc_feature (656)..(656): n is a, c, g, or t
  misc_feature (659)..(659): n is a, c, g, or t
  misc_feature (694)..(695): n is a, c, g, or t
  misc_feature (728)..(728): n is a, c, g, or t
  misc_feature (730)..(730): n is a, c, g, or t
  misc_feature (747)..(747): n is a, c, g, or t
  misc_feature (749)..(749): n is a, c, g, or t
  misc_feature (762)..(762): n is a, c, g, or t
  misc_feature (766)..(766): n is a, c, g, or t
  misc_feature (782)..(782): n is a, c, g, or t
  misc_feature (815)..(815): n is a, c, g, or t
  misc_feature (818)..(818): n is a, c, g, or t
  misc_feature (873)..(873): n is a, c, g, or t
  misc_feature (889)..(889): n is a, c, g, or t
  misc_feature (941)..(941): n is a, c, g, or t
tnacgggaggtctgtccgggaatcaggtgggcagcccctccgcggggccagggcggagacggggtctgtccagtcccccactcgaggggggggcacccgcctgcctggatttccaggaggaaggggcccggcgaggacaggnctgggcagcccaagcngaaagggggtgccggcgttcgggaaggggccgcggccggtccggggccgtcgcgcttgggggcccggctaagggagcccccaacccaggnagccagaaggagggagcaggggcacggcggggagaaggggcaggtcatccaccggggtccacgggaggaggaaggcccgggtggaggagcagagagcatggtgcgatcaccgcttgaagcggtaggtaaagggcagcagcaacatgctctacttnaacncctncacctncttnagcntctcgtcgtccagggccaaaaagcaacggcaggaantctcnaacagacgcnccttggaaaggtcgaactngcccacctcggccagcctctngngagccanaattaagcagnacggcgaaangngtngtcagcaccacggngtacctattcacgcggtggtacacaaaggcccgcgacangctcttgagcttctggaaggtgcccaggatnttctngtancggcagagnacnccntcggcgtccttcactcgctgactctcccgggcctnnggcttaccaaaacgcctccgactagcacctacntnctgcttctgccgcctcntntaactggcgctgncttnttcggacgctccgctngagggaggaggctgcagactcagggtccgaggnatngcccccagcaccaccacggctgttaccctccatccgccttggcccaggcttcacncggcagttgtctctgnctccatccgagcagagagatgaattagtcagcaggcacgcagaagtactctntcctcaagatctcgat

SEQ ID NO: 708389 - DNA, 843 bp, Homo sapiens
cattccttaagtcctaatgggaaaaaaaaaaaaaaaaaatgaaatatttgaaaaactctggggtgtaaccaattgattgtacccctacacctatccaataagtagtaaaaggagcatcacacaaattcagtctaatctggcccttctggtggggccataatataaccataattgtgtgtacctggataaaaagtcattttcttccaaagagactacagctagctgcactttggtgtagagcagcttctaaatggtcagacttggtgtggaactgtaatattctatttatggagaagtgattaacaatcattattttaatcatagaaatcagggttggggctgtatggatatggtccgatacatgaactggtcccacatcttattctaagtgggccaatttatttggggaacataacgaaggaacaataaagatggtttccccctgggaaatctaagtccttccagggtggggacgattacctgggttcataccccttttggcctgaataacaagtattcccatgtaggaggacctttatatcccttttgggatagaccgttcccatattttctggacctcaatattctcaaaatctctgtcaacgggtatacctggaaataggggctaccatacttaggacaagtgtttcgcccatccaccaaaaattattctgccctaattaatctttacagtttattcaaaaggctggtccggggatacaatgcgcatgggcgtccagatagcgggaaactcatattctggaccaatggacccaacggtagactccgggggagatacactccccatgccaggtataaacccagcccatttgctaaagaatc

SEQ ID NO: 708390 - DNA, 981 bp, Homo sapiens
gagccctgagcagcccaccggcgcgcggctagttaccatcacaccccgggagaagccgcagcttgccgagccggcccagtcaccatcaccgcaaccatgagcagcgaggctgagacccagcagcggtaccggcgacccacctgggctcgacagcagaaccttaagcgcgaggccgaagcatcgaggccccgtgccgacgtaggataccatcgagacgagacgagccgggcccgttgagaccaccggagccggacacccaccacactccgccaccgcgaggacccaagcgcacacccaccccgcacacaccacaacagagcccaacacagccacccggcaagaaccctcagggcaggcagcgccaccagccccacacgcgctcgccacagcagcacaccagcgacacccgcaccctactctcgcggacacaccatcgcaacagccggccactacagcacaccacccccacaacagcacgacgacaggcaccatgcgcaccacacacacccacacacctcggcaccacatacctcgtcacgcagcacacgacacaccgacgcagaggacagaaaactcaacccagatcggccacagacggcacagacacacacagaccgcaccagccactgcactgccgcaccaaaggcacacaatgacgctagccacagggcactcacaacgaggtcaccccaccaaccacacacacaacgaggccgacaacagaacaccatggcacagccatgcaccccaacacaccagaaggccgcgccacaacaccgcattcccaacaccagagcacccggcaccccccacgctaccgtccgcccaccacccaccccacgctccggcaaccacccaacccccacgcgcgaccttaccaccgcacaaaactcaccacaccacgatcagccggacgccagagcgacacaacccagcaacacaccagcacgagcaaaccaccactgagacacgccgcgcagg

SEQ ID NO: 708391 - DNA, 1169 bp, Homo sapiens
agtccatgtgatcttgggcgcgaatacttatgctgcttgcctatacccctctaacttggtcaacagcacatcacagggccaagccccaatccctggctatcatttattatatatgggctgctggtcccacagcacccactctccagccatattggaaacaaaaacagatgctattgttcttccattagagaacgtggccagtggagacggcacactgtgacaatccagcagtgcaatgttcttgcaacagcagggtcacggtgtcaaccaaggcccaagcccaacaggcatgccagtcagaaacccattttccattcagaaacatctttgcggcagtgcacagtcaggccttacagaccaactcccgatccctgcaccttgacggctaccactacacccattagttatagacagggatcgggcggggaggggtgtggagaagaaatgaacttgcctgtggccccccagtgctacccatctgacctacgctcacggtctgggtgccaattacatttagaaatcgatgatgctacagctcagccacaccatcacacacacttgcatggtacaaaccaggaaccagactcgcctacatgctccctgatggtccagatggacggaacacccccttgggattggctcaaagcgagtccagcgacttggcactttggggaccatccagggttagactgacattgaaataccaacaacaccccagagccctactcgggaagtagcagacccccgccgcaccatgaacataagcagccccaccgcgcaactgcgacacgcaccgcgcgaaccgaaactggcggctacgacggaccgcccgacctcaccgacaacacaatgccaactggggacccgctccccagcatggcgcgtgcacgcgacccacgacagccagcttgccgcgaccgaacagcgaaaaaggaggcgcaaccagaccccaccgacaccacctccaagaaaccaacacccccccacgaaaccaaagaaacaagtagaggcaaagaccaagcacacacagctgacaccaacacaggaccacacggacccgacgcctgaaacgaaccacgacggcagccggacgaggtcagcacgcgaaaacgacaagcgccgcgaccgaccactccaaactgaatacaagcaagcacagcaacacgaga

SEQ ID NO: 708392 - DNA, 155 bp, Homo sapiens
cagaggaacaggcaactggggtttaggcgattagctagggtcacacaatttaagtatctgaaacctgttttgaattcagatcatcttgactctctaggcccagaactctatatactgcaaaaactcccatcacacactaagataagctctatatg

SEQ ID NO: 708393 - DNA, 219 bp, Homo sapiens
  misc_feature (124)..(124): n is a, c, g, or t
caaacaatcaaggagataccatgctgtattaggaatcgggcaaccgtgtgagccatgtgagccctgtgaaaggttatggatctcggtagctcaagtctctctcacctctcaaaagaagaatttnttttttctattttattttttatttattatttatttatttttttggggagaaaagccctcactcttttcacacccaagaggcgggggggtggcggg

SEQ ID NO: 708394 - DNA, 822 bp, Homo sapiens
acttcaccttcctgagagaggaccagcggtcagagcctcagtgactgccaccctggcaggacaggtcacaacaaccgtttctggagagaatgggaggattccagaggggcaaatatggaactatggctgaaggtagatcagaagataacttgtctgcaaacaccaccggcattgaggattatcctagttgggcaaaacaggctgcgggaaaagtgcctacgatgggaacagctatccttgtgccagtcccgtgatttgagtccataggctgagggtcccagtcacgtgaccagtgacgtgccatggtgaagaacaggaagcatggaacgggaggaaagtcctggtggttgagcagctgctcctccatgcttgtgagtcgacagtgccgatacccaagagctgtacaagaactatcgtgggcactgtcgtacctgcgtctctgccccgggggccccacgtcctgcttctggtgatccaagctgtgggcgtttcactgctcaggacacagtggccatcaggaatggtgaaacgaggtctttggcgacagtgcgccatgagacatgtggtcatcctcttacaggccatcaaagaggacttagtggggccaggccctggcattgactatgtagcaatacgacggacaatctgcagcctgataagacctggtgcgggagtgtgagagaaggtactgtgccttcaagaactggggctctgtggaggagcagaggcagcagcaggcagagctcctggctgtgattgagaggctggggagggagcgagagggctccttccacagcaatgacctcttcttggaatgcccag

SEQ ID NO: 708395 - DNA, 483 bp, Homo sapiens
  misc_feature (12)..(12): n is a, c, g, or t
  misc_feature (26)..(26): n is a, c, g, or t
  misc_feature (78)..(78): n is a, c, g, or t
caaactgtaccngattaataaacctnttcccacaatatccagttttctaactccttgttgccgtacagtgtatgtttncttactcatacattatttaaatttctttaacctctgctatttatgctccacaagtaaaatgtacttagactggtcactgtattgtcccttattaagatgctgatattaatttttacagtttattatctatgtacaatggtaaatgataaacattttgtgtacctttgcaatatgtgtgttactgggtttacttcggattgatttctttctgaatagggtgtcttcatatggaaacctcacattacatcatttatatttggtggtctacatgtgattagagcttttatacattctgtatatttttattaaatgtaagacttttgcttctataatgttagaggaaggtagctcacacatgtatttataatttagtcacattacattaaattttagatttatgtaaaa

SEQ ID NO: 708396 - DNA, 480 bp, Homo sapiens
gcaacttctgccagctgtggctctgcctgatgacccttctactttgacaccgagttccgtcccgcacaccctaggattcccgaggcatccccccctgcgctggggcccatcagctgtccggggcttcgcttcgtggcaccggcctgatggaagactacggcaatcctcgtgccccgcaggcacccctgcactcggtggtacagcaactccatgggaagaacctggttttcagtgacggctacgttgtacaggagacaattggtgtgggctcctactctgagtgcaagcgctgtgtccacaaggccaccaacatggagtatgctgtcaaggtcattgataagagcaagcgggatccttcagaagagattgagattcttctgcggtacggccagcaccccaacatcatcactctgaaagatgtgttttatgattgccaacacgtgtcctggtgacagagctgatgcggggtgggagctgctg

SEQ ID NO: 708397 - DNA, 203 bp, Homo sapiens
gctgtggtcgctctacgagttcccccctggctcgcctggtctctcaaaagtgcgggccttacatggtgtgagccactgtgttccagtcccattgtttatcttattttctatccactttactgtactattcctactctctattctgtggtgtaccgcttgcgtgcactgaggtgcggaatgggtatcactgccttttgccttct

SEQ ID NO: 708398 - DNA, 221 bp, Homo sapiens
gcatgtattggtgtggtgacagcaacagtgacgaatagtacctacgagtatgacatgttcaatggataggaaccccaatgaaatgttcaagttcaatgaggagaactacggtgtgatgactacctatgatagcagcctttcttcttatacggtgcccttagaacaggacaactcagaagagtttcgacagaagagagctgcgtgctggccaagtttgagat

SEQ ID NO: 708399 - DNA, 770 bp, Homo sapiens
  misc_feature (147)..(147): n is a, c, g, or t
tgttctcagtacaggtgtaccaacagtacgttattgcaccacaagtaaccagtccctcacttctgtgccaccaatgaatccagctactacattaccaggtctgatgcctttaccagcaggactgcccaacctccccaacctcaaccncaacctcccagcaccacacatcatgccaggggttggcttaccagaacttgtaaacccaggtctgccacctcttccttccatgcctccccgaaacttacctggcatttcaacttcttcccctggcattcgaattccttccggtataattcccttgggtcccaagaagagctctttctgcaagcaaggctccagggagagctggttgggttttcccttccgggcccaacaagacaaggcacccttctgaccctgccacacatactgcaaaggcagacgctgcctcctcactcactgtggatgtgacgccccccactgccaaggcccccaacaccgttgaggacagagtcggcgatccaccccagtcagcgagaagcctgtttctgcggctgtggatgccacatgcttctgagtcaccttaactttgaaccattctttggacttggcgtgctatatttaaccacggagaagcgtgtctgcaaacgcacacctatcattaattcatactagtatagtcccgtatctggtaagctccttgtccattattccacggggacatacacacgaccggctgtatccggcacgtgaatgggtcacagcctagtgcatgacaaccgctgcttccc

SEQ ID NO: 708400 - DNA, 182 bp, Homo sapiens
ggatacaggtgtgaagagtgagccggcctaggaggtgatatgggcggagaagacaggctaagacccaagatcggtgcccccaggtgtaacagtcaagtcacaccagtgtcacactggtgcacagcagcctagcacggaccgggcggcagctgccaccagcacctctcacatcggcttcccca

SEQ ID NO: 708401 - DNA, 122 bp, Homo sapiens
gaaaccagctcatgtttaattgtggcattatacaaaatgtacaggtattatgacatcagcacaccacagttagtctctcaaaatgacagtaaaacatccaatcgcaggtttaatacattgac

SEQ ID NO: 708402 - DNA, 156 bp, Homo sapiens
  misc_feature (27)..(27): n is a, c, g, or t
ccctttaaatcccccttgtaaatttanctgttagtccaaaaaggagttttggcactaggaaaaacccttgtagagagagtaaaaaatttaacccccatagtgggcctaaaagcagcccccaattaagaaagggttcaagctcacccccccctccca

SEQ ID NO: 708403 - DNA, 148 bp, Homo sapiens
gaaaaaaaaagaacgaaaagaaattctgaaatgcttcaaaatcccaaacttttcggagtatcactgtgacactcaaaggaactggctgcactgggggcacttcagaattttcacgattatgggatactccagctaatgataagttata

SEQ ID NO: 708404 - DNA, 147 bp, Homo sapiens
aagaagaacgtccagaaaaaataccagatttaaaattattggtggagaagaaatttttggctttacagagcaagaattctgatgcagactttcaaaataatgaaaaatttgtacagtttaaacaacagctgaaagaactaaagaagc

SEQ ID NO: 708405 - DNA, 302 bp, Homo sapiens
ccccaaccccccctgggtttttttttttaaaggccctttatttgaaaaagggggggggggcctgggtccctccccggggggggggatttccagggggcccctttttttccctttttggggggagggggccaaaaaaaaattccttttttccccccccaaagggggaaaaccaccccgtgccccctggcccttttgggggggggggggggggggggggcccctcggggggggcgggggtttttgggggggggggaacccgggagggttcccttttccgccaaattttattttttttaattgga

SEQ ID NO: 708406 - DNA, 780 bp, Homo sapiens
gcctgctgctcctaggaccgtctccagctggctgagatcctggactgagggggcctggatgccccctgtggatgctgctgcccctgcacagcaggctgccagtgcctgggtggatgggcacgccttggcccagctgatgccatccaagttgtatattttttaatctctcgatgaatggactttgcacactttggcccaggtggccaacctctatcccggctttggtgcggggtacacaagaggggatgagttgtgtgaataccccaagatcccatgagggagatgcatgagccgccaaggccttcccctggcactggcaaacagggcctctgcggagcacaactggctcaccccagtcctgcccgccaccgttatcggtgtcattcacctttcgtgttttttaatttatcctctgtgatttttctttgcttaatgggttggcttgttttcttgcatggttgggagctgatcgttctcccccaccccctaggggtaccagcaggcaagagctttgccctctgctccagggctgggggtccagtggggaggggcccaaagatctctgctcaaggaggaaagtgcaggggagccttcaagctcactctccctgaggactgcttgacagggggctatggggtttgcttggtgttgtcttcacacacccacgaaacatatttctttttggaaaacaaacgactggcccaatcccgggtccttctccctgatgcgttggggcagctcaccttggttgttgtttactccaaaaacaaaaaaaaacac

SEQ ID NO: 708407 - DNA, 351 bp, Homo sapiens
taagatgatatagcacagatgtcagataatagggacaaacctactcatccacaggttacaagattttagtattacagaaaacatttttaataaggatcccctaggctaggggatccttattaaaaataattgtatttttactgccttctagtctatctgtttccttactaatattctctcttgttttattacagaaagtggagtattgaaatatcctactataattgtattgctctctttgtgtttattcagttttgttagtatttgctttatatagctgaaaccccaatataagacacacacacgtaaatacacacatatatatacaaatataaaataaggatcccctag

SEQ ID NO: 708408 - DNA, 399 bp, Homo sapiens
  misc_feature (16)..(16): n is a, c, g, or t
  misc_feature (49)..(49): n is a, c, g, or t
  misc_feature (395)..(395): n is a, c, g, or t
ccgggacaaacattanagaaaaatattgcagacacgtatagcttaaccnccaataaataaactgtaaatctctctctctctctctctctattttttttttttgggggggggaccgagtctcactcttgtcacccagactggagtgcagtggtgtgatcacggctcactggaacctcaacctcctgggcttaagtgatccttgcacctcagcttcctgagtagctgggaccacaggtgcacgccaccatgcttggctaattattttattttttgtagaggtggggtctctccatgttgcccaggctggtcttgaactcctgggctcaagagatcttcctgccttggcctcccaaagtgctgggattacaaatgaaagccactgtgccctgcctagnaaat

SEQ ID NO: 708409 - DNA, 889 bp, Homo sapiens
ggtttattattttttttttaaattcacactttttttaaatctgggtaaaaacagcatcagaaaacaaacttcaatctagaggagaaccaaaagcagggaaatgggcagccaacttattcccaaggccaaccgtgttcacagaaggaaccttggggtcataccacccctagggctataaagtgtatctctaaaaaggtttcgtgggagttgcaactctcaacaccacaatcagaaaataacactcgaaatcagcaccccaaggagttgacatctgtagtttaaagaaacaaaaacaaatgggacgctccagaatatggaatattgacaatatcaatcactatgatatgacagccggccatcaagttgggccggacccctgctggggtctaaagggaaatctggtcattgggggccagcactcagccctggcaaaatggggtaaggtcctggaattggggccaatcgggatcaaagcgtaggactacagtggaggaaactggctgggcgtctaccccaggaccaggaatgagtgaactgatggggtactaccaacatagaggacagtgtacgagacattgggaccatattacaccgcccgaaataataccgtggaaggacaggacggagaagcataggacagtggccaaagggtagcaaacgaggaaagacaaaagaaaaggacacatgcgtggtagatatgagcacaaaactgagcagagacaaaatcataccagaacacgggccatataaagactacaatacagaatagctcagagatatagaacaccaacaaatccacggtacccagaacatgtaacagaaacatgagattatagcacaatacgacaagaaaatagagatacaaaaatgacaacacaaagatttaaaa

SEQ ID NO: 708410 - DNA, 347 bp, Homo sapiens
ccatatcaagatacgctcatggatgtggaagccaagaacaaactgaagtccgaatgtatatatgacttcattccagaacgatcttagttcttatgaatagctatgctagttatctcgactatcggaagtcaatagtacagaagctggtatttcctttatgctaagctataccagtgctaaggacaatcgacaacagatccccacgctagtgtattctattgtgggtctactttccaatgcagcgttcacaacagactattctcagcccactgttcctagtcctgtaacttcaactcttcagtagctggaacttgttctattttggttaattccttagctattgtaat

SEQ ID NO: 708411 - DNA, 427 bp, Homo sapiens
acgtaacccatcactttggatgccgttcgtggttgccaaaatgttaccggggggtccttgctcacagagctccaagatggtggtgaaccacttccaagatggtagcaggccgcttccaagatggtggcaagcctcgtattctctgacctggagttcttggcctcacggattccaaggaatggaatcttgggccatgtggtaagtgttatagctctattagaagccgtgggtcacagaccgagaaccatggaagccagtgactagtgtacagctcaattagagacaaggtagagccgagggacaaggtagagccgagagacaagggtagagccgagagacaaggtagagccgagagacaaggtagagccggagagacaaggtagagccgagagacaaggtagatgctgagagacaaggtagagccgag

SEQ ID NO: 708412 - DNA, 1126 bp, Homo sapiens
ttttttggttctaaagggggtaaagggggtgctatagggaaaattcgggcccttattttcaaaaatttttatgggagaatttattctcttaggacagatgtgggcattgaaacgtggtggttggctctccaacaaattttcaaaaacattgtgaccgttagttttcccccgcggtgtcgtgtgtataaccggtgatgacaagaggtaggtatgtgtggtttataaacagtctccggagaccattgtggcctctctgtgttttatataacccctataaggtgtgggaacacaagctctccagtgagagtgtgacaagacgaaacagtctctgtgtgtgtgaagttgttaaattctattatatatatcaacaaatgtgagggggggctctctcaaaatctctggagaaagatctaactataactcctcgaaagtgtgctcaacagcgcctctagaggggaaatctcacacaggggtcttccccctgtgtgtttccccatacgcgcaatcttatatgtgcggggggaaaaagtatttttgtttcacgagagatttgtaaaaaaaaatcttctagtcttcccgctcgcgatatatgtctccgagggtgtacttacacctgcgcgactaagcggtcgttctcacgggatacacccaaaaatgtgggcaatgttggcccccaaaaagttgtagacaactatcgcacaacatggggtaataaagagcggatactaaggggacaactactgcgtgtatacacacccctattcgcgactaactgttgtgtactccagatgaatcacaccacgacgtcaacttcgcgatcaattcgcggtggattattgagtagaaaagatggggcacacacataacatcgaggaaactctacacagcgcatctgcacacgtaaactgtgggctccacacgagatacatcatctctcatccccaaccacccgcagtgatagaacaaaaagttatccaccctacttcgcaccccccctcatacctcaacacaaacactgtatctcgcaatatattttcaccgattccaacacgaataagagaatcaccaatacaacactggatttcatgccacaaaaaacaaggcgagaccattaacaacgagacct

SEQ ID NO: 708413 - DNA, 168 bp, Homo sapiens
  misc_feature (150)..(150): n is a, c, g, or t
ctgatgtccagcacacaaacaacaggccacaccctgctgcactcagctttctcccacagacgtgtattttggcgtttctcatgcagtagctcactggctggaatgggttcccaggattttcccttaaaaattcccatttgctcttctganatgccttataaaggatct

SEQ ID NO: 708414 - DNA, 209 bp, Homo sapiens
  misc_feature (3)..(3): n is a, c, g, or t
canacattaactacttgcatgcaatctaacagcaagatatataacaataacgagtcctaagatgagcctcaccatgtatttgggcaaacagtattccccgttcttctttctatactgcttctatcagcaggcttcaacctccataatctctaacccccttctgtttggaccccataccactatcttggcccacatagttcagcgtctga

SEQ ID NO: 708415 - DNA, 728 bp, Homo sapiens
agcggagcggcggggatggcgagcagcggaggcgaggcggtgacgagagcagcggctccgccattggacgaggaggcctgagtggacgggccagtggtgcacaatgaagagacctgaggcgggtggccccgagatgagccaggccatggatgtgccaacatgcctgaagcggaaggagcctggcaggtctctccgcatcaaagtcatctccatgggcaactgccgaatgtggggaaaagctgtattataaagcgatactgtgagaccagattcgtgtctaaatacctggcaacaattggaattgactatggagtcacaaaggtacacgtcagtgacatgagacatcaaagttacacatccttgatatggctggacatcccttcttctatgaggttcgaaatgagtttttacaaggacacacagggtgtgactactggtctatgatgttgggcagaaacgactcctttgacgcccttgatgcgtggctggcagaaatgaagcaacgagctttggcacctcatggaaacatggaccactacttactatttgtagctttgtggccaaccaacgacttgacttgtaaccaaacatcggctgttgtagactgaccagtgacggacgctctttgcggctgtcacgcaccaggggtccctgttaccttggaacgcttcagcaccaaacctggccacggccatcactgatcactgtccagaacctttatatctccg

SEQ ID NO: 708416 - DNA, 277 bp, Homo sapiens
  misc_feature (254)..(254): n is a, c, g, or t
gctcgacagaacttgccacagcactctgataaagaaatagctttaaggctgggcatggtggctcacacctgtaatcctagcgctttgggaggctgaaggtgggaggatcacttgaggtcaggagttcgagaccagcctgaccaacatggcgaaacctcgtctctactaaaactacaaaaattagctgggcatggtggtgcatgcctgtaatcccagctacttggggagctgagcagcagaccccttgaaccagngaggtggaggttgcagtgagcca

SEQ ID NO: 708417 - DNA, 203 bp, Homo sapiens
accggcatctggacttttcagaattgatcttaagtctactgtcatttccagatgcattagtttgtacagactgtagtccttgcgaaatatatttctagggatgaatattattgatcgaacatatgttaatagccgtgagctcgaaatttcatgcagactgtaccagtcattatgtatcagctgcgctagcgaaactgcatacg

SEQ ID NO: 708418 - DNA, 490 bp, Homo sapiens
  misc_feature (31)..(31): n is a, c, g, or t
  misc_feature (38)..(38): n is a, c, g, or t
  misc_feature (45)..(46): n is a, c, g, or t
  misc_feature (58)..(58): n is a, c, g, or t
  misc_feature (61)..(62): n is a, c, g, or t
  misc_feature (322)..(322): n is a, c, g, or t
  misc_feature (345)..(345): n is a, c, g, or t
attcgcggccgcgtcgacgtacaaggccatngagatcntcaaacnnggctgccgcctnggnnacatcggtgaaatcatccagaagcacgcggaaaagaacggcttctcggtggtgcgtgagttctgtggccacggtatcggcaaggtgttccacgaagaaccgcagatcctgcactacggccgcgccggcaccggcatggaactcaaggccggcatgaccttcaccatcgaaccgatgatcaaccagggcaaggccgacaccaaggtgctgggcgacggctggaccgcgatcaccaaggaccgcaagctgtcggcccagtgngagcacaccctgctggtcaccgncaccggctacgagatcttcaccctgcgcagcgatgagaccatcccgcgcgtctcggcctgatcgcttgcacctgccgctctgtacagaacgcctatcagaacccaaggaaagccaatcgatgccgcaggtggaccccggtcgagc

SEQ ID NO: 708419 - DNA, 260 bp, Homo sapiens
  misc_feature (123)..(123): n is a, c, g, or t
  misc_feature (131)..(131): n is a, c, g, or t
  misc_feature (167)..(167): n is a, c, g, or t
ctatccaagtagacaattagaataaaacaaacaggtctttggtgctgaaagactttgagagattatcaggtacagcagttgacatataggtgatgcatcagaaacaaccacagagcttttaanaagatacnaccttagatatatcaaacgcagaactatatatcaanaccagaaacttttgggcgatgtcgtccagggcatacattagtagtttgaaacaatgagaaattcccatttttattaagtcgaaaaagaaaaaa

SEQ ID NO: 708420 - DNA, 501 bp, Homo sapiens
taaaaggcatgtgtagcaggtgagtgataacagccgttaggattttcaaagcaggctgtgggatgggatattggcgttgagtggggtaagcgccgattaggtttaatgagatggtaagggttgcatgatcggtcgccaaggagggagtagaggtatcttatacttgtgggttaaggtgggggaatacaagaggaggacgcaagggaggctttgtattgggaagaagggcagcaataagatgcagctgtagtccaggaatagtcagggaagcagataatttggttaaaatatctcggcctgataagggaactgggcaggtggagataactaaaaaagagtgcataaaagagtgttgttcaagttggcaccagagttggggagttttaagaggtttagaagcctggctgtcaatacccacaacagttatggaggcaagggaaacaggcccttgaaaagaaggtaatgtggagtgggtagctccatattgattagaaggggacg

SEQ ID NO: 708421 - DNA, 185 bp, Homo sapiens
catgctagagcacagtgcatgtgcgggaacacacacgtgcaccctgagctgctggcggatccagagcatctggtcccggctgcggagacaggcctgcttagcaagtgcgagcggatccgaggtcgcagagccacgctagtatgagatccagatcagtgcactctgacataccacagccctggctc

SEQ ID NO: 708422 - DNA, 495 bp, Homo sapiens
actcgcaaccctgcctcctgggttcaagtgattctcctgcctcagcctcccgagtagcaggaccacagtggtgtgccacccgcccagataatttttgtatttttagtagagacggggttcaccacgttggccaggctggtctcaaacttctggcctcaggtgatctgcctaccttggcctcccaaagtgttgagattacgggcgtgagccaccgtgcctggccggaatattctattatagatgccaattaggtcaagttagttgatggtggtgtacgtcttctgtttcttcattgagttcctgtctacttattctatcaattattaagaaagaggtattgaaatctccaactataattgtgaatttgtccatctctccttgcaattctaccactttttgtatcatgtatttggaagctctgtcattaggggcataaacgtctaggattattgtcctttgaatgaactgacatatttatcattatgataccgcgaa

SEQ ID NO: 708423 - DNA, 331 bp, Homo sapiens
ctggcatggccatcggcggacgtcaccctcctgagtggatccagacccagcgtgctgacctggagaagctgacctccctcttctgaccgttacgtgagtcactatgagaccgaggggccccaagttctgctgtattttgacttcagatcccacctcccgggagtgcgtgggctttgaggctgtgcaggaagtgcccggtggggctggtgcagccggccagcgcaaccctgtacgactactacaaccccgagcgcagatgttctgtgttttacgtggcaccaagtctgagcagactcttggccaccttgtgttctgctgaagtctgccagtg

SEQ ID NO: 708424 - DNA, 685 bp, Homo sapiens
ccaatgccgcaggcctgattaaggcgcggactgcgataattagccaatcacggatagcaagctggaccgcttgcacaatgtcatgatgatcaagttactgatggataactggatcttgtccgtgcctatcaatgagatcacgagcattggtaactttgtactagtctctgtaaagcttacgcggctgatgatcatgcgagagcatgagcagagacgtgtctgatggcggacccacaccctgtcatcacgtgatatcagtctcaacaatcttcaccgtgcctctggctaacaagggctcgcggcatatcggacgtcaacatttctctacacagtgaccttgggcatgcgctattatactcatgctcgcattggatactaagtctacagagcgtctatcctgacgcgaggccttagatgattgcgagctgctaccgctactgcctgctacgtatccagcattccatacattgtagcggaactagctcagcgaatctgcctaagatgcttattaaacagtctgcccctgacacgtgattaaactatcactggacttacctgcatcatggcagacttagcacgatccacttggattatcgccaggacgacttctacatgcccctagacattacagcatacgattctgtcacgatactagtcatcacgaccccttggttacttcttggcg

SEQ ID NO: 708425 - DNA, 412 bp, Homo sapiens
  misc_feature (1)..(1): n is a, c, g, or t
  misc_feature (79)..(79): n is a, c, g, or t
ntttggaggacgaaggcacctacgttcaaactctggcgttccgtaggggaggtgatgaccagccaagacgatccactcngcggggcggggggggtacaaccaccccgggctcggaactaataggaaaagactctttgtgaagaaacgagccagtgactgaaacaccctggtgaaaacctgttgacagaccttccactttctcttcagaataagtagctgtggtggatattattatttgagggagtggggaacagattttagggtggaaaaaacagtcaactcacacaaggaatggaaaaaaatactgagttaaattaagcagataccttttacaagtgaaaggaagaatttttcttctgccgtcaataaaaccattgggctaaaaaagaaaaaaatgggctcgttggcctaa

SEQ ID NO: 708426 - DNA, 86 bp, Homo sapiens
ggaacgctgctgggagacggcgggatctctttcgccatggctgccgggccgatctccgagcggaatcaggatgccactgtgtacgt

SEQ ID NO: 708427 - DNA, 675 bp, Homo sapiens
  misc_feature (432)..(432): n is a, c, g, or t
acactagaaatattgataagtggcaggttgcgtgcaccgcacatgcctacacaaacctgtttagacacgcgtggttcggacaaaccattattgcccatgataccccagtgaattctgggaacatatggggcaaaatagtaagccttggggcaagccttcctctgaaatgttacaggctacggctagagttggttttcaggaccgaagactgtggtaactggcatacgttagcaggatcacttgaagactgtggcccgtaaaagatggcatatgtgtggctgacactgaattcggccctgcatactgtgaggtctctttacagaatggactaggtttacaaccggaacaatacaaatgttaaccgtgcacgcatgcacaatgctataaaattggtgctgctgttgacggcacatattgtagacgcatgcgtgncctatttttcattgagaacaacatgacattaagggcatggggaattgagtaggctctatacttataacaaaatttcctggtgctatgaagaactgaacacgagacctttttagataacatcataatccacacgtttagggttgaaatcggcattgatatttggaaaaagatgggggtttaaaaagcgatttttctttcccgacagacacctgaggggcctgtggtagccggaattcgtttttg

SEQ ID NO: 708428 - DNA, 80 bp, Homo sapiens
  misc_feature (59)..(59): n is a, c, g, or t
cattcatgggaccactgaagaaagaccgaattgcaaaggaagaaggagtactcgcgggngggtatcacgaactcttcttg

SEQ ID NO: 708429 - DNA, 130 bp, Homo sapiens
gccgagtgagactgtgttctcaacccggtatggtggtcacctttctccagtcaacgttacaacggaagtaaaatctgtcggaatgcaacatgaagctttgaggtaagctctttcttgggacaatgtgtgg

SEQ ID NO: 708430 - DNA, 314 bp, Homo sapiens
  misc_feature (59)..(60): n is a, c, g, or t
cccctttttttttttaaaaagggggggggggggaaaaaaaaaggttttccccccccccnngggggttttttttcagggggacccctggggaaaaaacccccccccccttaaaaatagtttttttttttggccccccccccccccttccccccagttttggtgttgggttttggggtttttcccccttccgactggttttttttggggcgtgttgtttccccctttttgggggggaaaaaaaggggggggggggggggggtgggcccctttcccccccttttttttttttaaaatccgtggggccggggggggga

SEQ ID NO: 708431 - DNA, 282 bp, Homo sapiens
atgaatatcactatttgttagctattaatttaaacaatagagacattagcttaacaagtattttacaagttcttcatgcaagaaaaaaacatgaaagtgaaacagacattcacttctctggaaataattcagaaaagccagtagtgatcgaaaaggacatacatatacaagacaacagagatgaacatgaacataatctgcacctttaatataataaaggaattcagttaaatctttctgtgtggtccctaaaaagtccagaacagaaacacctcttttcaa

SEQ ID NO: 708432 - DNA, 2625 bp, Homo sapiens
tcaggagaacctcagtctgacgacattgaagctagccgaatgaagcgagcagctgcaaagcatctaatagaacgctactaccaccagttaactgagggctgtggaaatgaagcctgcacgaatgagttttgtgcttcctgtccaacttttcttcgtatggataataatgcagcagctattaaagccctcgagctttataagattaatgcaaaactctgtgatcctcatccctccaagaaaggagcaagctcagcttaccttgagaactcgaaaggtgcccccaacaactcctgctctgagataaaaatgaacaagaaaggcgctagaattgattttaaagatgtgacttacttaacagaagagaaggtatatgaaattcttgaattatgtagagaaagagaggattattcccctttaatccgtgttattggaagagttttttctagtgctgaggcattggtacagagcttccggaaagttaaacaacacaccaaggaagaactgaaatctcttcaagcaaaagatgaagacaaagatgaagatgaaaaggaaaaagctgcatgttctgctgctgctatggaagaagactcagaagcatcttcctcaaggataggtgatagctcacagggagacaacaatttgcaaaaattaggccctgatgatgtgtctgtggatattgatgccattagaagggtctacaccagattgctctctaatgaaaaaattgaaactgcctttctcaatgcacttgtatatttgtcacctaacgtggaatgtgacttgacgtatcacaatgtatactctcgagatcctaattatctgaatttgttcattatcggaatggagaatagaaatctccacagtcctgaatatctggaaatggctttgccattattttgcaaagcgatgagcaagctaccccttgcagcccaaggaaaactgatcagactgtggtctaaatacaatgcagaccagattcggagaatgatggagacatttcagcaacttattacttataaagtcataagcaatgaatttaacagtcgaaatctagtgaatgaatttaacagtcgaaatctagtgaatgatgatgatgccattgttgctgcttcgaagtgcttgaaaatggtttactatgcaaatgtagtgggaggggaagtggacacaaatcacaatgaagaagatgatgaagagcccatccctgagtccagcgagctgacacttcaggaacttttgggagaagaaagaagaaacaagaaaggtcttcgagtggaccccctggaaactgaacttggtgttaaaaccctggattgtcgaaaaccacttatcccttttgaagagtttattaatgaaccactgaatgaggttctagaaatggataaagattatacttttttcaaagtagaaacagagaacaaattctcttttatgacatgtccctttatattgaatgctgtcacaaagaatttgggattatattatgacaatagaattcgcatgtacagtgaacgaagaatcactgttctctacagcttagttcaaggacagcagttgaatccatatttgagactcaaagttagacgtgaccatatcatagatgatgcacttgtccggctagagatgatcgctatggaaaatcctgcagacttgaagaagcagttgtatgtggaatttgaaggagaacaaggagttgatgagggaggtgtttccaaagaattttttcagctggttgtggaggaaatcttcaatccagatattggtatgttcacatacgatgaatctacaaaattgttttggtttaatccatcttcttttgaaacagagggtcagtttactctgattggcatagtactgggtctggctatttacaataactgtatactggatgtacattttcccatggttgtctacaggaagctaatggggaaaaaaggacttttcgtcgacttgggagactctcacccagttctatatcagagtttaaaagatttattggagtatgttgggaatgtggaagatgacatgatgatcactttccagatatcacagacaaatctttttggtaacccaatgatgtatgatctaaaggaaaatggtgataaaattccaattacaaatgaaaacaggaaggaatttgtcaatctttattctgactacattctcaataaatcagtagaaaaacagttcaaggcttttcggagaggttttcatatggtgaccaatgaatctcccttaaagtacttattcagaccagaagaaattgaattgcttatatgtggaagccgcaatctagatttccaagcactagaagaaactacagaatatgacggtggctataccagggactctgttctgattagggagttctgggaaatcgttcattcatttacagatgaacagaaaagactcttcttgcagtttacaacgggcacagacagagcacctgtgggaggactaggaaaattaaagatgattatagccaaaaatggcccagacacagaaaggttacctacatctcatacttgctttaatgtgcttttacttccggaatactcaagcaaagaaaaacttaaagagagattgttgaaggccatcacgtatgccaaaggatttggcatgctgtaa

SEQ ID NO: 708433 - DNA, 810 bp, Homo sapiens
  misc_feature (30)..(30): n is a, c, g, or t
  misc_feature (32)..(32): n is a, c, g, or t
aagcacccatcacataccaaacgctcatcntntttcaaaacgagtttaagcatcgagtgactgacagaacatcagcctacataattttacttcattgacgtggaaaagcactctgtgaatttttacagcaagattctaactaactatgaatgactttgaaactacttatactttatactcataaaaactattgcccgttgctaatttgttcatacccactattggtgaaatatttctgcaaattctgatatatgatcttcgcgtaaaccctaaaggttaaacctaagccctgcgggaaaggcatttcggtgggttgtaggaaatctatagcactaccttaatgtctctgcgggggcacgccccggtcgcgactgatcgtcacatcacataaaaaaaacactacccgtctccacgatataatacgcgtatcccctaagtccaattattaacatgaaccacccactctcaccaaaaacgctcgaaatggctcacttagatcattacagttcgcaaattacccccccacaccagaaacgtgcccacagacaatctaaaccacactcacaggtataactgccaatcataaccacccccgcacaagacaacgtacacatatttcacaattaccacatcacacataatagcatccggaacacctcattgtctccctcccctctctcaaaccgccccatcccacctctaataaacccccttatcaagataacacaaaacatgctgtaataaaacaaatctctcaacatatcagaacataacttcaatatgattcccatatatacacttcaaaactta

SEQ ID NO: 708434 - DNA, 218 bp, Homo sapiens
acgatccttagatctttgagcatcaccccatcagatggactcatgggatgtagattcaccacacagagttccggcattaactgcatcatgtataaaataagtacggaaaagtaaggcaggaagattgcctgagctcaggaagtggtaagaaaattatactgcagagatcatgccaccgcactccagcctgggcgacaagagtgaccctctgtctcaaa

SEQ ID NO: 708435 - DNA, 899 bp, Homo sapiens
ttctcctcttgtgggggacaattttttatacgcgatacgtggtcccgtggaaacaaagttggacgttgacttccccttggcttgctagatgggtcagcgacctcccggcctatgttcccccttccgtgtgggcgcggcctcttttggggcctccggaacgcccctaaggttgtggcgcccagcgccctacaactatgttttattagtttgactcctcgccggagagcataactactcagcacggggtactgaattggctgcactcatcctacgcgctcctgggtttgccttctgctcgctcacaattgccactgctgtcctgttactataaatcccctctctctcaacaaacaggctttctcttagattagcttttatcactcccactctagtaagggcttctatttcaggcgtcttttttttcaccccagcgacgctcttggcttttacgcgctgactcggtaaacctctcgctcctcacgttcacatcactcgctcgctgtggcgaagacactcgactcactctaggtcactggtgactaccgcctgctcttcctcgctgggtccctcacagacaagtcccgtctctctcactgacctgacgtcactcggccactcacagagcacactattgtgttcgcccccccacgcatgaaactcctgtctacatacaactgttttcacccacgactcaccttatgggtgcacaccttcccgcctcacccacctatgtccacatactatggcaatcctctctcgttttaccacactgagatcccaccttcgattatttctaactcacctcgtcttacccccttgatcattcgctcctcattgctcctactccaccacgactactaactataaccgaaggttcatccccccccaacatagacgca

SEQ ID NO: 708436 - DNA, 900 bp, Homo sapiens
  misc_feature (886)..(886): n is a, c, g, or t
gcaatcacagccaaaggcgcaacaataatcgtgtattaacccgatctggctgtcctgccaggattgcgcgtgtgacgacacccgagtgattcaactcttgaccggcagcagcatgtggttgtcctaatcaacaaagacattgccagcgctgcgtggaatatgagaacatggtgaccaagatacgtgcccagctggaggagaccttgtcggccattgtggtccagtcggtggacagcaactggtatccatctatgaccccagcaaggagcccgctttggtgttcttcaggcgaggaatacccattctataccatggcgagatcaacgatgacgaaatcctagacttcttcaatgacaacttagagccagcggtcaaagagctttccgacgacaacttcgagcacctgactcaagcctcgtcgggtgccactaccggggactggtttatcttcttctcttcggccgaatgtaccgtctgtcagcgactctatgccgtttgggagtctgtgggcggaaagctaaagcgaaagctgaatattgcccgcatgaacagtttggagtctggaatctcaactgctacgcgactgggagtattggaagcaccggcttttattttcttgaggcaaggaaagatgtacaaatattcagccaagcaatacagtcccgaagcctttgtccagtttgctgagaagggatatacccagagccatcctcaaccagtgcccgcaatcccaagtgccgtaaacgaatttttgggcccactgcaaagttattttgcagctgaaaacataacatcgctggcgactttgagtattttcgccttagttgctctcttattcgttggcaaaaggtgccaaaatattcagttcagagcctgcgaaactaanataagtcgataact

SEQ ID NO: 708437 - DNA, 1269 bp, Homo sapiens
  misc_feature (788)..(788): n is a, c, g, or t
ttatgtcctgcccgactgagtaacgttagtggggtggccccctggccgacgtgtgtgggggcccagagtgtgccccggtgtcttccgccctggaaagtcggttttcgtggtgtcccgacagggtccgcctttggggtccccaccagtaacctgtccccgtttgtcttgctaggtggccctggtggcaaccgctggtgtgtacacccgacgaaaaatgtcggtgtggacccatctaacgatgccgagagggttggttgcccctgtgtggtgggtgctcaggggtcgcgtgcgtgttggtgtccgggcctttaatttatgtgtgacccatgccctagcgtgataccacagagtgcgcgtgtgcccaagtttccgccgttagcgattccccgtgcggtcctggggaatccgggagcgccgtggacacactgcccaatcgtcgtaggagccacaggattggaagcgccttggacatcgcctcgtgtgcgtcaacggcccattgcgggggtcaccacagactggagggtgtggccctctgggaccaagaatgtaatggggccacatggccgtgcgcgctgtgcgttaggtgtagaaaaggactctggacctattgggcccctctgtggtggagactgccacagggtgtcccaacgggaagcccttggccttgtcgtgacaattacttgtgggagatgccacattccacgggaccacgcccggtgattgtctgagaggtcccagcgcgccacataagcgttcccctggcgctccctcgtttgctttcgtcgacnctaggcgcacagaagggctccccacagaggttgagagctttgtgcctctagttctgatgagaacacactgtggaaagagtggcccacaagagagcctcggagaggcacctcggctgtgcctctcgctggcacgagaaccacgctttctgcctccgtccccgtcacgccctctgtggcccacgcttccttcttcaccactgagagccccctcggcactcttgctcggggaacgggaactggcctggtaacttgctcgttagggcacggaaaggggccaaacggaagaacttgggtatgtaattctgcggggttcacagaatgggtagcacctatagccacagctggcctaaagaatgcacaataagttcctataggtaagtctacccttacaccctgaggaatgggaaaatgaacctcagccccttaggccggaaaagcttgatatttaataaaccaggaaacgagtgaactgagaccccca

SEQ ID NO: 708438 - DNA, 130 bp, Homo sapiens
ttggagtgaaattccacgtcatcaacgaggacggaaccacctctggtggcccgatgtactacctgcgtgacggtcttgcgtcgatcggtaaacccacattgggccgcgtccttgcttccctcttcgccat

SEQ ID NO: 708439 - DNA, 192 bp, Homo sapiens
ctactctaaattcgcggccgcgtcgacataggatcctcccgaatcaaccctgacccctctccttcataaattattcagctccctacactattaaagtttaccacaaccaccacccacaagattatttttcacccaaacctcaaataaatcccctgcgtttttgtcgacgcggccgcgaatttagtagtagta

SEQ ID NO: 708440 - DNA, 285 bp, Homo sapiens
agcactcctttcctggttgcagaaccgatattaaggttgccaaaagggcagatatgccctttccaagttttggtcgtggcaagcagggtcgtggtgaaattatgcgctggttttggatgggagcactcaaaaggcattggttagagattgaagtttcaagctatttatagtttttcaatgggaatatatcagttagggagaaaccatcaagctcagtattattgtttgatctgcaggtgtagtctgtgaatatttttatacatctttttcaaattatgaaaaaaa

SEQ ID NO: 708441 - DNA, 668 bp, Homo sapiens
  misc_feature (364)..(364): n is a, c, g, or t
gagcggggcctgcggggcggggcctgggccaagcggccgcaggaggcggcggtggcgttcagtcccttgttccccgccgcgccgtcgctgacccagcccgccaggcgctcctgaccgtcgcttcctccggtcccaggtccccggcctcgcctcagtcccggcccctgggtccccagccctcgtcgcgagccccggccgcccgcacgccgacatgtccaaggaggagcgcccctggtcgggagggagatccgtggagtgccaggtgatgtgggagcctgacagtaagaagaacacgtcagatgtgaccgctttccgggctggttgtggggctgccgcctgtccggccattggaccgctggagacnttagtgatgacttgtaccattggtccggtctgagtcatatgcagacttctgggcagagttcttggcaaaattcagtggaattgtcttctcacggtgtgtatgatgaaggttgtgagaccacattcgaaaagcgaatcgccagatgttccgccgcaggtggtacaaaaggcaagtcggctcagctattgcaggaaacacctcctgccggcacaacgagaatgacagagttgccattaacgttgcaaagggaaggcaaaacaggaaatcgtgagagtgcacttaagaagagctgaggcacacaagc

SEQ ID NO: 708442 - DNA, 124 bp, Homo sapiens
ccctgcattagttcacttaatagtggcttccagctccatctatgttgctgcaaaagacagtatcctaagtgaactaatgcaggacagaaataccagacaccacaggttctcacttataggtggg

SEQ ID NO: 708443 - DNA, 320 bp, Homo sapiens
  misc_feature (18)..(18): n is a, c, g, or t
ttaaaaaaaaaaaaaaangggttttttccccgggggggccccccccccccccccgccacaaaaacctgcctttaataaattttcgccttgccggaaaaattagggttgggccccccattttttaaatttggtttttaaggtttgcccctttggtttggccccccaaaggttaatttgtttgtttttccccccaaggtttttgggggggggtccaaagggggtccccaaatttttttttaaaaaaaaaaccaaaaccatggttttttggtaatccgtttgggcccggttttttagggccttttaacccaagcccatttaga

SEQ ID NO: 708444 - DNA, 1241 bp, Homo sapiens
acctagcaggctgtctccatctactcttaggcggccatcaactttcactcacaaccaattatcaactactaaaacccccatgccataacccaataccaaacgcccctctctcgttcctgactccgtcctacatcacacgcagctcctacttcatcctatctctcccagtcctagctgcctggcatcactagtactactaacagaccgcaacctcaacaccagccttcttcgaccccgccggaggaggagaccccattctataccaacacctagttcgtgcattctctccggctcacccctgcaaggtttagtatgtctctactccgtaaccagcgccttcgggacatacatctacccactactacgtcaacctctacctacctccggcacaacaacaagaaccatctaggactacataggctactgcgctctgagctactgactactcacacttggaccttccctagcggctcttactcgctgctgagccaccacccactatactcttcacacgctacgcgcacactacgaacagctacgcacacaaccgacgcaactactctctcacccctccgcctaccccactaacctcactcagctaatccaccccacccgcgccgcctcaacaccctcactcccaacgcctgcacctcgccccacaacctcccaccgcgcacaccacacctcatcgcacccactgcactcctcggcctgcccaacccgacttgcttgcaacgccccctcacgcatatcaactcatctcccctcactctacaccccgatcaacggctggcccctgcaccttgggcattcgtcatttaggccaacggtccatccacttagcaccaatccgtaaccaccaaccgaaaccacggttactcaacgctaggtaacacgcccaagctggcccaaacctactggcgtcccctagttcgacgacgggcacagccggcaataacaggcccaacacacacggcgatagggcctattttcactttacaccgtgggagttattccccgcccgctactcaccttcaaagatcgtaaacctccctaatgcacacctaaagacgccgattgcgcacaacatcccccagatatcacacactactccaactctccattggagggtaagacactcaatctctacgctttacccgactccaacaacattttcttcggcccctatttcgagaatatgcccggcacgcttctatgccacactacacaccgatgtacaa

SEQ ID NO: 708445 - DNA, 362 bp, Homo sapiens
  misc_feature (20)..(20): n is a, c, g, or t
  misc_feature (22)..(22): n is a, c, g, or t
  misc_feature (34)..(34): n is a, c, g, or t
  misc_feature (38)..(38): n is a, c, g, or t
  misc_feature (42)..(42): n is a, c, g, or t
  misc_feature (354)..(354): n is a, c, g, or t
gctgctgcctgcaggtaaantnaaaagggtaaantttncctnccccttggtggtggtgctcaagagcgctgaacggatgggttacaccgggctcaatatcacctatccctgcaagcaggccatcctccccttgctcgatgagctttctgacgaggcgcgcggtattggcgcggtcaacacggtggtgttcagggagggcaagcgcatcggccacaacaccgattgccttgggtttgccgaggggtttcgccgtggtcttgcccaggccgcacgtcaccgtgtgatacagatgggggctggcggcgccggtgcggcggtggcacatgcgttgctgtccgaaggccaccaaggggnagagaact

SEQ ID NO: 708446 - DNA, 945 bp, Homo sapiens
  misc_feature (542)..(542): n is a, c, g, or t
ctagccagtcgagttaagaaagcctgctgaggtggtatgctgaggagtacaaagaaccactgctagaggagcccccaggctggttgaagtccttgctgtgtggcgaggctggtgttttcagctgcctttctttcccattgcgaagtatgccttcctcagaggaagctgctggtggatacgaactcctgacttcaatccatctcacgtcctgttccacacgcatgaaccaactcattaactgtcctgacatcactcctcctacattgtcctggtagtgagtgattttctccgaacaggccgagtggcttatcgaagggacgaaagagcgtgaagtacgttaggcatgagacggactcaactcgcttgttggtctgtcgtatgccccaccttacattaaatcatcccattcatactatataatctatgatgtggcggagcccctactaactaattatggaggcagcagaaaggaaaaacaacatgaatggaagggaaacaaccgatctggccgcagggtagagtagcattgcctgacgagggtnggttgcttgtgtaggaatacaatacgaggaatcgactggctccagcaaccctacgtctgtcagcatgcatttggaacacgactggcagccgatgccacaagagcatggatggtgtcaggaacgatgtccaaatcctcaccttctatcccattcttgttctcttctcgcaaggaccgcctcagtctggtgcccaggctggacttgaccgggggggcatcatacgcggctcgatgcaacgtccggctgcttggtatccagccttcttcgtcatccccccaaggttgtagcacccgcgggtgttccccccggtgtggtagctggcgtggtcctgttgtgtggtgccaacgtttgccattgcgcccgttgtgcaccacctgctttggtggccctgtcctgggcggta

SEQ ID NO: 708447 - DNA, 141 bp, Homo sapiens
ccacgcctgatatcatttctctatggtttgagtctccatgtatacacatgagtggtatgaatattatacgttgttatgtgactgtcgtatttcacttagcataaggtcctcaaagcttacatcacatagttcaccgtctga

SEQ ID NO: 708448 - DNA, 1147 bp, Homo sapiens
gttttcctgcgcagtgagcctgcagtgctgtaggcagccatggctgcccagccggaatggcatggtcttgaagccccacttccacaatggactggcagcgtgctgctgtggccacgtggttcaaccagcctggccctgtaagatcctgcagactgtaagtgccctgtgcaagccaatggctgcgcctgcatctgcccctgcgcccctgctgtcgggtcccatcctggcccatctgtgcgcttgccccactggttctggtaaccacactgaaggtgctgctgccggcctgcgggcttcagccatggaggaggctcagtggtggcctgtgcattcacgaagaaggttggccctggaccatctgcgcatttcttgtggatccgcacggaggctgtgaacaaggtccaactggagtccccttgcaggaccaactgttgcatgctggttgacagggaagtacccagcttccaaagattcattcccttctatcccacatgggaacgcccatcggggtcccccaaatgcacagggggaggaaccagagtttcatatggcttgaaagaaagcctttgaaaacattttgaggcaccaatccccagtgccttaggagcccctggggaaaccctggtgttccatttagccgccctggtaccctgggggaaaccgggtccttatttaaacggaagacgcgcgaagcaaccactggcttcctggaacgttccaattcacaaccctttgcaagtgcgtgaacagtgaatggaaggggacaacgtatgttatacgaagaaatagagacaccggtttctaccagcgcgttttaatagggtatcctttcacatgggttaaatgttggcgggcccccacggggtgttggcccctaaagaggcatgcgcgcgccgggaggagctgtatcctttgatccgggtggtgcatattattacccgtagaggtagtacctaaaaaagtagaaagagcgatagggccccccaaaacaatacgcgtcgaaaaaatgcgggcccagtggcggcaagcggtaacgaacgccacacagggcgatacatattgggtttagtggcaccagccgagcacagtgttgcaatgatgaccgtagaactttttaacagtagggtggacgcctcagtatttaccg

SEQ ID NO: 708449 - DNA, 540 bp, Homo sapiens
ggcctgtcccggccattctcgctagttcgatcggtagcgggagtcggagaggcggacccagagagccctgatgcagccccactcgtcgccgctggcctagttaccatcacaccccggtgaggaagccgcagctgccgcatggcggccccagtcaccatcaccgcaactcatgagctagcgaggccagatacccatgcagtcgcctgtgtcttctccgaccacgctggggtctgggacgcgaatgagacagaagagaggatgtactcgtacaccggggcctgcaaggagctgcctgtgagccatctatgttcgcgcttactgctacaggtcctgaccaaaggaagcgatttgccagttagagcgagagcgtgctttccatagtgatgcgatgcatatgcctggtgccgtcggatggtctcagccatggagtgattggtcttcagcgcatcttgcatgtcccttctgatcccttcacagcactagttatttcactgcttgcacgatcccatttccagagtcgcgaggaaacttggtgccacc

SEQ ID NO: 708450 - DNA, 117 bp, Homo sapiens
aggatccaccctgggctctgtaaagaatagtgttttgctctgcaggacattagtgtccccccttgaagcaataactccaagcagactccagcccctggacccctggggtggccaggg

SEQ ID NO: 708451 - DNA, 122 bp, Homo sapiens
tctgggtgatctagaggatcctgaagcatccctaacaggacagatcctaaccagtctctctatgtctttgtactccttgtatcttagcccttccatttcctaggaggatagggttgggccag

SEQ ID NO: 708452 - DNA, 374 bp, Homo sapiens
tggcacgagccgactccctgccctctccagtgtgggtatttgtgacaaggcagcttgtgtgtgtgggtccccacagcctgtccaaggcaaatgcgatgtgtaagctctttgtgtgcacagacacgaagggtgttaaccgcagactcttttgtgatggggacacatgactgtggagaccactccgatgaagccaactgtggaagggtttatataggataaatttgttcacaaacaggtttgagggcccacttcttggtcaccagtattattccagtggatgctccccgcatttcattctggacaccagggttaagaagcccttcactgtgtgaaggttcacgccccagaccccaagcgaataccaattctttttg

SEQ ID NO: 708453 - DNA, 334 bp, Homo sapiens
cccgtgtttggaacctaaatctgtttttgggtttgcctcaaagggacctttggttcactgggtggtaacccttggtgaaatggggtttgtccaagtaacgttaactttgaagttaccccccgtagctggcttcaaagtgcctgttctgtaaaatttattttaaacttttcccctagtcttaagttgtttttgctttttccggctgggtaatttgaaagcctaattttttgaaggtttttttgccttttggggccttaaaaaatgggtttcattttaccggctaattttgtaactggcttgtttgtaaaataaatccttcctgtgtttaaagcca

SEQ ID NO: 708454 - DNA, 895 bp, Homo sapiens
  misc_feature (10)..(10): n is a, c, g, or t
  misc_feature (12)..(12): n is a, c, g, or t
  misc_feature (152)..(152): n is a, c, g, or t
  misc_feature (181)..(181): n is a, c, g, or t
  misc_feature (207)..(207): n is a, c, g, or t
  misc_feature (252)..(252): n is a, c, g, or t
  misc_feature (278)..(278): n is a, c, g, or t
  misc_feature (311)..(311): n is a, c, g, or t
  misc_feature (313)..(313): n is a, c, g, or t
  misc_feature (317)..(317): n is a, c, g, or t
  misc_feature (333)..(333): n is a, c, g, or t
  misc_feature (342)..(342): n is a, c, g, or t
  misc_feature (353)..(353): n is a, c, g, or t
  misc_feature (360)..(360): n is a, c, g, or t
  misc_feature (384)..(384): n is a, c, g, or t
  misc_feature (397)..(397): n is a, c, g, or t
  misc_feature (402)..(402): n is a, c, g, or t
  misc_feature (429)..(429): n is a, c, g, or t
  misc_feature (432)..(432): n is a, c, g, or t
  misc_feature (457)..(457): n is a, c, g, or t
  misc_feature (485)..(485): n is a, c, g, or t
  misc_feature (502)..(502): n is a, c, g, or t
  misc_feature (509)..(509): n is a, c, g, or t
  misc_feature (512)..(512): n is a, c, g, or t
  misc_feature (618)..(618): n is a, c, g, or t
  misc_feature (622)..(622): n is a, c, g, or t
  misc_feature (707)..(707): n is a, c, g, or t
  misc_feature (756)..(757): n is a, c, g, or t
  misc_feature (769)..(769): n is a, c, g, or t
  misc_feature (772)..(775): n is a, c, g, or t
  misc_feature (782)..(782): n is a, c, g, or t
  misc_feature (784)..(784): n is a, c, g, or t
  misc_feature (787)..(788): n is a, c, g, or t
  misc_feature (795)..(796): n is a, c, g, or t
  misc_feature (798)..(798): n is a, c, g, or t
  misc_feature (802)..(802): n is a, c, g, or t
  misc_feature (830)..(830): n is a, c, g, or t
  misc_feature (832)..(832): n is a, c, g, or t
  misc_feature (862)..(862): n is a, c, g, or t
tagaaaaaananaactttattctttatccagtagatcccagtggaaagcccaacagtaacaggggcacccacgggccccaggggaaggggccccaacccccggtgaaggaggtcggggcagagccagcccccccagccgggggtgcaggggngaggggagacccccctgtaggcccgtccngcggggtaaggagggggcacgggggngggacaggttgggggtggggggcaggccagggaaatggaggaacncgggccaagtgtgtgtcggcccatcnactgtccagtgtgtgtgtgtttgtgtgtgtgcncncgcncatgtgtgtggtgtcngggggcccnatgggggtgcnggtggcngaggccgggggtgggggcagcccnggcccctggccanccccntcacagtgggggctggggagcctaaangangtgggccccgacgggaggcaacccngccgaggagccaggtctgggaaaactcngtcccggggcccttgcnctccccnccnccatccctcaaggtgggtgcaggcaaatgccaaggccaggagcctgtcctttcagggctgccccacaccgtccacacccagtggtcaggcagagggagaaaggggntggnggcttctccagtgggagggaggggaaggcaggccttggaaagttagtacttcacagttttaaagagaaaactgaggaggaaaggntgaggaggagaactggggggcacagggacatgaaaggagagtggggggnncttccgagccanggnnnnccccggntnaanncctccanntntttntcaactcccccaataaacagcacaaatncntcaatataaatttcttaaaataaaattctnttaaaaatcaaacaaaaattaaataaaacaaac

SEQ ID NO: 708455 - DNA, 175 bp, Homo sapiens
agctcgtaccgagtgatgtgggcgattgatgaaaaggcggttgaggcgttgtgagtagtgcatggctaggaatattcctgttgctgactatctggaggagtcctactgacaagtccgccactgcagtgagtcgaagctttcatcatgcgcggccaatagtaaattcttccacggt

SEQ ID NO: 708456 - DNA, 371 bp, Homo sapiens
cagtacggatggtaatagaacactctgaggactggtggcagtggcacctcagagactgactatcaagccaatgacatggaggtgtgggtggttacttgggtgaacagtgaagaatggggacagcccccaaaatatcccctataggagtagttaagccacagtcgcctggggtagagtgctgcaaggagaatgggccccgggcatgggtctccagggaaaaccaggtgtccacgtggacttggagtacctgctcctgccggccctgacggggatggcagcttgctggggtcttcagagaaggtccttgcaccccccagtcctgtgttgccaactgcagctcacttcccatgccccaatctcatttgggactc

SEQ ID NO: 708457 - DNA, 162 bp, Homo sapiens
tacttcatagctaaggaagtgtctaacacctgagcgaacatatctgaaggatctcgaagttattacttcgtggtttcagagcacagtgagcaaagaggacgccatgccgggaagcactgaaaagtctcatattcccgaattttgaaccggcggtgcggcgtg

SEQ ID NO: 708458 - DNA, 164 bp, Homo sapiens
ggcgcttccggaagctggcgtctcgtctcctcccacggcggaacatcctgtgcctgaagctgccgggtctgctacggtgatcgcggggctgctgaaagcccggtgggaccaaggagcagaggctgctctggccgcctatgtggctggcaagttcaggacgatat

SEQ ID NO: 708459 - DNA, 512 bp, Homo sapiens
  misc_feature (1)..(1): n is a, c, g, or t
  misc_feature (15)..(15): n is a, c, g, or t
  misc_feature (45)..(45): n is a, c, g, or t
  misc_feature (122)..(122): n is a, c, g, or t
  misc_feature (283)..(283): n is a, c, g, or t
nctccaacagccacncgggccggattcagagcattcttccagccntttcaaagaccccacttccttctgtaatcttctccacgggaagaccaagcccatttgccggagcccacattaatggnaccattcagcctttgaattgccacttctctgaagactctacagggctatgagggtgactcctcaggccgggaggaagggaggaaggtaggaaggaggttttgagcctttatctgactagaaagaggctgctataggcccacaaaatcaaggtctcaccccntcacccctgagaggcagccaggcgtcctgggcaagagtgatgctgtctccacaccgcaggggctagcaagcaaggctgtagacagggctgttccaatgtgtgaccccaagaagacacctgccaaggagaaggaggcagtgcgggcccctgagaaggagctgcccagcctgcgtgtgtgtgttgggggccgaggctgttggtttcagtgcattaaatcatggactgctca

SEQ ID NO: 708460 - DNA, 109 bp, Homo sapiens
gcggccgcctactactactactgctcgaattcaagcttctaacgatgtacggggacatgattctccagtatatttgtaaaaaataaaaaaaaactaaacccattaaaaa

SEQ ID NO: 708461 - DNA, 1278 bp, Homo sapiens
agtaccattagcgcggggcggcgagcacaggtaggtccgataaagagtagttagagcgtgagctctatgcagcagtgccatgagttcctcggaactgattgaatgtgcatcacgtcgagacaactagagaaaagaacctgtgccagtgagaggcatatcgcagaacaggcagttcctagtcagctagaccttggggtactagcgaatatagctgctgtgctctagtggaagttggaatgctcagtcgacctgattgcatgtaaccagcggggagcatcgaaagatcgagagtcatggggaggagaatcaaggacgatcagaatacacctgaccttgacgccaaaggaagattcaaggagaggactacacatgcatgaggacaaaaatacctggatacagatacaccactaccttagggcatagaagattcacatcggagaagatcccaccagtgcaaagcacaatcttatgaaaggacaaaaacagaaagggacacgaaaagacacaagaaaacacatctgaaaaagagaggataccaagaacaccgaagaaacgaaagtgcacggtttaccacaaagaggacaacatgagaggaaaacattaaccccctatacaaaattgaggaccacatgcatgactataggagttattatcacacaaccacaagagaaaattatgagacaccaagagaaaccagcttgcagccataggacacgatttaacacacagatccaccatttaggaaatttatacaaaggaggatgtgatagacaggaaacaacatggcacacacttggttagatgaacaactataccaaaagccaacggtggacacattaattatgtcaaaagaaaggggaatacaacagagagtgacacacaaagaggagcaaagaaacgaaaaagagacagacacaacaaggacagagaacagcagaatcaccacatatcacacacagaagtggcacatgacgcggacctgagaccatgaggaaggaaaacaagacaataggacatagggagaagacaggaaccacagcagcaaactacaaaaagacaagaaacaggacggcgagacaacacagagagaaatagacatagaagacccctacagtaggacacatagcaaacaaccacgattggacaaacacgaatagacaacacaagaataggacaaaacgagacccgaaaaccagattacaaatgagcataggaacgcccaaaaacggggtaaacacgataccaaaacagacatggagaaacacaaagactcaaaaa

SEQ ID NO: 708462 - DNA, 122 bp, Homo sapiens
aatcagtactctcctcatgataaaagagctgggtggctgatggatgcagagatttctcatgtcttcctcctctccctccctaacgcactttccccatgcttcctccaagtgtgaatcatctt

SEQ ID NO: 708463 - DNA, 320 bp, Homo sapiens
  misc_feature (246)..(246): n is a, c, g, or t
  misc_feature (280)..(280): n is a, c, g, or t
  misc_feature (292)..(292): n is a, c, g, or t
atactcgctgtatccttgaactcctgagctcaggtgatcctcctgcctcagcctcccaagtagctaggaccataggcatgtgcacaatgcctggctaattttgaatttttttttttcataaacagggtcttgctatgttggccatgctggtttcaaactcctggcctcaagctatatttcctcctcagcctaccaaagtgttgggattacaggtgtgagccaccatgccctgccacttaggagttnttttatttttatcttgattgattgggtttttctnttgggaaaagtntttactgataaatttatgtgtggttaat

SEQ ID NO: 708464 - DNA, 110 bp, Homo sapiens
agtgatgatctagaggatccgatggagtctctatacccaagacaagtcatccatggataaacacgttaccaggagcagaaccattaagctggtccaggcaagtgagaact

SEQ ID NO: 708465 - DNA, 122 bp, Homo sapiens
gcagaaattcacatttagagcagggtggtcttctgtggcactactgacatcctatatatgccctgtcctgcaggtacaatgtgagctgtagccatcagttccggctgaaggggaaaaaaaaa

SEQ ID NO: 708466 - DNA, 874 bp, Homo sapiens
gtacacaggcccctgcccctgcctcagaggatgaaaaggtcgttgttgaaccccctgagggagaggagaaagtggaaaaggcagaggtgaaggagagaacagaggaacctatggagacagagcccaaaggcagaggtgaaggagagaacagaggaacctatggagacagagcccaaaggtgctgctgatgtagagaaggtggaggaaaagtcagcaatagatctgacccctattgtggtagaagacaaagaagagagaagaacacgaagaagaagagaaaaaagagatggtggttttacgtgagcttgcactccctttgggctagaatgaatgatgcgggcagaccagagattaccaagagagactctatgagatctggcatcgacggcgtgacttactggctgctagccggcattataataaccatgtgtttatgcccggtggcgaagacatcctagatatgaccctacgctatgccgatcctcaatgagcctttcaagggtgaaatgaaccgtggcaatttcttagagagtcaagagtaaatctcgtatgctcgaaggtttaatgctcttagaagctaagctcgtggtggagttgaggatacagcgtgctgcgcgggctgcttacttgaactagtgtcgatgaatgacccttctcacccttccatgggccctcaactacccgctttgctgatggtggagtgttaggcggaaagtcatcagctagcctgtccagaggaagtctagtgggcaggaagatcaagccaggcaaatgcgagtcgtgctcaaaagttctgaaacagctggaaggaacgtggtgagtgacatgaaagctgatgtgactcgactccccagtaccattgccgaattgccca

SEQ ID NO: 708467 - DNA, 121 bp, Homo sapiens
tgcaggtttagtagttcaggactgtgggtttgtaaggtactgattgcattaataaattaaagctccatagggtctcctcctcttgctgtccacctcctccctcctccctcctctgtgctgt

SEQ ID NO: 708468 - DNA, 112 bp, Homo sapiens
gtctgatcataggatacggagatggtgggtccagtttccagagcaccacagggacactgtgtaacacatgaggggggttaccttaacaggagcccactgagattgatttttt

SEQ ID NO: 708469 - DNA, 127 bp, Homo sapiens
ctttctctactccatccattatctccgggattcctccacattcccttcagctcctagttgttccaccttggctaacaatttaccaatctttttttctatgaacacgttctgcctttgctgctacttc

SEQ ID NO: 708470 - DNA, 731 bp, Homo sapiens
  misc_feature (731)..(731): n is a, c, g, or t
agaaagaagcccctgacgagaacggaatgctagtctagtctacaggacctacctgaagcagcatgattagcacagcatcaacttttcaacttcattatcttggccatccaggtagtcatgtgtaactgaggattaaattacggatggaagcatcgctaagagcgtgtcgagggccgtgagagtggagagcggagcgagcgagcgggaaggacctttaaacgcaccccatcacgagcaccgtggagagcacgcgcgttgagcggcgcagaagccggcggctcacgccgctgacgtgacagctcacatagcaaaccgacagatccgcgggcgggacgagtcgaatcagagaagacgtggcgacagagcccccccgccagcctcaaggcgaaagtgtccgaggcgttgcttgcacgcgacgacctcgaccatgagtacaatagctttcggcggggtcccggcacagaggtgcgcgcctggcggccggatccagcgtgcgaccacccgaccaaacgccacgccacacacacagggagtacgctgcgagaccgcggctaggtgagagctgaccacgcaagcgagagtgagaggcgcaaacatcgaggttgacaggagcacacagcgaggaaccaggccgaatccttgcgagacgatggcctgacggagataacaagcgctgagcgcgtccccgcgtcgcaacgggatcacccaagcatgcacgcgcaccaataatn

SEQ ID NO: 708471 - DNA, 669 bp, Homo sapiens
tggtgatgactcttaacaagcatgctgccttcaagcattgtttaacaaagcacaccttgcacagcccttaagccatttaaccctgagttgacacagcacatgtctcagggagcacagggtgggggtagggttacagattaacagcatcttaaggcagaagaatttttcttacagaacaaaatggagtctcctatgtctacttttttctacacagacacagtaacaatctgatctctcttttccccacaggagttcagtggcatgaccagggctcactgcaaccttgatctgggctcaagtgatcctcctgcctcagcttcctgagtagctaggaccacaggtgtgcaccaaccacaaccgactaattttgtagagatgagatcccactatgttacccaggctgtcttgaactcctgggctcaggtgatcatcctgccttggttcccaaagtactgggattataggcttgagccaccgtgcctggctgtgatcagaattctcattttttgttagtcactaaaaatgctggggggacactccattctccattatgtgattagttcacattgcatgttgtatcaaaagatatatatacccaaaatatatcaaaaatttaaaattttagtattattgtcaggacaattaaatgtgggagtgaatctcaaggcc

SEQ ID NO: 708472 - DNA, 1001 bp, Homo sapiens
ggaggaggaggaggacgaggaggggctgggccccccaggccctgccagcttgggcaccacggcactgttcctcccgtacaaggcccagccatgcccgatggccttcctgcggtgatgtggttcccaggggtgcttggggggccaggagcgtgccggggcctggccctgcccatcccgtgaggggggcgccacgttaggccccgcagctgcagccgtcctgtaccacggtgactggacttacgaggagcagtttaagcagctctacgaactcgacggggaccccaagaggaaggaattcctggatgacttgttcagcttcatgcagaagctgagggacagcctgtgaagccgcatccccatcatgggcaaatcaggtccttgacctgttcatgctgtacgtgctggtgacggagaagggcggcctcgtggaggtcatcaacaagaagctgtggctgtgagatcaccaagggcctcaagctgcccacgtccatcaccagtgcagccttcaccctgtggacccaatacatgaagtacctgtacccctacgagtgtgagaagcggggcctcagtaaccccaatgagctccaggcagccatagacagcaaccgacgggagggcccggcgccagagctttggtggctcctctttgcctactcgccaggcggggcacacggcatgctctcctcagccaagctaccgtgtctccctgggcctggccgaagcaccaagagagtccatcacgccgccctagatcagaaagaggagactcagcatcccattaaagtcctggcgcttgctgtgtccctggcgggccacctgttgttgggcagcccaggagcaattgttcaagcagcatgcggccaacagtgtggcttgcaggcagttgcctggacaactgcgagaactctgagttggaaactctcgagaaaaaaggctgtggcagaacacacgcttgagcatatcacacaaattggcgggccaagcccaaatcgacaacacaa

SEQ ID NO: 708473 - DNA, 369 bp, Homo sapiens
aaggatctatttctggcacgatgagggtagatacttcttaacgtactaagaagagaggctgcggtgacacagtagatgcattgatctaaagatgcgtcttgacttcagaaggtcgggaagtggaaagcaggtttcagggctgctgaggtacaggtactcctgtaggccccaggcatggtctcaggcgtgctgagtgcgtgcgtggtaaatggatggaggccagtggtgcctcctggcagtgtcctccaggcactcaaacctagtccttatgaagccgagctcacgtgacctcacagcccctcctgaaggcgcctcactgatgacggtgggtggaataacagcccgcagagatgtccaggtttggaaccc

SEQ ID NO: 708474 - DNA, 226 bp, Homo sapiens
  misc_feature (15)..(15): n is a, c, g, or t
atacataaagatcanggagctgggtgtgggggtgatgcctataatcctagctacttgggagactcaggcaggaggctcccttgagtcccagtaatttgagaccagcctgggcaacagagtgagaccctgtcacaaaagagaaagaaagggcgtggtggctcatgcctataatgttatgcctacaatcccagcactttgggaagccgaggtgggcagatcacttgag

SEQ ID NO: 708475 - DNA, 301 bp, Homo sapiens
ggggaaggggggcccccccctggggggggccccccccgggggggggggaaaaattttttttcccccattttgggcccggggggcccatttttccccctgggggggggggggggggggcccccgggttcggccggggttttttggggtccccccccccggccccttggttcccagggcccccgggtttttccccctggggggtgaggcccctttttttggtccagggtttttgggaaatttttctttttttttttttttttttttttttttttttttaaaaatatttggcttccggccccca

SEQ ID NO: 708476 - DNA, 207 bp, Homo sapiens
gcagaaaaacatacaagacttccttcaaccaacaggaatggtactgaaagttaggaggaacttgtgcaactggaaagaagaatggcaattggggaggcagggaatttccttcctgaggatttcagaagattggtgagtattgaggcttcctgttactttaggagaggcaggtaggatcttaagacacttcttgcccaccctttaccc

SEQ ID NO: 708477 - DNA, 534 bp, Homo sapiens
cttccagctaaacgtttacaaccatgtttgataccgattacgtcgcctcaatcaacaagagcggctaccgttatcacccgggcgagccaagaaccttcttgctcacagccaatatgcatttctgattcagatgtggggcgcaggcaatatttataatcggcgctactttttcaacagcgtagagtcattattgtcgcgacctgttgttaaggacttctgtgtcatgctggttgatattaatcagttcaaacgcatcaatgcccaatggggacatcgtgtgggtgataaagtgctggtttcaattgtcgatattatccagcaaacatccgccccgatgatattttagcgcgactggagggtgaggtgtttggcttgctatttaccgaactcaatagtgcccaggcaaaaatcattgcggaacgtatgcgtaaaaatgtcgaactcctgaccggctttagtaacagatatgatgttcctgaacaaatgaccatcagtattggcacggttttttcaacgggtgacacgcgtaatatc

SEQ ID NO: 708478 - DNA, 353 bp, Homo sapiens
ccatccgagctgaggcaggagctgacttcgcggttcatggcatcggcgtctcagtggcgtctccagctcgcgctgagtttccgggggagggttggccgctggcctcctcttcggcctcctccagctgccgttgagctgcttcaggcggggtagatgccttgtcgtgctgcgaagatggccgtgtggcccgttgccccggttaggggctctgggcgtgcaagccagtcagcccccattgccctgccttgtcacccctatcttgctggcccagcccccgttgcccttttttcaattgccccatcaagagcccacaccttggtccttgaactggttcggggttccctccgctcgtg

SEQ ID NO: 708479 - DNA, 264 bp, Homo sapiens
gaatgagccggccacgacaagatatcgacgtgatcgaccgcctgcccctgcgggcaatctgtcggcggtcggcaacatcggcgacggcacgctggaccagctatcgctgaacgtcatcgtgccgctggacaagttcggcatctcgggcgcgcgcttcaccttccgcaatgactggaacaagaccagcgtcaccgacccgacgacgggcgaggaaaggccgatttcccgcgttcgggccagtcaggccaacgtcggcttccagca

SEQ ID NO: 708480 - DNA, 125 bp, Homo sapiens
ttttttaaaagaaagtttttattaacaaaagtttccttaattcacatttcaacctttattaaatagtccaagggtttcatttatgaaccacttattccagtttagttctcttaaattcatttgct

SEQ ID NO: 708481 - DNA, 434 bp, Homo sapiens
ggccacggtcgcccccccgttccccgcacgcgctctccagcctgctggcgcccgcctgccgctggtcaccccggccttcctgcctactgtcccccagtgatctggatcaaaggccgctgagctgatggccctgcctgctggggctggcatgcggtggtgacaggagcgctgacgacgagcgcaacggtgcccgctttcagcccaccccttcatctgccataccactgtcgctgcgtcagcacgaggattcccacattcatggacctgattggcttgcatcccggcgggcaggcggaccggagaatgcccacaggaggccagccgggaacacaaaaacggtcggccacgatcccaccaatacatgaaaagaacacacgtgaccgcccggggagccttggacaatggaagaggactgagcccggagagatcggagg

SEQ ID NO: 708482 - DNA, 121 bp, Homo sapiens
agtagagaatttgacaagtaaactgaagttttgattcagatatattttgaattgaaaccagagatgttctagagtttagattctttcatttgattaaggtatggtctgaatatgcgttgct

SEQ ID NO: 708483 - DNA, 181 bp, Homo sapiens
  misc_feature (58)..(58): n is a, c, g, or t
aagtgggccggtgctgcgaccacagtcagttcttcctggtgcctttgcctctacgtgngctacacccgcgtgtctgattacacccaccactggagcgatgtccttgtaggcctcctgcagggggcactggtggctgccctcactgtctgctacatctcagacttcttcacagcccgcctta

SEQ ID NO: 708484 - DNA, 1423 bp, Homo sapiens
gcagaggatggcaccactagctggatgatgacgattactttctgctgtctaccttccaactactaacgcttcgctggcactcgcgctccctaactgacgaacactggcgcactacaagcaacttcacgactggacggtacacgcattggcatctcccaaacagtccatctcgactgtacgactgaacacagcacacgcgcgggcacgggcctctgaacgctggacacgaactgtgagccaggccagcgtgaaacgaacgatacgtgatccagccatcagtcgctcctagtcagcaggaggacgctccacgatgcatgattgacgcctccactgcctcaggacctggactcacggaagctacagtcaggagtaagagccacgcgatccagacggcatgcagacagcacagctcccagacacggctgcttcgaccacagcgcagagcgacagtgcgctcaggtccagagcacgctccctgccagcgtgctaacctccaggacgtctcgcgacaacacgaggggcagacacaatcatagctcaacacgcacgcgaccgcagctcccaacacgcctgcacatattggctgagcgcaggccgcgactggcacgctcagaacacgaggctaactcacagccacacacgcaggacccatcacatcgggcaccgcatggccgcacaagcggcgaacgaccgaggaaatacccgatacccacgcccaccgacccgcagacgcacggccaacgcccacacaggcagaccaccacccgcccacaccccaacccaccacaggcactccccgccaacgctatacggctgctacactgtccgcgcaccacgaacccacgacaaacagaccgtgcatgacccagcagtcagcaccacctgaaaaacgacggggccgcaccccttccacgccaaacgcaacgaaggaccaactcgggaccccagacggaacccgcaccatggcgaccagcccggcggaacaactcagaaccaagcacaacaccaagaccacagtcacacaccgccaccatcgcaccatagccactaacaccaacacacgcagagagagacaaattaccccaacaacaacagcgacaagcggagtcacccacaccacagcacctgggaggaggacaccctggagcagaacaccacacgtaagacaccaagcacggaccgcaaacagaccgcgcaaatgccacaacacccagcacgtctcacacactacagcaaacagtgcgaccccaacggtgaaacacacatgtacgggccgccgccgcgactacagcctggaatagcagccccaccgagacgcaccaaactaagtcaagagacacaagcagcggcacaacaagcaagcccacgagcggcaagaacgagcgcacatggagcagaggcgcgacacgagaggcaccacgca

SEQ ID NO: 708485 - DNA, 888 bp, Homo sapiens
ggcttactctttctttcatgcagcagttattatacttgattaaagggaagccctgtcagtgaatgaaaaataatgaagagtgttcattaaaaaaaaaaaaagtctttcaagtgtttctgggaagaagtagattatgttagacaataggagaggaaagtatctactgatggggataacttccatatgggtgtaatgcaccatattaaatatgatactggctaaagatttctaaattaggatggtgtataaatggcatagagccattgaaaaatttgccctataagacacctttgagatgtgacttcggtccatagtggcttaaatatctgtcggcagtctcatggaaagtcaactgtcactatgagaaaacatcatgtcatggccttaaaatttcctaactttggaaaacatctctatctatcaagaagatactctgaaaatcagaatctcacatttccacagtcgaggaaataagtgttccctacggcaaattttagtttcccaaggcatatgttaaaacattcacttatgcgttctgggctcaccacttaaattatgaactaaccttaattcccttattccttgcccactggtgacaacgtcagaaaacaccttccggcggcaaacctttccaccatggggcaacgtctaagtggcttaaggagggattcaaaaaggtgacccagaccccagcacgtctttctcaacgatgtcaaccaagatgtatcatgggctggtcacggagctatcggaagattctcgaacccagtctaacacaaggccgctgttcacaattcaaaacgacaagctcgggaagatatgagatgtccaataagtgcagttgaagtacacccaaaaatacatggagacaccaaattccacgtctta

SEQ ID NO: 708486 - DNA, 116 bp, Homo sapiens
tgatgttatgaatgtccacattaatgcagctcataactggaagtcactggggagttctttgctgcttgctgggtttaactctgatcatgcattagagtctcctcagcacctgttgt

SEQ ID NO: 708487 - DNA, 148 bp, Homo sapiens
  misc_feature (135)..(135): n is a, c, g, or t
gcagcacacacgttgcacacgcaagcacccacctgcacacacacacacacacacacacacacacacacacacacacacacacacacacacacacacacacacacacacacacacacccctgttctgcagggcttnagcgtggggtttt

SEQ ID NO: 708488 - DNA, 775 bp, Homo sapiens
gcataagttggaaacatgccacatgtcggacgctgcatggatcatcccatggccgcgtatcattccgtatggccctcggcaccaagatcggtatacatcagtagcgaaactcgatcacagggctcgtgcgaagccatcacatctacagaccatggacacgtgatgtcgaaagtgaggggctactgcgctataagctccatctactataggaagctgagagacactaaccaacgagccatgcgcatgggtgactgctggctgacagagaaagatcagatccctaaattgtgtcaagtactgtgccatcgggacaaagatcaacctgcgggctacacaagaacgctgcaaatcccaaatcgacatttgcatcgagccaagatggcacagatcgagtatgaaggcaattgcctcccacccctgcctatagactaaagagacagtcacattacactactaaaccagctggtgcaggggttgatgcatgaactcaggcaaagccaggaagcaagcaagcacaggtcccacacagttgagacaccacggatataactggatatgaaaagtttgtataccttaatcagacccattatcacagcctttggagcacttatactctttgagacaactgggctagcagatgaaaatggcaaccttgatggggttggtgaccttatccggaggcagatgacctttctttgcacaatagtcaaaagtctttatgtttgggccaaataaaaattttctcaaaaaagcaacaaaattgccaggcagggtt

SEQ ID NO: 708489 - DNA, 339 bp, Homo sapiens
atcccatatggctggctgcacataatttaccatgcctctttgtgaggatgagactgtgagccttcatcttacctatcctgcatctttctagtgggctctgtggggcttagtaaaaaggataaacctggaggcatcccactacctgattttaaactatactataaggctatagtcaccaaaacaacatggtgctggtataaaaataggcacatagaccaatggaacagaatagagaaccctgaaataaacccaaatacttacagctaactgatcttcgacaaagcaaacaaaaacataaagtggggaaaggacacccttttcaacaaatggaactgggat

SEQ ID NO: 708490 - DNA, 220 bp, Homo sapiens
gaacaataccccatccgggcacgaatgcacgcacagcgttccgcccgtttttctaatgcgtaagaataatgccaaaaataaaagttcggttttcctttgtctttacaacttttaacaaatcatttgaaactgcatcataatctaatgaacctttaaaaggcggattggcaaggacaagggtgtatttgtccttgcccactccgccttttagaggttcatt

SEQ ID NO: 708491 - DNA, 832 bp, Homo sapiens
cactccggcgcgcggggctagctgcgggtttcagcgacgtggagccctcaagggacatggcaatctacagcggacgccggcgggtcggcgcccgaaatggagctggccccggaaatggggatgcgttcggaaaaatacatccaggtcggaggctcagactgtgcatttgtacatggaagaaactatggattgattacctcaggctctagcttcgaggaatatgggatgatgctgcactcagcgcctgcgcgacgtgaagaacgttagacgctgatccaggctgtattgcatgctgctgctgattgaggaggatgaagagttacctgggcgattaaacggacatccaacgtggacgacctggagcccggtgtcagggttgtgcatgatcaggattgttggcagagcatgtgcaacacagagacaacgtctcatcacgagagtcccgtatcaggcattgatatcggcacaagccaattctgacatccatcgagtacccgatagctttgattgtggttgcctgcatcagcgatgctcaagacgagagctttccatgggtagtccattgcatccctatcaaggaatgtgttcaaggattcccccgaaagagaattgcgagggttgatactcttatgggaccctctcatgctaggtccttcactcctggtatgctattgcgtactccagtgttaattgtgacgacggtctgaccattaatttattccggcgtagtggctccccttgatttggccacagcccatttgggcaccctcgcttacgggcccctggctgggagctctcatccgtcctttgctttcctggccctacctttgcc

SEQ ID NO: 708492 - DNA, 607 bp, Homo sapiens
aaatagaatttaagcaacccaccagaccagttaacctacagatataaccccgacaataagtcaaaattcggtaaccactaaataaactaagccactactagaaaccccgaaaccattaattaattaattacacgagaaacagaccgagataactacgtagggttggtttgcgatgcaagtgacacaagtggcggtccagggtttaaaaaccccaaagcttaatgaggtccaaccaaaagagagccgagaagaaaaaactcgacccctaatttaagatcctcaaagtttactaattaacctctccacctcaggcccttcttaccaaaaactcgaccaaccttactcgttgcgaagaagtaagtgattgatgcatgccagagtgccgagccgagatcccgaatgacgttcttcccagggactaaaaaggaattctacggacgcgacaaaagaaaaccgtaaaagagatgagaagagccggcaagactataggtcaacctctcctccaggcatacgaaaaaattcgaaaacttcataaccctcggagctaccaacctcgacggaaataacaattaataagaatgagtcgacgaaacggacttagagaaca

SEQ ID NO: 708493 - DNA, 528 bp, Homo sapiens
gcctggctgatctgaggatccccgaacatgtcgaggctataggaaaaaaaactccttctacttgagaaaagaagacataaaagaggactttatcttgcagcttaggtaccagttaggccacagttgggtagagcaacaagtggtctattggcatccctgattccaggcattagctcttggatggcatttctataactaccctgagccagagagaagccaactgccctgaaggtgagtcctaggcctggcagcactcatcataagctgactaaagagcctttggtccttgaatgaatatcattggtagccaggcagtactccctgtgggcctgtggtagtggtggccatgagaagagactcctcttcttacggaaaggggtaggaagagtgggaaaaactatcttgtggcttgggtaccagctcaaccacagtagaatagaacaccaagtaggttcctaaggtttctgattccagtccctagacaccggatgtcatctctggatgtgcccaggagcatggggaacttgc

SEQ ID NO: 708494 - DNA, 669 bp, Homo sapiens
ctacccctcacgacgcagacatgttgcagctgcagaatggaccagcagaaatgatgcctgaggcggaatgtggctgagctgtgcactgacccttgctgcctgaatgctgattccctccgtgtgcagtgcctgtggagtgtgcttggatgctgtgctgccgctgctgaccatcctggccctgtgatgcaccttctgtggaccatgcagctgcttctcactgtgcccctgcacaccttgggatgatgcttgtgccagctgcctcgtactgcaactgtggagtactaccatgagcaactatgtgttcgtgttcctgggcctcatcctgtactgtgtggttgactgtcccctatgttgcttggtgtgctctgtgctgtctttttcgtgtgcctgttacattctctatcttgcgcaccttggagtccaagcttgtgctctttggcctgagaggtgatgcccagctgcatcagtatgctcttggcttggatggcatctccttccccttcttcttggctggctggttgcgggctctggccgtcttctgggtgcttgggagccaccctggtggtcatctggctcccacgctgccttccaccagattgaggctgtggacggggaggagcttgcgatggacccgtgtgaggtgtcttctgggacctgcgtgctccgggc

SEQ ID NO: 708495 - DNA, 148 bp, Homo sapiens
tggcctggcgcctcactgacctcaatgatctcacgtgaattggataataacgaatgtgcgagaagatggagtccagagttcacaacaaatacatgaggatagaggagacgctgacaatacaacgagagaagtacaatgcagagatcga

SEQ ID NO: 708496 - DNA, 1485 bp, Homo sapiens
  misc_feature (531)..(531): n is a, c, g, or t
  misc_feature (1485)..(1485): n is a, c, g, or t
gcctaagctggagcatcctcgagagcccgaagccggcagtgtggatcattgtacacgcaccttcagcgctttctgaacattcacagagtcacgacacataggtctagggcattccccatcattcgctgggcaactagtggacactgtaggggtgacctttcgaggatggcgagacgtgatcgtcccatggttgtccagtgttctacaggcacctctcatttggcattactccctggatgacgtgggaacccgtcgttgtgccatcaatactcaccccagaatgcgctgcaagaagtgtagaccggtgatgtacagcgcgagttgcggcagactgatcttggtgacctaggatgtaccacgggatccatgagcaacgcctggtgccccacagcgttaacgtgtatcttgctcctgccggatggtggccacaagtgcgcgtgattccatgagacgacttggtgtggcaacttcagttgaaaacccttgatcccgttgcccaggcattgccgtgaaacgatgaccaatttgatnagggcgaggggcaaacagtggtcggacatggtagtaacatggggtgcacgaaaaggaagcgtctcatatgctttccgcagggagccaggtcgttcccttcccagagtagagcgtagtatggcgacgctaaggtttgcgtaggcgattgcacacacccatcccaggcacgcgccaggataccgggagtaccttgtgacgtgccgcgccctccaagttcttgagacctggcccagggttcccttggagcgcgtggtgcggcccgggttgtgctgggcccccttgggactcgaggaattgcggacccggcaattgccagtgccttcgtggggactcccctggagagctagttgaaccggtgatgcctggggggggctggtttggccccaacccgactcctgtgggaaacgggcgtgggaagcgtcacggcgagaaccggcttcggatttggcctggcgggaacggaaacagtagcccccgcgcggggaactccaataagctcccgacccgtggccgcacttgcgcgccactaggctggaatccggaaccgacgccgacactcgggccccgggcgaacgctcccctagggctcgaaaacgaccccgcgccggactccgcatagcaccggccaaacatcgccggcgccaattagaccaaaacccttggggtgagccagacttgctctttgtggctgttaggatcccgttggagaacgcgaaggaaagggggctgggaggaccctgacgagtaagctcacttggagataccattggcggccctacgtgggggcagaccccttggtgcgatcctggacatttgcctcctctctagaggaggttacagaggcccacacgacttggggcctggaacgcatatgggtggcccccgtccacaagagtatctcacagggtaggacattcgtgtctcatggagaggcgccaatcggaatatttaccn

SEQ ID NO: 708497 - DNA, 614 bp, Homo sapiens
agttgatggtggacttaaaccaagatccagctacgcaaagtcttatgacagtactcttcaattacccacataggatgaataagtagacagttctaccgtacaaccctaatcgatagaccattcttaatttagctatttatattatcctaactactaccggcattcctacttactcaacttaaactccagacaccatcgacgccatacgtatcgtatcatcggcacctgaagacaagctatagcatgactaactacccttaattccatgccatgccgtccgtctccctaggaggcctgcccccgactaaccggtctttttggccagaatgggccagttatcgaagcaattcagcaaaataacaataggcgctcatcattccctcagccattcatagcccatcatcagccctccttaatcctctactttctacctaccgcctaatctactccacgctcaatcacactactccccatatctaacaacgtaaaaattacatgacagtttgaacattacaagaacccgagctccattcgctccgccgacagctcatcgccctttaccacgctactcctacctatctcgcccttttatacgtaataatcgttataaagac

SEQ ID NO: 708498 - DNA, 978 bp, Homo sapiens
gtggtctcatgcctccatagatcactggtgtactctttggcgtttggggcatggtgaagccaccttcatgactagcactgtgttccatgtgcctgatgtggctgatatggagctgctggcctgttgcagccctgattatggccactcgttgtgcccttgaggtggtcatgctcttgacggttcgcaatctgtgctgattgacatgaaggtatccatgcaggtggacgtgtgcagtgcttaggtgctatgtaggcctgcatcacgagacagcatggagcaggcaagggttgtctgatagcccaatgtgcatctctgactttgacgcgcgtgcacggacagatgcgctgcgccggtggcgttccgagatttctccgtgttgcacgagagctcgaaaggtgatctgagcaggtgtctagccatgaatattgccccgaatgccgccttatgacgagaagatacgacagtctatgtatacgacatcaagtactctaacttcattttatcgtgcgcgtcggtgctctgctcgccttatatatcctcaagcttttgaacgatctctaagtcgatccaattcccgacggtcataggcacgcgcctcgtcgtgagtcatttgacattgttgggtcaagtgttgggggagaatccatagtcatagtcattatcgtccaaagtcattagtgagcaccatcgagtcgctacaaagctctcagaagctgcaggccgggacggaaaccatactgatcccacccgaggtgtggtcgaggcttcctgcaaagagaaagtggcctgctggtactcgatccctctgatttccttgtgccttttaatcttataacctctcctgcacgtccaacccgtttttggtgtgtgctcaacccgcagggatgtgtaaccccggttgtaagggacgcgctgaaatcgtgggtgagctgttccggaacttgcttatttagaggacagaagctgagtcctgggcca

SEQ ID NO: 708499 - DNA, 104 bp, Homo sapiens
tccttacgatagccgacagcagacatgtgtcatgggatgccgcacaaaacagctgatgctgctcctctcctgtcgggctagtcgggggggtactgagctcgaat

SEQ ID NO: 708500 - DNA, 178 bp, Homo sapiens
tcgtctaagataaatactagccactcttacacaagcacactacaccccttatcccatactagttatatcgaaaccatcagactactcattcaaccaataggcctggacgtacgcataaacgataacattactgcaggacacctactcatgcaactaataggaagcgtcaccctagaaa

SEQ ID NO: 708501 - DNA, 737 bp, Homo sapiens
  misc_feature (152)..(152): n is a, c, g, or t
  misc_feature (227)..(227): n is a, c, g, or t
  misc_feature (239)..(239): n is a, c, g, or t
  misc_feature (305)..(305): n is a, c, g, or t
  misc_feature (535)..(535): n is a, c, g, or t
ttagatctatttattaaaaataaaattaaaatcagattgtcagggaagaggtatgatttgagtaactttgggaaacttggtagaggcatttctcatggagatacaggttaacaattctaagagtgctgtacatggacgatgggtctgcacanaagagttaatagatgtcagatggcgtgagccagatttctcacttttggagagggaggttatagatagcagagtanagccagtatgcnctatatagttctgatagtcagagtcatcagtatgaactcatgtttacctcaatatagatacagatnatagttatatatgtgtatacatacatatatttgcaggtctatactctgaagaggcctagaagtcatgatattccaacagcaatgagcacattgagtacgcagatcttggtttctcacatgattcaccaaaatatagacccagggatccttggaaaaatgtctgattctaggtctggggcaggatatatacaagatgagtctggaacttcttctagtgccagagagtaagngagtactcaaaaaacacaactatggagtatgtcctgttggtagaaaaatttgagcaacaaaataaatagagtagtataggattatgaccccgaagtataaaataaccatctatgagtccatacatatataaatagatgattgaataaatatatcggcggagaagaaaaaaagactatccatagcagaagtattcctaataat

SEQ ID NO: 708502 - DNA, 143 bp, Homo sapiens
tgtgggccggttacttggtagacgtgcagagctctctctggggtggctgtatctcatcttggggggatgctggactcagatgcccccgtaggttcaaaagtcaacatccacatctcactcctcccggtgctttctgagtcctt

SEQ ID NO: 708503 - DNA, 1973 bp, Homo sapiens
  misc_feature (135)..(135): n is a, c, g, or t
  misc_feature (178)..(178): n is a, c, g, or t
  misc_feature (184)..(184): n is a, c, g, or t
  misc_feature (199)..(199): n is a, c, g, or t
  misc_feature (202)..(203): n is a, c, g, or t
  misc_feature (211)..(211): n is a, c, g, or t
  misc_feature (217)..(217): n is a, c, g, or t
  misc_feature (222)..(222): n is a, c, g, or t
  misc_feature (224)..(224): n is a, c, g, or t
  misc_feature (231)..(231): n is a, c, g, or t
  misc_feature (233)..(233): n is a, c, g, or t
  misc_feature (237)..(237): n is a, c, g, or t
  misc_feature (298)..(298): n is a, c, g, or t
  misc_feature (305)..(305): n is a, c, g, or t
  misc_feature (330)..(330): n is a, c, g, or t
  misc_feature (334)..(334): n is a, c, g, or t
  misc_feature (342)..(342): n is a, c, g, or t
  misc_feature (365)..(365): n is a, c, g, or t
  misc_feature (373)..(373): n is a, c, g, or t
  misc_feature (384)..(385): n is a, c, g, or t
  misc_feature (399)..(399): n is a, c, g, or t
  misc_feature (405)..(407): n is a, c, g, or t
  misc_feature (410)..(411): n is a, c, g, or t
  misc_feature (416)..(416): n is a, c, g, or t
  misc_feature (418)..(418): n is a, c, g, or t
  misc_feature (420)..(420): n is a, c, g, or t
  misc_feature (422)..(422): n is a, c, g, or t
  misc_feature (424)..(424): n is a, c, g, or t
  misc_feature (428)..(428): n is a, c, g, or t
  misc_feature (431)..(431): n is a, c, g, or t
  misc_feature (441)..(441): n is a, c, g, or t
  misc_feature (446)..(446): n is a, c, g, or t
  misc_feature (453)..(454): n is a, c, g, or t
  misc_feature (456)..(456): n is a, c, g, or t
  misc_feature (462)..(463): n is a, c, g, or t
  misc_feature (468)..(468): n is a, c, g, or t
  misc_feature (485)..(486): n is a, c, g, or t
  misc_feature (488)..(488): n is a, c, g, or t
  misc_feature (504)..(504): n is a, c, g, or t
  misc_feature (519)..(519): n is a, c, g, or t
  misc_feature (527)..(527): n is a, c, g, or t
  misc_feature (629)..(629): n is a, c, g, or t
  misc_feature (842)..(842): n is a, c, g, or t
  misc_feature (1370)..(1370): n is a, c, g, or t
agcaccgggtcggaatccgtcgacccgagccgcgcatgaagcttgtaccgtaacctctgcggacccggccccacccaactcaccttcgcaggtcaccagcaccctcggaacccagaggcccgcgctctgaatgtnaccccccttgggaggaaggcgatggcccctgcgaggacgatgncccgcnccctcctcgcccctnccnncatccctnccttcnccttntngcttctntncacnctcggcctccagggcacccaggccgggccaccgcccgctcccccttggctgccctctgganccgactncctgaacagctttacctccggggtncctngcttcttncttgacaccaactcctctttcancaactganctaccttcctnnattcccccaccttnctcctnnnctnngactncntncncncctnctncaccacccanaactncaacttnncnctattnnatctncagcccgacctcggggnngnacgccatctccgcctncttcctcatcaactncctctacnagcagaactatcgtgtgcaagttctgcgcccatgtggatgggcttcatcaactacctcacgagggaatgtgtaccgctcctacctgccagctgcggacccanggctttgtgagggtctgggatccccaaggcctgggcaggcatagacttgaaggtacaaccccaggaacccctggtgctgaaggatgtggaaaacacagattggcgcctactgcggggtgacacggatgtcagggtagagaggaaagacccaaaccaggtggaactgtggggactcaaggaaggcacctacctgttccagctgacagtgactanctcagaccacccagaggacacggccaacgtcacagtcactgtgctgtccaccaagcagacagtaagactacctgcctcggcatcgcaaacaacggtgggatccgctgaccagagggcatctttcaccacgactggtacttatgaccccacggatgcagatactgcatatgagttgtctgtattagtgcgaagggctggcatctcgggccagacatatgaagcaaccttatccttgcaggtgaacgcaacgagatggcgattcgtagtcctgctctgagggatgatgcagaggtcacccatccattggcaaatggcgaccatgccagttgatggctcgtgtgtcacactagtacaaggcaccaacaccaagtttccgtctgactagacacacttggctgcctgacattctgacgagatatatactctgagcatggtgtgacggactacctctccaaaacttgccctccgatcgtctccatccgactggacggcttgcgcttgtgaccatacattaccacagaaagtggncgtttgagcggaggcctccaagcgcgatccaatgttcccccaatgtgactcaaaggggcacttgctgttggaccattgtcaggaactactaggcactctgccaatgtagaagccataccagtggcctggtttacttaaaaactcctttctagcgaatcacgtggggccccgggttaagcctatggggggcaggtatggggcacccgatgaaacaacctttgtggggcacaacacacaggggccccccaatccttggtcgcaggcgagatatttccacagcaaatggccgctgtttttggggcctgtaatggcggggagaaaaatttcccccccttgcccgaaacagggcttccgtgtgtggaacaaggcgtttctcgaccgacggatctccgggcgagaccgagccatcgtggggggggggggggacaccaacccatcgtcggtgtaatgagcgtcctttctagcgaagcgcgagccaagaaaaattcctgcgctgcgcgactgacaacaacacgacgacaccccctgcgtcgtcgatagtgctcatccatcgaaaacgaggacgaccgtctcaatcatcacaccgtcggccaagcgtgaaga

SEQ ID NO: 708504 - DNA, 360 bp, Homo sapiens
atttttaagcagatttgtttgtccctttcggaactcacattggcaagtttaaaaaggtgacttaaggtgaagtgggggcaaaatccccttttgcatactaccctatttttttttccctttaaggtgttaaacttgcccctcatgtccactcagtaacaagttttgggacgtagagcacagcctcactcagctttgaaaggtaataccgcctttggggaagtgaccccgcagtggcctttgcaattgtggatcttgagctttgctctcagcagattttaggtgtaaccattttttaactttactggaggtgtgtcctcaagaagaaagttttcaaattaaaaaagttgtttccaagtccca

SEQ ID NO: 708505 - DNA, 206 bp, Homo sapiens
agtactgcctcccgagatctctagcttccagcctaatctgttatatacaagatgtaagcgtcatcctgatgaaatcaccgcagtccgctcagccgccccaaaccaccagaggcttcggcccggatgtacagcccctgagtcagctcgtcgcaggggcagttcccgtctggatctgggccgattggcttcatgtcgtccgtgggcca

SEQ ID NO: 708506 - DNA, 433 bp, Homo sapiens
gtcagagagatgaactggattagagcctgagtggaagcggattggtgagtggtgcggggagttgactccttccctaactgctctgcgcatggtccctgcctctagaggagcaggtggtgaggatggctccgggcccgtgtggtgcctccccgacccaaaagcttcaaggacacggggatgccatgctcttccccaagatgatcttatcgagtgcacacaagagttcatccttgggttggcaaaatgtcccagaatgtgaagaggcaggagtgctcatgtgaacatggagcgctcaccccaggcgcctcagcacagccagggaggccttggggtacagcccctcgttccctggggccgccagcacctcctctgccctatcccggatggggcctgggggtctgcccagggtgcgagactggaatctatgctgaaa

SEQ ID NO: 708507 - DNA, 132 bp, Homo sapiens
  misc_feature (70)..(70): n is a, c, g, or t
  misc_feature (114)..(114): n is a, c, g, or t
gctttttcgcaacgggtttgccgccagaacacaggtgtcgtgaaaactacccctaaaagcctgggggagnagactcgtatccattgtcgtcattggacacgtatattcgggcantccaccactactggcctc

SEQ ID NO: 708508 - DNA, 921 bp, Homo sapiens
  misc_feature (212)..(212): n is a, c, g, or t
  misc_feature (456)..(456): n is a, c, g, or t
gcagagttggtggcgttcaatagggcagcgtgcgtatgtggtgaattactcgagagggtggggacgggctcgtcgttgatcctgaccggggtcggaggtcgatgctgcgatgcgtctgacgaaggtcggtaatcggatgaccttcttctataaattggctatgaactgacataggagcttcgagcatgcggagagttcagcgggccatcagngacctttcccaactgctaagggcatcatgcgatcacagtaaaagtagactgtgccttgttcgtttgagtagacatctggaaggactctgagtccagtaagttgatagagtctatacagacgattgtcatacgtttcgcatacaggtggccaatgtcgtaggtccatgacctataggatccattgcatgagtatggatagtagacactcctttacttggtgtaagaaactttagtgtcagtcatnattctgtctcacgaagaaaactactataacatgttggaactgatctctccgatacaagtactaccaatgggtaatgtgacgtgtcccacgtctgacttggtactagtctcggtggatggagctaaccaatctattgcatcactggatcaacgtcgggggagatgagtaactcacaggaagggcacctatgcctattgctctctcggtaaaggtagcagataccatttgggggtaaccggtaaagattatgtaggtccataaagacagtaccggtacggttgttcgaaacggaaagtaagtcctcgcatgaagtcaacctgtggtggcattgtaccttgcccgattgatgcatgaatgggccgttgcaatggttcggctacggcttattcaaaacgtgaccccgctgggtcaaatatttaaacggtgaggttccggcaagggtgcctggacgcggttggtgtggga

SEQ ID NO: 708509 - DNA, 318 bp, Homo sapiens
  misc_feature (13)..(13): n is a, c, g, or t
aaaatgtttcccnaaaaaaaaaacagtggtagtaggacacaattttcatcattttctttagagctttaagcctggatgatcctttcttgcgcccaaatgctttccgaccatagacacagtgggtactaagacagttggagcaggagccataatgctcattggtacaggaatcattggggtccctggaggtacaggtggaggaaatcctggaaactgcgggggtgggatccctggtgggagtgctgggattcccatgggagggcgattcaaatgaggtggaaaagacattcttactgcagcagtccgccgctgaggaaa

SEQ ID NO: 708510 - DNA, 249 bp, Homo sapiens
tcccaaatcatgccattgcactccatcctgggtgacagagcaagactccataaaaaaaaaaaaaaaggaatacggcaggacctttaaaaatgagtattggcttgttcccaaaaataattagggataagctctgtagggaacatttgttgcaagccccgggttgggacaaagttggggggggctccagggggagaggccagaaaattgggtttttttggtcactcctccatccaaactctacttttctcg

SEQ ID NO: 708511 - DNA, 370 bp, Homo sapiens
agagtgaccatggaattcatgttcattctagagcaatggaaaatacacccttgccaaagagagtctaatgtcccctcatgtgtccaagcgttctggccaggtgtggtggctcacgtctgtagtcccggcactctgggaggccgaggtgggaggactgcttgagcccaggtggttaaagctacagtgagctaggatcacgccactggactccagcctgtgcggcctcaggctctggggctcaaatgaacctcttgcctcagcctcacgagtagctgggactgtaggtgcaggccgctatgctcagctaattttttattttttgtaggatagggtctccccatgttgcccacgctggtgctcggcggccgca

SEQ ID NO: 708512 - DNA, 451 bp, Homo sapiens
  misc_feature (382)..(382): n is a, c, g, or t
tacagaggtcatgtactctgggtgttttaaaagaaacattttaaagaaacccacagattgtcattctctatcttgttttctcacgattctctgcaattcttccctgtactaaacacaacagagaaactggactgttttgtatagaatactgcttccagcaaataaaccatcacaagtgcttgggggtttgtatgtacacgatactctcagaggtaataatgcatgaacctattttatatgtaaaatatgtacagtattcatgtcaaccatctctttaaaagttagcctataaatattgttgtataatttctttggtcagaaacatttggactaagtcatgtcacctgggtcaggatttctttcagtgccatttagcaaactngtctttagtctatgcaaatagcaaagatttacagaatgcaactgaatgcagcttcactggtaaatttca

SEQ ID NO: 708513 - DNA, 175 bp, Homo sapiens
ctgtcgcacagaaaacattgagttatttgagaatttcagcaaggagtctcctgaaacaagtgacaccaagccatttatttcaagtaagggatggttacacatgattcaggaatacacggcaatagtagcctaacggtatgtcacaatgcctatgtaattcacctcacttcatgtc

SEQ ID NO: 708514 - DNA, 246 bp, Homo sapiens
attcgcggccgcgtcgactgcaaaaatccttcagttttattaatagtaaagtacatgaaaattaaaacaacaatacaattttatttttaaaccagcaaattgatgaaacaatgttaaaatattaaatgctcccaagggtttttggataatctgttccttgaagggtaaatgggtatgattttcctggaaatgcatgtaacagtgttatgaactcattcttaaaaggtcgacgcggtggggaattta

SEQ ID NO: 708515 - DNA, 206 bp, Homo sapiens
gtggaactgctccgtagatccagaaaagcacattgctatcttactgtccctaagttatggggcttatttgtttcgcagcacacaggtaactggaacagagggcaagcctgagtgaatgggcgcacagactcagcccataccttccctggttctagtgttctcaggtagcccggaccaaccctgggagcctcaggaagttaggcggt

SEQ ID NO: 708516 - DNA, 347 bp, Homo sapiens
ttatgcagagagcagagatggagtgagagaggtttttagaaatggctactgagagctgctctgcaacgctagatcgtggagaagaaaaaatctgggtgcgttgtcttgtgaagccttgttgcaagcacagtccttatgcggttaatcctgaagtgctgattattaatcttagtgtatgattactggccgtcgttattaaatcaagaatcaacctaaaactacaaatcagaagtacatggtggctaccagtataacgaagccaactatgatcatgaacgatgtccaacccgtcgggcccaccagggtcctaccgacactgctctaacagcctgcctctatgctcagtt

SEQ ID NO: 708517 - DNA, 348 bp, Homo sapiens
  misc_feature (38)..(38): n is a, c, g, or t
aaggaagagaaggaaggagaaagaaaaagaaagaaggnaagaaggaaagagaaagaaggaaggtctataaagatagaaaataacctgataaaaaggctacattttgaggaatggcaatgaagcctgtgagaggacgttttcactattttctttttcttttcttttctttcttctttctttcttttctttctttctttttctttctttctttctttctttcttctttctttctttctttctttctttctttctctttctttctttctttctttctttttctttctccttccttccttacttccttccttccttccctccttccctccccctccttctttctctttcttt

SEQ ID NO: 708518 - DNA, 115 bp, Homo sapiens
attacagaagaagcaggctttgaatgctatccttagttatgaaatggtgccctaaagaggcagcatccctttctccgttctgctgtaagacaccacatcagaaggtccaggtatg

SEQ ID NO: 708519 - DNA, 106 bp, Homo sapiens
tggagtatctagagatccgagaagatgacgtcatgtcacagcttgcggttttgtcaagaggtggaagcttcagagatgaagttggatcccttctgtgcgtcttctc

SEQ ID NO: 708520 - DNA, 193 bp, Homo sapiens
gtcctggcatgttgacgcgtaaagaagaatggagatggatgaaggcaaatgcagagggcacagttaggagcaaaccattcaaaccgctggagtgaggaggggtggtggccagttgcctatggtaaagcttggagaggtgaactttttcttgactgctgcccaacatctcctacctctgagactggagaaagca

SEQ ID NO: 708521 - DNA, 428 bp, Homo sapiens
aatctatgtaaaacacaaccaacaatctgcccgtaaaaagctggacggaaatagctcaaaatgttatgtgattgtattcaagaagtgatctaatagggatcttcttgcttcctttcgactctactgacttttcccaaatgtttctctactggggagatttttttaaaaagctattagggaaggagtagaacaaaagtggaaaaaaaaatctattagttacaaaaaactgagtctgatagaagcattgcatttgagttaatgaatctaagtctagcctataagaatttgtacatttagaaaactatgaaacagtccaggctactccatgaatccattggtaggaccagaggctggaggtggaagtgccacctggtcctgcctgataaaaaatgctgaatcagccaggcacggtggcccacacacctgta

SEQ ID NO: 708522 - DNA, 1150 bp, Homo sapiens
ccctactgagtgagtgccctgcggctgcatggatgcccagctgggccacctggcggcatctgtggagccccgccatgggcttccaccttccccatggaggtggcattaccagacgtggctacctcaacaaggacacgcacgaacagctgtcagagcccagcgagtgtgcgcagactacgtggaccacgtccaccgacgagcgcctcagactacacagcagcgtgctcaggcggtgccggcgtgacgacggacaccggcgcagctgcctcctgccgctgtcaggacagcccgcaaagctgaccttccgatggacactgcggaagcagatcaccatggaggagctggatgcgctcgaaagagtcatggacgaggccacggagaatgcagacttgcggagagggccatgaacatcacatcgaggaggttcacacaaagaacatatgaagcaagttgcctaggacagggcaaccaagcctagacatacagcctagagatagtactatacgatagagaacggcccaacaaatggcagcagaggactactacgacgtgtaagccaaggggcccatggaacgcaagggggccaatacaataacgcgagcacacgagaaacaggacacaatagcagcataccattgggcaagggacggccacgtgacagggacgcaaccccgggtataccacgttccaatacccgaaagcccacccgaatcaacagagggaagcgtgggaacagcgcatgcacacggggtgggcacggacagggccgcggaagacacgtaacggaggggccacaaaggatcgggagacccccgcaaagcttaccacagcggaacacaacgccgtggacatgaacgaggacacgagaacgaccgcgccggccacgagaacacaacatggagagctagcacacggggagcaccccctatacccaacagtgccggcaacagacccaaacgccatcaacccacccactaacacagaagcaacaacgcgacaacgacacgggggcccgtggcaatacccacgaaaaagcgacaagccgatggagcgcaccccagcccagccagctgcaaagaggcaccgagacaaacgaacaacgggggaaggagcaaaccaaacaacgaacacccggaccagcagaagacaa

SEQ ID NO: 708523 - DNA, 335 bp, Homo sapiens
tgcggctgtgcttaatatctcgatgagatttattcttctttctattgggtaaaatttcataaaaacagattaaataaattttctggtaaagatataacatatataatcaaatatgtgccaaatcacattagattcttttgggtttttttaaacagggtcttgttctgtcacccaggccagggtgcagtgatgcgatcatggctcactgcagcctcaacctcctggattcaaatgaccctcccacttccacctcctgaatagctgggaccacagctcatgccaccacgcttggtttttgttattgttgttgtttgtttgagcaaagaccccaaaag

SEQ ID NO: 708524 - DNA, 162 bp, Homo sapiens
  misc_feature (1)..(1): n is a, c, g, or t
nttggggggggggggggttctcccccccccccccccccccggggttttctggggcccccccttttccccgggtttttttggggtttcgggggggttttttggggggccccccccccctttttttggggcaggggggggttttacccgcccctttttttccca

SEQ ID NO: 708525 - DNA, 440 bp, Homo sapiens
tcacaagaaggcacagcttctaggttaagtcaattcagggggactacaaatgggcagtgccttcattaacacatttcaaacacatagaggtttggcagcgttgcttaagtgatattcattacaacggagtggcagaaaataagatgcggtcagacaaggcggctagggttaacgcggtaaatgtgaacaaagtgggctgcaaagtcagggccctcaagtgatgagaggagatgatgggtaatcttcagttattctggacgaggaggtgggtgatgaaaggtaacaggaaatcaatcaatgcacggcacggggggaaaggtgacaaaataacacctgaataaatgtgcaccaaatgaagagcgggttgaaaaggttacgtaactggcaaagacactgggaatgcataggtggaacattggctgaggcctgctgacatggaa

SEQ ID NO: 708526 - DNA, 176 bp, Homo sapiens
  misc_feature (114)..(114): n is a, c, g, or t
  misc_feature (120)..(120): n is a, c, g, or t
  misc_feature (147)..(147): n is a, c, g, or t
aataagaacattctacctagcccaaacaacattttattacacacaattattaatttcttaatatcatcaaatatccaatctaaattccagtttctccagttatcctgaaaccgncttttncagctgctctgtttttccagggtaggnccacacattgcatttgttcccctttcaat

SEQ ID NO: 708527 - DNA, 487 bp, Homo sapiens
  misc_feature (16)..(16): n is a, c, g, or t
  misc_feature (71)..(72): n is a, c, g, or t
  misc_feature (80)..(80): n is a, c, g, or t
  misc_feature (82)..(82): n is a, c, g, or t
  misc_feature (85)..(85): n is a, c, g, or t
  misc_feature (87)..(89): n is a, c, g, or t
  misc_feature (91)..(91): n is a, c, g, or t
atttgaaaaacaatangaacggtccgcgcgccattgtgttgataccccggaattcggccattatggccggnnaagttctnanatntnnngncatgtaaataatttccatatttctcttttataataaactaatgataactaatgacaaaaaaaaaaaaaaaaaaaaaaaaaaaaaaaaaaaaaaaaaaaaaaaaaaaaaaaaaaaaaaaaaaaaaaaaaaaaaaaaaaaaaaaaaaaaaaaaaaaaaaaaaaaaaaaaaaaaaaaaaaaaaaaaaaaaaaaaaaaaaaaaaaaaaaaaaaaaaaaaaaaaaaaaaatttggggcccctttggccaaagcaattttaaaatttgaaaattttttggattagggccaaatttggggcaatttggaaaaattccccataaggggggtcaaaaaaaattcaatgggcaaggtttaaaaacacccaaattggaaaaacccgggggatcccctttcgccttgg

SEQ ID NO: 708528 - DNA, 131 bp, Homo sapiens
gccagaactaccaccaggactcagaggccgccatcaaccgccagagtcaaccgtggagcgtcgtacgccgtccgtacggtttacctttccagggtcttactactttgaccgcgatgaggtggctttgaaga

SEQ ID NO: 708529 - DNA, 367 bp, Homo sapiens
  misc_feature (9)..(9): n is a, c, g, or t
  misc_feature (259)..(259): n is a, c, g, or t
  misc_feature (283)..(283): n is a, c, g, or t
  misc_feature (286)..(286): n is a, c, g, or t
  misc_feature (314)..(315): n is a, c, g, or t
  misc_feature (327)..(327): n is a, c, g, or t
  misc_feature (357)..(357): n is a, c, g, or t
gaattcggnacgagccactccctctctaaaccttcaatggccttgcacttgggataatgtcaaacatcttcgatgtggcccaacaggaagtgcctgctctggcctcgaccactcctccatcctcatttaccacattgttcctgccgctgacataagatcagattcccttctaattagcagggctctcacgtggcatcagatgtctgtgtgtatcacgggggtcctagcattgcagccagaggaaccctgacccagaggncgtaccgctcctgggtcatgcagnctncacacttcttatggcccctgccttcccnntgcagccacagngggatccttgcactgagggttctctgcctnaggggctttt

SEQ ID NO: 708530 - DNA, 104 bp, Homo sapiens
tgcgagagagtagcggatacagccgggcaaacccagctgcacgctgtcccatgaagtgtctgagcaccagagtgtgtcccagcactgtgtaccagtgcctccgt

SEQ ID NO: 708531 - DNA, 640 bp, Homo sapiens
agcgggggaggccacccagcgaaaattgcggaggtgtgaccggagcctaagaggcaaacttgatagcacagtggagaattctggaacatacttgcaataatagacggctgatgaaaaacaggatacttgctttacaaccaacagctgtcacgaaaagctagacacatagaaaggagttaccccattgagagttcaataatccacgtactattgtagatcctgctggagccaaaattggaaatggaggatcaacactttgtgcccgttccaatgtttggaaaagctatcatggagataacatggacattcttgttaccatcttcattaatgtcactctgatgaatggaagaaaaaagtccagtgaatccatatgttatcacgaatagaaagattagaagatgacctgacagatcaagggaaaagagaagctgacagaactataggaactatattctggtatttagggtacatgtgtcacaagatgcagctcgtgatgaagccttcagtaaagtcaatttaaattaccgaaactgcaaaatgggctgtctctactacattaatgtatgcatgtgtggaggcaagaaatcacatattcgaactcttatgttgaaagggctccgtccatctcgactgacaagaa

SEQ ID NO: 708532 - DNA, 1646 bp, Homo sapiens
ggacgcgtgggtcgacccacgcgtcgagacaataaaatcttgagtttatgttcacttcaaaaaaaaaaaaaaaaaaaaaaaaaaaaaaaaaaaaaaaaaaaaaacaaaacaaaaaaaaaacaaaaacaaaaaaaaaaaataaaaaaaaacaacaaaacaaaaaaacaaaaataacaaagcaaacaaacaacaacacgctgcgccgccctacacaattatcccatagaccagcaccaatacaacataaacataacacaaacatatactatagtataaccagaaaacacgaagcaaccctagagaaaatcaagcaggtatatataaaaataacaaaaaaacaagcacgagccatgataatataaataccacacacgaacacaagtacaagacacaaacaaaccacactccaacacgagacaataaaaacgttacaaccacacaaacaacactttatcgctctcacaagaacagagaaaaaaaacactaaagcaacaaccacaccccatacaccaacaaaaacaaacacatatacataccaacgaaataagtaaactaacaaaacaaacaaaacagacccaacaaacaaacaattttataccacagcgagagagcgcacgaaaagataaaagcagcgaaaaccacgagatgagatggttggagggggcgaggagctacagagagaaaggaggagaagagcgaaaagcggaagcaaaaaagagtgataagggacatccaagatgatcgacgaagtacaaagacaagagaactagtttaaaaccagaggacaggcagactcgggctgtcgagtatcagagctatagagcacggaccaagagcaagagcaggagacaggaagagagaaaaggtaaacaagacgagaggcacaggagaggcgaggagagagagaagggcgagaggagaggagaggagaggagagagagaggagagaggggagaggagaggaagaggggagggagcggtagagagggacagagggagaggggaagagagaaaggggaggagggggagagaggagtggagaagggagggaagagcgaggggcaggagagggagaaaggaggaacagagaacggagggggaagaaggcaacgggcaggcgagaacgaacgcgagggagggacctaggaagcaggcaggagacagcaaagcacagaagagagaagaaggagcgaaagcagcaaagagaagagccaacaagagaaagagaagcagagagaagcagaagcagagacaaagaagaagcaaggacgaaccgacgagagaagaggaaacaggacagacgagagaagcggaggcaagagcacgagcaggcagtaagagagagaggtgagaaagaaaaacagcacgacagaagagcaagatgagtaacaagacaaacaggaacaaagaaagacgcacaggggaactcagacgcagaaatgaacgagatcagaagacaggaaaaagaggaaccagaggaggagagaagaagagaaagaacagaggaagagagagacgatgggagtgtggaagagacaaaatgaaatgaaaaatgaacgagagcaattagactccttgatcacggcactccatgcaatcacagagagacaagctcgacgcggacataacgagaatgcaagaacgac

SEQ ID NO: 708533 - DNA, 1353 bp, Homo sapiens
gccatcgcctatgtaagaaccgtgtactattagccatgtgtctgaccccatcgggtacgacgagatgtcgtcgacgggtatcccttgtgccgcgtctccatttgaccattgtttagtcagtactatggtcccagaatgtacagcatgagagaagttttgctgtgctcgtgtatgcaccgtggtagacgatacatcgagtattggttataagcaaggattcaactgcttgcagcagtaagttattccacgagtcatagtgtgatcaggttgagtgatctgcactacgccatacgatggcactggagctgtgaccgagtgcatactattgtgtgtgatgaacattagaaggatgagaataacttcgaatctctaaagttcgaataacgggtccatggccactactctgtccatggcaaagtgctgtaacccatgcacaaagtggttcccagtattaacagtcgtgcagttggccaacgtacgtgaggtgtgcttgggactgtgacaatgccatgcttgcgatggtttctgcgccataaagtgtaacagtaaacggtcatgcaactatttgctgcgacgcgcccattgggcatgtcgccttaggggggcttccacgcggaaattggttccccaggaggacaggactcacgtcaacgattgcaccgcggtagtcgtggaactggtggagacctaaagcttcgggagaattagacgatttacgacctttggtggctctgtactccttttaaacgcatccaaggagtcagttgccttcctggtacgcgtcagtgattgagcatgcccgctttcccaacccccaatttgtgcctccagcaacgggaatccctaggaaatcttttgttgctaccttccgcttggggaagagttccgccctaattttggcggattgtcccaattgggttatttcccgtttggtttgccccgttcccccaattagccactaagcgttgggaattgggcagggaagctttaaaagcttttagttggacgtctacttgaacacagttaaaaaagaactaagaagtaagccaagaattcaacagaacaatatgagaggtaagagccacagaatgcctgcaggcggggcgcattcctttaatgatccaagggggtgtccggacaaacaaaagcagatgtgtcatctgcaggcaatgggggcacaccttggtgtcactaagaaggtgtgtgttcccaattaggacccgacaaggttttcatttaggtgtacccaaagagttgtgttaaaccttttggccgcggggcaccccccttatatagtagaggtgtccggagcatttaagtttccgagaagaggccagaggttaactctggata

SEQ ID NO: 708534 - DNA, 229 bp, Homo sapiens
ggcgcttgcggcttcaagcgacgcggcttacttaggaacccgggtgatttgaacttaaaccttgcgccgcaccgagttttgcagtacggccgtcaacccgtcaccgctgcctccttgcggttggagaaatcaaggccctaccgggcttccgtagtcacctctctatagtgggcgtggccgaggccgggcgtgaccctgccggagcctccgctgccagcgacatgttcaa

SEQ ID NO: 708535 - DNA, 284 bp, Homo sapiens
ggggggggaacgggtgaggataatggggggacctgtacccatgaggaccttgaggggacccatgacggccacggggagacccatgactgcgctgtttttatgaccacgtaaggggtccagcccagtagcaggggtgtagggggcagagccggccacacttgcaaagaacctcctgccaaaacccggttaaagttcccccgttgcctttttccaaggcggtactggacggggaccctgggggcctccccaagccaggtgcaggcctaaaaattaactgtttccag

SEQ ID NO: 708536 - DNA, 331 bp, Homo sapiens
cacgaggggagtctcactctctcgcccaggctggagtgcagtggcgtgatctcggctcactgcaacctccacctcccaggttcaagtgattctgttgcctcagcttcctgagtagctgggactacaggcacgtgccaccatgcccggctaatttttttgtatttttattagagacgcggtttcacaaccttggccaggctggtctcgaactccttgtgatccacccaccttggcctcccaaaattctaggattacaggcatgagccactgcgcctggccttcaagcttcattttataattagtgacagtgtctactgattgtaaaatttat

SEQ ID NO: 708537 - DNA, 785 bp, Homo sapiens
gtcccttcttacaatggccactattcttaaagacattccaaccttttaccccgaaaccactcctggaggggttctctaccaaaaccctctctctcctcctaaggtgcagggcacccccacaccgcgccgcggttcaagtctccccactcgcagttctctctatgacaaagattgccccctcctctaagtctgacaagggtgtggacatattaacatatattgtattagaaatatgcatctctcgtaagtaaattaccacaaggatctgtagagaagagagacaggccatcattcatgatgcctcccgccgccacctccgcccaccagctttttcatgtgccaagtcatcaactctcgccactgtcagtctgtggatttttgtctttccctcggacatcaacaccacgcacgcatcggtgtctgtctctctcactctgctgtgagccgtccgcgcactctctcctctcacttaccatgcctctctctctcaccgacagcatataaatctcactccttctcttgcgtctatgtgtagttgatcattaatcaccgaggtgtattctctcgctcctccagtcttctctggtccgacgcgtgtgtatatctatctagaagaaaaagacaactgcacgcgctgcggtaaaataaaagaaaatatataacaccccaagctagtacatggtcgaggtgtttcgttctcgagcgtcaaattatctggtggcgagcagttgaacaataacaagagacaaaacaagatattcgaagataaaaaaacccacataaca

SEQ ID NO: 708538 - DNA, 189 bp, Homo sapiens
ccaagccaggggactcatgacttttgcccctccccttcagagcctcggtaacacaagggggcgagcaccacggccagcctgggactggcaagagctgggccaagctgcgctggaatcgcagcaggaaagggaagtgggctggttcttccaccacttccaggctctaaacgccggactaatttcaggaac

SEQ ID NO: 708539 - DNA, 202 bp, Homo sapiens
  misc_feature (2)..(2): n is a, c, g, or t
  misc_feature (66)..(66): n is a, c, g, or t
  misc_feature (91)..(91): n is a, c, g, or t
  misc_feature (97)..(97): n is a, c, g, or t
  misc_feature (104)..(104): n is a, c, g, or t
  misc_feature (117)..(117): n is a, c, g, or t
  misc_feature (127)..(128): n is a, c, g, or t
  misc_feature (155)..(155): n is a, c, g, or t
tntttttagaataggtgataggtgttgtaggtgggaggagaggtcacagtgaggcagggcaggggnatccccctctcaacacaacttaggngccagngcttacnggccaggtagagnaagggctggnncatgtagtgagcccagcatggggagangctgagggcccatggggcgccaaagccagggggcagcagcctccaaa

SEQ ID NO: 708540 - DNA, 932 bp, Homo sapiens
atagttgaatgcagggcagtttccaccatgctgttctgatagtgagtgagttctcatgagatctgatggttctgtaaggggcttatcccttcacttggcactcattctctctcttgctaccctgtgatgaggtgccttccaccatgattttaagtttcctgaggcctcaccaaccatgcaaacctgtgagtcaaacctctttccttgtaaactacccagtctttggtatttcttgatagcagcataataagggactaatacattacatcatcactttggagttaatggctggctgctacaagaattaatgaaagaagaaaagaataagactgggttcttggtcatctttcagaatgtcattgccttcttttgcattggaagtgttaaagtaaactatggcctgagaaggactctgtacttctatatttgagtccttgtggatgaactgtaacctagcttaatagacaaaattgaaaacctaacttggtagcatgtacctgtaataatagctgagtgttggccaatcccagcagccatacttcaaccactcatagactgcagaatgtgcaaactgcattcaaataaggcaaacaccgagtagtacccatttcactgtttctgtacctcacttcgatccctgtacatcactttacttttgtctattaattgtctgacacgagaaccctggagtttctataatctggtggatctgggggtgtcgatcggaatgtcaagccattaaatctttattaaaaaaaaagggggggttaaaaatcctggaggccagttacgtacggtttgtaagaggccaaggaggtaaagagaagggggtaaggaggggaaggtggatttgggaccttggggtggagcccaaagcgggaaaagtggtacgtgtgggtgtgatgattataatataggagaaattagaagaa

SEQ ID NO: 708541 - DNA, 196 bp, Homo sapiens
tggatctcccgggctgcacgaattcggcacgagattaaaagtaagtataaagcaccgagattgcaacaggtcatgcatgtgtcggaatcactggtaaacgcacgtgatcatggcaatccctccccttgcacttgcaaaaacactttgagcgctttaagagattagcctgagaaataattaaatatcttttctcttc

SEQ ID NO: 708542 - DNA, 866 bp, Homo sapiens
ggcggctcggcgctccgggcctggcgttgtggcgccgcagtcccttgccaccttccctgcacctgtccctgcccggcctcatgtaccgcgcgctgtacgcgttccgctcggcggagcccaacgcgctggcgttcgccgcgggcgagaccttcctggtgctagagcgaagcagcgcgcactggtggctggccgcgcgggcgcgcagtggtgagacgggctacgtgccgccagcctaccttgcgccgcctgcagggcctggagcacggatgtcctccaggccattgaccgggccatcgaggctgtacacaaacacagccattgcgggactggtggcaagctacaagcctggaaacaggcgttggagtcctccagaaagcttgatccaaccaacggacaagaagaccctgttcaactgcagaaggcccctttcagcccttccaagtgttgccaggtcatgaccttcaatcaaccagttgaccaaccaattggattgctgcttgccagccaaggcatgccaatggcggtgtgtcgaactgggttccgagcgtgcaagcacagcctaccccagttcttgaggcatcttgaggcgcagactggagggcctcttaaccagaattcctatcaacaggcctcgcacgaagcaagcaacccaatcaaaaacggaacccaaaccaaagttaagcacgccggaagaacccgacgaagcgcccccttgacattggccttcattggagaaactgtggatggcaccaaaagtatgccaattggcccatcacaggggagataaactccatggtgctccaacgcagggctccttcatgattaaggacagaaaacataccttgtgtaacacagcacatataacc

SEQ ID NO: 708543 - DNA, 234 bp, Homo sapiens
ccacaataaaaaaatagaaaaaagatgtgagactgtgagactttgtttaagatgaggctagaggggacagcaggagtcatcagctcataacggctctcataaacccatgttaaagagtttagactattatcctaagaagaacaggaaagccattgatgggcctcagtcaagagaaatcaatggctaacatcctctacatgttaaaataagcagatggggtactacgctttggca

SEQ ID NO: 708544 - DNA, 745 bp, Homo sapiens
  misc_feature (55)..(55): n is a, c, g, or t
  misc_feature (77)..(77): n is a, c, g, or t
  misc_feature (79)..(79): n is a, c, g, or t
  misc_feature (83)..(83): n is a, c, g, or t
  misc_feature (85)..(85): n is a, c, g, or t
  misc_feature (118)..(118): n is a, c, g, or t
  misc_feature (120)..(120): n is a, c, g, or t
  misc_feature (125)..(125): n is a, c, g, or t
  misc_feature (143)..(143): n is a, c, g, or t
  misc_feature (152)..(152): n is a, c, g, or t
  misc_feature (154)..(154): n is a, c, g, or t
  misc_feature (170)..(170): n is a, c, g, or t
  misc_feature (183)..(183): n is a, c, g, or t
  misc_feature (199)..(199): n is a, c, g, or t
  misc_feature (218)..(218): n is a, c, g, or t
  misc_feature (227)..(227): n is a, c, g, or t
  misc_feature (295)..(295): n is a, c, g, or t
  misc_feature (331)..(331): n is a, c, g, or t
  misc_feature (513)..(513): n is a, c, g, or t
  misc_feature (741)..(741): n is a, c, g, or t
acacagcacaagcccatccctggattcggaatacaatgaagaattaaatgaagangactctcaatctgatgagaaanancaanangctatagaaactgatgccatgatcaagaaaaananaaaancttcaaagccttcaaaancagaaaaananaaggagcccagaaaangaaaaggaaaaanttcgaagaaatgaaancatttttcactagcgacancactttttnctctccctcctgaccagtccagctggtctagagaaagccttgttttttcccagagcaaccatgttttngcataatgggagtgacctggtgtcccattataaatnaagggtggtatggctagaagggtatgagcagtaggcttatgtacacctcttatagaggttgatagggctgcttgggtcctccactgtcctctgtcaatctagttagacgtgcttctgaatgactgttgaattgggactagaaactacacctgggctttggagttagatttttgttaacaatnatgagcctgggagcagtagtactaaggcgtcttttgtaggcttgagagtttatcctcatggcctttataggaccaatgctgtgtttttttttaggctgtgcctattatgtggtgtgattttgttaattaatgtttatacacaacagtctccacctagaactgggtgttctttgtacattgtcagatatctctctcagtgtatatttggtatattaatgttccacatgngaaa

SEQ ID NO: 708545 - DNA, 235 bp, Homo sapiens
  misc_feature (18)..(18): n is a, c, g, or t
  misc_feature (135)..(135): n is a, c, g, or t
aggaattcgaggccagtntgggcaatgtagtgggacctccatctctacaataaaatacaaaattagctgggtgtggtggcgtgagccagatgctgccacggcactccagcctgagcgacagagtgagactttgtntcaactttgaaaaaaaaaagagggagagacatggagggaggttgcagtgagctaaaatcacaccactgcactccaacctgggtgacagagcgactctttc

SEQ ID NO: 708546 - DNA, 198 bp, Homo sapiens
aatcgcacgacaaggagctgagaccactgacgcgtaccaccacgcccagttagtttttcgtattttttttttggagatgaggttttgccatgttgcgcaggctgatctcaaacttctgggctaaagcaatctgcctacctcagcctcccagaatgctggggttacaggtttgaggccacttgcccctaggcctaaggt

SEQ ID NO: 708547 - DNA, 923 bp, Homo sapiens
  misc_feature (1)..(1): n is a, c, g, or t
ncggcggtacgcagtatagcgacacgattgacatgggtaggttgggactggtggtggtgccgccgatttgcccccccagctgggggtgatgtccttggccggcgttatgcacctcgcttttgtgggcaccaggtgtcgccacggaaaaaaaagcacggggtcacaacagaggccgggttgtgaagaaggagtccatgtgtacggccagaaggcgccgtggggacagttgaattcgggccaggctcgcagcgtgtgttctgcacagaacgacgatgttcaattgagatacaaacggggaaattaactgagagcgaatatctaccctcttcccgcgccatccagagcggtagggcacctgcaatgtgaaaactttgttgccccaccggagtaggagcatataagcggacgaagcaggagttttgagattttcccccgcgcgcgcccaatctcacgcctgtagggggggcaaaaatgccccacctccgcttgggggacagaccgcctggtgctcatttgtacaggcaccccccgccaaatggggtagtttaatccgggtggtcccccagccacaagttttgggagtccgctcaatgaggacaccacagggccacctttgcggtacacaacacaaagcagtatacgccccagtgccactctactctcccatatattttaacattcatggctttacccgatcctgagtgtgaaaaattgtttgtttttgccgcaacacaaaccacaatatagattgtttttaagtggttaacatacccaaaaggcaattccacacattcttgataaggacgaccctcgctttgagaatactattgagtagaaaaacccacaccaaaacattatgctaatttttttatacaacccaggaaattcttattttttttccccaaagaacaccccacataaca

SEQ ID NO: 708548 - DNA, 202 bp, Homo sapiens
ttagtgggattacgggctcttttatctgtgaattacagtacttactatatctaattttcaccacttgtagagctacccagacttcagaatgttggggtagaaatcatctaaccatgttcatataactatagcacctttaggtggtgggtataggaaataataggttagtagtttaaaaatggggataagctttctttgcata

SEQ ID NO: 708549 - DNA, 1056 bp, Homo sapiens
ctagcgggccggcccgggccagtgacatgcgggcggcgggcggcgcgggcctggccccgggatggctatgttccgcagcctggtggcctcggctcagcatgcgtgcatgccgccggccgggccggcgggcgtgtgacagcggcctggatggcgcatgtacacctgccccatctgcctggaggtctatcaccggccctgtggccatctggcagctgctggccacactgttcttgcgtgggatgtgtctccagccctgcctgcagtgtgccatcccctgctgtgcccactgtgcctgcctgcccttctgaccccagagaagggtggacaaggccacccacagtggatgaagcatgctctcatcctacaaatgcgccctgtcgaggctgcaacaaagaatggtgaccctggcaaaagatgagagtgcacatttcgtcctgcctgaatggtccagtgaggcatgatggccaactgacccaagttcgtccccgtggtgcccacatcacagcctatccccagcaacatccccaacaggtccaccttcgcctgcccgtactgtggtgcccgcaaactggaccagcaggagctggtgaagcacttgtgtggaaagccaccgcagagaccccaaacgcgtggtgtgccccatctgctcggcaaatgccctgggggtgaccccaggtacaaagagcgccaacttcctgcagcaacttgttcaacgaaacaagtactcctacgacacctattgatgggactaccagtatatgacgaggagggcggactaccaaggagaggatctggaccatgaactctctctgaggaactgaacgggaagcagagacagccgacagaagacagagagcaaggggaaagtccccgagaaccatggagaaccgacacatgaaaaccaagaacaggagaaaccaacgtcaacaggagataacacgcaacaaagacagaaacacggaaccaaaagcaaaaaaggcgaaaccgggaccagaaccaacgaaacacaaaaaagagagcagaacgcaagacgcaaagaaagagcagccgaccccc

SEQ ID NO: 708550 - DNA, 215 bp, Homo sapiens
tgctctgacgctctctcttgcttcgggctaactcacagcttcgggcactggctgcttgaacctgactggatggtgacttggcttgggcatatttcctgtgatggtgaccggtgggaccagtgggtaccatttggctcacagctccagaggcagaccatctgcatgggagtctgagaccaccatttcttggctctgtgttgtgttcctgcctttgg

SEQ ID NO: 708551 - DNA, 149 bp, Homo sapiens
ccctgataccacctcaccacaatgtactgaaagcaataacatacgaaaagatgttggcaaggttgtagagaaaagggaaggcttatacactgctagtgggaatgttaattagttcagccactgtcaaaagcactttggtggtatagcct

SEQ ID NO: 708552 - DNA, 378 bp, Homo sapiens
ttgtgcctgggtaggctggaaggggggttgggagaaagccaggaccagatggggagggcaggggcgctgagaaaaaatacacgccacccccagtgtcctccaagaccctcttccctcattgtcctgtgctccctccccaatgtttttttctgtttcagataggtgggggtcaggcgtctccatttttgtccctacatcaaggggctctcacccggcagtttctccttcccatttagaattaggaccttagtatgaatttgcattcgcaaattcatcccaagacagggtgataggttaattaaaagcaaatattccttgaatttgagacacacaataaatggcagcacgtgcagaaaaaataaactcccagacaacagc

SEQ ID NO: 708553 - DNA, 349 bp, Homo sapiens
  misc_feature (7)..(7): n is a, c, g, or t
  misc_feature (49)..(49): n is a, c, g, or t
  misc_feature (67)..(67): n is a, c, g, or t
actgtgntacccacgtttgtggtgggaggacatccgagctggtgacttngcctcacaggcctaatangagtttctctgacacatcatttttatctttttctaatgcagggttaggaggctctagccagatgaccctgcatcaattgtggcagtggcttgtgttaagcaagtgcctgctggagggggaagatgagtgcagtgtaccctcctcagctcacatgccagtgagtctgtgagtgtctcctacacttttttttttttttttttttttttttttttttcttttggctcttttttgtttttaaattggaatatattcctcacccagaggggttctatattccacaag

SEQ ID NO: 708554 - DNA, 326 bp, Homo sapiens
gcggcccgcaacgctcggagtgttctcaatattatcatctgcgtggagtggagctgaggtttggaagtggtaagtgagctgacgctcggaagtgtgtcttaacattctcatccgctgacggtggaagcggaccccgcagatgctcagcaggtatcttgatattatcatcggctgagggtggagctgagtgttggaaggtaattaagcttgacgctcgaaatgttctcttgaaattatcatccggatgagggtggaagcgaaacttgagatgctcgggaggtgtcttgatataatcatcgagggagggtggagctgagggtggaagt

SEQ ID NO: 708555 - DNA, 250 bp, Homo sapiens
cttttggattttttttatggtgtgaaaacccaaattggtattttttaagtctttggttccccaaaattaaataatttaaaaggattttttggatattttaaaataaggagtccccaggcttccctttaccttttatgcctgccttttaaaaccgttttttcccgataaagtagtaataagttggattcctaaaaaactggtttgtgttgcctttccaaataaactggggtgtgctttgcctgggttttta

SEQ ID NO: 708556 - DNA, 393 bp, Homo sapiens
cctagaggatccatggagaccaggctgagggcagtggcttgtctcggctcacggcaactccgcctcctgggttcaagcaattctcctgctcagccccactatagctgggattacaggcatgtgccaccgtgcctggctaatttttttgtatctttagtagagacaggtttaccatgttggccaggctggtcttgaactcctgacctcatgatccacccgcctcagcatcccaaagtactggaattacaggcgtgagccacagtgtctgggccccatttcttacaaaagcaggaatgcctgaggtctcagactgtgacacaggcatagcctctgcaagtttccctggtgcccaaccccatgcaggtcctcccgaaaatggtgcactgtgccgac

SEQ ID NO: 708557 - DNA, 212 bp, Homo sapiens
  misc_feature (16)..(16): n is a, c, g, or t
  misc_feature (18)..(18): n is a, c, g, or t
  misc_feature (28)..(28): n is a, c, g, or t
  misc_feature (57)..(57): n is a, c, g, or t
  misc_feature (68)..(68): n is a, c, g, or t
  misc_feature (82)..(82): n is a, c, g, or t
  misc_feature (94)..(94): n is a, c, g, or t
  misc_feature (107)..(107): n is a, c, g, or t
  misc_feature (126)..(127): n is a, c, g, or t
  misc_feature (130)..(130): n is a, c, g, or t
  misc_feature (148)..(148): n is a, c, g, or t
  misc_feature (154)..(154): n is a, c, g, or t
  misc_feature (156)..(156): n is a, c, g, or t
  misc_feature (158)..(158): n is a, c, g, or t
  misc_feature (160)..(160): n is a, c, g, or t
aattttttcaactttncnttccccctcnagctgggggttttggtcccaagggtcagnttttttccccnggccctcccccccntcatttgtaaancaaagcccaggcngttgtgtgccttggggccnnggnaccccccctccaccttanacaggncncngnatatgggttttggggatgccccccccgggggaataaagggccccaattttta

SEQ ID NO: 708558 - DNA, 1169 bp, Homo sapiens
  misc_feature (292)..(292): n is a, c, g, or t
  misc_feature (772)..(772): n is a, c, g, or t
gatgatcattgctattcacatgcctatcatttgataaagcctcttgccatcaactcacttttgtgggtgtgactcggcgagatacttctctgattgacacgtgccgtcccgtagccctctgtgatttacaatgtctcgctccatccattagacagcatcgcttcatgacatacgtgcgctagctatatccaatagaacaacatattcccatgagtagcactagctgtaatggctactgaatgctacactccgtagaaacaggcactatacctactgggtctcatctcgaacnacaaaccaatacctgatacgcttttaaaaaggtcacatcttctgagtgagcaggggatttaactacacataatgtttttatcaccatgctaatatatgtttctttcaaatactgtacgcattggttttatttttgcctaggaagtctcctttttcttatcttcatctgcacaaggcaaatcaagacacgctaagacagcactccacaatctaaagcgttcgttggtcaaaccactggcttgcgctgcgagaccccgtgacaattggttcaccccccttttataattactttggacctttggaaaacttggcaagctccatttttaacggaacatattcttgatttgacttcttttcctacaccagaaatttcccggcgatacttgtattgcctctattcgacttagctacttttttttcctaagctttaagcagtttatccaaaacctttgccctggtgggaacttgaattaatttgcanagttttgccggaagttacactttcatattccgttgagacggctccactggggaaacaacatcaagacagctacgaagcgggataaggggcgcggtcccatccttatggttgccgtagaagagttccttaacctaacagtcttgactggggagagtttccttcccctgaggagcgtttccacgagcggggcctggctatgcgactttaccatatgggtgtgccataacccattttaggttagcccaatttcgggaagtgtaaagcctggcatacttaaaagacaaggttgtctccagtgcccgaaacggggggcaacaatccttgctaagaaatcggactcttttaatgcctgtttaatttacgggtaacaaaggtgcagcttgactctgtatatatg

SEQ ID NO: 708559 - DNA, 133 bp, Homo sapiens
tggtgggggctgatcgcgggccctcccgctccaaacaaaaaagtcccacacggaacaaagaactgaatgggatgtatttaaacgccatattggttctctctcacactctcccttggtgttctttcaccatcta

SEQ ID NO: 708560 - DNA, 360 bp, Homo sapiens
aacatggagtcattcaggcataatatgtcagattgggtacaggattgaaatactaacatttttaagtgtcctggtttcaatattaataaatacaaaaacaagtataacaatatatacaaccagttgataacgcactgtactgcagatgctcagaaagtataatctcgctctcatatgtatgcaggtatgtcttgagtgtctggatatctgggtagcttcggctggtctataggaagaagtccaggctggtgagatgtacaatgtcacgcaccctagctgtgtgcatcttcatgagttcttctacccattttgattcgtcctctgagctattgcagctctcctcgttgtcaggccggtgag

SEQ ID NO: 708561 - DNA, 121 bp, Homo sapiens
ctctcaggagctttgcttacttacccagtgtgctaggttgtatggcatccatatagtcactccagtgttatggagggttcttctactaatatagttacttttcgcttcgaagcgaaggctt

SEQ ID NO: 708562 - DNA, 333 bp, Homo sapiens
ggacaagaagcggcggagtgcctatcttcctccgtcttcgagctattttaaatttcttctattacagcactttgggaggcaggctgaagcgggcggatcacgaggtcaagagatcaagaccatcctggctgacaaggtgaaacgccgtctctactaaaaatacaaaaagtagccaggcgtggtggcgggcgtctgtagtcccaactacacgggaggctgaggcaggagaatggcgcgaacccgggaggcggagcttgctgtgagccgagatcatgccactgcattccagcctggggaacagaacaagactctgtctcaaaaacaaacaaacaa

SEQ ID NO: 708563 - DNA, 839 bp, Homo sapiens
ggccgcggcggcctcagctgccggcccgaagaggaccagtgccgccgtaccccagctgagaggcatgcatgcgcgtgaggagcggcagacccagcatcggcggcgccatgaacctcctgaccgtgttaactcctcacggacaacgggctagctctactgccggacttcaaccagtgaccacgggatgctatggcgatgtggcgctggacaactgcgatccggagtctataacacgtgattccactaaaacgaaacaccgagaaacaacgaactttctacgacaggagcgagttggccagtgtgtgaacactgtaactttcggctgccaacgtattctacgctttagctagcgtgggtggcacagaagagccgcaaatacccatcccaacacaagtacatcgatctggagattgaccgtgaagacagacagacctgtaacttgcccatagacataggctaacagaagctcagcggaagtcaacgctgcggccgagatacgcaatagtgcgaggtacatgggacgtccattgattcaaggtgttcacatttcacgaggacaatcccgcatcagttggcacagtgttcgaaacctggctataacccgcaaaggcctctagtgtccttggtcccaatagtaacaactaccctactggcctttccgggacacgcacacgggccatgtgcagcttgtggacctggccaagaacggagaggccaccggggaacattcctgcaccacgagggtgtaccggagctggcatggcactcaacctggcagggaacaggattgcaattggatccgacaacggggccctataagaatatggagacacaaaagg

SEQ ID NO: 708564 - DNA, 158 bp, Homo sapiens
gataccacatacaaaagacaaatccacaatagactaatacagcccatctatattgtagtcaaggaaatgcacatgcacatcactataagtcactgtccaccagagctggcaaaaatacaaaagtagtgaaaacaacaggatggttacttcgacgctga

SEQ ID NO: 708565 - DNA, 294 bp, Homo sapiens
  misc_feature (226)..(226): n is a, c, g, or t
  misc_feature (247)..(247): n is a, c, g, or t
  misc_feature (266)..(266): n is a, c, g, or t
  misc_feature (280)..(280): n is a, c, g, or t
  misc_feature (293)..(294): n is a, c, g, or t
gctggtgtagcacataaagaagggtccccaggttgggcgagagcccaagttgagaacaataatgaacaattattgtatgaacaattgttagagacagctaatcacaaacaacctgcgggctcaatgacctcattccacacgtagcacccttcagcaggaccctataaaactttcctccagcccttgcctctttgcaggtagccccgttctctagctgtagctgccncactgcaagcatattttcacngaatttctctaataaatcntgcccttctttacnctacaacgtatcnn

SEQ ID NO: 708566 - DNA, 190 bp, Homo sapiens
gtgtatgggcaaaaaactcgaggactgtacttgtgactaactgtatcacaggttatttacgtttctgttctgtggaaagtgtaaagcattccaacaaagggtttacatgtcgattttttttttgcaccccatgctgttgatggctaaatgtaacagtctgatcgtgacgctgaataactgtcttttcttt

SEQ ID NO: 708567 - DNA, 213 bp, Homo sapiens
ttatccccagcgtagacacagagcaggtcgacatctcccatgctgatcagtagtgggattgcacctgtgacctagccactgtcatctcagtagtcaacatatttgaacctgtctcccagaataaaattttcaaataatattaaaaccatattatgggctgggcatagtggctcacacctgtaatcctaccactttggaaggcccaggccagaa

SEQ ID NO: 708568 - DNA, 93 bp, Homo sapiens
cacagtaaatgttgatctccatagtagagcaacccacaaagacagaactgagtcggcccattctgtttagaaatatattttaaatgtttagta

SEQ ID NO: 708569 - DNA, 615 bp, Homo sapiens
cgtggtggctcacgcctgtaatcccagcactttgggaggctgaggcaggcggactgcctgagctcaggagttcgaaaccagcctgggcaacatggcgaaaccccatctctactaaaaatacaaaaaattagccgggtgtggtgacaggcacctataatcccagctccttgggaggctgaagcaggagaatcacttgaacacgggaagcggaagttgcaatgagccaagatcatgccggtgcacttcaagctgaatgacagaacgagactgcctcataaaaaaggaaaaccgtaacggccaaatggtgtaaatgatccctagcaacaattttttcccaataaagaccattacactattggggccaacggcaaaaaccgaaatggagcatatggttagaatggcagaaggcctccaaggtaaacggttacttggaggctctgatggctgatagtgagaaaaagcccctggtttgaggaaaaaggcctctacggttacaaatagggcctatatgcaaacaacgttaaggtggtgtagatacgctatgggcccatactgtgaagttctcagagttatcgcccattctattacttcaacgccatgcacattcttggggcg

SEQ ID NO: 708570 - DNA, 172 bp, Homo sapiens
  misc_feature (26)..(26): n is a, c, g, or t
  misc_feature (28)..(28): n is a, c, g, or t
  misc_feature (43)..(43): n is a, c, g, or t
  misc_feature (45)..(47): n is a, c, g, or t
  misc_feature (51)..(51): n is a, c, g, or t
  misc_feature (68)..(68): n is a, c, g, or t
  misc_feature (76)..(77): n is a, c, g, or t
  misc_feature (86)..(86): n is a, c, g, or t
  misc_feature (98)..(99): n is a, c, g, or t
  misc_feature (112)..(112): n is a, c, g, or t
  misc_feature (123)..(123): n is a, c, g, or t
  misc_feature (168)..(168): n is a, c, g, or t
ttagagtatcccccgtgtctagcagngntagtgatgttctggnannnctcngtggacatcaggcgcangaaggtcnnctggatggncacatcggcagnntcggagccctggncgccatactcnaactggaatccatcggtcatgctctcgccgaaccagtcagcattnacca

SEQ ID NO: 708571 - DNA, 507 bp, Homo sapiens
  misc_feature (2)..(2): n is a, c, g, or t
  misc_feature (39)..(39): n is a, c, g, or t
tntgctttcaatcgtgtggcctttgggaaccccgcgtancactgccgcctccttctgtcctcgccatgttcctcactcggtccgagtacgacaggggtgtgaatactttttctcctgaaggaagattatttcaagtggaatatgccattgaggctatcaagcttggttctacagccattgcatccagacctcagagggtgtatgtctagctgtggagaagagaattacctccccactaatggagcctagcagcattgagaagattgtagagatcgatgctcatataggttgtgccatgagtgggctaattgctgatgctaaaactttaattgataaagccagagtggagacacagaaccactggttcacctataatgagacaatgacagttgagagtgtgacccaggctgtgtccaatctggctctgcagtttggagaagaagatgcagatccaggtgctatgtctcgtccctttggagtagcattgttgtttggaggagttgatga

SEQ ID NO: 708572 - DNA, 262 bp, Homo sapiens
catatcactatagagtggaaggactgattgagaatgtccaagtccaaataaaatgcatcacaacttacaaatgctgctcattgtagtgagtactaagagatcaaattaatctaacatatggaaagccttatgtcctccaaagatgagtactagggatcatgtgtttaaaaaaagaaaggctacaatgactgggcaagaagaaagatggagaaactgaaataagcagataatcagcatcattggaacctggggacgagtgacg

SEQ ID NO: 708573 - DNA, 130 bp, Homo sapiens
ggggagcggatgatagtccggcaatctcgcgcagtctgatgcgtgccaggtctgtcttcgaacgccgggcgtttcatcgccttgagcactttcgggctggcgtgctggaacgggatatccaggtacggca

SEQ ID NO: 708574 - DNA, 278 bp, Homo sapiens
tgactcagaggatcccgtcttaccacaggcaggggtaattgagaaacgggcacataacagtattcatccaggagtctcaggttttttaagagttttttagttttttttgttgttgttgttgttttgttttttttttggaaatgggctctcgttctgtcgcccaggctgaagtgcagtggcgtgatcatggctcactgcagcctcgacctcctgggctcaagtgatcctcccacctcagtctcccaaagggctgagattacagatgtgagccactatgt

SEQ ID NO: 708575 - DNA, 131 bp, Homo sapiens
gcttaccagcacaccccagagcaatcacagacccaagcagcacgcacctcagggtcagcctgggtgcccctgcccagggcactgtgaccgcagacaccaggaggccaggcctgttgctggggacccccctt

SEQ ID NO: 708576 - DNA, 306 bp, Homo sapiens
  misc_feature (4)..(4): n is a, c, g, or t
  misc_feature (11)..(11): n is a, c, g, or t
  misc_feature (21)..(21): n is a, c, g, or t
  misc_feature (34)..(34): n is a, c, g, or t
  misc_feature (55)..(55): n is a, c, g, or t
  misc_feature (271)..(271): n is a, c, g, or t
  misc_feature (304)..(304): n is a, c, g, or t
cccnttaaagnaacttgactncaactacaggggncctggggaagatgcctgggtncccctaggggccttgccaaggggacctgttcgcaccccaccactccactgggctcgcacaacgccaagggccgccaggagtgttttacatcatgtcctgaggcctacctttcccccaaattctggggcccacagcctagggagccaggtgatcagggcctcggctgtggggccagggacaccatggccctggggtactacgtgtccacacatgctncagaccctggggcaaggtaggccaggggttttnac

SEQ ID NO: 708577 - DNA, 238 bp, Homo sapiens
gacagattgcttgaactcaggagttcaagaccagccttagcaacatgataaaaccccatctccataaaaaaatacaaaaagttagccgggtgtgtggtgcactactgtagtcccagttactggggagaggaatgtatgcactgtagtccagctactggtggggtagcggggagttgggaggccaaggcagctgaggtggaggatcactcagccaagaggtcaaggctgcagtagctga

SEQ ID NO: 708578 - DNA, 369 bp, Homo sapiens
tgcatgtatgccaggcattacagaatacagctataaacggcgctcccaacacctgggctctgactcacccacacccacttagtgtccactaagtactccaggatgactcagtttcagccacatctcaggtgagagtcactctgcatataccttggcttacctgcaaatagcctgaacttgaatctcacatacagggaaaactagtcatcactcaccaactcattgactaccctcaggacgtcctgcagaactcaggcgtccttgaggagaacaagtggatcataacaaaaacagggttacaatcccttctgcttcagagtactatcagtcagactaaccataaattacgctacagaaacaaccaacccc

SEQ ID NO: 708579 - DNA, 236 bp, Homo sapiens
gagtaaatgtcacagaaagaaagggcaagagacacttaacctcttgtggataaactgcagtataacgagagaaacttcatatagatcgcctccctggctgcatggtcaccaggtgatgtgccacactcaggcactgaagacagggaacgtggggatcctatcagcaagcacctcatcatcaactcccaggatagaatgggcaatgggcaaggctcaaggagtcctccaccaaggct

SEQ ID NO: 708580 - DNA, 243 bp, Homo sapiens
aattattaagagttagtggtgaggaattttaaatttaatgttctatgatatagcacaacacagatttatttatttattatgaaatgggatcttgctctgtcacctaggctggggtgcagtggcgtgatcttggctcacttcaacctccgctcttggtgcagcatcctcctgcctcagcctcctagtagctggattcaggtcctcactcaccagctattttgatttagcaacggggtcccacct

SEQ ID NO: 708581 - DNA, 100 bp, Homo sapiens
cccccccgggttttgcccgggggggggtttttcccccccccccccggcttttttaagggggtttttttcccttttggggaagggaaaatttttaatggga

SEQ ID NO: 708582 - DNA, 718 bp, Homo sapiens
tggatagctgttccagaggatccctcaacgctgctcacatcggtctgacccaaagtcccacacgcagggtgggatgcggagatgaaggtcctgccagtgtcacgtggcggcttagatgacaggtttgaggggccttatcggcttggtcatggtggcctcgctgtggcctttcgtatagaaaaatctgcaggtgctcattgttctctgagtgactcactggaggtaacagcctacatacatgagcataaatgtggtcaaacatcccactcagaaatattcgtcataagccaaggcgtggtggcatacacctgtagtcccagttactcaggaggctgaggtaggggaatcccatgagcccatgaccgaacccctgcgacaccagcctgggtgacagatggagatccggtctcagaggaaacacatcagatgtatggtgtagctggaaaccgacaagacctttcaatgtccagtacgggataaagaaacttgatagtcattagaatgactacagcagtcagtgaaaatttgcagtcatgtgaaaaaggctgatgtgaggtcaggacacttctgaaaccactgtaatcggagctaggctgtgggctgggaggggaagatcctttgagctcaggagctcgaggctgcagtgagccatgattgtgccactgtactccaggctgagtgacagaagcagaccatctcctaaaaacacaaaatgttt

SEQ ID NO: 708583 - DNA, 348 bp, Homo sapiens
  misc_feature (118)..(118): n is a, c, g, or t
  misc_feature (121)..(121): n is a, c, g, or t
  misc_feature (221)..(221): n is a, c, g, or t
  misc_feature (242)..(242): n is a, c, g, or t
  misc_feature (248)..(248): n is a, c, g, or t
  misc_feature (251)..(251): n is a, c, g, or t
  misc_feature (266)..(266): n is a, c, g, or t
tcagctcggtacactcggagagtgcaagtcaggaatatcttcatgtcacaagtgaatggatctattctgtttttctgaaacagtctcacgtctatctttgcttttcccaccctttttnttnttttttaaaacagagtctcagtcggtcacccaggcgggagcgcgggggtacgatctcggctcatggcagcctcggcctcccgagttcaagtgagtctcangcctcagcctcatgagtagcnggggtnacnggtatgcacaaccangccgggctaattttggtattttaagtagagtcggggttcatcaggtgggccaggcgggtctcgaacccctaacctcagggga

SEQ ID NO: 708584 - DNA, 171 bp, Homo sapiens
gcccgagacacaatgtaccctttatagccaccaaaacggatattctgttctcgtatcccgaccgcagtgactctagagactgacgggagacattcacttgaactcgtaggcggcggtttcaatgatcctaaattgcaccattgcactccagcctgggggacaagaacgaga

SEQ ID NO: 708585 - DNA, 976 bp, Homo sapiens
  misc_feature (5)..(5): n is a, c, g, or t
tgttnataatactacagtatatagctggtgcggaagaaagagagaacaacgcaacgatcagggtccgcatgtgtccggtatgttgtgtgtacaaagagtccgccttattgtgcggtcttgttttctttagcgccctgtgtttcgcgaccacaatataagacgggggcccacactcttaattctgggatactgtgatatatctctacgcgtctacaagggttccaagaaccggctccgaatgtgaaatgtgtaaatgcccggcgaatctgcccggggacccccagtgtagtggatcaacgcgtgcaacgcgccccaaattgtcgggaccctgttgtctctcccccggggtcacacctgcatcgtggatcacgccttgctgacacagggaccccgagggcttttgtcatcaaccgcggtcgttgtcacgccccctgagcagaagtcccgtcgtgtgggcgggacactcttcggcttattcaaatagtggagaagatttccttacaaacccaagagttcttgtggcgcgcaacactttgtgacccacgcataatggtcagggggataacttcaacgatttatcataagcctcccctctaggaagcttctcagatacatctcagatactagtcataagtgcctcccgtaatttctgccatctctgatttaagccactgcagatggtatagtatagacacccttgatagcccactcctgtagagtagaacgttttccccgaatggtacgcccgcgcccatcgagcgctgccgtcgacatggaatgagatccccgtgacctcctccgtgagcccactggagagacagtctcattgccgctatgtgaacgtctttgcggaaaggcagggacgtctgttcaaacagaggctgtttctatgcaggtgcgtcttacggagaaaccaacagtcttaatcgcgcaaacgggcgaaaaaaaaataaagttctttctgaaaaacaagaca

SEQ ID NO: 708586 - DNA, 254 bp, Homo sapiens
  misc_feature (85)..(85): n is a, c, g, or t
cccggggggcccccccccaagcccggttttgggggttttccccccttttttttcccaaggggtgggcgggggggggggaaaaggntggggcccttcccgttttccccagggggggggcctttcccggggggatttttgttttaaccccaaagtttcccgggggttttttgtttcagccattttcccttttttttttttttggggggggtttgggggggggttttcccaaaaaaatttgtttttggggcccccca

SEQ ID NO: 708587 - DNA, 1238 bp, Homo sapiens
gatctgtgcgttggtgcgctcagtgtcatgtgtctgtgtccctcatgccgtttgtgtgtcgtcgcggatgttcttcccggtctggggtccataattcgccagcctcaccctttttggccgcccgggggggccccctgttatccccgctttggtttgtccggttccccgtgcgttgtgttttgttcatcgacagcgtttggggatttttttcccagtgtgtactttttatttccggcaaaaagacccccctggggatacataggttttggttttgggctttgagtctccacctggcttttcttaggggttttcttccgtgtggtgccacagccccatatatgttgtcccactattggacatttgtagtgtttgtgtcttcctcggggcatatgtgttcgagcagtccgtggcgtttcgccgttgtccttccgctttgtctgtcgccacccgggcgttctcaaagttttttttgtcctggagctttgccacccccgtgccccgggggacgcccctttagtgcaaattgatttcttcttggcccaggggcttttttggggccccttttgggatttcaattcgggtcgtgttttccccgccgctatgggtgtgccctgggcttgggccatttgttaattggcgcgaacgtctatccactttgaacactttcgttacttaccacggaaccacagttattttacgttgtttagactccacatttccgcctaagtagtgccctgatcccaattaaagggaactcgtgattgtgcccattccactaaggaaggcttcaattcacctgaattttccccctattttctccagggctaacccctctatgagcccaacctataccccccaaatccactttcacctattcaataatttcaatccgggcgtaaaaattttaaaacttttttcccaccaaacacctctttctcgcgcctattccggaaatggccccgaacgcttatctcgcgagctaaccccgaatgcactacacccaccactgtgaaccactcctattcacattctgtataggctcacattacttttttttacacgcacgtgtatattaataattttcactgagatttgagggagccttcgctttcgaaagcgaaaagtcctaaatatgtatgagagaaccctccactaaacacctggaggtgaactaataatggagatgccccccaccctaccacacatttgaagaacccgtatacattaaatttagacca

SEQ ID NO: 708588 - DNA, 879 bp, Homo sapiens
  misc_feature (54)..(54): n is a, c, g, or t
  misc_feature (79)..(79): n is a, c, g, or t
  misc_feature (84)..(84): n is a, c, g, or t
  misc_feature (92)..(92): n is a, c, g, or t
  misc_feature (95)..(95): n is a, c, g, or t
  misc_feature (124)..(124): n is a, c, g, or t
  misc_feature (135)..(135): n is a, c, g, or t
  misc_feature (150)..(150): n is a, c, g, or t
  misc_feature (159)..(159): n is a, c, g, or t
  misc_feature (166)..(167): n is a, c, g, or t
tggaaaatgaaaggttccccatcataggggattcttaagcacgttctccacgtntgcggggtgctagcgggatgtcttngggcntaatggtnacncgttgggcagggatagcacacaggtgggngtcttcaaaanggccaaccagatggncctcacggncctccgnncaaagcaccgatagcggcgctcgggaagcgcagactcggttttaaagttcccggagcaatttctcgcaccagacgcgggaggggaagtggcgaactcaaaagtcaggggactctcggactaacgctcataaattcagcggagcgccacagtaccgggcctgtaacgagtgaggtttctcacccctccagtagagggcggactctggcgaggggcttgtggtagccagtggctctccggggtggcttaaccaccggtcgatatgggggggcagtctgggttggtaacgagccagggtgacagagacctcctgataacccccagttctccttcggcggggagctcggagagcaaaaggggggctgggtggaggaaagagggaagaatagtctcgagtaaagactagcgaaaaatgcatcacaaaggagtaaagagacacccccagaggggggaccgaacacccttcgagggggagaacacgacccacggcgcccacatgggaagtgacccaccacaaagaaggttattgagacagggagaccccgcaagacagcaaaacacaaggacagagcagtatgacgccccaagaattaccaccaaaagagaggtggaaccacggacatacgcgactaaggaaagcggcaacaactgggccaaaaggaacacccgaagaccggaggaacccgcaaggaacagagacagtgcccagatgct

SEQ ID NO: 708589 - DNA, 156 bp, Homo sapiens
ggctcacttggttgcctaactcagcctcctgagtagctgggattacacgtgcacgctgaccacacccagctaattttttttttagtgtgtgtattcgagtagagacagggttacagcatgttgcccaggctggtctcgaactcctgagtctgcctg

SEQ ID NO: 708590 - DNA, 91 bp, Homo sapiens
gctcgacttttttttttttaatatggagtctcagtctcttgccagtctgaagtgcagtggtgcagtctcgggctcactgcaacctctgctt

SEQ ID NO: 708591 - DNA, 683 bp, Homo sapiens
  misc_feature (69)..(69): n is a, c, g, or t
catccaacaacaaccaccctgtccccaaaaggccttcggataccgggatatatccccactgttagttancctccacgaagtgttttttcttcccacaggattttttctgagcctctttaaccacactccacgccctatgcccgctatgccccccccatttataggaagggcacactggcccgcccaacacggcactcaccccgcctttaattccccctatggagaagtcccacctccgtgtagcaccactccgctatttatactcgcactacacaggaggtattcacatcgaccctgaggggtgcacccacatatggtgctataatatgagaaaccacacccggagacccacatatatttcacagcacctgcttatattaccacagtttactgggtctctattttaccctcctacaacgcctcagagtacttcgagtctcccttcaccactttccgagcggcatttatcggctcaacacatttttgtagccaccacggcttcccaccggagcttcacgtcattaattggctcaaatttcctcactatctgcttcatccgcccactatatttcactttacaacccaacatcactttgggtttgaacccccccctgatactggcattttgttaaaagtggtttgactatttttgtaagtctccatttattgatgagggttcttta

SEQ ID NO: 708592 - DNA, 286 bp, Homo sapiens
  misc_feature (3)..(3): n is a, c, g, or t
  misc_feature (186)..(186): n is a, c, g, or t
gangcctcctttgtacctggagcagtttctccccgcttcctctccccgtctgggcggagagacaggaggcctaccggtcgcatgctcagcaccattcctttcagactgtaggctggaccagtgacccaacacgacccctcacctttagggcctgggagggtggaggagggtctgctttagactganttctttttggttcaggcttgtgggttgtgctgggcatcacagacaggcttacaatttgagactgacgaaagcaaggaaggagaaaggaacagggaaaaca

SEQ ID NO: 708593 - DNA, 563 bp, Homo sapiens
tactattgctcaaaaaaaaaaaaagaagctcagtgccaccctagttgtaaaagtgtgcattttaagttcctctagttttatgtcattggtatagtatattctctgggactataatctgtgtttaaacaaaaacagcaaggaggtacctcctctttcgcctttggacccccctgctctttctgtctctgtacgagggagcttctcccgttctttctccctttcctttcttgccttatttaaacttctccacttcctttaaaacccacttccacgttgttgctccgcgttcatttttttctaatttggacattgaggacccaagaaccccgggttttccctccactttatcagagcccttatcattttgggttgtgtgggccgggaaaaggaaatttcaatcatcagacgtggtgtgaaacctcggaatttattcttgggacctcaagccggagaggatcacccaactcatggttttttgaggattcaaccccatggattgggctcggtttaaaggtctatctgagatgcctgatggaccagagtttcatcaaagccaattcaaa

SEQ ID NO: 708594 - DNA, 342 bp, Homo sapiens
gagaatgcatcaccgcactccagcctgacgacagagcgagactctgtctcaagaaaaaaaagaatggtagagtaaaaagaaccctttgctgagtaaacgagcctaatattttgtgtttttatgagagtgaattagaatacccagcgataaatatttaccacaacctgtgtccaatcagtgggacattaaacacagattgtacaatgtgagcttgggagttaatggcccagattttactagtcacggcagaaaagagtccggagtagtgtagtcttgtctatcactgaggaagaacgcttgaacatgatacaactaaatctacatattacgtgacacaaagct

SEQ ID NO: 708595 - DNA, 408 bp, Homo sapiens
ccccaccatccttatccaaaagcagccatccctagtaaatgtttgcactaaaaatacaggacacacttatttatgactttccaaacagcttattaaataaataaataacactgagctttatttaaaggttccagccaggtgcagtggctcatgcctataagaacattttgggaggccaaggcgggagaatcatttgaggccaagaggtcaagaccagcatgactaacatggtgaaaccccgtctctactaaaaatacaaaatttagccagacatgggggtgggcgcctgtaatcccagctactcgggaggctgaggcaggagaatcgtttgtacccaggaggtggaggttgcagtgagccaagatcacgccagtgcgctccaggctgggtgacagaacgagactctgt

SEQ ID NO: 708596 - DNA, 110 bp, Homo sapiens
gtaactggggtctgtaagttttaatccaactgttctattgaaaaatacactatcttgcaactgcgcttgaagctagcacaaaaatacagtttttacaaggaggtaataaa

SEQ ID NO: 708597 - DNA, 232 bp, Homo sapiens
tgacgtgtatgactgagtcgtattgctgtacagtagaaattgacagaacactataaaccaactataatgaaaaaaataaaaatcattaaaaaaatttcacactcatattttgggttctcaacatttagaattaaggcacagacaagaaaatcttctaggtcaattatctccccaacattcaaagggatttcatgtccccaacgcttcgtttgggtttcccttgccatgctgg

SEQ ID NO: 708598 - DNA, 625 bp, Homo sapiens
  misc_feature (625)..(625): n is a, c, g, or t
ggtggttggtctgtctggtctcggcctgtggacactcagtcacgttcttggggtgctgcaggcgtctcatgatatccgaggaccgtggtcttcctcacgcttgccactgagtgctccgtattgcgaggggtgtagcctggtcttgtcgaagtggagccgttggggttgggaatgagcgaggcgatgagcgccagtatcaggtctgttgtacatgtagccaggttaacgcagggtggtgatgctggctgatagtgatggtatacatcaggtggttgatctggtagaccgatgggttctggatgttcagggggtctgtgtcactccggttcagggctgtgttgtccagcgccaccacagcgttctgcattctgtggtcgtgcctcttgacgtgtgcggagtgcatttgtcatggctggtaccctcctttcgctcatctcgtcctggttgggaaacactgagtatgtctgcaccagcttcttaggatacctgtcattcagccgttctaagaggtaggaacccagtccagagcctgtccccccagcaatggagtgacacagcacaaagccctctagactgtcactaacatctgcctcccggtctatgatgtctaaaatggtctcatggn

SEQ ID NO: 708599 - DNA, 488 bp, Homo sapiens
cacgagatttggtatgactcagatcgtggtggactgagagtccaaaggatcgttgtgtatcttatgtaatgtaaaagtaaaaacgtgtaagaaagaggtagtaaataagagaggtgtgaaaaaatgcatacttaggcaaaaaccgcgtggtgaaacatcttcgattagaattcactttctgccgggaaagctgctgcataggcaaagtgtcctttccaacgcttagggccttgggccccaagaccccgaagtcaaagcgatcccggctgtgttgggataatttgttccacattttatccgggggcagtccccagcagaccccatccccgacctgcactagtcctgcgctctgatgcttcttcactgtccacccttgaggtttattttgaagccaaaagaaaaagacagctgggcatgttgatgtctgctgactatgccacaggttgaggggagaggcgatctcaacaatccccctgtaataacatcaa

SEQ ID NO: 708600 - DNA, 343 bp, Homo sapiens
  misc_feature (270)..(270): n is a, c, g, or t
tgaaggagtttttgctcgtcgcccaggctggagtacagtggcgccatctcagctcactgcaacctccccatcccgggttcaagtgattctcctgcctcagcctccacagtagctaggactacaggtgcctgccaccatggctggctaatttttgtctttttagtagagacggggtttcaccatgttgggccggatgatctcgatctcctgacctcaggtgatccgcccgcctgggctcccaaagtgctgggattacaggcgtgacatctngcacccggctcgtgttttaaggaaatagctacctaaggtattcttattaaaacaaatgaacaaaaagttttcc

SEQ ID NO: 708601 - DNA, 415 bp, Homo sapiens
  misc_feature (86)..(87): n is a, c, g, or t
tccccatcccccccccccttcttcccaccaaagctccgtgttaatttaattttggggaggttgtttggggggagaggacccccccnntccccccccccctttttttccattaaacacaaatgtgggtgtgggttcccccccctttttttcccccgggtttaagcccccttgaagaaggggccccccccaaaaggggtttttttgaaaaaaaaatcccccccccttttataccccctttttttagggtgccccctttattcccccccccccgggggccctccccccccccccaaaaaattttttggcccctttttttttttccccccccgggggtttttttaaaaaaaaaagggggggaaacccccccttcccgggcccattttttttaaaacctttttcccaaatggggggccca

SEQ ID NO: 708602 - DNA, 284 bp, Homo sapiens
  misc_feature (76)..(76): n is a, c, g, or t
  misc_feature (131)..(132): n is a, c, g, or t
  misc_feature (222)..(223): n is a, c, g, or t
tgtccttctgaaacacaaagtaacaatgaaatgtccccaccacagaagacaatcaatcctcagtggcctcccactnggcaccgctttatttggatgaccatgcacgcctaaacagcacagtgtcccagcannatccttgcctgaatgcttgatcacgtggtgatcctctagatgtctgaccttgcatgtgcatgcaatgccttgtgcacttggcctgtctgnnttttacaactgtctgttgacttgtggaacaacccctgtgctgccccccccccccctccccc

SEQ ID NO: 708603 - DNA, 319 bp, Homo sapiens
aacgaagtgcaatacagattttagtagaagacagatctggagaaagtcatattactatagtgtctcaacaaggtgcatacttggataaaaagaacatactgcattaattaaaaagaaaaatccaatgtggaatagcccactaacaatacgtttgtaagaaacagaaataagcgtttacatgctacaaatatttctgcattgatatcacatataactgtgacaactatacaactaaactgatctgtggaatttttcatggcatcatttttataattatgtttgctcacctatactgtccaaatgtggtacttcgtttcgc

SEQ ID NO: 708604 - DNA, 361 bp, Homo sapiens
ttgtatcactgagcatgagtgtagcagagggatcttactcaaagttgtcactgcaaatcagtgcatatcaaagtcacacgtctgtgaacgaagtataaggcaatctgcagccacatacttttaaaactatgttagagttacaactacctaggagatgtcatatttcccttctggtcttcgtcaaagcttttctttgctgacagcggtgaagctgagctgagcgtggtggctcaggcctgtaagcccagcactttgggaggctggggcaggagaatcacttgaacccaggaggcggaggttgcagtgagccgagatcccaccattgtactccgcctgggcaacaagagcgaaactccatctc

SEQ ID NO: 708605 - DNA, 233 bp, Homo sapiens
  misc_feature (150)..(151): n is a, c, g, or t
atggtagtgaccaaggaggtggaggagaagggaagttggatgcggacagactgaccatggctgaacatcggcgtccacagggcagtccatgcacatacccctccggttgcgcacactgcatgcctgggaaaggccagcactttatggacnntggggaggccccaccccctccccacacccctgctccccactgccgctgctgcctcaataaatctgctgatttgcaaaaaaaa

SEQ ID NO: 708606 - DNA, 118 bp, Homo sapiens
attttatctgaaggctgctaaggaagagagaatacagttttctagagaataagagtgcagtgtatggatctgctgcaaaaccctttcctgttactagctcctatgccttctactactt

SEQ ID NO: 708607 - DNA, 314 bp, Homo sapiens
attcgagctcggccccccagcggctacaagatttagcaattaataattgctatttgttaattagcacttattagccgcttttgaatggtctgagggcttccggcctgaaggctgaccgcaggcagcaatcgcctggctttcctgttggatgcaaataaagtttcattctaacgcgaacgattttgctggactggctgggaagcaccctgcccggcctgcatctaaagtttcatcctaatgcctagcagcggccttcaaacggtctgaaaaccacggagccatgcaaatatagtttcatcctttcctgcattttg

SEQ ID NO: 708608 - DNA, 212 bp, Homo sapiens
gtagaactctaaactgctcttgaggttgcagcagtaactcaggtggaaagcactagcttaggttctgttgcctctcattcagtttcagtagtaacttggacaacctgactcctctgtacagtctgtaaaagtgatctttaaggacctcactgccatattctcttgttctcaacagggatcctccttccactttcttggtagcatagaactag

SEQ ID NO: 708609 - DNA, 190 bp, Homo sapiens
cacgcccagctaattttgtatttttagtagagataggtttctcccgttggccaggctggtctgaaactcctgacctaagtgatctgcccacctcggcctcccaaagtactgagattacaggcgtgagccactgcgcctggcctgcctctgcattttcttgattgtgctcctggtcctctttgggtttagg

SEQ ID NO: 708610 - DNA, 1330 bp, Homo sapiens
  misc_feature (154)..(154): n is a, c, g, or t
  misc_feature (427)..(427): n is a, c, g, or t
  misc_feature (767)..(767): n is a, c, g, or t
  misc_feature (1129)..(1129): n is a, c, g, or t
  misc_feature (1330)..(1330): n is a, c, g, or t
gatacatccatggcgggtggttctgcttcaatgcgaggtggtgcaattgcggcgactaggatgcgcgcagcccacgtgcaggtcctgccgagggccttgccggagcagccacggtctctctatctgatcccggggacgcacatgacacgtctgntgtgtccgcttaggattcagcctcgcgtcgatcgtgacgttcgcctgtggagaattggagccaggccggccggcgatgttggtcggcagggtctagcgctggcctgagaggggcggcggtgagaggctgagagagacgtgcacggcagcgttgcgtcgggaccacggatacatacgggtggcatgctcttcgttcgcgctagagtaattcacgggacctgtagcgaaggaaggtggaacgtacgtgcacgtgcccttggcggtgttgtacctnctcgccccgggagacgcgcaacagtgtggccactgggaaaacagcatttgcgaaggcctcccccatcgcggggaacttggcccaggaacaggtttgtaggatggccgttgctttccacaaaagtccggggccttccgttacactactttagtcacgagacggggtacgcgtggggcggcatccacaaggggctcggagattggcggtagagtgtcgcttgggcacaagactcgggaggaggctcccaggattggcgcaaccagtagatacggcacttgggaaaccatggtcgggagccatggggattatcagacgcgaactggattctatgaagcttctnttgaaagaggtaccccaaaagggggcaaccttatcgaaattgacaaactgtggacatcccgagcaaaggaatgacatattgcggttccttaatttcaaggtttgtaccgatattcccttctagcccaagcggtgaacagccgagggaacaaaagcaaagactttaatcaccccacattttgcgattgagagtcccttgggagaagcacaattggtgggaagaggggtctggaggacagcagcagaggagcccacacgcggatagcgcgagaggggtgagcaccaaatacaggcagcggaggcgaaagacgataccccacaatgtgtgagcttcaccaggaaacgccacaggtggcgcgagtncgcataaagcaacacggcagtgtcgccagccagatatagaaagctataggccgccaaacccgttgtggaacacagagcaccaattcctagtggagcccatttttccgtgggggggagagaatccgcggagagactcagaggaactaggccacagggtgagactagatcgacaccaaacaacacattgtgcaaccattacan

SEQ ID NO: 708611 - DNA, 374 bp, Homo sapiens
gcatccagagatcgaagaaaagcctgctggtttaaaggtaacctctaggtgtagcactacgacgcaggaatgaagagaatacagacctggaaacaatgccaaacctaaatctagactcatgttagacctgtcagtaagttacctagcatctctctaagaataatccgcatccaggtataactatggagaaaacggaatgaggggcatactctataagccaaaggctggctaaaaatcacctttgtaaaagaatcaataattctgaatatgcatttacaacatgtatttacttcagtaagagctcttttagaaaccattaaggacggtaagaatatctgtacacacagtcatgatatagaaggaaattcagacaa

SEQ ID NO: 708612 - DNA, 348 bp, Homo sapiens
gaaaaagaatggaaaatcttgaagccttagaattaggtaattgtggccgggcatagtggctcacccttgtaatcccagcactttgggaggacaaggtgggtggatcacttgaggccaggagtttgagaccaacctggccaacacagtgaaactccatctctactaaaaatacaaaaaattagccaggcatggtggtgggcacctgtagtctcagcctcccgagtggctgggattgcaggcctgcgccaccacgccgggctaattttgtatttttagtagagacgaggtttcatcatgttggtcgggctggtctccaactcctgacctcgtgatccaccagcctcagcc

SEQ ID NO: 708613 - DNA, 1737 bp, Homo sapiens
  misc_feature (646)..(646): n is a, c, g, or t
  misc_feature (883)..(883): n is a, c, g, or t
cctaggtgtccgagatccattaccccttagaagccagtactgggggatcgaagttgagtccatctccatcccttgcttggtgcgtactaggtagcaagcttccatagcgtggctggagtccgactccagtacatggtgcagtcgtgagtctgaataaagtgccgggtggcattcgtgcacagaagtgaagcagtcgtcaagacaagtctggagcaaggcagtggcatgttcgcgctatggctacagcgggttcctctcaaacgctgatagccttgcgcgatacatccgagatgcacattgcaaggtggacatgtgaaacgtgggtgatccaagcatcatgagatacgtcccgtgtgggtcggcacatctaggagagcgcatgcgaatggtgatcttcattggtgggacttgatgcaattttggatagccgtcgatgtgagcgagcaaggcacgtacctttctaatttcgacgatataaacgactcggagggtaaaccccgcggtgtacctacttctgtacaagggcggacattgaagcttgcttgtccttgctcctcatacggactctagttttcggtctgtgggcctttggtggtgggcttcctcgtgcttgccaggaagttatggtggcaccaagtgcgtgggnggtcatttccttttctccaaggagtggcatagtagtggggggctaaggaacgcctcctggaacgtaaaggacctactgcggtcccccattttgcctccgagttgttttgacaacacgggacttgtcgcgaggttcgtttcgcaaaacaccctccgcgctactatatgttggttctgcgcccatggtattcggaagatgcgatgtaggaatttttggtggcagcttctccgcaatgantgagaatgtcccgattttctgctgtaattagttaccacgttacaacgcaagaggagttacttggtaagggcgtgggaagggtgaagaatcgaaagggggggaaaaggggtcctacgaaggaggcgtttaaaggattataagagagaaacagaatttggaggcaattaattaaaaaaataacggtggagttcactatttgaatattaaaggaaaataggatagaccaaaaaatataaacgtttgggggtttatggggcaccacgttggtgttttgaaaacaaaaattatatttgccctatggggaacagggagcgagacggacttagaaattcaaataaattgtgcaccgttatgtgatgatacacaaactgtggtggcattgtgtgtgctaacaagagttgaggtgcgcgggccaaaagagggatttgtgggacaacatggcgccatagtatgtgtgaaataacccacatgagaatgtatatgtggtacaggggtgatatattgtgtaacatagtgaagttcgatataacacactggcgagaacaatccagtctcctacaaactgtgaagtgagaggacccatcttttgtgggcgcagtggaacaacacacgccaacagggacttgtctgtacagcagtgacaagtataggggcgaataggtagaaacactagtacacacagcagtagattacgaaagaagtgacaacaccaggggcgtagtacactaaaaccgcctgtagtagagggtggtgctactgtgtttgtagtccatagcatacacgaaatataacgagaagcgagaacagagtgtgtgcaaccgacagcatgacacttaaaagaaaccactcgcggc

SEQ ID NO: 708614 - DNA, 1336 bp, Homo sapiens
gatgagagtgagagaggtatgaaggttattgaaaaccgggccttactaacgatgaggaacacgatggaactccaggaacactccaactcaaagaagctaagcacattgcagaagaggcatgataggaagtatgaacgaggtggctcgtaagttggctgatcacttgagaggagagcttggaagcgcagcagcagcgtacacgagcctgacgcctggccagcaggtcccggtctgccgagcagactggactgacgcagacttacgacctgactggaccacgaaacctgcacagctgctctgagctgctgcctgcaagaaaaaggtacatcatcaaccacacagcaagactaacagtatgcacggaagagaagtccaagcacttcttcaacctgactaaacaacctccaaagcgcaagcgccagcaaccaccccggatgccctgccgactccctgccgagcaaggacgcactcaggcataagcccgcaaagaccgtaggcaccatgacaacccaccaacacatctgacactgcaccgccatgggatcaacccacttacacaccctgacaaactggccagccaacacacgaaagcgaagccacacaatcaatgctaagcaacacacacggaactggcttgagcacccaagaagccccaatgcttactcgaccccgtggcgaacttgccacgcatcgctaccgcaagaccggcccccccccaggcttccgcaaccgcccttagccttgccttggcctccccttcccccttcctggcaccccgtaggtaactcccggccctttgggcgcgccccactgcccttggccggcgcgcccacgctctgcaaccccgtctctgtgagagcttgggacacgcgggctaggcactgctttatcgacgaaccttggggttacggcgacttggcctgctattcgctgccccttagttcacgaagccaacccgcccgcacttacgcttttcccgcctgggtgctacgtatatgcaacaccgcccccacacacagcctgggtacttcctaggccctgtgcttttcaccccgggcacgcagccttcccacgcgccgcggcgcgcgtcctaaccgcaagcggccctcggcagcgccagccccttcttggcaccacgccgcggcgccttctctcaccggcgacctccttgtcgcagcgcccacccctgcgccctctacactgcggctccgctgctcgtcacatcagtgccctctctctcggcgccgcttgctatcccgccccgctctgtcgcgcgcgcgctctaccccgctctctccttcgcgccagacgatccacgctatcgcggcacccccat

SEQ ID NO: 708615 - DNA, 265 bp, Homo sapiens
cgtggacggatgtggtggttggcgatgacctggtcgcgtggcaccgcacggataggctgaggccatcagtggagatgtggatggagatgctcatgtccggcaaatgcgaaggttgctcttcgctccaggaacggtacgccaggtgcctttgttgggcggcctcttttcattccagcgatccaccggcaacgccaggtctacggtccatcatggcagcactgattgactgtgcttcccatggctcacactgcgctgtcgcgatgtt

SEQ ID NO: 708616 - DNA, 290 bp, Homo sapiens
gtagattctagaggatccctgtggctggggaagagggctgggctgggaagaggggatcgaagttttccttttgttctagttgcaatctctttggacttctcaactggagtgaggacgatggagccagcctgcccatgagacactttcctcatggtcattcttgcttccgtgtcagcgtagccctattgggtgacgttaaggctcgccagtggtgcaggtgacagagactgtcggcctcgatccctccttacttgtggtgtgtgctccatgtgcagcaggggactggcgtg

SEQ ID NO: 708617 - DNA, 447 bp, Homo sapiens
  misc_feature (73)..(73): n is a, c, g, or t
  misc_feature (271)..(271): n is a, c, g, or t
  misc_feature (343)..(343): n is a, c, g, or t
  misc_feature (365)..(365): n is a, c, g, or t
  misc_feature (382)..(382): n is a, c, g, or t
  misc_feature (417)..(417): n is a, c, g, or t
  misc_feature (420)..(420): n is a, c, g, or t
  misc_feature (426)..(426): n is a, c, g, or t
agaagtggatagatgcaagaggcatttagaaagctaaactgtcagatgtgaggatgaattggaagtgcgggtngcggaaggaaatgtcaggtgttgacccatttttttaaaggtaaaatcatgaccttcatacaccatataaaataaacacgtcaaatattttatttaactcgataatgaatacatcataagttgttacaaattgtttaaagaatttggccagatgcagtgcctcgcgcctgtaatcccaacactttgggaggccaaggcnggaagattgctggaggtcaggaatttgagacccagcctgggcagcatggcaagaccctgtctctaccaaaanaaaaaaattttttttaagaaanaaattagccaggcatgntgacgtttacctgtggtcccagctattctggaggntgnggcaanaggaccgctccggcacgggca

SEQ ID NO: 708618 - DNA, 574 bp, Homo sapiens
  misc_feature (2)..(2): n is a, c, g, or t
  misc_feature (40)..(40): n is a, c, g, or t
  misc_feature (511)..(511): n is a, c, g, or t
  misc_feature (531)..(531): n is a, c, g, or t
  misc_feature (547)..(547): n is a, c, g, or t
  misc_feature (551)..(551): n is a, c, g, or t
cnctcacggtacctcaagtaattcacccacctcgtcctcntaaaatactgggattacacgtgtgagccactatgcctggccgggatttttacgtataagatcatattgtcaacaagtagaggcaatttaacttcttttttttctattacaatgccttttctttcttcctcttgcttagtttttctgaataggacttccagtactgtgtggaaaagaagtagtgagaatgaacattcttgtcaggtccctcatctttaaagatttcagcatttcactcttccatatgatgttagccatgggcttgttctgcatgtcctttattgtgtttaggtacattccttctatacctaatctattagtagttttgatcacgagaggctgttgaattttgtcaaatgcctcttctgcatctattgagatgatgatatgacttttgtcctttattttgttaatgtggtgtatcatatttattgacttgtatttgttgaaccatccttgcatcccaaggatnaataccactgtatcatggcnaaagattattttaatntgtngttgaatttcatttaatattttg

SEQ ID NO: 708619 - DNA, 346 bp, Homo sapiens
  misc_feature (18)..(18): n is a, c, g, or t
  misc_feature (21)..(21): n is a, c, g, or t
  misc_feature (63)..(63): n is a, c, g, or t
  misc_feature (88)..(89): n is a, c, g, or t
  misc_feature (101)..(101): n is a, c, g, or t
  misc_feature (103)..(103): n is a, c, g, or t
  misc_feature (110)..(110): n is a, c, g, or t
  misc_feature (114)..(114): n is a, c, g, or t
  misc_feature (116)..(117): n is a, c, g, or t
  misc_feature (158)..(158): n is a, c, g, or t
  misc_feature (163)..(163): n is a, c, g, or t
  misc_feature (177)..(177): n is a, c, g, or t
  misc_feature (195)..(195): n is a, c, g, or t
  misc_feature (197)..(197): n is a, c, g, or t
  misc_feature (243)..(243): n is a, c, g, or t
  misc_feature (248)..(249): n is a, c, g, or t
  misc_feature (254)..(255): n is a, c, g, or t
  misc_feature (285)..(285): n is a, c, g, or t
  misc_feature (337)..(337): n is a, c, g, or t
  misc_feature (339)..(339): n is a, c, g, or t
  misc_feature (342)..(342): n is a, c, g, or t
  misc_feature (345)..(345): n is a, c, g, or t
caatggcgctcaatattnctnatctgcctcttcctacacatcgggcgaggcctatattacggntcatttctctactcagaaacctgannacatcggcattntnctcctgnctcncnnctatagcaacagccttcataggctatgtcctcccgtgcagnccaanatatcattctgagngggacacagtaattacanancttactatccgacatcccatacattgggacagacctagttcaatgnatctnnggagnntactcagtagacagtcccaccctcacacgnttctttacctttcacttcatcttgcccttcattattgcaggcctagctggcncnccnccnc

SEQ ID NO: 708620 - DNA, 214 bp, Homo sapiens
ctaggttttcttctaaaattttatagttaaggtctgaatttttgtatatggtgagaggtatgggtccagtttcattcttctgcatgtggtcagccagttttcccagcaccattttttgaataaggtgtcctttccctattgtttatttttgtcaactttgtcaaaaatcccttggttgtaggtgtgcagctttatttcaagggttctgtactct

SEQ ID NO: 708621 - DNA, 184 bp, Homo sapiens
ggcagataagcacgcgtcgacgacatcccgcgtcaccacaggtaactcgccccaggcgtgatcggagtcaccgcccagaagggtatgtccaagtcgaataaagccaggcgcatagcagatactcgcggaccagtctgtaccacggcgtccagcatacggtcataacaggagagtgcacataagg

SEQ ID NO: 708622 - DNA, 110 bp, Homo sapiens
agcggatatacatactggtatggatgaaacttgatccctagttcacaccatattgcaaaatcatttcctgggctcaagggatcctcttggcctcagttcatcctgagtag

SEQ ID NO: 708623 - DNA, 116 bp, Homo sapiens
tacgattattgttttctgagatcagagcaacttagaaattggaaatatgtttgaattatggcttactatggcttagaattatcttacacttaattaaattacattttaaattaaaa

SEQ ID NO: 708624 - DNA, 161 bp, Homo sapiens
cgacccccacctccgcacgaacacgagagactccatggcatgctgagcccctgcagcctcctagtgctccagcactcgcaggtccattcttctgcacgagcccctctgtccagatccataagcacggtcagctcagggtcgcggagcagtacgaggacaag

SEQ ID NO: 708625 - DNA, 177 bp, Homo sapiens
tcacaagagaagagacgagatgaagagatagtaatagccctgttttgctacttacagtaatagaagactttaaaaaataatcactgcacaaaattgtatagggtggggttatgctgtgatattaattttcctcaataatgtttttcttgactgttcacctaacaatttagagtttcc

SEQ ID NO: 708626 - DNA, 308 bp, Homo sapiens
ccagttacaacagctctagtttttttttttgtcttaggttgttactatcttcgttccgtgaaaacactccccaaaacccccctttccagttacaattagcatcgggatccaggcagggcccatatggaagaggaatcgccatttactcggaaaaaatgccccttacaggagcacgcgtaagttaggcaggaaccggccggcctatatcaaaaataacgccagcttgcttgggaggcatcagggttgctcctttggcgctttttcttgcagatgggccaagcccggtgtcggttccgattttccccttg

SEQ ID NO: 708627 - DNA, 194 bp, Homo sapiens
  misc_feature (151)..(152): n is a, c, g, or t
catctggggcatcactgcaggttctctgaagtattcatcagtttttggctttggtaatggggttctttcctcctgggtactggtcccagggaaaataacccagaagaaatttccaggctggcttttctcaagtgcagtgactacagtcccnncctctaaatatcatctggcttcatacttatctcacatttaaa

SEQ ID NO: 708628 - DNA, 638 bp, Homo sapiens
gcccggataagactagatgataagggaacttcaccgctagaaagcgtcccactagacacatactagtgcggccgctgtggctataagcctaccaccttcagaagccgacctgtggcaaacgtggctaccatgtcaagcgcaagagaaagtataactgtaatggcaatgctaaatgacgaactaccaccggaactggtcgaacgagccacctaaaaattgctaaccgaaattcaggcatggatatcgtgaaggaacaacacctatacccaagagggcagctgttgcagtatccagttcatcttacgaatgtcaacgattattcatgcaataaatgttctgctttcaaaaaatataagtggatcaactgacaaattcgtgtgggccgcctagtcccagtcgactctaaactcgcgcatgctcaatcatcgcgccgcaattggtgctcacttggccaattcacccataagtgagtccaatacacttcaatggccggagctatacacccttgcgaatgggaaaatcattgcggttacccaacattaattgcctcgcaagtgtctacttctgtccacatgcctaatgaaggagcccctcacctatagaccttctcaccaataggccctcttaattgccgtccg

SEQ ID NO: 708629 - DNA, 782 bp, Homo sapiens
  misc_feature (652)..(652): n is a, c, g, or t
  misc_feature (661)..(661): n is a, c, g, or t
ctgagattgggtggttctgcatgtgtgatgaatctctttcacacaaatagatcgaggaggatgtttaggtgctagatgagcccagattgtgcttcgcccctccgatctctcaggggagacaaagaacctccttcctggaccagggaggtgcggccaagttttctagcccagtgcacataaccagtccgttatacgcatgacattgtggaagtgccccgggtctcgctggcgatccctactcactgtcccacctgctagtgctcgtctgtggctcgtggaccctggcctagggggttctaagaagctagctttggaatgttgaagcatagatgcaaacgtcacttgcctgatcagtcttggtatcagacgtgtgactcacatggttaaatagacctggaatgtatgccaaggcagctgcactatctagttcattggttcatccgttgggatgatgggtgatgggcatgtgtaaaggcggagatccaggacactacagccctcggtgatatgactatggcctgaactgttgcaaacacggattatatggggggctgcgttccggctagctcggggtgtctcggtggaatacccgagagcggctgcattgcctactgaggcgagaggagatacctacagttcattccacctcctntgttggtgncctgctacacttgttacgatgactcccagaaattatactgcttcagtcttgggttgaacagaaggctcagtggtgtaactggtccgcttgctgtacagtaggtgaacatgtgtatggccga

SEQ ID NO: 708630 - DNA, 341 bp, Homo sapiens
  misc_feature (53)..(53): n is a, c, g, or t
gtctagctcgccagtggctcatcccactctactgtgccactgtgtgtgccctntgtacagccaagcccaatcaagtttctcttccagactgtgtggcctttggaaaagccaagcccaaacagtgtctcttccaggtagtcttccctagggactccaccttccctcagtgccctctcctgtgagattttggaacataacttggtttgtgctactcatgggtttgttctcagcctgggctgccagcaagtggaaattcccactcctgctagatttatagtatttcagtctttgtcgatcccagccctcttgtgaaaacctgagatctcatgtgaccctgcccc

SEQ ID NO: 708631 - DNA, 137 bp, Homo sapiens
caaggtcttcagtcgcaattcataccttgcccaacatctgataattcatgccggttgagaacccttataagtgtgatgattgtgacacagcattcagtcaacattcacacttgtccacatcacagattccatacttg

SEQ ID NO: 708632 - DNA, 513 bp, Homo sapiens
aagacttcggacactggacaccctttttcctttgcgatccccgcccatcgctcggcgccgtgcgtcgcactctttaggccatcaagaaccgtcttccgcatgtagactatccttacctgtttgatgccatctataggccggcacctagctatcatgtgctctgactgtgatacgactgcgctatctcaacaagctcaaaacctaaaacgaccacagaatatagagtgccttaacggcgaaagggaatcctttagagaaaacaaattcgctgaggatacggctacctgacaaaccagctcccataaaatcaccgtgggcactggctaacgtatttgcgaactcggtcttcacctgaggaagtggctaaagtgcaccaacttcgccttggtcgtaccaggatgacaccaaaggtttaggtccctcaagattacgacagaaagagctcagctgtctccccacaagcctgaacttaacaactaccggatcgccgctccaaagactcattgacttgag

SEQ ID NO: 708633 - DNA, 822 bp, Homo sapiens
gagtctatcgctgtcgctgtatgtgagcctagtggcgctggattctgtggaccggaaccttaaagatagccgcaatggatgaaaatggtgataatgaaacgatagttgccctggaggccataatctgccatcaaatgagtattattatcggcgacttcaatttgccactgggacaagttcctacaggaacagcatcaaaactggatgaacgcgctgggtacctttcgagataatgcataaacattcaacgaggttgaaccgtctaacaacagactttaatgtaattgtggaagcattgagcaaatccaaggcagaactcatggcaaatcagtgaagataaaactaaaatcagaaggtctccaagcaaacccctacctgaagtgactgatgagtatacacaaatgatgtaaaaaacagatctgtttatattcaaaggcttcccaagtgatgcaactcttgcatgacatacgaagaatggttagaagatcacggtcaagtactacatattcagcatgcagacgaacatatgcataaagcattttaaggggatcaactctggtcgcgtcgctaagcattgaactcctgggtcagcaacattttgtcagcaggaccccccctggccccacgaaatgttactaaatgacaaccagaaccttggctaaataacttattcaagggacggattaccctttttgggcccaaacaccaactggccgacacggcaaagcagaacaacaggtggcacgctaaactttaaggaagctaaaacccgtgagcccagcaaaggcaaacacagttgacacagtgctgcctgactctttg

SEQ ID NO: 708634 - DNA, 193 bp, Homo sapiens
  misc_feature (9)..(9): n is a, c, g, or t
tagtactgngtggatagaggaagaggaaggcagtgtgatgaagaactccagtagcgccgcgcatgtaggcagagatggtggcgtaagcagataagatgatgaggtcagggcctgcaggaccgagcatgtggaacttgccatgaaggggacacaggcagggcgcaggcctttgccttcccctccttggaagctc

SEQ ID NO: 708635 - DNA, 544 bp, Homo sapiens
acaaaaaaattttgcaacctctggcataaatgagttaagaatgattagagtgtagtcagttattcaggatatagatactaaaaaaaaaacatgtaaatgtgtcatgaaacaacaacaaaaatgtaaaacaggataaaataaatggtactattttgtctgataaaccacagggggatttctaatgtttgtttactacagtagtcttggcatccacaaaacaacaaaaaatcttacattagagaattctaacagagtatataatttctgcccccaaattgtcttagcgttagatgaagcgtttaatcaaattttctatttctgaatacagggctcattcagtaatagatctaagccaccactaacgtgtttacatctttcttcttcccgtgttcaaaatttttttttttttttgagacagggcctggttttgtcgcccaggttggagttcagcggtgcaatctaggctcactgcagcctcaccttctggactcaagcgatcctcctgcctcagcctcccaagtagctaggactacagggagttgcc

SEQ ID NO: 708636 - DNA, 236 bp, Homo sapiens
  misc_feature (167)..(167): n is a, c, g, or t
  misc_feature (221)..(221): n is a, c, g, or t
ccaagagtcagcaacaagctatttagcgtgtgccccaaccgttttcctcgacgccctaagaacccccctcctaatactaactacctgtactcctacccctcgacaatcatggcgagccaacgccacttatccagtgaaccactatcactgaaaaaaactctagctcntctagtactaatcgtccctacaacatctccctgtaattgtaacaattcacgagncctacagcaagcgta

SEQ ID NO: 708637 - DNA, 363 bp, Homo sapiens
  misc_feature (342)..(342): n is a, c, g, or t
aggcattgggtggatgcaaagttaaagagctaaacatgaaggccgggcgcagtggctcatgtcacgtctgtaatcgcgccccactggctaaagtttttttaaagttccctaaacaactctaatgagcaacctgggttcacaaccacttctttacatgcatcttcttttccctttcttccattgttttcttggtgaatatagggttggggtttatttccagatgggaaaattaaagcataaaaggttgaatagttcacccaagattaaatagctggtaagggatgaaacgaactgaacccagttgtgcttgactcttgggcccattgtgctttacatgatgcncaatacaacacacttattcac

SEQ ID NO: 708638 - DNA, 1100 bp, Homo sapiens
tgtattgtgtggtagttttattgtgtgttttgttattatatttaagaggagaaaatgtgtgtggggaatgagttgtttatctatcgggggtgttgtgggatgatattgtatttttttttatcatcaggaggggggatgagaagatgggtgggtggctaacacggttggaggagtggagagaaaagaaggatatatgattttttgacggggggtggggggagtggatttttgttcttctttcgatgtgttaggtgatgaacgtgtctctcggatcagcgggggtgagtgctctcgtcttgcgtgtggcctcgtcgcggcggttgtgggtggggtagactctgcgcgtgtgtggcccctcttcctgcacgcgcgcgccacttgatctcggccttctcgctcctcgggtttgtatcccgccactttgttgtttttcttctgttctctttctagacacactctctcattattacgaacacacgctctgtgctgatagatagtgtggtcacactacacacactgtgttgtgtgtgtgttgtgtgtgtcgacactacatgttgtgtgtatagagagtgaggcactctgggagaggttgtgtgtgtctctctgagatagatgtgtgagagattcgcctctcctaagtgccactaccatctctcgcgtgtgtataattatccccccttatgagagagatagtgtgaggtctctctctcgccgcgagtgtttctggcgcacattgatttctagagtgagggggtaaagagatagcacccatgtttcgcctctctctctcacacagagagagtatagggcgcctccacactggaattttttgtatttgtagagaggagctccattgttgtggcagtggacctacagtatagtctcccactcacacagagggtgttgtggagtgactacatgggacacccagcgtgttgtgcgaatgtatggtgggtagcggaaccccctccccttaaacattcccctcgggccctgtgtgatccacggtgtgcgcgcccccatactccgcttctcctccccggtgccccaattagaacaaaaatgtgtgggtgtgttttttttttataatataaataaat

SEQ ID NO: 708639 - DNA, 194 bp, Homo sapiens
agcggccgcctttttttggcctgggacaagatctgagggtgtcggacaaggtaaggttgttctccatgtaactgttcctgttccaacgcatggctggggggagggcgcagcttccaaacccacagttctccctccaccacctcccaccagatgctcctacagtctttttttttttttttttttttttttttttt

SEQ ID NO: 708640 - DNA, 896 bp, Homo sapiens
  misc_feature (4)..(4): n is a, c, g, or t
catnctaatcatagaaatgtgaaaacgtaacaaacagacgcggcaccaatgtgttatatgtttcccggaatcattgtcgtccctccaggattgtaccaaggattgattcttaggactgaatatcaaaaggatcaaagctatcaagcaccttggtgccatatcgccgccgtggatccggcttccgtccgtgtgtttctgtctcttcccttcattctgcccgtggtctgcccctttaggtgcccaccgttcacacactgaactaagttgcttcgttggtagcacaaagggtgtgcgcccccttggtggttaaaagtcgcggcgggcccccaatctttaggctttggtgtcgcccccccccgtgatgggggtttcccgcgcccactcgttgtgcagccttttccgcatgcaggcacacgtcgcggtcaccttgcagttgtgcactgtaagcaccccccgtgaatcacggggtgtgctgctatccctgggcccgtgccacagcataagtctctcggtaccttgctaggtgccccaccattcgcgccccgcaagaatatccaaatagggatacccacagtttcattcctccgaaatgtccgcccaccccatgatctaaaagccatggttgaaaggagccctttcaacatctcatgcagggccacctgggccaattaaatcaatggtttctaaaaatcggtgtccaggagcaccaaaggagatctgatgcccctcctcaatggtgaaacgtatgaaactaatctagggccccctattgagctatctattttgactagtgaggcccgttccatagtggacagtagtggcttataaagccgtagtttttagggaccccccttgggcccccaatttcgccccgatttgggacccccacatagaca

SEQ ID NO: 708641 - DNA, 805 bp, Homo sapiens
ccaaggcgcaatacttagagcttttcagcccgcgagtcgcccctggggccccgacccctcccccatacaggtaaggcccccgccgcattcgcagcggggttaaaaaaaggcgtggggccaccacaaagagggtaggcccccaaaccgtgtcttgaactgggaataagcccacaaaaggggggtctgacgccgcacattgcaagcgataaccaaccggggaagtataccacgataaaggtaacggagtacagataatggaggcccaagtctccgcgctgaaaataggaagggcgcccccacaaaggcagttcacacctttaacaagacagagaaatccgcacaacagaaatccttcacaccccccgggagtgcggcttaaaaaaactttgtacaccctgcaaccacagaggagcgtaagaagtctttcacacagagattaagactccccccgctccatatattaataaacccacaagaagggggactagaaaccacacagagagagaattacaaacacggtggaaaacccctggtagagtatctaaaaggaactttatacgaattctaaccgctgataccacacgaaaatgtccacagttgcaatcgacaaaatactagaaagaatgcggcacattacacttttttctataagaacctgctgttataaaatatgtttccccctttcttttaaaaaggagggaattcgtgcatatcaaaaaggaatttttagaatattagagaaagtccaccacaccacagggaaacacttaatacccctcaaaaacagaacccaccccaacaaaac

SEQ ID NO: 708642 - DNA, 763 bp, Homo sapiens
agaacaggtttccagtattcaattcttcacgggaagaaaatgaagttctaagtgaactgtatctcccaaggttttaaaattgtcaagagttattctgtgtgtataagaaataagaaacctctttaagcaatagattttgctgggtttgatttgttaaaagcataatattgtgcaggtaaggcactgtaaaagttttaattccttcgcagaagaaccagtggaagaaatttaaaggttgggctacgatcaaaaactaggtgaagttagtagaaataatgatgtctaagagctataccaacgaaaagaaccctcagcagaataacaaaaattttgctcaggacatttgaggtcagaagttgacagacggaaaccggaaaccgttttcttgtaagcccctagaggcagatcaggtagaagcatacatagtagcagggacacggcgagatgtggacgctaacactcaatattatgcggatgtatgcccattattgtttacgcactttttaaaggtgtgggtctttgcaggctaggtttgggtacgattagatcttagtatagtgtaaattacctgggtggattcacgttctaatattaaaggctacaattaatcttaaagctggggagacaattaattcctgttgcctgtggtatttttaaacaactttgaattttccaaatgttcacggtgaattcttttgggaggtccacaaggggtaataatgatttgtcctgttaaaaacttcggacacaatatattagggtg

SEQ ID NO: 708643 - DNA, 1018 bp, Homo sapiens
  misc_feature (1018)..(1018): n is a, c, g, or t
gtcaaaggctagaattatcccagcgtgtattattttgatctttggatgcaagtgccttaatgaagctctcaaaatattttaggagctgctcagggacgactgttgggatggaactgttggactacatgtcctactcttagattatgtgattttgtgggcactggcaaaaggtgtgtgtgtgaatgtgtgcatgtgtgtgaactgtgtgtgtgtgtgtgtgtgttgtgtgtgtgtgtgtgtgttgcagacatgcaaaactgcagctgacataataccttagatttctcaggtcaagtctttccacatttcacataatgggtaagcagtagacaccagggccgggtatcaattattgcttgctgtggcaacccaggccataacaatccactttctcagatcatccaccgaactaattaaatattatgccggaaactcctccttctgtgagtataacttccctgcagatccctaataggcagataagattcttcagaacaggtgctcctaagtgcatcactcccgcccgcttgattgtacaatattccgctttctcctctaagtccacagaatcgacagattgacgctagtgtattacgctaagcacaggcaagtgtcgatggagaagaagttgactctccgtttgtaccaacaggccagagaccaatcacccagaacagggtgggagataaatagactgtaaaatgtggcgttatggcttacaaacaaaaaccgtacctcaagcagcaagactgggaaacaggactacggggagaaacctatgacagagagagaaacaagaggtgggacgaagagacaagacatagcaccctctcaactgggaagggaccacaaaaaaacacgaatggagacgacgcgaagcacacacagaaggaaacaaggggacagaagcagacaagaacgacgaaggaaaaacaaaaaaaagacagaccgagcaaaagccaacgtacaagacgacccaagtcaaaaccggccgaccaggcgagccataaagcttagn

SEQ ID NO: 708644 - DNA, 210 bp, Homo sapiens
ttgcatataacacttatcttcttcttattcggctatggaatatcttttaagttttaaaaaaactggaataatatatatctatcttttttgccgtaatatattataggggttatagttgataaaatcaagtcttggtatgtggcttgctagaattaaatatttatgagatggtgcatttatagagtatagtagaacaacgacaccgatatt

SEQ ID NO: 708645 - DNA, 192 bp, Homo sapiens
tgggccgtgcccaccctcctccggaatcgcccttccctttctggccaagaaaggcagggtcctccccgacccccagtttgggcgcttttgggagggctctttcggtgccggcactcccccttgttagtgtctttccttgaaggggcgggccccaggctaggtccggtgccaataaatccttgtggaatttga

SEQ ID NO: 708646 - DNA, 763 bp, Homo sapiens
taccactacccctctctcacctgccacaatgtgaagaaagtccttgtacccttcgccttccgccataatggtaagtttccgtgagacctcccagtcatgcttcctgttaagcctgcagaactgtgagtcagttaaacctcttttcttcataaattacccagtctccggcagttctttatagcagtgtgaaaaggtacaaatacaccaccacactgaatcagatgaccaagataccagttcaagctatagaatcgaaaatacggattttatatgcatgtatgtttaatactgtaattagttacaaaagaacccagaaaccttttaacccatagttatgctgtaggattttttttacgccattttttaaagctgcatagatgcatcttcacatatgtgcatgtatgtttcagaaataaattatttgctaagaagtcacagaaaagacccagtattggaccactctaacagttatcacctattatagtgcaaaacacactgtgttgatcacatcaacacaaccaggtacctaaccaagctaaacattgggcagacattagttcctgaatgtaccaatgtgcaccattcatctacttaattcacgcaatgtggtgtttacacttggatggtgcgtatactgcccgatccgacctgattggaagagacttggcataaccacatttgtatctgacacctactttgaagaaacattctggaggcctggatgactatatcgcatctggcctccacaaggtccattcacacg

SEQ ID NO: 708647 - DNA, 264 bp, Homo sapiens
gaatttaactatcattgatttgcaaattaaaactagtacttaatagtatggcaatgaggttaactggtcagagatggtttacagtgcatcacaggagtgattgtccaggaatttcaaaaagagaaagataggttaggaggcaaatatagtagcatctgcattggatgacaaatgccttaaaaaaagggacagcaataggaaaaatgtattctgttgcaggcacatgatatgtctgtccatttattccagtcttttttcaaaggc

SEQ ID NO: 708648 - DNA, 156 bp, Homo sapiens
tgtgctctcgtgggcgtacggcggacatcgcgctggcacaacggtccggcttgcctgtgcgatcgcggtattctggtgaacccacagctgcaaaccgctgacccgcacatctcggcaattaggagaatgttgccagtggggcgaactacacttttg

SEQ ID NO: 708649 - DNA, 198 bp, Homo sapiens
tttttgtttgtttgtttgtttttttggaaaagaggaaggaattctcatgtatgatctttcaatgtaagctctccaagggcatggatctttatcttgttcattgatatagccatccccagagcctagagcagttgtctggtacatagtaggcatgcaattatttttgaaagaataaatagtataaaagctgtaaaaaaa

SEQ ID NO: 708650 - DNA, 782 bp, Homo sapiens
gacagaactactcacgaggtaccccgcaggagatgggtgccccctatccgggttactgtcctttgggcagcggacatcatgtctcccaaagaaggatgttcccgttacagaaatcaccagggacctccatctccaaaactgatggtatggccaggaagtagcaggggctcctccagcgcaagaacgaggagctgagccagctgtcccccagggcccttctagaaaacccatggagcctccagatcgtatctctccagagagtgggtgatcggaggtttaacaaggaggcgagctggaggagttcgaaggaggccttcgagctgtttgacccgagtgggggatggaaagatcctgtacagacagtgtggggactgtgatagagggccctgcgtgccagaagcggcaggcaaaggccgaggtgctcaaggtcctggggaaccccaagagttgatgagctgaagtcgcggcgtgtggactttgagactttcctgccatgctccatgcagtggccaagaaccgaggcaaggcacatatgaggactacttggaggggtcctcgtgtgtttgacaagggaggggaacggcatagtcactgggagcggagcgtcagacatgttgctcgaccaaccttggagagaagatgactgggaggaggtggtgaccgttcgtggcaggacacgaggacgccacagggtgcatcaactaacggggccttcttgaaccaatgctaagcgtctgaatgctgctatccaagagcggtccgaaatggccgcgcggggaaag

SEQ ID NO: 708651 - DNA, 977 bp, Homo sapiens
  misc_feature (251)..(251): n is a, c, g, or t
  misc_feature (306)..(306): n is a, c, g, or t
  misc_feature (332)..(332): n is a, c, g, or t
  misc_feature (334)..(334): n is a, c, g, or t
  misc_feature (413)..(413): n is a, c, g, or t
gtatccgccggaagctactgcaatgtgcaaaccgagatgtggacgtgtcttttgaatactgctgctctttcatcttctcatgtgcgtcacctgacgagctcatgcatcccatggccttgaagcttcttgatatccatttggcgtaaccaattggaaggtctgtatgccactcctgtctcgagcactgtcattctcaaagctccgtgcgagcactcacgctcgctgtcacgtaatctacgcaactatctggntgggcacgacactatgttgggatttcatgcaagattccacatacagactggcatncatgaatgcgtactgtagcgtactgnanactctggcatatcgactctctacaacgtaatacacgagttaaccatctcagtgacatcggtaaggaataggtcctctgnacacgcacagatatctccagagttggtcgttgtcttcatacatggtaccactcgtgagtgaaagtactagctagaaaccatccttatggggagacagaagtacttgttgttcccagaggatacgatccatatgggatgatgctgagaccatagtcagtcttggtcaattttcataatcacgtatgacttccatcgattccagggctgctacaaaaattacctaagaacagaacaatctgggcaaataattgtgccaacgaaaacaccctccgagacccaaatttttttgcgaaagctgaatggtgggacaagacgagcacccttttcccttttgtgaggaagaacgtgcgatattcaaaggtcacttccccacactagcagctggctaaaaagatgggaaaaacacaaagcacttactgaatagacggcgctgttactgaccctaagggacaactaccacgatgaccttttcaccagcaagcaagaccttttagacatgggagcgacctccggctacttcctggacattctttaatttacacgtgggaaatttaaatggagccc

SEQ ID NO: 708652 - DNA, 115 bp, Homo sapiens
tgaagaccctgatgcctaaagcaacaagtgatggatgtctggggctcatgctcacactagagcttgaacttgaccccactgaagcaaaagaagtggctgcatgataggagggggg

SEQ ID NO: 708653 - DNA, 180 bp, Homo sapiens
gctcggcctccgtgtagattagctctcttccatctggctgttccagcagctgtgtctttacaataaactgtaatagcgagcatagctgaaccctaaacaacgtaggggttagggtgctgaaccctaacaaagttgaagacccgcctataccttatagtggactctccttatctgtgatcc

SEQ ID NO: 708654 - DNA, 101 bp, Homo sapiens
ctcaggactttggcttgctattgaaacttctaaaactaggcctaggttctagaggtgtcaatcctagttttagaagttgcaagtagcactatgtggtaccg

SEQ ID NO: 708655 - DNA, 635 bp, Homo sapiens
  misc_feature (549)..(549): n is a, c, g, or t
tctagcagctgcccttggtgcgatgttggagcgcgaaccagagaaacacagacacgcctcatagagcaacggcgtctctcggagcgtggagcccgccaagctcgagctgagctttcgcttgccgtccaccactgcccaccactgtcgtttgctgccatcggagacctgctgctgacttccatccctctggatccggcaaggtgtgtgctgtgctcctgatccagcaaggtgcccattgccagtcccgattgggctaaaggcttgccattgttcctgcacggctaagtgcctgggttcatcctaatcgagctgaacactagtcactgggttctacggttctcttccatgacccacggcttctaatagagctataacactcaccacatggcctaagattccattccttggaatccgtgaggccaagaaccccaggtcagagaacacgaggcttgccaccatcttggaagcgacccaccaccatcttggaagtggcttcgccaccatcttgggagctctgtgagcaaggacccctgtaacacaaccgaggcnctctggggtattaaggaagagtatagttaggcacttagaatgtctcgtatcaagtgcactgtaaagctctgtgtctacttaatatc

SEQ ID NO: 708656 - DNA, 381 bp, Homo sapiens
ttgttcttgctgaaagtgtttttaaaaaaagccccccttttttttttaaagcttttatatattaaaaaacgtttcatgccccacctgtgaatagctcccgcttgcccaaaggacccggggaggggtcccgaaaggctccccatgcaactttggaaatgactgttccaaaaagggggcaaacctggcaaagcgcccctggcgcctgagactacccccccctccgttcctgccaaaaacgaccctttgtggccgatgggccatgggggcccctcccacccaactcacccagtgttgggactggctcaaagcccatgggggttggaggggggcagctgggactttggaattttttttataataaaacccttccggccaacccta

SEQ ID NO: 708657 - DNA, 176 bp, Homo sapiens
ttccctggataattaacccctcttttccacacttcagttctcaaacactttgccacaaaacacatctctgttttcaagcccttcccaaagaaagtgcatttctgagaatttgcatatatgtacatcttacaagccacagtttgatttagtctgcttaagcatatttctgtcgacgc

SEQ ID NO: 708658 - DNA, 1304 bp, Homo sapiens
gcttcaagacatgggttccagaccacaaggaatttggtaagccagtgtccatcacaggactatgatgttatacctgcaagttgcaatttgcacctgctgacacctcccccaaatcgggagccttcacaatgggaggatagtagtatagacaatggctgtgtgtggtttttaaggtggagaaacaatctgggaagggacctcgatttgcacatagttgcacaggcagggctggatgggatggagcagcaacattttttcagaagccatcaccgagtgccccctaggtgatcatggggacacacccaggcagaggacccacttcaggggtcagattagcccagtgtagcctgtcctgggtcaggtttgaggcacaagtgcacaggagggggcagtgctcttgctccagggccagctggggcctgagtcatagcaggaccttgaagccagaagtttaagggcaagtggtgcccacagttgtaagacaatgacaggtggtggttgcctccccaccagcgcctgtccccagggcaggtcctaaggctgtgggggctgaagttagggccttgtgaatacctgggggagcacagggctgttctggccgcagggcctttggagctgggaccacaagctacttcgaagcttcctgtaggaccccacatcggtatccagggcctgttctaggtgctgaggcagactgaaagctagagctgtccactccagctccttccaataggtcccaccgagggcagtgggtccagccagtggtagtaccttcctgaggccctgaggagtcagggaagcctctagcggtgctcctcactctactgaaggggatcaggaagagtgtaactggggtcaagaaaggtggtgtgtgcacccttaagagctctagctgaggccagcaatggcaatgggggtcccctgcagtgatgctaaggcacccggggctgaggggaagatgaaattgctggccctacctgagtctcctggcctgaaggtctggttcacccgctcacagcctgaactgcacacagcagtgcctgacttcaggcggatccctgctgggcttcagtttcctcacctgtgataggtggagttgggcctaactcctggctccaaggctttgaaagttgggcctgccattccctcacctgcctgtcagccaaagcttggagcccaccccaggtactccggcttgtgcctgagaagggggttagttgggcatgggggctggacagggaagggtgcagggcccaggtcttttctgctgccggcgccgctggctcaggagtggacgcggccgc

SEQ ID NO: 708659 - DNA, 188 bp, Homo sapiens
gctctagcaggatcctcattaactatttgtagagacagcagtcttgtttgttgcctaggcttgtctcagactcctggctcaagtgatcctcctgtcttggctcccaaagtgctcgattataggtgtgagccgtggtgcccagccgacaaccagaactttccgcagaccttgtgcctttgtcgtctgct

SEQ ID NO: 708660 - DNA, 849 bp, Homo sapiens
attaggctaggagggccgcgggttaatcggccgaggggagaggccggaggagtatgaagaaggttataacgatggcgaggtagatgacgaggaagatgaagaagagctggtgaagaagaaaggggtcagaagcgaaaacgagaacctgaagatgagggagaagatgatgactagagtggaaataaccgtattgtgtgagaaaattcctagttgtgaatttgactgtttgtatacccagtagtccactctcgtacgggctgccgtcctctccaataccgtgtcactcccgtggatatctctccattacatgtatttggtaagagatgactagtgcgtaacgctgaggatgggtgagagacgtgtattggggaggtaggacaggagaggaggtggacataggtgaggggtggaggtgtgaagatttaaaatcaagtgattgtaatgaaatggacgcgagtgcattgcaatgaggtatgtcacacttacatttatatcttggatgtcacctggtcgtaatggatcccccttttgaaaattagccgaattagggggaaaggtcaaaacaatgtatatggatttaaaacccttgtggttattcctgcagcccgtcgattggaatggatggcagtagagagtagcgaacatgtcaaagtaagtccaaggggggactttccccctaaggggatccaaccggaggcgaggaaagggaggcggaccgtggacgttgtgtaattcaggtatgggggaatctagaaaaaagtcaccaagtgacgggggcagatggaagacaaccaagcaaataagaacaaggaggagggggggaacaccaaaacgggcatgcagacacag

SEQ ID NO: 708661 - DNA, 1636 bp, Homo sapiens
tccaaaaaaattggtccctttatttatgacataggaaaaactccaaaccccggggggggaggagagggatgtggccccagtcccctccacaaagggaaggggagaaagagaaaatgtaaacctattctgggtaacataaatgttctcccacccaccacgcccagtcctttggagatatttttttctcttatattttcttatttctccaacacttctcacagagagtaacacacacacacacacacacactccactttaacactgtgtgtcgtccaacaaacacacagagcccatatttctcacacaccagagtggagagacacacctatcacacaccccacaaaccccccaaatatatctcaccatatagagccctctctccgagcgtctctctctatatagtgtgtcgtcgcgacagagagtgcgcgcgtgtagcgcgccgcgcgtgagagagaggagatatagtcgccgccacgaggggggagaggcgtcgtgtgcgagagtgtcgcctcctcccccacacacgaaaaaaaacgcgccacagagagcctccccagcgcggagagagagagaagcgccccacaagagcgtctccccaaaaagagaggggagggccccccgaggggtgcgccgccacagagagaggggagaagacgcggcgcgcggcaccacccacacaacttcttccccaccaataggacaacaactattatactcacgccgtctgttgtgcccctcctccataaataggacgcactaattcttcctcactcctccttattcttcaagagggcggcgcaactcatccttggatgaccagaacgagcaggggacgaaacaacaagggggcggccgcccatcaggtgttgttgtactcattatcactccccgctgtgggaggagcagaggagcggccacccgctttgctagaaaaactaagcgggcggcaccacacaccggactccaagagaagaaaaatgtttctgctccaccaaacaaaaaagaatgtcggcgacaggcgacggcgccaaccaataatgatatatataacaacaccaacgttcgtcggtcgtcgtgcggagttagacaacacatgagtgttcgtacgcgaccggtgggaggagggtcatttcccaccccccaaaggcgggggggggtggggtcgccccccccctaattaataaagagggagtggggtcgacaaccacagaagatatatgttgccgacacccaccttgtggtgggtcgtcacccccacacaatgatgggtggtcggtcacacccaccgtctacaatcacaaacagcagggtgggggggagggaggaggaaggcagacaatcaaacaccacctcacagggaggcacgaaaccaagccgggcggcaggaaaggagggactgtaccaccccgccggagagagacaactatactcaccaaaacaagacggggccccgcacaaaaaaatgcaggggggggcacgagagcaaccccataaacacaagcacgagaaaacaaacatcctcccctcgatagagaagaaaaccccccacaacaaaaagcggcggcgagcaaataaacaacacacatcaaccgaaaggggaggcgcccgccagtcgagaacacaccacacactacgg

SEQ ID NO: 708662 - DNA, 173 bp, Homo sapiens
  misc_feature (1)..(1): n is a, c, g, or t
naagattagaaagaacagacttgctgattcttccagcctttatctttctcgcatactggatgcttcctgccctcaaacatcagactccaagttcttcagcttttggactcttgggcttacaccagtggtttaccagggtgctctcagtgccttccatgcacagactagaagac

SEQ ID NO: 708663 - DNA, 172 bp, Homo sapiens
ataaacattttcttctaaagaaaaaaaacctaaaatgtaaatacctcccattctgccacataagactgtatacattatttacatctatcaaataaaacatattacagattttctgacattcagtgtttcctttaaaataacaacagtgaaacaactttgatcaataactaat

SEQ ID NO: 708664 - DNA, 228 bp, Homo sapiens
aagcttctcaacgagcaaagctgaatcacaactcaaccagtcacggacaaccacagtatcgtcagtcgatattgctgtatctacgagcggactgtgctcttggtccagatctgccttgatcagctcgccaggtcttgaccgcattcttggcattcgctgcgactactcaggcctgtcgcagtcagtcggtcttggatcctggattagaccggtccggatcctatgttc

SEQ ID NO: 708665 - DNA, 244 bp, Homo sapiens
gaacaatgtctggtgcctagcaaattctcagtaaatttcagctagtattattacagttagtattacttcactatgctccctgataaaatttttatactaaaatggttaatgactcagcattgaggtctgatctgacttagtgttagcataacgtaagttgcagttcatgatcttagaggcttggtcacaggcggagtggagcacgcatgctaatctgggatcagagttcactcaatcggacctg

SEQ ID NO: 708666 - DNA, 809 bp, Homo sapiens
aaaaagacaaacaaaccacttcttttcttcagtaacactggcatctctgttaaccactctccttagggatggtatctgaaacaacaatggtcaccctcttgagattcgttttaagtgtaattccataatgagcagaggtgtacgcgaaattgtgttatgagtgatagccttcagtacaaaaagataggatgacgtggtttaaagtgttctatttgtaaatcattccatttgagtctttctgatgaacttggtatagttgaaatcgtattttagtgaggctccaaaatgagcaaagctaggccatgattagagtagagtgactatataaaaaaaataactttctaggagctataaatcaaagtttaaaaagatgtttgatatatttgagtattctgatcatgaaaaagaaattgcctggctactacaggacagactgatgggcacatatgcacctggcacttcaggtttcaagcagagatgctgtaaaaataagggtctcgatatcatgcaacgtcccagtcaggaatctcctttccaggactagaaccagtcctggttggagagttaacacagcgttgcaaggacaacgactcgcagcaccggacaagtcgccgaacacaactccaatacagagccgtgataaagacagatagctcgaaccgggactgatgaccccgaccgctaccccccgggagcgacacgaggccagtcaagccacactgggaaaaaactggacccgcccgaacacaacaccgcaggcgatgaagacgcagcacacaccgagccagccgcccaaagaccaacagagg

SEQ ID NO: 708667 - DNA, 548 bp, Homo sapiens
cggacgggcgtgggctagttctagatcgcccccacctccaaaaaaaaaaaaaaaaaaaaaaaaaaaaaaaaaaaaaaaaaaaaaaaaaaaaaaaaaaaaaaaaaaaaaaaaaaaaaaagggggggcggcaaaaatttccctgggggggcccaatgggacccctttgaaaaagggggccccaaaggggggtttaaaaaaaggggaggaggccggctgtaaaaaaacagtgtgctgtcgggggaaaaaacttgtgttctaatgggtggggtatcttcttgtgatagaacagagaacccattttgttgtggggggggaggaacaaatcttggggcacaaacatatcctaacgaaaaaaaatattaagagcctcgcgagggagatcatttattacaaatttatgaagggcggttaatatgggtggttgcacaactacgtctattatttttgtgggcggctggaaagaaatactgtggctgatacgatggcatatatatatttgttcaagaacaatttttttacacgcgggagatgtgttataataacggtga

SEQ ID NO: 708668 - DNA, 161 bp, Homo sapiens
aggccggatccagatcgcataacagccttttaccaggcactgtagaattctctgggtggcgagaactcacgatcccgcatcgagactggtgttacattatattactctctggagcactccacggattagctatacctccttctcccgggctctggaagcaa

SEQ ID NO: 708669 - DNA, 440 bp, Homo sapiens
tgccctgctctctctcccttgactgccaagctctgctcgttgggacctttatgagtccattctccaccgggatcccagtcttctgcgctggtgccaggtcagcatcaggcctcctgttgggctgaggctccaggagggcacggtgcctggcacagcagctgggtcataaaatgtattgaatgaataagtggatgatggtgccaactgggaaggagaacaggatcacgtggcatggaaagctgatacttctgatgttgtggtcaggcaggaagaaggaggtgtgtgtgtgtgtctgtgtatgtgtgtctgtgtgtgtggcttagcagatgcctctgaattgaaataatctcttcagaagagagaggaagactaaggagactctggagactgaaagaatccttcagtcgaagcggccgcgaatttggtagtagtagtagtcg

SEQ ID NO: 708670 - DNA, 458 bp, Homo sapiens
ctgatgtttgacgccgtgcactgtggtggtgagcgctgtacgagaagctgaaccggagccgaggagaatcggtgtgaagcctcgtggcctgtacatcggccaacatttggccccacgggatcagacctcgtgaactacctgcgcatggtagagtatgatgggctgaccgggcgcgtggtctgagtttcaagccagacgacataggtgcagagaacgctagagctacatgcctgcgcaagtcctagacagcagtcccgtgtcagggccaccgtgagatcggggtgtggtactctaaccacgcaccctggtcatgaatgccatcagcctggacatcaagcatggtctgcagagactggctcaaatcaagaccctgtgtggtcgactagaccatcgcgtggagaaccgcaatacgtctatgcgggccggccctaacattcctaggctcctgtcgggcggaa

SEQ ID NO: 708671 - DNA, 692 bp, Homo sapiens
  misc_feature (319)..(319): n is a, c, g, or t
  misc_feature (333)..(333): n is a, c, g, or t
  misc_feature (454)..(454): n is a, c, g, or t
gctaagatagaaaataacatgattgttccttattaaagtttcccagcgtatgaaattctaagctgggtggggtggctcacacccgacgtaatcccagcacgtgtgggaggccgaggcaggtggatcacttgaggccaggagttcgagaccagcctggtcaagatggtgaaaccccatctctactaaaattacaaaaattagccgggtgtcgtgacacacacctgttatcccagctattggggaggccaaggcaggagaattgcctgaacccgggaggcggaggttgcagtgagctgagatcgcaccactgcactccagncactccaggcctgnggtggacggagcaaaggactctctcacaaaaaaaaaaaaaaacaaacaaaaaaaaaaaacttgtgttggggccggacatcgcgcccctagaaagaagttgcctaaacaaaccaatgcggtnggggggggcgcgggggccccaaggaggggtatggacacaatggggccaaagcttcggtcccaaaagagaactccggggcgctggaacagaggggcgggggttctccaaccaaataaaaaacgcgccggggggacaccgaggtgttttggacaaaatcccagatgggtctcggagacaccaggttgtaatcacacaggagcaaagcgggtcgaaaaaatagcgaggggggagtagatga

SEQ ID NO: 708672 - DNA, 504 bp, Homo sapiens
  misc_feature (404)..(404): n is a, c, g, or t
  misc_feature (407)..(407): n is a, c, g, or t
  misc_feature (415)..(416): n is a, c, g, or t
  misc_feature (419)..(419): n is a, c, g, or t
  misc_feature (425)..(425): n is a, c, g, or t
  misc_feature (431)..(431): n is a, c, g, or t
  misc_feature (434)..(434): n is a, c, g, or t
atgaccactgactacgtagtaaatgatagctgtatgaggttttgctaaacaactttcaacagtttctgcggacgccgtttcagctccagcttggtcccccctccgaacgtgtacggataaccactccactcctggcagtaataagtggcagcatcctcagcctccattcggttgattgtgagagaataagaggtcccagacccactgccactgaagcgaaaagggactccaggagccacgttggatgtgtcataaatcaggagtctgggggaggatccaggcttctgttggtaccaatatatgtaacgtatacttgagctggcactgcaggtcatggtgaccctctcccctggagatgcagacatgattgctggagactgggtgaagctcaatgtcagatccgncancgccaganncanctccgnctgaancgnctccacatgaggagacggtgaacgtggtcccttgggcccacaagtcaaagtagcgcctatagtagtcccc

SEQ ID NO: 708673 - DNA, 377 bp, Homo sapiens
caaagcattggggttcaggagatgctacagactcagtcacgacctggcatttcattatcaacaagtcccaaggcaatatatgacacctttctttcgtggatgctatgaataattttaaatggactacatcggaaggtctctccttcaactagctggtcctcagcctgccagtgaactgtgaatatgttcctatgcacagcacaatgctgtagttgggtgctattcatggtaatgacaggattatctcctagatattggaaagaccctattaggctggaacctttggtggtgtggcacgatcttgttcctcttccctgctcagagtattactccatcaagttgcttgttagtcttctgctactcacctgcacgctgat

SEQ ID NO: 708674 - DNA, 540 bp, Homo sapiens
  misc_feature (70)..(70): n is a, c, g, or t
  misc_feature (440)..(440): n is a, c, g, or t
  misc_feature (443)..(443): n is a, c, g, or t
  misc_feature (451)..(452): n is a, c, g, or t
  misc_feature (455)..(455): n is a, c, g, or t
  misc_feature (461)..(461): n is a, c, g, or t
  misc_feature (467)..(467): n is a, c, g, or t
  misc_feature (470)..(470): n is a, c, g, or t
ggaacctggcgcctttattcagagaaacatcgtttatccttgcaggcttgggtaaaacccttgtgctgtnttagcgtaagataaacaactttcaacagtttctgcggacgccgtttcagctccagcttggtcccccctccgaacgtgtacggataaccactccactcctggcagtaataagtggcagcatcctcagcctccattcggttgattgtgagagaataagaggtcccagacccactgccactgaagcgaaaagggactccaggagccacgttggatgtgtcataaatcaggagtctgggggaggatccaggcttctgttggtaccaatatatgtaacgtatacttgagctggcactgcaggtcatggtgaccctctcccctggagatgcagacatgattgctggagactgggtgaagctcaatgtcagatccgncancgccaganncanctccgnctgaancgnctccacatgaggagacggtgaacgtggtcccttgggcccacaagtcaaagtagcgcctatagtagtcccc

SEQ ID NO: 708675 - DNA, 526 bp, Homo sapiens
  misc_feature (426)..(426): n is a, c, g, or t
  misc_feature (429)..(429): n is a, c, g, or t
  misc_feature (437)..(438): n is a, c, g, or t
  misc_feature (441)..(441): n is a, c, g, or t
  misc_feature (447)..(447): n is a, c, g, or t
  misc_feature (453)..(453): n is a, c, g, or t
  misc_feature (456)..(456): n is a, c, g, or t
gtaatcaggaatagaggtttaccagtacgttcgggaatcacaggtcgcgtggtatatagatccaggataaacaactttcaacagtttctgcggacgccgtttcagctccagcttggtcccccctccgaacgtgtacggataaccactccactcctggcagtaataagtggcagcatcctcagcctccattcggttgattgtgagagaataagaggtcccagacccactgccactgaagcgaaaagggactccaggagccacgttggatgtgtcataaatcaggagtctgggggaggatccaggcttctgttggtaccaatatatgtaacgtatacttgagctggcactgcaggtcatggtgaccctctcccctggagatgcagacatgattgctggagactgggtgaagctcaatgtcagatccgncancgccaganncanctccgnctgaancgnctccacatgaggagacggtgaacgtggtcccttgggcccacaagtcaaagtagcgcctatagtagtcccc

SEQ ID NO: 708676 - DNA, 515 bp, Homo sapiens
  misc_feature (415)..(415): n is a, c, g, or t
  misc_feature (418)..(418): n is a, c, g, or t
  misc_feature (426)..(427): n is a, c, g, or t
  misc_feature (430)..(430): n is a, c, g, or t
  misc_feature (436)..(436): n is a, c, g, or t
  misc_feature (442)..(442): n is a, c, g, or t
  misc_feature (445)..(445): n is a, c, g, or t
gtaccgactatagtagtcgtcttccagacgttagaaatgaatcctgatagcgtagctaaacaactttcaacagtttctgcggacgccgtttcagctccagcttggtcccccctccgaacgtgtacggataaccactccactcctggcagtaataagtggcagcatcctcagcctccattcggttgattgtgagagaataagaggtcccagacccactgccactgaagcgaaaagggactccaggagccacgttggatgtgtcataaatcaggagtctgggggaggatccaggcttctgttggtaccaatatatgtaacgtatacttgagctggcactgcaggtcatggtgaccctctcccctggagatgcagacatgattgctggagactgggtgaagctcaatgtcagatccgncancgccaganncanctccgnctgaancgnctccacatgaggagacggtgaacgtggtcccttgggcccacaagtcaaagtagcgcctatagtagtcccc

SEQ ID NO: 708677 - DNA, 136 bp, Homo sapiens
tctacaggatctccccagctactcaggaggccagctactcttgaggcagtaggtactattcttagactattcacagccaaggaaactgaggctcagagacctgaatccctcgttcaaatgccacagcaagtggctg

SEQ ID NO: 708678 - DNA, 231 bp, Homo sapiens
gctgatcatcctaaacatgtgggtaagcattcattgtcacaaatagaggcaatcaggcttaactatacatagtataaggatttacccgtctactatattacccggcaactacaaagttataatcactcaggatcatattacacaatcccctaggaattgtgtaatggaatccgacgggttatacctatgttgtttacccagagatatcgatgcaagatctctcatactgct

SEQ ID NO: 708679 - DNA, 790 bp, Homo sapiens
gtaagaggcactcagccactgaggactttgatgttggctggatcagggggatgctggagcagctgaatgcagagctgggcttgtgatgccacgagataccgctcaaaatccccgtgatgctccacccctggggcccgagatccattctctggtagccagtacacgacccagaatgctcagcgccgtggcgaggagcctactgcagccagccgtttgacggccaggagctgtacggcatcatgtcatgcggcttcattggctaggaggtgttgctgttctccttcctgttgcactactcggactctgtgtgtgctggggcggatgttgtgcggtgaacgctgcgctgtcgggatgcgtacgctattccgacctctcttgccgtgccttgctcgtgccgtgcatgtccttggggcacatggtagccatctaccatgtgtccttagggatctgggtgttctacatagtgtcttgtcaagattagagtgtggtcccgagttggcgggttgatgtgtgcatgcttggatccatgggggcgtcagcgcgtcaggtccctttcgccgcacagggccctgctgccttttggccttcgccctgtctctcgatactcttattacttcctttactcacttactgtgcccgaaggcgcgcttggctggctcgtgcgcccgtattctgtgttctcctgccgtaatctcttcagtggtgacccgttgtgtcctgccttcttgtccgcatcgattgataccccagcgtggcgtttgccctgagcgtccgcaggggcggctgttat

SEQ ID NO: 708680 - DNA, 297 bp, Homo sapiens
atgacatgaaaatgtgtgcatctgtgctgtgatgcccctgccaacatgtgctggtgtgttgggatgtgcctctcttggcctggatgtggtggtggtggcagccaatgtccagccactcttcacctgtgctccctgctctgggccctgcaccagagcttgccaccctcttctttctccccagccttctcatttcctgcctctccagccagccctcttccccatgcccagaagaaacaaaacatgcaaatcaacctccaatggggccatgcccaagccttcccctcttccccagcccag

SEQ ID NO: 708681 - DNA, 233 bp, Homo sapiens
ggcaaatcaacagtgctttcactcctgctgaggttgtacaaccctacttctggaactattaagcttgatgggcaaaacattcctcaagttaacccagttttgcttaggactccaaaattgggcaaattagggtaaggaccccattttgttttcttgctctattgctgagacacatatgcttatggtgctgatgacccctcctctgtgaccgtctgaggaattccagagagtgg

SEQ ID NO: 708682 - DNA, 870 bp, Homo sapiens
cttggcccatgcgagtgccagagcggcggccgcctggattccgggattttgccccgtcctccggtgtgggaccgggtgccgttctcggtcctgatgcgccacgaaagcggcgagtttgcccagaccccggcggggccaatttccagggggttgcgagttccaaacgctgcggcccacccgggagggtgccaggaccgggctcccgccacacccaaggtggcgctttcccccccccctccgggaggggagacttcttttagggtggcgcgcgaaagaaatttgtgggggatccccgctgcggccccgttgagcctcccccccccagagggatttctgggatcccccagaagggccccggcatctccgctcccgaccccaggctattcccccacggcgaggagcttcaccaaagggcgtgatcccccaatccgagttgtggtgtaagcgcctggggcccaggacagcttgtcttccccatgccccggactgtatcatgggcggcctggaatgtatctccatccccgcagcacccccattccacacaccggcttccccccccggaaggctcggaagctgtgtatgggagaggaggcctgcacttggacctgacctcaagcctcagctcccgtgggaccctgtaaatgctccccgtcagagctctcccgaatatgcttgtttggagatccctccgcccctaagggagagttttcccccttacacaatggcctttgcttgcaccccccactggaaatgggtgtgcccccaaaataagactttgcattttttacaaaaggggaactacaggggcaaccctggcctaggccccaactttgttttgagaaaattaatatttgtaccccccttctatta

SEQ ID NO: 708683 - DNA, 1138 bp, Homo sapiens
  misc_feature (386)..(386): n is a, c, g, or t
  misc_feature (397)..(397): n is a, c, g, or t
cgaccgtccatgatccgggatgtggcgtcattgctaaaaacaaaaggttttttttctcgaagcaaaagcgagcaataaatttatatctgtatgtatactcccgaagcactattacggagagcggtacgtaataccgagtgagtatatagccaaggcggttgtgtggccttttcctaacatagaaactgggtcgtggcaccaccagctcctattcataaccccacacgttgtttatgacattcaaactggaggagtgtatgctcatagtaagagactgccgcagccatccaccgctgttgttcggccatttcgacagcttgagacgtcatatccgcgacagacatgaccaccagacagtcagcgttccctcatgtggtggcgggagntcttctgggcnatagatgatatgatatacgacttttacggactgcaggcttatagagcagtgacatatgctggacacaaagtgttcgggtctgtatctcgcctcgtatttttatttggtggactcctacttcacgtgatccggcctacggttctgacaataacattaccacccctccgcataatgacatagagacccatcacccgcaggtggaaccggatagtaaatgagccctgcgcagcacccacaattcataccgccaagagttgggaccttcataggcgttaattcatatggcgagcggagccgacggggtgagggggtatgatggtggaggggcgcgctcgtcagcggggtttcagcgctatgataaagatcggaagtgcggcgcgcgcacgatctatcgattgtttctgctaatattgcggtgtgagatagcatgcgcaccaaattaagaggtagattacgctggctgatttactctatgttaaagaagactcgtgctttcacaataggttctagaggacatccgctatcgatctatcgcgatacgacctgtcctgaactcaatgaccgtgatggaggagggaattgaagttacctcatgctagttggtggtgtgacttactcgcagaaagctgtcattcatccatctctgtcggcactgtaggagcggaccacgtgggttacacgataggaggcaggacgagtggggttgctggggtgaggagggggatgggagaggacgcaggg

SEQ ID NO: 708684 - DNA, 319 bp, Homo sapiens
ctgcgcggcctcgcatgatgctggcagatcaggccagagatggaaagcgtgaggtggtgaggggggagacgtggcagcgagggctcactcaaacgcctcctgcctatactggcaagactcacaaagttcacaggacggagacctcaccctgtaccagtccaatagcatcctgcgtcaccatgggccgcacccttgtggctctatgggaaggaccagggggaggcagccctggtggacatggtgaatgacggcgtggaggacctccgttgcaaatacgtctccctcatctacaccaactatgaggcgggccaggatgact

SEQ ID NO: 708685 - DNA, 296 bp, Homo sapiens
tgagccggttgtaaagtgatcagacgccggaccccattctgtgggcccctgtggttgggcttcccccctggttcttacagggagctccagggctatgtcttagcccaaggtgtagaggtgaggcacctcaagtctttcatgccctgggaactggggtgccccagggggagaatggggaagagatgacctgcgccctcagtaggaacaggggtgagatgaaagaacgacagaatgagggattttcaggcacgggggaaggaagggtggttttggggaacagaccgtagctgactggt

SEQ ID NO: 708686 - DNA, 119 bp, Homo sapiens
cgtgactattacagtgttcctcatcacccaactaaaaatacaaaaaatcagctgggtgtggtggcgggcgcctgtgatcccagctactaggactaatcagtttagagtatcagtaaagc

SEQ ID NO: 708687 - DNA, 178 bp, Homo sapiens
attagacggatcctccagaggacaaggaggaggcgactggtggacatgagccctccctgctcacaagcatatgcccgggagaccggatagggcagtttctggggccagggacatggcttggaagagggggagactgggacagcatctggtgggtgctgagaaccccaaccttaaggac

SEQ ID NO: 708688 - DNA, 100 bp, Homo sapiens
tagtcacaatctatgtaacctgtagacttcccttcacttctctggctctcctctcctgctagctttgttccttattacatcttctgccactccactagct

SEQ ID NO: 708689 - DNA, 464 bp, Homo sapiens
tttctctcaccactcctattcaacatagtgttagaagttctggtcaaggcaatcaggcaggagaaagaaataaagggtattcaattaggaaaagaggatgtcaaattgtccctgtttgcagatgacatgattgtatatttagaaaaccccatcatctcagcccaaaatctccttaagctgataagcaacttcagcaaagtctcaggatacaaagtcaatgtacaaaaatcacaagcattcttatacaccaataacagacaaacagagagccaaatcatgagcgaactcccattcacaccccttgtaagttgtatttctaagaattttattgtctttgtagcaattgtgaaactatcatcagagtgaacaggcaacctacagaaggggagaaattttttgcaatctatccatctaacaaagatttaatatccagaatctataagaaacttaaacaaattataaga

SEQ ID NO: 708690 - DNA, 129 bp, Homo sapiens
cccccccgggggggggggtttttacccccggggggggggggggggccccccccccccccaataacccggggggggccggggtttttttcccccccccccctttttttaaaaggttttttccctttttta

SEQ ID NO: 708691 - DNA, 825 bp, Homo sapiens
  misc_feature (53)..(53): n is a, c, g, or t
  misc_feature (778)..(778): n is a, c, g, or t
ggtgaaaaaaaaaaaagcatggtgtcctggcctgtgtgtcacactcagcattnggcattggggcttgaatggcaaagatgaaaccaagaatgcaaatatcttatccagaaaaaatatatggcatgaggcctacttgtctgcactaagtgtctcaaggggcatggcttagtcaaaccaacaactccatggaaccttaatgaagcagagcactttagctgaaacagagaaaagaagaaagaaaattaaagaaggaacggaaacggggaacaaaggaactgttccagtcaagcctccaaggacctccatggatgtcaaatccatgttgctaaattcaaggagaatgttctttccttatctcagttggtgaacggtagaatcctcacgaatggaattagtgcccttataagaagaacttacaagagaaatgatctctttctggaccataagaggatacagtgtaaagacagacctctgcaaggagagccgtcactgagaaaatgaacctgttgccctcctgatcttggatgggccagcttcagaactgtgaacacataaaggtttctggtttaagccacccaggcaatgatatgtcgtatggcaccctaagctgactaaggacagctttcttcctcaatctcattcatgggtcctcaggactactgaagttggcactattttcccatcagcaatgctgaatataaatgcctttggtttaatttgctgggccctcgcaatttttaagctctagggccagaaatttgccctttgggttccaatnaggaggtgggtaatggcactctgtctaaccatttatcaacacggtat

SEQ ID NO: 708692 - DNA, 476 bp, Homo sapiens
  misc_feature (46)..(46): n is a, c, g, or t
  misc_feature (70)..(70): n is a, c, g, or t
  misc_feature (98)..(98): n is a, c, g, or t
  misc_feature (170)..(170): n is a, c, g, or t
gaaggtgcatttgtaaggtcctagcctgggcccactgggaagagtntagctgcctagcgtcttagaaccnaggtcgctagtagcagccacaatgcgcngactttaaagtgtttatttgcccgagaacacctcaatttctaaatggttgctatattagtgtggggagttcntataagagccaatttctggctttttaataaatccaatatgtggctacgtaggtcaacatcctgaatggccacattgactgaagctgagtagcagctagcagtttggacagaatatgggttctccagtttgccatagcctcactgcagcccacttcactcatttctgttattcatgtggttactataagcatttgtttgctaaaaaatatcttgaggcatgtttttttttcctctttttttaaccagccccctcccttcccaataaaaaaagaaaaagaagccatgaaacttgggggtttaaacagc

SEQ ID NO: 708693 - DNA, 93 bp, Homo sapiens
  misc_feature (19)..(19): n is a, c, g, or t
  misc_feature (25)..(25): n is a, c, g, or t
tggggccgacgtgtgaggnaagccngttccgaacacaaacaggatgatgacacagcaggtagcggggaccaggtagttgagcatgtcccacac

SEQ ID NO: 708694 - DNA, 949 bp, Homo sapiens
  misc_feature (53)..(53): n is a, c, g, or t
  misc_feature (902)..(902): n is a, c, g, or t
ggtgaaaaaaaaaaaagcatggtgtcctggcctgtgtgtcacactcagcattnggcatttgacttcttcacactcttaaaagctattgaggcagttccaagatggctgaataggaacagctccagtctacagttcccagcatgagcgacacagaagatgggtgatttctgcatttccaactgaggggcttgaatggcaaagatgaaaccaagaatgcaaatatcttatccagaaaaaatatatggcatgaggcctacttgtctgcactaagtgtctcaaggggcatggcttagtcaaaccaacaactccatggaaccttaatgaagcagagcactttagctgaaacagagaaaagaagaaagaaaattaaagaaggaacggaaacggggaacaaaggaactgttccagtcaagcctccaaggacctccatggatgtcaaatccatgttgctaaattcaaggagaatgttctttccttatctcagttggtgaacggtagaatcctcacgaatggaattagtgcccttataagaagaacttacaagagaaatgatctctttctggaccataagaggatacagtgtaaagacagacctctgcaaggagagccgtcactgagaaaatgaacctgttgccctcctgatcttggatgggccagcttcagaactgtgaacacataaaggtttctggtttaagccacccaggcaatgatatgtcgtatggcaccctaagctgactaaggacagctttcttcctcaatctcattcatgggtcctcaggactactgaagttggcactattttcccatcagcaatgctgaatataaatgcctttggtttaatttgctgggccctcgcaatttttaagctctagggccagaaatttgccctttgggttccaatnaggaggtgggtaatggcactctgtctaaccatttatcaacacggtat

SEQ ID NO: 708695 - DNA, 489 bp, Homo sapiens
  misc_feature (28)..(28): n is a, c, g, or t
  misc_feature (302)..(302): n is a, c, g, or t
  misc_feature (316)..(316): n is a, c, g, or t
  misc_feature (332)..(332): n is a, c, g, or t
  misc_feature (354)..(354): n is a, c, g, or t
  misc_feature (396)..(396): n is a, c, g, or t
  misc_feature (408)..(408): n is a, c, g, or t
  misc_feature (438)..(438): n is a, c, g, or t
  misc_feature (454)..(454): n is a, c, g, or t
aaggaaaagtgggcgcaggggacccgcntgcagcatacggaggacccgcgccggcaccagcctctgagttccctcagtatttatcgatcattatcgggcatttctgggagagcgggatgtggcaggacaatagggtaatagtggggagagggtctgcaggaaaacatgtgaacaaatgtctctgcatcataaacaagttagagaaaaaagtgctgtgcttttgatgtgcatatacataaacatctcaatgccttaaagagcagtattgctgcccgcatgtcccacctccagccctaaggcgnttttcccctgtctncagtagatggaatatnacaatcgggttttacaccgagnacattccattggcccggggacgaggcagggacacagatggcnttcctctttatnttcaattgcaaagagggctttcctttcctnttttaattaatcctcntcagcacagaccttttttggatgttggggttgggt

SEQ ID NO: 708696 - DNA, 995 bp, Homo sapiens
  misc_feature (27)..(27): n is a, c, g, or t
tctcgatgcacgttgtgagagtgtatntggaaaaggttcaagaaatgctccatttgcctgctatgaagaaatacaatctcaatcagacagatttgggaactgtggtagggatagaaataacaaatatgtgttctgtggatggaggaatcttatatgtggaagattagtttgtacctaccctactcgaaagcctttccatcaagaaaatggtgatgtgatttatgctttcgtacgagattctgtatgcataactgtagactacaaattgcctcgaacagttccagatccactggctgtcaaaaatggctctcagtgtgatattgggagggtttgtgtaaatcgtgaatgtgtagaatcaaggataattaaggcttcagcacatgtttgttcacaacagtgttctggacatggagtgtgtgattccagaaacaagtgccattgttcgccaggctataagcctccaaactgccaaatacgttccaaaggattttccatatttcctgaggaagatatgggttcaatcatggaaagagcatctgggaagactgaaaacacctggcttctaggtttcctcattgctcttcctattctcattgtaacaaccgcaatagttttggcaaggaaacagttgaaaaagtggttcgccaaggaagaggaattcccaagtagcgagatctaaatcggaaggtagcacacagacatatgccagccaatccagctcagaaggcagcactcagacatatgccagccaaaccagatcagaaagcagcagtcaagctgatactagcaaatccaaatcagaagatagtgctgaagcatatactagcagatccaaatcacaggacagtacccaaacacaaagcagtagtaactagtgattccttcagaaggcaacggataacatcgagagtctcgctaagaaatgaaaattctgtctttccttccgtggtcacagctgaaagaaacaataaattgagtgtggatcaatttgcaaa

SEQ ID NO: 708697 - DNA, 992 bp, Homo sapiens
  misc_feature (5)..(5): n is a, c, g, or t
  misc_feature (40)..(40): n is a, c, g, or t
  misc_feature (56)..(56): n is a, c, g, or t
  misc_feature (59)..(59): n is a, c, g, or t
  misc_feature (82)..(82): n is a, c, g, or t
  misc_feature (100)..(100): n is a, c, g, or t
  misc_feature (120)..(121): n is a, c, g, or t
  misc_feature (126)..(126): n is a, c, g, or t
  misc_feature (171)..(171): n is a, c, g, or t
  misc_feature (189)..(189): n is a, c, g, or t
  misc_feature (207)..(207): n is a, c, g, or t
  misc_feature (210)..(210): n is a, c, g, or t
  misc_feature (219)..(219): n is a, c, g, or t
  misc_feature (258)..(258): n is a, c, g, or t
  misc_feature (263)..(263): n is a, c, g, or t
  misc_feature (281)..(281): n is a, c, g, or t
  misc_feature (316)..(316): n is a, c, g, or t
  misc_feature (319)..(319): n is a, c, g, or t
  misc_feature (328)..(328): n is a, c, g, or t
  misc_feature (334)..(334): n is a, c, g, or t
  misc_feature (336)..(337): n is a, c, g, or t
  misc_feature (350)..(350): n is a, c, g, or t
  misc_feature (401)..(401): n is a, c, g, or t
  misc_feature (407)..(407): n is a, c, g, or t
  misc_feature (413)..(413): n is a, c, g, or t
  misc_feature (424)..(424): n is a, c, g, or t
  misc_feature (426)..(426): n is a, c, g, or t
  misc_feature (429)..(429): n is a, c, g, or t
  misc_feature (437)..(437): n is a, c, g, or t
  misc_feature (451)..(451): n is a, c, g, or t
  misc_feature (459)..(459): n is a, c, g, or t
  misc_feature (464)..(464): n is a, c, g, or t
  misc_feature (466)..(466): n is a, c, g, or t
  misc_feature (470)..(470): n is a, c, g, or t
  misc_feature (477)..(477): n is a, c, g, or t
  misc_feature (492)..(492): n is a, c, g, or t
  misc_feature (506)..(506): n is a, c, g, or t
  misc_feature (509)..(509): n is a, c, g, or t
  misc_feature (513)..(513): n is a, c, g, or t
  misc_feature (521)..(521): n is a, c, g, or t
  misc_feature (523)..(523): n is a, c, g, or t
  misc_feature (533)..(533): n is a, c, g, or t
  misc_feature (539)..(539): n is a, c, g, or t
  misc_feature (545)..(545): n is a, c, g, or t
  misc_feature (559)..(559): n is a, c, g, or t
  misc_feature (567)..(567): n is a, c, g, or t
  misc_feature (578)..(578): n is a, c, g, or t
  misc_feature (593)..(593): n is a, c, g, or t
  misc_feature (595)..(595): n is a, c, g, or t
  misc_feature (606)..(606): n is a, c, g, or t
  misc_feature (610)..(610): n is a, c, g, or t
  misc_feature (646)..(646): n is a, c, g, or t
  misc_feature (662)..(662): n is a, c, g, or t
  misc_feature (694)..(694): n is a, c, g, or t
  misc_feature (702)..(702): n is a, c, g, or t
  misc_feature (739)..(739): n is a, c, g, or t
  misc_feature (802)..(802): n is a, c, g, or t
  misc_feature (805)..(805): n is a, c, g, or t
  misc_feature (841)..(841): n is a, c, g, or t
  misc_feature (860)..(860): n is a, c, g, or t
  misc_feature (912)..(912): n is a, c, g, or t
  misc_feature (917)..(918): n is a, c, g, or t
  misc_feature (922)..(922): n is a, c, g, or t
  misc_feature (924)..(924): n is a, c, g, or t
  misc_feature (978)..(978): n is a, c, g, or t
caagncggcccagtacagaggaaaaacccgaacacgacanagaactgaggagagtncangcctgggctggtgggggccacanccgcgggccctggttgcngggaggcatggggctcaggnntgggngcctcgggccggggtctccgggcctcacttggccggccgcgtgangaagcgcgtggagaagtngaacaggtcccgattganctngcgcaggtngcgcacctcgtcctccagctccgtcacacggacgcgcantggtnctggccgccgagcacgcncttctccatggtgctgcacaggacggcctgcagcngcnccgtgcggnccaggnanntgggctccgagcnctgctggtggaggcccaggcgcagagtgaggcccccgtggcgcggctcgtncccgtnctcggngcccagcaggngnttnttgaagtngggcagcggcaggntgggcctnaagtntnatcncagcatnctgacgggcgccacnggatggcggcattngtnactnggcctttnanggccaccgtncggatncactgnttgctctgcacgtnccagaggngcacggtctcntcgtgggagcttganancagcacgctgncgtnagttgacactgacaggcaagtcacctggttcctgtnccctttgaagaccttnccggcgtcctgctctgggtggaagctcctctncctctgtncgggccaggtgaagaggtcgacctggaagatggagcnctcactgcccccgcagaacatatggtgctcagccaggtccatggtcactgccatgatggacangtnaaagaggacggagagcagcagctcccccgaggaganctcccatagcttcaccgtntggtccagtgaggaggtggccacccgggccagggggccccaaagccgcagtncaggnncgtnanggggagcgtgttgtgagaccagaagtgccttggcgccggaattctggaggggtnggcctgcagcacgc

SEQ ID NO: 708698 - DNA, 956 bp, Homo sapiens
  misc_feature (27)..(27): n is a, c, g, or t
tctcgatgcacgttgtgagagtgtatntggaaaaggttcaagaaatgctccatttgcctgctatgaagaaatacaatctcaatcagacagatttgggaactgtggtagggatagaaataacaaatatgtgttctgtggatggaggaatcttatatgtggaagattagtttgtacctaccctactcgaaagcctttccatcaagaaaatggtgatgtgatttatgctttcgtacgagattctgtatgcataactgtagactacaaattgcctcgaacagttccagatccactggctgtcaaaaatggctctcagtgtgatattgggagggtttgtgtaaatcgtgaatgtgtagaatcaaggataattaaggcttcagcacatgtttgttcacaacagtgttctggacatggagtgtgtgattccagaaacaagtgccattgttcgccaggctataagcctccaaactgccaaatacgttccaaaggattttccatatttcctgaggaagatatgggttcaatcatggaaagagcatctgggaagactgaaaacacctggcttctaggtttcctcattgctcttcctattctcattgtaacaaccgcaatagttttggcaaggaaacagttgaaaaagtggttcgccaaggaagaggaattcccaagtagcgagatctaaatcggaaggtagcacacagacatatgccagccaatccagctcagaaggcagcactcagacatatgccagccaaaccagatcagaaagcagcagtcaagctgatactagcaaatccaaatcacaggacagtacccaaacacaaagcagtagtaactagtgattccttcagaaggcaacggataacatcgagagtctcgctaagaaatgaaaattctgtctttccttccgtggtcacagctgaaagaaacaataaattgagtgtggatcaatttgcaaa

SEQ ID NO: 708699 - DNA, 247 bp, Homo sapiens
tagagtcgaccagagctccagtcttacgatatttggaggtcagcacgatgactcacgtgtcgacggaacttgtacagagaggcatgcaccgcagatggtgaatacacgtcgaccaggctgcatgtatacgatattgggaggtgagcacggatctcatgtattgaaggaacttgtataggaaggtatgcaccgcagtggtgaatacacgtcgagctggaggacatgcatgcatggtcgggtcactgga

SEQ ID NO: 708700 - DNA, 596 bp, Homo sapiens
ccggcgtcttaatgaggctgtgagagtgcgttagagctcctctagaggatgtcatcaacggaggattgacgctctgcagctcctggtcagaaacatggatcttgacgccagacttgggggtgaattcggggacctgcacagactgcaggaatgtggccacagcagctcggtcctgagagcctgtcagcccgtaggtctgggcaaacaggttggcagcagccatcacatagtccagatgcaggggattgttgacatcaaaggtgagcgggtgtggacagcgtttgggcccagaccagaacggcgctcctgagcttgtgagctggtcaggagggaaattgtgcagcagatgccggatgttgtacgagtactgggttgtgccagtggtggcaggcccaggtcacgcagtcagcccaggtctgtggtcgctgcagcaccaggctgcgctgaaaagcctccagcacctccacaggctgagtgcctgccagccgcagtgttcgctccacaaacttggggtctgtgaggtactggttgacattttctgctgactgcttgaagaggccttcaaatcatccgaggccatgcaggtgtgctcgtga

SEQ ID NO: 708701 - DNA, 930 bp, Homo sapiens
  misc_feature (623)..(623): n is a, c, g, or t
atggcaggtgctgctgcttgaagcctgtgagtgggttgtggatatgggactggtgaggacgagtgaggactgttaggaaagtgtgtatctatgaataagggcagttgaatgtagaatttttaccagtccacttgagcttcttcttccctaaccactggctcttgagccagcttgggatttccctggccattgccaatagctggccatctggcttccaatatgtacacgttggctacatcagcgttcaatggagaatgcaacattccaagactcctggtgactgttactttccgcagagccaaccacgtagtgcagtatgtgaaggggaatcgtgggcttccgaacatgaatggattccttaatgaagcaagggaagataaagatctttataatagcaaggcaacatacttgggaataatagtaaagatagatcgggatcttccacgtgataaatggaataggcgcgaaaaaggtggtttgtggtttttgaacaccctgaggtatgtaaggggccagtatatggatgtgtgcaatcctaagttctctatacaagtgtaaaccactcggtatatttggcgtgcgtggagtgagacttggcagtgtgttcgccctggaaatatgangtgtcccaggtcgtcagcggtggttccgaaactacttcgttgtttggtaaaacgttgcgcgcacctatcttatattatggcccattggcaacataaccttttatttaggctgataatcacgccattataaaatgattcttctatgacatttaagaagttccggcgtcaacaggagttctggaggttccttgcgaccctccccgaatacgtgggtatatgcttttgaaacccgcgggttataagggataatagggcccttgaacaaattaccttgggggaaatcccccggtgggtgagggcggaaacc

SEQ ID NO: 708702 - DNA, 303 bp, Homo sapiens
cccccccccccttggggccagccaggaagcccccctggccctcagtattttttgcccccggccgggccggccctgggcccctgggctggggcctgtttccccagggttttagggcccccccccccggggggcctttcctttccccgcccgggacaaacaaggggcccaggggcccccttttttaaaaccgttttctgggcccccccccccccccccccggtttttgtgttgggttttcccgggccaggcaaaggggcccgtccccgttttttttttggccggggaaaaaaagccccctaagga

SEQ ID NO: 708703 - DNA, 642 bp, Homo sapiens
gtatccgcggaccaggcagagggactctgcaagcaatggctagcagcgcgcctggcaagagcggcgcctgctgctgcgggagccgcgctacacgctagctaggtggccgcctgcctactgcctggcggaggtgggcatcaccttctgggtcattcacagggtggcatacacagagattgactggaaggcctacatggccgaggtagaaggcgtcatcaatggtacctatgactatacccaactgcagggtgacaccggaccacttgtgtacccagacatggttatcgtgtacatctttataggggtaagtactatgccacccagccgaggcactgacataccgcataggcccagaacatctattgctgtgactctaccgtggcatacctatgctgctagtcttacttgatactatacaccagagctgcaaggtacctccacttcgtactatttatctatcatagtgctgcgcctcttaccgtgtccacatccatcttatgtgctgcggctcttcaatgacccagatggccatggtgctagctcttcctcagtataacctcctgctggaccagagctggggctgggggtagctgcttataacagccaggcagactcgtgaaatgatgtgtgttctagcccagg

SEQ ID NO: 708704 - DNA, 1109 bp, Homo sapiens
caacacccacttactatcatgctggctgctccatttccttctggaccaccaaataattcccccaccacctcccatatgtccagattctcttgcatgcatgctgcatgctttgggcaagtcatgttcaatttcatggtacatgagtggctatcatactggctcattatatgggttttcagcacaaaatcaaaaagaaggaaggtgctcacattccgttaccattcaaggcagcacatgctggcatagagcagcactaacatgacaccactaaagaaacgatcagaccagatctggaatgtgaagcgttcatagaagatcaactggcctcatttcttcaccaatatcaagtgttgggcaacgcaaaacaaggaagtggcaatgggtcaactcttcttgcattcaacaagttcatgtcaataaccaaatgcaatgtgaaatattttcactggcactctattttgaaaaaccatctgtaaaagactgcaggtgggggtgggaggccagctatggtggtgaggcagttgagcaaacatttgaatgtaggattagatttatgcaatgcatatgggataattataggtaattttatgagctgtgagaagggtgttgtagtttaataaaagcctgtctaaatttgcgatacttaagcagtttaggaatgaagtgtaagagtgtcttaaaatgtttcaaatggtttacacaaacatgtatgtgaggcagatatgtggcaaaaatgttacagaattctaactggtggacatgggatggatcagtagtactggtaaatatcttatcttactatactgtttaacaagtatttacttaaactctttcacttacattaaacttcaaaaacattatgaacaacagaggcgggcaccgaacaagagacgagcatcacgacaggaagagaggcacccaaggtatgaacagcaaaccacacggctagacatgcatcacaaagagtgaacaccaaatcagcaacacaacacataccaagaaaagaccaagagaccacaggcaacaaaaagcaagtgcagatgacaaacgcgaacacgctggagaagctgtgacggacacccgacccgagagatgaaacaaacagagca

SEQ ID NO: 708705 - DNA, 169 bp, Homo sapiens
  misc_feature (137)..(137): n is a, c, g, or t
tatcttgatctatatagcgttaagcatctctcgtagatattactaaatatgaggcactaaaaatggtaagagatcccatacagtagttgaacatacaactgtaagaagtagtaggaaagaccataaattcttcatangatggactatgcgtggccgggagatcctctag

SEQ ID NO: 708706 - DNA, 869 bp, Homo sapiens
ggcaggagcgaggccgggtgttaatcggccgaggcttgcaagcgcagaatgctattgagcgttgttgccaaatcagcggctttgattcagcaagccacaacagttaaaaacaaggatatcaggaaattgttctggatggtatctatgtctctgaagaaatggaaatgacatctgagcttgttgcaaattcagcgcgacttgatctcagcaagccagaacagttaaaaacaaggatcatcaggacaattttgggatggtatctatgtctctgaaagaaggcaaagtgttcagcaggctgatgaataagatctacgagttacctggctacagaaagaagatgccagatgacacttaagacctacttgtggatatataacaggactgcaagtaaccagaccgtatgactattgggaccttctctcttaagcaagaaaagaaaagcagaacaggcaacacaaagaacaagagcagaaaaaaccaaaaacaggagaacaaaacaacaacacaacgcaacccaaaacagactgaaaggaaccaaagagagaaagaacacaaggcacaggcgcaagagacacaacaaagcgaacacaccacaccaaacaaccgaccatccaagcatcccaacccagacaaggaagcacacacgagaaagaccaaccacagaagtgcacataagaccagacccaagagcacaaatagaaacgaaaaaaaagaaaaaaaaactgaaaaacagacgcgagcaaaaaaccaatgaagcaagcaaccaagacccacataagaccaaagaaaaagacagagcacagtacaccaccagcacaacgaagcggacgataagaccaacgacgcaccaccagcgaacaaccacaccc

SEQ ID NO: 708707 - DNA, 1012 bp, Homo sapiens
ggtgtctactgtgtgtgtgtgtctcggatctgtagtgtgtatttgtgtctgtgtgtgtctatgagtgtgtgtgttgtgtttgtgctgtctctactgtggtctcatgaaggagaggggtcagggtagattcggggaggagttcctattggtagcggggtgactttgtagtgatttatgcggcgtcgacttagtagctccttatctggtccgttccatcgtgggttggtgtatctgtttgtcccggagattgctccggggcgaggtcgcgtccactgtgcatgccgtgagctcgtgcgtgggtcggatggcgctgggccggacccgggcgtccgaccgtccgcgttttccttgcttggtgtctgggcctctggagggtcggactgcatccgtggggtgtgcctgatgattgctcccaggggccgagccggtcctccttcccggtccactcttccagggccaggacggctcccgcggagccaggccatcgtggctggtgtggtcccgagggtgctggaggtctgctggttagcctctgttgcccggagattgagtcgaggcgcctccagtcctctcaggcccctgacttgtcaagtcctttcaagtccttgtgccctgaccaagtgatgaggacaagagggctgagggcctgtcggtggggtcggcccgctcggtgccacctgagagggtctctcctccccgggcgtgatgattcgacttggcgggtcatcttggtccctcctgaggtcctcaatcggtcctgagttgagtctgccgcgatctgatctcgtggtggggccatgctctagggttgcctgtgccgtgctgtgggattactgagtgctggaaggccggacgtgggacccgagtcctccctgctgatgtcggcttgcttggtatgatggggcctgtgccgcctctggggagggctcgggcgtttctgatgatttgagttggagtacgtgtagtttgtggcagcgtcgtgtctggacggagtggtgggtcggctcgtggg

SEQ ID NO: 708708 - DNA, 338 bp, Homo sapiens
ctaaagtgctgggattacaggcatgagccactgcgcccggccaacccggaacttttcaaaagagacatagaaagttgcaagagagaactgagaaagttaaagactcaaggacaagtagacaaaaatataaaatgatcatcaacgaaggcctctgtgaccgcatccacctgtgtgtgcacatcacaacctgctgtttttacttagggcattctttaacttagggctgtcaactacaaacagtgcttcctcgatacacttcatctgcacactaacctgcatagcttgatttgcaaactctaagcctgcagacccaaaccaaggcataggaactcccccac

SEQ ID NO: 708709 - DNA, 1499 bp, Homo sapiens
  misc_feature (573)..(573): n is a, c, g, or t
  misc_feature (1269)..(1269): n is a, c, g, or t
gatgcccttgaggcagccatggctagtgcttctgctgagggggcaggcggagcattgtagggagagacctgcagataatgtatccctgctcgtttcgacagagatacgcagattaatacaacttacgttaaaaaatatcgttccagtaaggttacgtaagtatattgccttagccgtctacaagtttcccagaccgctaagttttacaatcagctttatacgactttcggaactagcagacactatcgagggaccttagaagcacgtagcaatagagcgaatgcgccaccggcataaccaggttctctccttaaaaaaccacgttgatcgagcaagcggtctagaactgacttgcacacggcctttcctttccactgcgacgcttagagaacaaacacttgtacattttttcaacacactgcacatacacttcggcacggcagcaacaagagggaccctaaccaggaggtccccgctgtaccatttctacattaccccagggtttagcaccacgcgcggctatcgttggcccttgttctaagggcactttacacacacgttgcacacggcgtntggcaccttctaagcatcccaggccccttcttagatacggctttccacgggttctcttaccaccacggttccggcatacgccgcatgaactttaatccattacttaaagtttagctcgcaccatgagcgcgcacttccctcttctctcacgaccagcacacgcgagggcacttttcaacgtagtccgccggaacacgcgcgttggcagttccttagccccatgcaaccctcctttggtcaaacaccttcggccatttgacaacggtgcatgctgcgcaccgcaacacttcggcgcgctctcacttactctaacaaaggggtccccttaacggtggttgaaacccggcctgatgttctttaccctataaacacgccggcccaagaaacccgaaacacggctcttgcgcaccacacggaatctttccccagtactgggtgcgccgatgcttttggccgcaacgtccgtacgttgggaacaccatgtcgaaaacgtttcttgagcggcaccgccaagcagcgaactttacccaatcagggttcgcgcgcaccagcggtttgggcgcgcacaacacgcgtttggctcacaatgttccaccgcaggcaacaacggctaacccgggcgagacaataacgcggtccggccaactgatcatcaaccccgcctacaattctagacgcacgcgcaaccgctcaccnttaggtgcgcgcacccacggtctgacctgcaaccaggcaattccacggaccaccctcactttactcctatctatcaatcgaacacctatacgctgatggcggcgtaactaagcacgcgtttataacaccgccctcctcgcaagacgcatagcctctcgcgtgaatacggcgccgcacctctgtcgaggccccaagagaaccacagtgcctccggcgaactccacgccaca

SEQ ID NO: 708710 - DNA, 184 bp, Homo sapiens
tcccggtcttagatgcgcgttgcccaccatgatgcggcgggatctggcgtagaaagtgccgcaacacgcgagcaaaagttaagccgatcgcttcgttcaccggtacctgtacgatgccttcgaggtcgtattcgaccggctcctctgcggtgatcagtttcgaatcgattgtgttgatcttgcg

SEQ ID NO: 708711 - DNA, 553 bp, Homo sapiens
  misc_feature (9)..(9): n is a, c, g, or t
  misc_feature (11)..(11): n is a, c, g, or t
  misc_feature (18)..(18): n is a, c, g, or t
  misc_feature (56)..(56): n is a, c, g, or t
  misc_feature (76)..(76): n is a, c, g, or t
  misc_feature (103)..(103): n is a, c, g, or t
  misc_feature (108)..(108): n is a, c, g, or t
  misc_feature (137)..(137): n is a, c, g, or t
  misc_feature (162)..(162): n is a, c, g, or t
  misc_feature (173)..(173): n is a, c, g, or t
  misc_feature (201)..(201): n is a, c, g, or t
  misc_feature (220)..(220): n is a, c, g, or t
  misc_feature (231)..(231): n is a, c, g, or t
  misc_feature (240)..(240): n is a, c, g, or t
  misc_feature (256)..(256): n is a, c, g, or t
  misc_feature (259)..(259): n is a, c, g, or t
  misc_feature (263)..(263): n is a, c, g, or t
  misc_feature (279)..(279): n is a, c, g, or t
  misc_feature (299)..(299): n is a, c, g, or t
  misc_feature (304)..(304): n is a, c, g, or t
  misc_feature (313)..(313): n is a, c, g, or t
  misc_feature (326)..(326): n is a, c, g, or t
  misc_feature (380)..(380): n is a, c, g, or t
  misc_feature (382)..(382): n is a, c, g, or t
  misc_feature (385)..(385): n is a, c, g, or t
  misc_feature (410)..(410): n is a, c, g, or t
  misc_feature (413)..(413): n is a, c, g, or t
  misc_feature (418)..(418): n is a, c, g, or t
  misc_feature (427)..(427): n is a, c, g, or t
  misc_feature (433)..(433): n is a, c, g, or t
  misc_feature (435)..(435): n is a, c, g, or t
  misc_feature (437)..(437): n is a, c, g, or t
  misc_feature (446)..(446): n is a, c, g, or t
  misc_feature (460)..(460): n is a, c, g, or t
  misc_feature (476)..(476): n is a, c, g, or t
  misc_feature (482)..(482): n is a, c, g, or t
  misc_feature (488)..(488): n is a, c, g, or t
  misc_feature (519)..(519): n is a, c, g, or t
taatgggtntnaaaattntgtgaaaaatttttggtcaagttgtttccattaaaaantactgattttaaaaaataanaaattaaaaatgccaaaagcaaaaaanaaaancaaagtggtccaaaaaaaattttcctttncttttgaaggttttacgatgcattnttattattaancagttttttaataataaatttaaatggncaattgaaaaaaaaagttntgagaacgttnttccaccantgattaagagtggggnggnaggnattagggataatattnatttagccttttgagctttntgggnagaattggngaccttgccagcnccagcagcctttttgttcactgctttgatgaaacccaccgcaactgtttgtttnanatnacgaacagcaaagcgacccaaaggnggntagtntgagaagcnctcaanananatgggcttnccaggaaccatatnaacaatggcagcctcnccaganttcaanaatttagggccatcttccagctttttaccanaacggcgatcaatcttttccttcagcccagcaaa

SEQ ID NO: 708712 - DNA, 1666 bp, Homo sapiens
  misc_feature (1590)..(1590): n is a, c, g, or t
agagtatgatatgtcgaaccacgcctcgtgtcttagcgtgaggccatcagtgactgaactgcaagaggcgtggtctataagcaatggcataaatctaagaagaaggcctttaccaagtactgcaagaaatggcagcgatgcacgatggcaagaagccagctggcacgcaaggactatcagcagcatgcaacaagtactgccaagctcatccgcggtcataggcccagcagccagatgcgcctgcattcctctgccgccagaacgaagggccacctgactggagactccaggtgaacggacgcactgctgggccgagaagcgtggacatggcgcccgccgagcaggcttgaagcagcacggtacgcgtgtcgaagccaaaggatgcttacgcgcgcaagcgcactacacgacgtgagtacgaccgtgacagacacggcggacgaaccaacacacgggcaaaaagtgcgaacacaacacggagggagacaaaccaacgctccgaagcggacagccgaaagaacacctcgcgcaactgcacgaacccacaacgaacggaccgctagccacacaagcgggaagacaccccacagtaacttacggacggaggcaatagaggcaacatagctatgagctacgaactaggaaagcgcggcaaaagtgagacatgggaggaggcaacagcgcgcgacgggggcgcacgcacgaacacacgggcacagacaacgagacaccgacagaccgcaccgaccaaaccacaccaaagcgaaacaagaaccaaacacataaagaacaccaagtaacccgcagagatactaagacgcgaaaggttaaaccgggaaccaggaacagaaaggggactgacgtaacaacgcgaacacaaaccaacgcggacaccaccgacgacaaccacatgaacgaacgcactcaaccacccacctgcaccacaccagaccaagcacacactacacgaccgcccaaccacgaaccggacggggcaaccacacgcacaccgccaccaccaacactggcgacctgcacacaccatcgacacccacaagagcagcaacgcagacgcgaaccgaccacgcactaaaacccacgcggcactagccaacacgcacgcggagccaccagagaacgccaacacaaccgctacccataccacactctcgaccacccagcgacgcagcacgaataacgaagacccagggacaccggacagaacacacaccaacaactggacacacggagcacacgcaccgtaacagcccacactcgacaacacacgaccgaccaccacacgcaccacccaacagaacccgcacgaacaacccgaacacagacacacgtagaagagcgagaccgggagccaccaactcaacatgctggaacacaaacgagacgcagatcagaacacaccaagccaactccacgcgaagcacgcgtgaggacacacccccaggagacgcgcgggtcagagaacacaccatacgagaaagaagactgtagagaggaaagcccagaccagccgacactcaggcacaacagccaccagacacgaacctctccatccgagactcgaagtcaaanacaggaaaccacagcagaatcggatagaaccaagaccatgatagagcaagcgtcgaagaggacctcggcaaaatcg

SEQ ID NO: 708713 - DNA, 333 bp, Homo sapiens
tgattctctgcaggatcccgcacactttttgcaacctggctttgttgtcacttttcatctccatctttgcattctctgagaactcttacacgtttctgtaggtccattttatatctacttgactcaccgtattactttctggttgccacatgtttttctttcttgtcttgctcatcctattttactgctgtgcccttactgtgattgattttccaaactatatattacctggagcagcagttatagcatattatgccttcagtggcattctatcaaatggagtttccctctagcacagttctgtaagaagtgcgtttgagattgtgtgtatat

SEQ ID NO: 708714 - DNA, 280 bp, Homo sapiens
gaggatccgattttgcggctgcctttcctgaggcgagcctgtctcacgcaggttctcagcccgagaataggattgtgggtgggtgagggactgtcccctcttccaccacgccgggaggctcttagaaaaatgtcactggtgggctgagcccatcactcctaccccatggaaaccctctgggaaccatccagacaaaccagcaaggacaatgacagctccatgtgccctccctggtctctccagccaattgctccacgtccatgtccacttcatgctgggc

SEQ ID NO: 708715 - DNA, 254 bp, Homo sapiens
tttcccccttttttggggggctttttggggaaaaaaattccccctttttcccggagtttttcaaaggatttgggggggtaaaaccttccaaggggcaaaaagttttttttttttttttggggctttaaaaaaaccttaaaatttaaaaaaaggtgttttccttttaaaccccaggctttttttttgtttttaaaccccgtttttttttttgggttgtttttttccccctggggggaaaaaagttaaacggggga

SEQ ID NO: 708716 - DNA, 188 bp, Homo sapiens
  misc_feature (105)..(105): n is a, c, g, or t
tgagttattttactggctgatctatgtatcacgaggccagtatgtacagacaacagtgggaggttttatttcttggtctcttcctccttgtgatctagtcttgantgatctcctcctttcttgtgcctgagggcgctcttcacgtgcgcttgctgtgcttccgttggtcttagacctgcgtggcctca

SEQ ID NO: 708717 - DNA, 120 bp, Homo sapiens
ttatccacagaagaatcaaaacatatccttctattagttctccattttccctattattggagatgaaagagtagaaaagagaattattttctgtatgcaattacagctcctaaatattca

SEQ ID NO: 708718 - DNA, 1353 bp, Homo sapiens
  misc_feature (505)..(505): n is a, c, g, or t
aagcaacttaagctactatgatcctaattttacagatgaggaaaatgaggcacaaagaagtctgtctgcgaggcactaaagttcacaagaaatgctaccttgcttcagaaggtttgaagcatttccatgaggccaatgaagactgcatttccaaaggaggaatcctggttatccccaggaactccgacgaaatcaacgccctccaagactatggtaaaaggagcctgccaggtgtcaatgacttttggctgggcatcaatgacatggtcacggaaggcaagtttgttgacgtcaacggaatcgctatctccttcctcaactgggaccgtgcacagcctaacggtggcaagcgagaaaactgtgtcctgttctcccaatcagctcagggcaagtggagtgatgaggcctgtcgcagcagcaagagatacatatgcgagttcaccatccctcaataggtctttctccaatgtgtcctccaagcaagattcatcataacttataggtncatgatctctaagatcaagtaaaaatcataatttttacttattaaaaaattgcaacacaagatcaatgtccatagcaatatgatagcatcagccaatttgctaacacatttcttgggatttgcccttcctggggtataggggatcagaaatattgatccatgtgcacgcagataaaatggcttctgctaaacagactaaaatctttctctctagtctttctcactgtacaaacccagttgttttcaaaaaatcacagtagcaatgcaactcatcactctagaaaagcaagcttaggctacctgaaagattttccccttggaagtttagcgtatgttgactaacaaaaattccctacatcagagactctaggtgctatataatccacacaacttttcagcctgtgctcattctgtcccatgctggccataatacctagtcagcccattacccttatctcgaattgctccatctcctggtgggacttgtatcttgtctgccatatcagaacaaacccctgaagaggttctgattcgatttactacactctcaagccctaccccttttatcgggacgcttccagcccgcaaaatagaaactgaacgaggacacgggcgcacatctcgaccaatttaaatcccaacaatgtcttacaactttaattaaaagggtaacccctaaggaatctaaagacgcacattgcttgaccgggaccgaaacacgaccctactaacacggcaaccactacccacatcagcacgaaggccacatcctcaactccaacctagtcccccccatttatgttggccaccatgccgcacgatcgccactatcgctgcacatcgataga

SEQ ID NO: 708719 - DNA, 1571 bp, Homo sapiens
  misc_feature (723)..(723): n is a, c, g, or t
aagatgtagctgtgtagtctccttccatagctgctctaagggggctggcaacatggctcagcaggcttgccccagagccatggcaaagaatggacttgtaatttgcatcctggtgatcaccttactcctggaccagaccaccagccacacatccagattaaaagccaggaagcacagcaaacgtcgagtgagagacaaggatggagatctgaagactcaaattgaaaagctctggacagaagtcaatgccttgaaggaaattcaagccctgcagacagtctgtctgcgaggcactaaagttcacaagaaatgctaccttgcttcagaaggtttgaagcatttccatgaggccaatgaagactgcatttccaaaggaggaatcctggttatccccaggaactccgacgaaatcaacgccctccaagactatggtaaaaggagcctgccaggtgtcaatgacttttggctgggcatcaatgacatggtcacggaaggcaagtttgttgacgtcaacggaatcgctatctccttcctcaactgggaccgtgcacagcctaacggtggcaagcgagaaaactgtgtcctgttctcccaatcagctcagggcaagtggagtgatgaggcctgtcgcagcagcaagagatacatatgcgagttcaccatccctcaataggtctttctccaatgtgtcctccaagcaagattcatcataacttataggtncatgatctctaagatcaagtaaaaatcataatttttacttattaaaaaattgcaacacaagatcaatgtccatagcaatatgatagcatcagccaatttgctaacacatttcttgggatttgcccttcctggggtataggggatcagaaatattgatccatgtgcacgcagataaaatggcttctgctaaacagactaaaatctttctctctagtctttctcactgtacaaacccagttgttttcaaaaaatcacagtagcaatgcaactcatcactctagaaaagcaagcttaggctacctgaaagattttccccttggaagtttagcgtatgttgactaacaaaaattccctacatcagagactctaggtgctatataatccacacaacttttcagcctgtgctcattctgtcccatgctggccataatacctagtcagcccattacccttatctcgaattgctccatctcctggtgggacttgtatcttgtctgccatatcagaacaaacccctgaagaggttctgattcgatttactacactctcaagccctaccccttttatcgggacgcttccagcccgcaaaatagaaactgaacgaggacacgggcgcacatctcgaccaatttaaatcccaacaatgtcttacaactttaattaaaagggtaacccctaaggaatctaaagacgcacattgcttgaccgggaccgaaacacgaccctactaacacggcaaccactacccacatcagcacgaaggccacatcctcaactccaacctagtcccccccatttatgttggccaccatgccgcacgatcgccactatcgctgcacatcgataga

SEQ ID NO: 708720 - DNA, 1562 bp, Homo sapiens
  misc_feature (714)..(714): n is a, c, g, or t
ggtcctgtcttacggatcgctggctgtttatgagcggagatggtgaggcacgtagagcgagctcgtaagccatgaagaggacatgagagtattaatagcatctaggttattagctaacatctggatcataacactatacttctatctagatctaatgtatgcagctcatcaagtactctgaatatctaagatggtatcttaaattccagttggaacgttctggaccgcaagtcattgcttcgcaggatcttcgcctctagcagactgagtctgtctgcgaggcactaaagttcacaagaaatgctaccttgcttcagaaggtttgaagcatttccatgaggccaatgaagactgcatttccaaaggaggaatcctggttatccccaggaactccgacgaaatcaacgccctccaagactatggtaaaaggagcctgccaggtgtcaatgacttttggctgggcatcaatgacatggtcacggaaggcaagtttgttgacgtcaacggaatcgctatctccttcctcaactgggaccgtgcacagcctaacggtggcaagcgagaaaactgtgtcctgttctcccaatcagctcagggcaagtggagtgatgaggcctgtcgcagcagcaagagatacatatgcgagttcaccatccctcaataggtctttctccaatgtgtcctccaagcaagattcatcataacttataggtncatgatctctaagatcaagtaaaaatcataatttttacttattaaaaaattgcaacacaagatcaatgtccatagcaatatgatagcatcagccaatttgctaacacatttcttgggatttgcccttcctggggtataggggatcagaaatattgatccatgtgcacgcagataaaatggcttctgctaaacagactaaaatctttctctctagtctttctcactgtacaaacccagttgttttcaaaaaatcacagtagcaatgcaactcatcactctagaaaagcaagcttaggctacctgaaagattttccccttggaagtttagcgtatgttgactaacaaaaattccctacatcagagactctaggtgctatataatccacacaacttttcagcctgtgctcattctgtcccatgctggccataatacctagtcagcccattacccttatctcgaattgctccatctcctggtgggacttgtatcttgtctgccatatcagaacaaacccctgaagaggttctgattcgatttactacactctcaagccctaccccttttatcgggacgcttccagcccgcaaaatagaaactgaacgaggacacgggcgcacatctcgaccaatttaaatcccaacaatgtcttacaactttaattaaaagggtaacccctaaggaatctaaagacgcacattgcttgaccgggaccgaaacacgaccctactaacacggcaaccactacccacatcagcacgaaggccacatcctcaactccaacctagtcccccccatttatgttggccaccatgccgcacgatcgccactatcgctgcacatcgataga

SEQ ID NO: 708721 - DNA, 116 bp, Homo sapiens
  misc_feature (63)..(63): n is a, c, g, or t
tgccgcaccaggcgcacttcttggaactttcagtcttcctttctgtaacaggctacttaactnttttacaaaattgtttctatcatgcatagctagagacccacctcctgttagaa

SEQ ID NO: 708722 - DNA, 371 bp, Homo sapiens
agcagtacatacagactcaaaaaagaaaaaaaaaaagaaaatcctacagtatgggacaatatagatgaccctatgaggacattatgttaaggtgaaatacatcggtcacagaaggacaaatactgcttaattctacttatatcaggtactaaagtagtcaaactcatagaatcagaaagcagaattgtagccaggagctaggtggaggggaaactatgaggaactgctaatcggtgagcctggttacaattatgcaagagaaactagttctagagatctgtgaaacattgcccctatagtataacaatactatattagtagcacttaaaaatctgtaaaggaggtagagctcatgtcaggtgtctggcccc

SEQ ID NO: 708723 - DNA, 396 bp, Homo sapiens
aaacaccttagaaaacccattagcctcaaatcttgtgagaactcactcactatccatgagaacagcatgggggaaatcaccccccatgattcatttacctctccctggtctctcccttgatacatggggattatggggattatgttgggaacaggcccccaaatctggccatagacaggccccaaaactggccataaacaaaatctctgcagcactgtgacatgctcatgatggctatgatgttcacgctgaaggttgttggtttaccagaatgagggcaaggaacacctggccacccagggtggaaaactgctaaggttgttcctgaaccaccaacaatagcatgagtgatctgtgccttaaggacatgttcctgctgcagataactagccagaa

SEQ ID NO: 708724 - DNA, 138 bp, Homo sapiens
ttagaggatcccggcaccattgtgtggcaaaagaagtgagctggagatggatcatagccgaaggagtcaggtgtgcaatgatgttagctgtggccacgtgtggatttttcgcaagaacattaataaactaaaaacttc

SEQ ID NO: 708725 - DNA, 792 bp, Homo sapiens
agaaacaaggcaatccagtgaccaaacaggcaattaatcattagtggatttgagaacacaatttcatacgtcagtgcaaagcttacaaggcagtatgaggggaagctggtagctctaattgatgcattctgcaagtccaagttactgaagcagaaggactttctgcaattctctttccccttctacatctcctacttctactccttacttggctcatttctcatcaagaaacattcatcagcagtgcagtgttcattttccgtatgtgttatcatcatctaacaaccaccacacccatcaccaaacgattggctcacacagttgcattcaccatccaacagcaatcgttttcagccttcatcgtattatgcaagctcactggccatcattccattagggatctcctcctcagggatttactcatcatcaacatcagctggaacatattggagattcactagcacacaacctcatagtttcacattctttcgtcaagcacacattccgatttgttccctcccaggttcagacagaactgaggttgcatgccaatttcagcctatcctgggggaaacgaagacctctggtaatcgggctatccttccaaattcaaaattctcatcccaaaaagcacgggacgggccccttttttaccaaccagcctttgggacttttaagcaaccaaggtacattcataggaggtaaggctcattgtaacacctcaaacgttggctccgtaacttttgggtatctctccccactatttaaggggagcttaatctattctaacat

SEQ ID NO: 708726 - DNA, 93 bp, Homo sapiens
ccatataggttggacgaaaattggattttatatgacaccactgacaaccagctcagctgttggactgagaagctccaaagccaaacttgcacc

SEQ ID NO: 708727 - DNA, 341 bp, Homo sapiens
  misc_feature (13)..(13): n is a, c, g, or t
  misc_feature (44)..(44): n is a, c, g, or t
  misc_feature (94)..(94): n is a, c, g, or t
  misc_feature (111)..(111): n is a, c, g, or t
  misc_feature (127)..(127): n is a, c, g, or t
  misc_feature (335)..(335): n is a, c, g, or t
  misc_feature (339)..(340): n is a, c, g, or t
ggaatgtcctganttttttaaaaaatggatatttagtgaagaantgcctgggcctacctatacattatgcattttacatgtgcctaactagaanttccacagtaaccatcntggtccatggcaggantcccattttatcactgagcaaactgggatttaaaaggattaggtaacttgttcaaatatcccacagttagtgggtggtagtttgtgaagctcaggtgttccatatttaagtttgctcatccctgtagtttgcttagatatttgacaatttatcagaagaggaacaggtgaaatgagaaacaaaatggtgagaagctacaggttattantttnnt

SEQ ID NO: 708728 - DNA, 207 bp, Homo sapiens
  misc_feature (91)..(91): n is a, c, g, or t
  misc_feature (102)..(102): n is a, c, g, or t
ccaggtcccttccgggcgcaggttgttggcagaatcagttcctggaggagttcccatcgtggctcagtggttaacaaatccaactaggaancatgaggttgngggtttgatcctggccttgctcagtgggttaaggatccggcattgcctgagctgtggtgtaagtcgcagatgtggctcggatcctgcgttccgtatattgcggtc

SEQ ID NO: 708729 - DNA, 1273 bp, Homo sapiens
gcaacagagggctcgtccggcgccagtgtctaccgcccagtctactcagaatccgtggactacgaggtgcttcggaacagctgcagggtgtttgctttcagaatgtatacagaagatgaagctaggaacaataggagtggttggctgggtgaagaataccacgcaaaggcaccgtgacaggccaagtgcaggggccagaagacaaagtcgattccatgaacgtcctggctgagcaacggttggaagccctagtttctcgcagttgaccgcagcaaatctttgtctaagtgaaaaaagccatctctaagcttgaactactctaagtttgagtattcagcatactaatacgaagagaaaaattggtagagcacagctgacacaatagatactgtatgttcttagagcactatgtatagctagaataatagtagcagagtagggtgagaagaggaactgtactagtatctgaaacgctaagcgactgtacgtgcgactagacaaatgtctgacacctgtaagataacttttacgtcacactatgtactgcactcaagccagaaacctatacgtacttcctaagaagttaagaagtgtcacttacatacatgaattgcgcacataaaacctcgaggaccgatcagagcgttcggcgctaggtaacttgacacaggagcaatgggccatggtgtgcaccgttgtggcaactgaagagggtttctcgggaggacccgcggaacttacacgcgtggcacatagaacggaggggaaaatttctcagacggagagactccccgctgtatagttagcgctcagaactcaacgcttgcgagcatgccccggggtatagaccctggattaaatgatcagccccagagactgggcaaccacggtgacacggcagacgcccctggagagccgcacgaaagcatgacaacggggccccgggaacaggcgctaggagacgaagagcacgggaacaatgggagagcacccaaggataatgggacacgaacaacccgacattgaccgcccagaactactcacgggagttacaacaggggacgaacagagctaccaagggggactcacagaccggtcgggacgcaccaaacaagcgcaataccacgaatccccagagagcccacacaaaaggagcaataaataggaagagaacacagacgcgaagacaacactatgaagagacaggtacagaccgcaacaccaccaagagcagaacacaagaaacggcggactaaattaacatacaataatc

SEQ ID NO: 708730 - DNA, 384 bp, Homo sapiens
gagttttgctatgctcccataaggtgcaagtggtgagcaagaatggtgcctcccttctcccaagtgtgcccaagtcctgacctgtgaatctgcacatatcaccttatttggaaatagaatcttcacagatgttattaagaatcctggctgcgctgggctcaatggctcacgcatgtaatcccatcactttggtgggccgagccgggtgcatatcgaggtccgcagatcgggaccataccggccgacacggtgtacccttgtctctattagaaataccacagcaaaatttaggtcggccgtggtggcgggcccctgaagtcccagctactcgggaggatgatggacgagaatggcgtgaatctgggccgccgagagggtacccgc

SEQ ID NO: 708731 - DNA, 102 bp, Homo sapiens
  misc_feature (63)..(63): n is a, c, g, or t
gatcctccattggagtggcccaatctttcctctagggcaatcctgaaagcccaaggcccttcncagtctggccttggcttcagctggagaagggtaacatca

SEQ ID NO: 708732 - DNA, 615 bp, Homo sapiens
ggtcttgaggtcgaagcatctgggagtgagagacttctgagccaagtgtgtgtcagttcctggagctgtgtcagagcccagaaggtggcttggaggaggacccggtcagtatccacaccttgcacccacatatgcagcagtcaatgcattgtgcatcattggcaccgaggaggcctatgacatcattaacagagagaagcttcttcagtatttgtactccctgaagcaacctgtacggctcctttctcatgcatgtcgggagattggaccatgtggaggtagggagaatagaatagtcgatagtccgtttcgactgaggccatgccggtgagcaacatctatccgaatagacatgtcgctaccctctcagttggggagcccagagaggacgtgaacgtgtgtcaagagtgaggacaggagaagcgcatactgtgcttgcctccggtaacctcgacgtgaccaagatcgatcgttccagacctctttgagggcactgctgagatggatagcaaggtgtcagaactggagaaggtggcattggccgggggtaccagggcacggaagcccaatggatgcgctatacgttttgtggcctgtgcgtgctggtagatcctc

SEQ ID NO: 708733 - DNA, 214 bp, Homo sapiens
  misc_feature (201)..(201): n is a, c, g, or t
cctctgcagctgaagctctgaccactaccgcgcagccctgcgctcctgcagccttgtgctgtagcaccagctcagacaacatcaaggtctctcttccgctaagggcaaggtgctggcccagtctagggggagtacatgtgagtgccatccccatcctgatggcacgccctgacacgctgtaatctttccaaccaagatgantccacgtcagagc

SEQ ID NO: 708734 - DNA, 320 bp, Homo sapiens
taattttttaggaacatctcaaccacaaaatacccacaagtggccgggtgcattggctcacgctggtaatcccagcactttgggaggccgaggccggcggatccgaggtcaggagatcaagaccatcctggctaacacggtgaaactccgtctctactaaaaatacaaaaaattagccaggcatggtggtgggcacctgtagtcccagctactggggaggctgaggcaagagaatggcgtgaacccagggggcagagcttgcagtgagccgagatctcgccactgcactccagcctgggcgacagagtgagattacatct

SEQ ID NO: 708735 - DNA, 195 bp, Homo sapiens
aatctggaaaaaggggggctttttccaaagcggcccccaggtacttaaaaggatttttttggattacggttttttccaaaaaaaaagggcataataaggccataaacccgcccttctctttcagcgggaagggttttaaaaatatttttgaaggggctgggagggcaaaaaagccctttagttcctttttgttta

SEQ ID NO: 708736 - DNA, 406 bp, Homo sapiens
ccctctgttcatacatgtacgatgcgtgctaaccatgtcacacataaaactaatgaacacaaagtccctcatgctacctttttatgcttacactccatccaaacctaattcatgccaaccacttatctcctatcagtatatagtttcatcatttcactgaatatgataaaaataacattgtattcgtcaatggttttcatacattatatataaataatgttatatgactttttattgctcgagagtatgtaagcttttggcattcatgtcactcagcaaattactcctaaggttaatatgcgttgatgaatagttgtttgattatttcttttaccaccatgtatctaaccagatgaaagtagtgtatatttgagagtagtatacatattggatgtatatacaagag

SEQ ID NO: 708737 - DNA, 201 bp, Homo sapiens
tgtgatgatggggtagggtaataagcagaactctgacgtggtagaaaaaatagacctgaattatgtgtaactttgaggaaggtttaatctgatatcaaaataatcattgaaatacaattccatggtaaagttgtacagaaagttatagagattatattgtgatgctggatctgggcgtcggcgcgcgcgtaccgagctcca

SEQ ID NO: 708738 - DNA, 574 bp, Homo sapiens
agtgtcggctatctgtatttcattcacagccagatcatatctatgggacaatagtattgaatagatttcatgcttttatgctggagataactggcatgtgagcaaactgtgttggcgtgagggtggaggggtgaggtgtgcgctaagcctgtgtttacgatttctcaggtaccccatcactaaaggcaccgaaggcttaagaggtaggacaagccatggagccttcctgtgtcaggagagacaagcaaagcgctattatcctaaggtcaagagaagtgtcagcctcgactgatttttattagtattgaggacttgcctcaagtccgctctttctggagtgaagcttccgaaggaatgcttgtaagtacccctgggcttctcttaacatttaagctagctgtatttatagcagctcttaatattacagcccatatctctagcggtgcttgaaggggagggacagggggaaagcgggcagcagtattccctaacttttccagaagcctgttaaaagcaaggtctccccacaagcaagttctctgccagatcgtcaccccgtgcctttggatctagc

SEQ ID NO: 708739 - DNA, 822 bp, Homo sapiens
tgcagcaaggagaccaggaaggggtgagtacaaggaagtcggatgtctgagctggagaaggccatgggtggccctctatcgtacgttttccacctaatattctggtaagggagggtagtacaagcacaagctagaagaaattccagaaacctacaaaggacgctcatacaaacaacagacgctttcccacttttactttacgacagagacacatttcaacacagacggcacgagacgagataaaagaccaacacataccacaaaacacaccactaaaccaacaagacaaaacagaccagacgacacaaaaaccaaccaaagacaaaacacaaaaccaaaagagaagccacaagagagaagcaaccaagccaaggccagccgacagaacaagagacagcacagacaaagacaatataacgagaaacagcaaggcccaagaagccaaagacccaaagatagagcagaacgagcaaagtcacaagcaagagaagaacagcaaaccaagcaacaagagcagagcaagcccaacataaggaagaagctaaaagccagagatccacagcccagaagagaagaaaagcagaacagaacgaaaccgaggcagaagaagagaaaagcaaggaagaagagagaagaggacgcacgagaaagcgaggtccagcaggagccagaacataggcaagatggtgaaggcaggatgccaagccgagcagtggcaggggcagggcaagaagcagagcgagccaagaggagaagggaccaagaagcaaagccccaagaaggagcagcaaggtagagcggaagagcagactaaggtccgag

SEQ ID NO: 708740 - DNA, 87 bp, Homo sapiens
gggggggccctggggggggttaaaccgggttcccaaaaaggggaaattgggggggaaaaaccttttgggcccctaagggttccccca

SEQ ID NO: 708741 - DNA, 477 bp, Homo sapiens
ttgctggtattctctgagcttattggatctctggtttagtgaatggaaattctcagtcattattgtttcaaatatttcttctgttcctttctctatttcttctacttctgggattctaattatgtgtatgttataccttttacaattataccacagtaattggatattctattccatgtttttcagtattttttctcttcacttttcagttttggaggtttctattgaaatgccctcaagctcagaaattctttcctcagccatgaccagcctactaatgagccctttaaacgcattcttcatttctgtttcagtgattttgatttctagcattgcttttggttctttcttagaatttccatctctctgcttacaatcccttctgttcttgcattctgtctactttatccattagggcccttatcctattaattgttttaaatcatagtatgataattccaacatccctgccttatc

SEQ ID NO: 708742 - DNA, 1549 bp, Homo sapiens
  misc_feature (1117)..(1117): n is a, c, g, or t
tcgatggtgtattgtgtggggtcgtcttcagctagttgttgtgtctgtggtcgcgctccgcgtctctgctattggtgggatcgacacctacctgtagttctcgctttagccgcggggtttgattatatgatggtcccccgcagcggttatttgtaacagggtggccgctttggcaagatacgggcacgcggctggttaacctcttttgtagggccccctgtggggtgatgaataggttgttcgaccgattttgacggcccctctcgggagttttaatttcgcccctgtgttgtgtctcgctggcaccaaactcgttacgaagtgttttttgtccccctcaggcaaaacgggaaagaatttacagaaaaagggaatttcgggagaagttgttgggtttttttcgggccccgggaagtaccacaacggtgcgcattgtgtgtgccaccacaggcgcgtttgtgttcccccccggggtttaaaaaatgtttggtgggaggccaacgcttggtgaacacgcggtttgcgacggaaatagggccgattgtagccccccccgagagtttttattatgcgccacttggggtgttcctccttcatgaattgtcgaaccgcaacgattaaatataaaggggcctgggggataatacccacggcctcttttggaagaccaccacacggcccacccttcggtgttccaaataacctgggggcccacaaacacgacgcacctttgttggggcttctactaagagaagaacacgcactctggtaaaaaaagatgggcctctcttgtgtgaccacagccctggaagttactcctggttattattaaatagactcacacatgggccccatagagtggcccacaaaagatcttatagcggcttcttatgtaatattgtgccacacatctgtttgtgagaaaaaatatttgggcccacccagcagaatatatgggggagtatgttataatctccgcgagttggtcccgcgctttttcgtcgttgatacgtctaaaatgtgtgtagacaaatatattttatggagtacacctcttcttttgagaaacacacttataccacgctttttcttgtgagagacacacactgagactttntgttaaaggagtctggtgaactatattctatatcacttcctctatatgagacacatggaccacttgtttctgtcacctaaatccctctggagttttggctcgtatattgtcaccctataaattggtaccacggtgagctcgagtgagaaattcttctatagtggattatatcactgataccaccttcttcggtcacacacacggttttcctctcacgcttgtgaagctttttctttataaaaggagaaagagtatcccaaatgcctcgctgctaccacccctctttcacaattgctattcttttgaaaaggcacccacgtaatgtgttttagagttgagttttccccgtttcaggggaatcccggaccgtagtttcagttttgatggtataacgccaaaccaattaaacgtttataaaagttgtattcttga

SEQ ID NO: 708743 - DNA, 509 bp, Homo sapiens
  misc_feature (61)..(61): n is a, c, g, or t
ccctgaagaaacgaaaaagaaaaacaaaaacaacaaaaaacaaaaaaaacaaacaaacctnaaaaacaaaaatagacacaaaataacacaaagaaaaacaacaaaaacatttaacacacaccaaacaaaaaaacaaaaaaaaacacacacaaaaaaaaaaacaaacacaaagacaaaaaaaaacaaaacaaatacaaaacaaactcaaaataaacataactatcaaaaacaaacccaacacacaagcacctaacatactcaactaacactacatcaaacaccacggatccaaacaccataacaaaaccacgaccatcaaaaaactaatcacacaaccaacatagaagcaaacataaaatacaaaaaaccacagagaaaactaacgaatcacaaaaacaacacaaaaacaaaacactaccaaacatcccagaaaaaaacaatcaaaaacaaaaaatctacagccacaatacaactaaatcaaaataacataaaaaacacacaacaccaca

SEQ ID NO: 708744 - DNA, 291 bp, Homo sapiens
gcattcatgaaataaatatatgatgacgggtgtattctcgtgtagaatgagggtaatagtgttgttatagtggtgggtgagtgagccccattgtgtgtaggtacctatgtagagggagtatagggctgtgactaagtatgtaaaatacagtaagtaggagagtgatatttgatcaggagaacgtggttactagcaacagagagttctcccagataggttaatagtaggggggataaggcgaaggttaagcagaggctatgctaagaagtacatccaacacaagctcattag

SEQ ID NO: 708745 - DNA, 777 bp, Homo sapiens
gggaacatgaggcttggtagtgagcccgctgctgggccaggcgctgcggtgctgcttgcattcccgggtcgctgggtgaacaccgcgtgaggccccgggacttgcctgtcgttgcttggtggtgcggcatggtcttctgtctgtcgacgcgaggagccgcgctctgcccgctgcgaggtcgactatggtccacttccaggcctctggaagtccagcgagcgtgctacacaacaagttcgtggtcatcttgggggacttccattcagagggctgtgtacaaggacctggtgctcttgctccagaatagactcacgtttcacagctgcccagctgaaacgccaagggggagctgagctttgaacaggaccagctgttggtctggggaccaactgggtgagctgctacaacgggaacacagtatcggtgaggtccgccagtatctgctcgggctctaggcgcacaccttgtgcgcttctacttcctcacctcgtgtatactccgagtaccttgaggatgttctggaagagctgacatattggacctgccccggaccgtggtgaatcatcaactccatgcctctgggatctttccagatatggtcggctgctcaatggagagctacctgggagcaacctggaagcgggtagtttgtgcgcattggaccacgttatttgccagactcctgcctgttgggtgtggaactattggcgatgccccatcggggaacgtatcactggggattacatactgcaagagctccagcccctggcagggtgc

SEQ ID NO: 708746 - DNA, 805 bp, Homo sapiens
gctgtaccggggactacgcgtctcatccatggcttccgctggactctcgccgggtggcggggtggcggcggtgccggggggcaccttccagccctacctagacaccttgcggcaggacgctgccgcggacggacccaacgctgttgtccgtagtggtggcggttctggcggtgctgctgacgctagtcttctggaagttaatccggagcataaggagcgagtcagagagctggtgcttcattgtgaggcctttgtgattccggggaaaacgttgctctttgtcaggttgttaacaggcctttatcagagacacgtcagacgtccattactgacagctgtgctgtattcgatgagtcaacaataacaggggcaatagtctgaccttgatatgaccttcccggccatgagagttcgaggcttcagattcttagagctggtttaagtcttcatgccagggctatggtgttggtagatggatagtgcagcattccagacgagaggtgaaagcatgtggctgagtttctgtatcaagtcctcattgacagtatgggtctgaagcaatacgaccatcattcttgaatagccgtgcaataagcaagatattgcaatggcaatatcgagccaagttacattcaacagcagctggagaaagaagtcaacgaacttacgagttaccccgttctgctggcccccaggacacctggacagttccagcactgcccctgcgtcagctggggacagaaaggccaagagtggaatttctcacaagttgccctcaatgtggagtcctggagtgcagtgcaag

SEQ ID NO: 708747 - DNA, 1254 bp, Homo sapiens
tataagattattagtttaaaaggggaaataggataggagttagcggtggtaagggcgatgagtgtgtgtggggaggaagtgggggtgggtttggctttgtttcaaacgtgctcattttatattttttacgttgtgttagactactggggagttaggtgtcgattgagggtggaagttagacttctaggcgttcagagttagacaagttcagacaggttaaggagagggttgacagtgggtgcgctatactgaagtggtgtgtgggatatgtatggaggcttatatgtggtttttgtgggtgaaatttcttctcgcattaagtggccccattttgtggccaaaagagcccggttatcagccgggggagcacaggcctctccttaaagggcagaaggacagggttggaagtgggaacatttagagggggtgtttaagctccagtgttctcaggcttttgttatctccaggtgtgtcgaacgaacttagttcagtctgagagggtttccggtggagagtggcccttgcgagagtctttctaacagtctttcgacagcctcagtctcagaggaaaagtgcgccgcgcgtaagacatcagtgttaaaggggacttaccagttcttcacacatgatgtttccacacactcttacaagccacactggggtcacaactgtcttcctaaaggcggggcttgtcgactaacccgacgcgctaatgaaaaacccggtgggccctatagtattatatttatccacgctgcccccatatagtgatctgggggagcattccaactttgtcggcaggcagccaagtagttaattgggcgacaaacaaagcacactatcttcagcgccgtagcttacgacactcgagcgggctcttggcggggtatctatcaacactttcccgaagccatgttcttaaaattattgggaccacctgagtcattaactcggaacatgtcggacatttaacagcaactttcgtctgagcaaaaagactaggtttcgcaacgtgggacagacaaggcggcgcataataacagcggctataactaggctagagaccgcgggacagaaacgacaacttactgctgggcgaaatctactacttgacaccttgtcgacacgaatttggcggcgcaggcaacaaggaactgctaataaaaaaatctggcacagaagtaccgggtgcctcgtctatccagtaaacaggtgtaactacccccatctgaaaggggggtcccccccacaaag

SEQ ID NO: 708748 - DNA, 200 bp, Homo sapiens
  misc_feature (40)..(40): n is a, c, g, or t
  misc_feature (81)..(81): n is a, c, g, or t
  misc_feature (101)..(101): n is a, c, g, or t
  misc_feature (131)..(131): n is a, c, g, or t
  misc_feature (172)..(172): n is a, c, g, or t
  misc_feature (191)..(191): n is a, c, g, or t
gtaaaaaggacatgacttttgggggttcaggagccaaatnctgtggtctgagtgtttgttttcccctaaaattcatatgtngaaacttgatccccaacatngtggggcctttgggaagtgattaggctgtnaggattccactctcaagaatggggttagcgcccttatgaangaggcctgagggacgggtnttgcccctg

SEQ ID NO: 708749 - DNA, 392 bp, Homo sapiens
tggctgtactcggctgagatatcagtggttggtgaacacgctatgcctgaagcatgcgcactaaagtggtttcgggacaacgcagtacctgggtgcccctagttcccagaacccagcaattcctacaccaccaccatcaacccgctccttgaacgaaagggctgagacaccacctctgccgatccctccaaccccaccggatatacaacctctggagaggtactgggcagcccaccaacagctacgggaaactgatatccctcaattgagtcaggcatcaaggcttagcacccagcaggtgctggattggtttgactctcgattacctcagccagctgaggtggtagtttgtctagatgaagaagaggaagaggaggaggaagaacagccat

SEQ ID NO: 708750 - DNA, 760 bp, Homo sapiens
gagcagacgagactcgagaaacctgctttgatggatgtatgagactcgtgcacatgagcacttttaatgccgaaggtcgagactgcacctgttgcagtcaagggcggtgtgatccagcatgaggcctcttataattgaaacctacgttatatcgaacgtgatgctaatttaccgagcccgggagattatggagacctatcaggattcacgatgacactctctagcacatactttcatacacatatatgtttgacactgatacacagatcgacagctctctatgttgtatatacagagaggtgatcacggactcgttacctgcggggcgcatgttagatgttgtccacactgcaagtcacctactgtggtggacttgagctgagaagagcatgtcgctactcttagactgtctgtgaatacgacgagaagacatattctcgcatgagcctttcctcgtatcacatggaggagcgagagtgctctcactgggagcagactgtgcactggccaccaatggtggcctagtttacccagcattgtgagctatgacaggatgagacattctctgagcctatctacacacgccatagcagcagctttatgcctgcaggttcttgatgaggtgattcgctctgagcacctgatcgtggcgcacaggacactgctgagctgtgggatagccttcacagctgagccgcactcaagacatggtgcggtgtatatgctgatccagattgcgtaggtacaccacagcactggc

SEQ ID NO: 708751 - DNA, 502 bp, Homo sapiens
cttcacgcccagatgcatttgcagctatgcggtcctcccgcctcccgcttcaggcctctcccatctcccctgggtttccacacagtgtcgcagcttcacctcgagagggccacgtgattggcggcactggggatgcctgagcccttgatccctctgctggggtccagggcgtgggtgtgcatccctggagcgtgtgtgctctgggcgtgggtgtgcgtccccggagcgcgtgtgctctgggcgtgggtgtgcatccccggagcgtgtgtgctctaggcgtgggtgtgcgtccccggagcgtgtgtgctctggccttccctgcccagctcctatggctcctcctttccctaggttgggcagaatctcccaggtgtgctgctgatggacaggctgagagcgtggagcccacgagggcgctttggtttagaatcatctcattggtttgcccacgttaagctcctataaaatctaggggaaaaaaaataaacatctttttgggttc

SEQ ID NO: 708752 - DNA, 942 bp, Homo sapiens
gacaggtgggcatgtggacatcccatgcagcacaaccccaatggacccccagcaccttggatgcagcacactcaccaccgatgaaccagggcccccaacctcgcatgggcaccatggcactcctccaatggtaactgggaaggtacagcatgaagaggctcatgggagtcaaatcgccgagcagtcacggaaaaaggtatgactgccgccaccacctagtgggcactgatgcacggcgacagagacgacgccatcccaagatggcgcagccacggaaaaacgcacacagacacgaggagcgacgaggagcagcagagaaacagcagacggagaggcagccggcagaacaacaacgcgcagcaaccgcgcgacgagaaagaagaagcgaaggacgacagggaaagacagagacacgggccacacgcagagcagggcgagagagagcacgaaagagaacacgaaagagcgagacacagaagcaaggggcggacgaagacagcaacagagaaaaaggggagcgagaagaccggacaaccaacagagagcgagacgaagccacgccggacagacagcgagagacgaggaacagacgacagcacgagaggagaaggagagagagaggacagaagcgacagcagaggaggaggagcagagacagagacggagaggagccagcgaagagacgagagcagggacggaacgaaggagaaggaagacgagacggaagaggcggcagagaagaggcacggggaagacgcgccagggcagggcgagcgaggagacagaggggcgacaagaggcggagagcagagcgcaggagcgacgaagagagaaacggagacagcggagcggcgagcagcaggcggcaaagcgcagagcggacagcgaccgagggcacgggggcgaccgagaaggcagaggacggcaacggagaagacgaga

SEQ ID NO: 708753 - DNA, 539 bp, Homo sapiens
  misc_feature (219)..(219): n is a, c, g, or t
aaaaaagcttcatggggtgctggtttagtttacaataatagaaaccttttggaggtgccaaaacttcaactgctgcggtggggcctccacagaaggttttgcgtgggagttggtggatattgtggtaaccagcagagtgcctatgtgaaggtctccagggagcgtgttcctcatgagaggtccaacccatcctttattatacaagtacctgctcatccncggcggctcatgaaggagtactctccaatttggaggttcatgtcaggcggcttcctacctcatgataatagcagttcaatgtgcattttgtgtatcaagtgcttgcatggaaggatccgattgggtacctgtgcaggttgatggtcagttgtcgtcccaactacttggcattctttgtttgaattatggcatgcattccatcgacatcgctttgtgttatatgacctttcccccagtactgtacagcatgtcttgcattaatagccctctgtctcagatctatatgtatgagtgtataaatgatttaataaataagcctt

SEQ ID NO: 708754 - DNA, 404 bp, Homo sapiens
catgagacaacactggggaagaccccgtactctactaaaaatacaaaaatcactagggtagtgatagagagggcaccatagataatccctgatatacaggagagcatgaggcaagaagaactgcttgaacccaggaggcagaggttgcagtgagccgagatcacaccactgcactgcgggcctgggcaaatggagcaagactccatcttaaataaataaataaaattctactgatgataaacatttgagtagatacctgataataactatcatatacttatatgatgtctttaggtggctgtcacacaatacactgctatcagagacaaagtcaggaatgttaatggtgggtcactgagtacacggtacgtatgtttagcttaacagacactgccagaacggtt

SEQ ID NO: 708755 - DNA, 144 bp, Homo sapiens
tactgtgaccttctgaatcctgcagtgtttgagttgcagagcggtgagtctcttgcccgggtggcgagtgaggcacctcttcggtggtgctacaggcctcggcagcattatcgtacatatgagtagcctcgattatgttctttt

SEQ ID NO: 708756 - DNA, 152 bp, Homo sapiens
tcgccggaactcgtacatgtgaaggcatgcccctgcaatgctgaatacacgtcgaccaggctccatccaaacgatctgtggacgtcaacacggtgctcacgtgtcgacggaacttgtcccaggaaggcatgcaccgacagtggtgaatacac

SEQ ID NO: 708757 - DNA, 295 bp, Homo sapiens
  misc_feature (288)..(288): n is a, c, g, or t
atttcgaggagctgtctgtgtgtctgaacaaaaatgggagctgggccaggccggacggtggtctctgggcaggtcccgcggtgctcagatgccctggtcacaggtgccgggaacgggagaagcagcagcattggatgtggtggtggcagtggctctggagaaggacctgggtgggaggtgggggtttgggtggtgacgtggtggtggcagtagctctggagaaggacctgggcgggaggtgggggtttgggtggtgacgtggtggtggcagtggctctgggagaaggncctgggt

SEQ ID NO: 708758 - DNA, 221 bp, Homo sapiens
ggttcaatagcatccacactctgcaactttgggttcaaagtatagattatgtcatcagtatgtggtgcctgtattcttacatattgataatacatatatagacgggcttatcacttaatgttccattggttcatcagcctcttctgcaggttcatcagcaggttgagcaggctgtgcctttctctgtggtctttcttcgagaccttccaggaatggagacg

SEQ ID NO: 708759 - DNA, 271 bp, Homo sapiens
ctacaaataatcattcagctggaacattcattatagacttggcatataatcattccttaagagaggtcggcggtcatgtgcggtacaaatggagactagggaagtagtgtaagtcctgggatggaaaggagtggataagtccctgatagatactcccacccccaccatttcctcataacctccgattactccgattactttctacgtgtgtgtgtgtagtagtgtgtgtgtgtgtgtgtgtgtgtgtgtgtacaacaataagtaactaata

SEQ ID NO: 708760 - DNA, 119 bp, Homo sapiens
tctgaactcctgactgtgatctgccaaagtgctgggatatagacgtgagcaccatgcctggccagtatgaagttaaaacaggatctttacctttgtcagtctagtttgagaaatatcac

SEQ ID NO: 708761 - DNA, 519 bp, Homo sapiens
gttataagggcagatacagtgggagatctgggattcatgttcatctaagtggactccaggaaggacagataaatacctctagttagcaacggttaaaatgggagctaataccaactattaattcccagttgggatcttctctttctctcaggactactttaagtccccaaaattccatgcttccaatttccccttctacaactgaagatcctatgattgaaatcataaaagattagctatattgggacactggccttgtattagtttgacagaaaattctgaaaagatctccccatgccaaaaaggtctttctcagacttggggtggagacctaaaattccaccactagaaattttaatattgagagtaatgctgtgtcccttactgacaaattcaatttcaaaacacagtagaattaaatcgacataaaaataaatgtattagataaatataatttttaagtatttgtgggccaaagatcaggagggaatatagaaatgtcatttgtggcgtgaaggt

SEQ ID NO: 708762 - DNA, 175 bp, Homo sapiens
ggaatctcatgtgtcagccagggagccgtgctggaagtttatccaggatctcgacaactgctcagtgatggccgtggagtgcgagagccggcgctactgcttccagatcaccacgccaatggaaaatcgggaataatcctccaggctgagagcagaaaggaaaatgaagagtgga

SEQ ID NO: 708763 - DNA, 523 bp, Homo sapiens
tcgccaatgatatacatcactgtctctgctgatggacacgagtacgggtcaagagaacaacgattactatcactaatgacaagggtaaggaggcactgtcatctggtcttgactgggataatagtatttcaattgagttactggtgcctaagggcgtctagctaagagaaactagagttacacatacacaggtaatttaaggcttttacttagagttaatttctttcctaggccgtttgagcaaggaagacattgaacgtatggtccaggaagctgagaagtacaaagctgaagatgagaagcagagggacaaggtgtcatccaagaattcacttgagtcctatgccttcaacatgaaagcaactgttgaagatgagaaacttcaaggcaagattaacgatgaggacaaacagaagattctggacaagtgtaatgaaattatcaactggcttgataagaatcaggtatgtgtatatatttttttttatttcctcccccactcaatggaggggaaggggatggt

SEQ ID NO: 708764 - DNA, 141 bp, Homo sapiens
ttttccttgttgggtttccggggccgttccctcccccccccccgggttttaaaccgtgtggttccccttggggcccttttttgggggaccccccctttccctttaaaggttttttggtccctaaaggccgtgggtttccca

SEQ ID NO: 708765 - DNA, 1259 bp, Homo sapiens
  misc_feature (351)..(351): n is a, c, g, or t
  misc_feature (436)..(436): n is a, c, g, or t
ggttcctcctcctccgtccacctccggacattgcggaggtgaatcacttgtcactcgtactcggacgagtcagagatggatgcgcaggcagagtagggtcgcagtctcaatgtaagcttccagacacgttgctatcgtacatgcacgagccaaaggtcgacccatgttgctgtatcgtagagcattgttgctgcagtacgtgctcacattagacctacactggtgcgtacaagtagaacgcttgcatgtagcatagatcaacgcgcataagaggtttcgtttggcaccattgaatccatgtaggtaggcacaacgcaggaggagaacgtgtgtgcgcttaccattgggttngctaagccacgcatttggctacagcatcggtgatcgatcgattgggatcattgacaatgctgtcccgacaggtctcttggtgagnccgactatctagtcgcgcgcatgttgtcactggtaccattcggccgctttgcgatgtcgcacagccatcgaaatagtacgatagtatacagtgagccagatgagcctccgatagtacgtggcacgaggtctatggtgtcgcgagacgatcctcaagaaatgcgagggccatgaattgcattgcctcgcttgccgcggagcacccgtccgatccacccgttgagagggggcctatcatgctaacgcagttgttgagtgcaattgtgtagggcgcgatgagcaacatcggacacgtcctatagagcgtggcgtgcgtcagggtagctaggttcgtcagacgagaacgttgtatccattggttgttgcggaactgttaggacgagcgtagggggtgcagtgcccattgcttgtacactgggggcgcccaggaacgggttgccacctctaggacgacgaatctacaagttgttggacttgggactgcctgatgattgggaagtgccttcaattttgtgtagccttcctggctcgtgaacgagagcgcaggtgcgccattcaatcgtaggccccctgcgaaatgggcacgtgatcgagtaagcttgagacacggcactccgcttccccccacggaagggtgggaaccccagggaccctgttgtcggtgcccgtctggttgcaggatgctccggacgcggggcacgaataccctgtgacccagcgggggctttaccagcgcgggcaattgaagttgaagccggcatgggtgggcggcctgttgggaccacccaaaagcaaccttgggagggaacccccctggtaacccg

SEQ ID NO: 708766 - DNA, 370 bp, Homo sapiens
tggtttactgaacttctcagtttctccatctgtaaaatgagaattctagcaactcgtagggtatttgtgagatgttgcatgcaaagcccccagcaccatgcctgtcctagcttaagcacccaccaggtgtcgataagtaattgttcttccctggactgcctgcacatctagggcaccccaggaagagtcaccgcactctgtttcggggctcggctctctgaggggagggcatcctgtatggggaggagggtctggaccagagctgtccctgatcgctagaatcaacggcagaattcttgttattttaataataattaataatttagtgcttccactaaataaaaatcattggaatggtgaaaaaaaaaaa

SEQ ID NO: 708767 - DNA, 923 bp, Homo sapiens
agctgaaggccaaggagggagaggaggcaggtcctggggaccattactggaagctgttcccaagactgggcgatgagaaggatgtcagtgtgtgacctgcccagactaccgacgcagctgcttccaggcccctatttgccccgttttcagactcacagatagatgccatctcgcccgctcctgacgttcctctacttgcgctgttctggccagcctggggggcccgcccagccctccctggcctctccactgctctccactctccagcgcccattcaacgtctctgcttctgacgtcacgcgggcttccactgccctgcacgacccccccatccagcatcatgcccaaagcccccggcgcagtcccgccgcacacggcaacaaagtcacccaggcccgcctcttacacaggcagctcgggcgaaggcctccaccaaaccaaggccgacacgcgcctctcccgctacaccttggggccccctgtctctccaactcgctaccctcctgcctgctctcgtgtcctccctactccaggccaacccaacccacctgactcctcccacatcacaagaattcaccagacatgctcccaacacaaccccacacacacaccacccaccacaaggaccacccagaaacaaatctaaccacaaaagccacacacaaaccataccaacaaagacaacacaacaggcaaaccgactacaaacacaaaccagagccaagggaagacgaggacagcgcgaagggaggagcgggagaggacacggagcacggaatataacaggcgtacagacgggctgccggcgcccgcgccggaattaacacccagaaagcggaagcggagaagagacggaacaagcgggggcagcgcgccactgggaagccggcaggacagggaacaaggacgggaggagggctgaa

SEQ ID NO: 708768 - DNA, 1247 bp, Homo sapiens
  misc_feature (782)..(782): n is a, c, g, or t
  misc_feature (833)..(833): n is a, c, g, or t
  misc_feature (1112)..(1112): n is a, c, g, or t
agcggggggaatgcgaagtagcgtcaggcgcgaggcggctggtggacccgtcggggcggacgggacgcagaatatgtccgctctgactctggaatgagcagtcatttcgcatcacggtttggatggcctgtccatttgtcacgaatgctggtgtgcagcacggacgtgttggatgataggtgagagatccgtcatgcctgttggtgtgtgtgcactaagttgatgccccagttgtatagacaggttcttccccagtgtgaccacgatcccgaggatgtgtccagaggcgagttcttacaggcgtgacttcagtgattgtgtctctgggattgcgtcgtgtgacgtcttgtttcgcggcaatggatctgcgaagaataggagggtcgcttgggcggtacatcgtatatcacggattatttcctgtgatttccttgtcgcgcattgctggtacacgaatggagatggaaatattaccgtgataataccccattcacatggaattgaattgcaaagaacgtcgataagggtggttatgatcgtacaatgaaccctacgaacgtccattggtgatcgagaagtagggctcgagggattgaaagaaacttttccaatacgtgaatttattaataccgaacattgtgccagtgaatattggcgaaccgactttaaaacaagatttaccgataaattgttaagaggatggggttgtggggttccccgacaaatatatagatatataaaacattgagacacttcactctggaagcgcagacttgtgaggnaatcaccgggtggcttcacacattaggggggtccacgtaggcattccactntttcaagtgagggagggtgcgggccaccccggtgtttggctccgagcgcctttgttctgtaggtttgtccaccctgtttaaagcaatgcggggaggtgtcttctaagggtctcttggggaaagcttgctgttggggaggggaaataaccctttcacaggggggttccatttgagatgcgtaggcatattgtgcgccgtagtgtgcgtgttgtcaccggacctgtggagttttacccccgctgtgtttttcaaaacaacaagtttgcggcagccactatntattgtgcacagagcagacagcaaaagaaaacccggtttgctgagaagagaggtttgtgggagactatttcaacaggagaggcccccaacaagggggggacacaagagttgtgggccattacgcgggtggggaaa

SEQ ID NO: 708769 - DNA, 136 bp, Homo sapiens
ccggtggcttcccggtgccccttacactccatcgagtcccggtcgcggcatgtcccagaaacaagaagaagagaaccctgcggaggagaccggcgaggagaagcaggacacgcaggagaaagaaggtattctgcct

SEQ ID NO: 708770 - DNA, 206 bp, Homo sapiens
ctaatcacattagccttatgcaatgactgggggatgtggagggttgcagtgttcctgcaggtactgctgatcccactaggaagagctccttcaggactggaattttttatgcttttcttcattgctgtatctccgatgactacaaatgtgccagacattagtaggtgctcagttaatatttgctgaatgaatggtattgaatagtc

SEQ ID NO: 708771 - DNA, 511 bp, Homo sapiens
  misc_feature (1)..(1): n is a, c, g, or t
  misc_feature (67)..(67): n is a, c, g, or t
  misc_feature (94)..(94): n is a, c, g, or t
  misc_feature (151)..(151): n is a, c, g, or t
  misc_feature (153)..(153): n is a, c, g, or t
  misc_feature (168)..(168): n is a, c, g, or t
  misc_feature (190)..(190): n is a, c, g, or t
  misc_feature (234)..(234): n is a, c, g, or t
  misc_feature (236)..(236): n is a, c, g, or t
  misc_feature (238)..(238): n is a, c, g, or t
  misc_feature (242)..(242): n is a, c, g, or t
  misc_feature (248)..(248): n is a, c, g, or t
  misc_feature (250)..(250): n is a, c, g, or t
  misc_feature (255)..(255): n is a, c, g, or t
  misc_feature (259)..(259): n is a, c, g, or t
  misc_feature (261)..(261): n is a, c, g, or t
  misc_feature (304)..(304): n is a, c, g, or t
  misc_feature (326)..(326): n is a, c, g, or t
  misc_feature (336)..(336): n is a, c, g, or t
  misc_feature (351)..(351): n is a, c, g, or t
  misc_feature (353)..(353): n is a, c, g, or t
  misc_feature (359)..(359): n is a, c, g, or t
  misc_feature (364)..(364): n is a, c, g, or t
  misc_feature (389)..(389): n is a, c, g, or t
  misc_feature (511)..(511): n is a, c, g, or t
natggctcaagaataggaataagaaaaatgtgcagtagacgctgtttgtccgacgatgatgaaagtntgcacggccggctgtcctccgattgangggccttgtcaaggcctcagaggcagcgaggtcacagcctggtggagggtctgggtntncgctgtgtccatctncacctcacagacaccagttatngggggatgaaaccgggccaagaacacatgtgtgcacaggctgtntntncctncatgtntnggatncgtntnggctgtggcggcgggtggcagatgagggataggacagaaaatngcccatccaaccccacatcctngccgggcgtntccaggtcccttttntnctattnttttncttccccatacgtgacagggacttngctctgagggtcaggacctggctgggaacacaccattgaagagggaacagaaaccaggccctgggacgctagagaccccaagagctacctggctgggtctatggtcagggcctgtagtgggn

SEQ ID NO: 708772 - DNA, 1020 bp, Homo sapiens
tcgtcggtgctttccttgcttcaacagtggcttggacggagacccggctggctcgtgtccccagccccggccggccgcccataggcagccctccgtcagctcttcaccgcgcccttcggactgctccctaagggggccctctcgcactgtcggcttccgagtcggccgtggcagccaaccgccgaccgccgtcgcctctccttagtcgtccgccgatgaacgagccgggtccacctcgcaggtgctccaggaatctaccactcaggtagtcagaggccggcatcaacgcgagcgagcaatcgagaaccctggaggctccttacgggccatccgtaacgttgtaccgtgtacgcagtgctgcttaacctacccttttggaccgcggcgaaatgcactgttgggcgtatgtgcacaccgaaaccttgtgtgccccaaaagtacctgtgtacgttacaaccgaatacgtcactgaaggaacgtaggcggcaacgagtggcgtgtagaagagcttggagtgcacacgtctgctaggacaccaaacggaagggtggtccggagagtcgtatccctatacagggagtagtcagaggaaaacccagacctggtgcactggaactgggtgcagagtcaggaaccttgacactggccacaatgtggaggtgttgtcactttacaactcttgcgcaatacacccatttgttgagacttccaaggtccaccttaccctgggaaaccttggccacaaagaactagtgtccacgttgtaccattaaatagtggacctcgcccattttgttgttggactttcccttcgcaggacacatttagcttgaattggaagcagggttgaaaatgccatccaaagacatttggtgcttggcacctcggttggacccaagtttggtcgccagatgggaaggcgcggaactcgggttggggggaaaatttctttgggacaggcacgctgggagcagcgtgtcatgaagaagggcgggcgcaaacccaacgcggggggcaccg

SEQ ID NO: 708773 - DNA, 233 bp, Homo sapiens
  misc_feature (149)..(149): n is a, c, g, or t
  misc_feature (164)..(164): n is a, c, g, or t
  misc_feature (183)..(183): n is a, c, g, or t
  misc_feature (205)..(205): n is a, c, g, or t
  misc_feature (216)..(216): n is a, c, g, or t
ctagaggatcccatccccggttctgggtacagagccaaggaagcatctcctcctgccaaagatggccacagagcctcacggagcaaggaaaggggtccagaaacccctgggaatcctattccaggctgcctctggatgggggacactanaaaatgtctttcctngtggtttggaagtttctanaaccttaagcagttgtccccangtgtctattanaaaactcgcaagagcta

SEQ ID NO: 708774 - DNA, 238 bp, Homo sapiens
gggacacttgattacctacctcagtgtacactcaactatgggttgtatcagtttgtgtatgtgcaaatgtcaaataatctttggctttaatggctactgtactggcttggaaagattacctactattttatgataaaatgtagttgtctccagtagcttaaatataattggtaaagcactgggtttaaattttctctcatacctataaacagtatagcagttaaggcgtttctagtta

SEQ ID NO: 708775 - DNA, 5541 bp, Homo sapiens
  misc_feature (347)..(347): n is a, c, g, or t
agcgggatcactgaaggagccgagttcgctgctgcggggcctgccctggccggggtgggaggtcgcccggcccttcccccgagagcctagcctcgggctcctcagcggcgttgcctgcgcccgctctgagcgccattacttcatcactttaaagttgatggaagaacttcatttttaatttcatcacggaaactgtggagtaaagacttgtattatccctgttttacaggagaacaaacggagtcttactctctctcccggtctggagtgcagtggcgtgatctcggctcaatgtaacctccactctccgggttcaaggggttctcctgcctcagcctcccaagtanctaggaccatcagtgatggctcatgaagcaatggaatatgatgttcaggtgcagttaaatcatgccgaacaacagccagctcctgctggcatggccagcagccaagggggaccagccctcctccagcctgttcctgctgatgtggtcagcagccaggggtaccatccatcctccagccagctcctgctgaggtgatcagcagccaagcgacaccacccctgctccagcctgctccgcaactgtctgttgacctgacagaagtggaggtcttgggagaagacactgtggagaacatcaatccaagaacttcagaacaacataggcagggatctgatggtaatcacaccatcccagcatcttcgttgcattcaatgaccaacttcatcagcggactgcagagacttcatggcatgctggaattcctgagaccttcatcttcaaaccacagtgtagggccaatgagaacaagaaggagggtatctgcttcacggagggcaagagccggagggtctcagaggacagacagtgccaggttgagagcaccattggatgcttactttcaggtgagcaggacccagcctgacttgccagctaccacttatgattcagagactaggaatcctgtatctgaagagttgcaggtgtctagtagttctgattctgacagtgacagctctgcagagtatggaggggttgttgaccaggcagaggaatctggagctgtcattttagaagagcaactagcaggtgtctcagcagagcaagaagttacatgtatcgatggaggcaagaccctccccaaacagccatctccccagaagtctgagcctctgctaccttctgcttctatggatgaggaagaaggggacacttgtacaatatgtctggaacagtggaccaatgctggggaccaccggctctcagcattacgctgtgggcatctctttgggtataggtgcatttccacgtggcttaaaggacaagtacgaaaatgtccccagtgcaacaagaaagccaggcacagtgacattgtcgtcctttatgcccgaaccctgagagctttggacactagtgaacaggagcgcatgaaaagttccctactgaaggaacagatgctaaggaaacaggccgagttagaatcagcacagtgccgactccaactgcaggtcctcactgataagtgcactaggcttcaaaggcgtgttcaggacttgcaaaaacttacgtcacatcaaagtcagaatttacagcaacccaggggctcccaagcatgggtcctgagctgctcaccctccagccagggccagcacaagcacaagtaccacttccaaaagaccttcacagtatctcaggcaggaaactgccggatcatggcatactgtgatgctctgagctgcctggtgatatcacagccttctcctcaggcctcttttcttccaggctttggtgttaagatgttgagtactgccaacatgaagagcagtcagtacattccgatgcatggcaaacagatccgtggactggcgtttagcagttacctcagaggcttgctactctctgcttccctagacaacactattaaactgaccagcctggagacaaataccgtggtccagacttataatgctggacgtcctgtctggagctgttgctggtgtcttgatgaggctaactacatctatgctggactggccaatggttcaattctggtatatgacgtgcgaaacacgagcagtcatgtgcaggagttagtagctcagaaagccagatgcccactggtctccctgtcatacatgcccagagctgcctcagctgcatttccatatggtggggtgctggctggaaccttggaggatgcttcattctgggaacagaaaatggacttttctcattggcctcatgtgctgcccttggagccagggggctgcatagactttcagacagagaacagctcccggcactgtcttgtgacctacaggcctgataaaaatcacaccaccatacgaagtgtgctgatggaaatgtcctaccgactggatgacactggaaatccaatctgctcctgccagcctgtacatacattttttggaggacctacttgcaaactattgaccaaaaatgccattttccaaagcccagagaatgatggcaacatcctggtgtgtactggggatgaagcagcaaattctgccctgctgtgggatgctgccagtggctcgttgctccaggacctacagaccgatcagcctgtgttggacatctgcccatttgaggtgaaccgtaacagctacttggctaccttaacagagaagatggtccacatctataagtgggagtgactgtggtctcgaaaccttgaaggcatgctgctggttagatgttgtttgctagcgcctagcagccccaagcaagatccctgtttattgtctgcagtctagaacattgggaatcatggtttgtttgcattagtatgattctaggaccctaggtcactgagacactacagattgtgtatctgttatgtccactaaaagagtaattgatgggtactttatctacattatccatttcttgggtttaaagccttcattaaccattattgtatgttggaaattcttattttctttattttctgtgtgactttctggaccttagagagtgtcctctcatcatctaggatgtgagtgggcatcaagcattttctggggaatatgacatcccatctgagttgtcctgtcacttaagtatccttgaagggactaaccatcgtcttggtactgatttgatgcaacgtagatgtaaaagagtattattcagttgaacacaagagggcactgtagaaccttgtgtccggtttatttctgaccttgaaggctgacaatcttttagtaacttgtctcatctccacacaagtgtgtgatagcacacctgggtgtgctttgtggcaataacacttgtgttccaggtgtgaagtgctgggacattggcaggcccagtgatggaagcagctagtgaacgattccctttgctaatgcctagtgcattaagttcattgctttgcgaaaggtaaggaaagaggccagttgtttgagcggtggggaagattttgttttttctagccagcttaggatctcaggattggttttatccaagctagtgctttgaagaacactatctcttgccaggaaaagatgagtgataggtcaaagcttttacttgagtctcccctagtgtcagagatcaggagaaaagacataagagaatttacaaaagctattcagactgctattgaaaacatgagaagaacttgtctcccattttgagagttcctatctaaataaagccaattcctcagactgaggggctgttcttaagtgttctttatacattccagttatccagttaaagccttccccatgtgaagctgatgtttgattccagtttcctttgatttgcctccctaaccttttctagggctcagtttgtatttctttgccttgcctcagactactttgccaacccacttccacaacagaatatgcttcaagatgtgggcaggtcagtgtcctgttcatgggagaaaatggcttaacagtctgattttctcaaatgattattgaagagttgttatcgtttttattataaaacacttctgacctgtcaattcaagagctgtttctaggatctttctctccggcaaggggttgttgcactagatttccccagagttccaagttctagttgtgccttttaatgaccctttaatattttaggacataattttttccttttttaaatttttttgtagaaatagatgtttcactacgttgtccaggctggtcttggactcctggcctcaagcaatcctcccacctcagcctcctaaagtgccaaaattataggcgtgagccactgcacccggcccctatttgaagacgtcttttgtaaaagctagcttctagaacctgagaaaagctcttttctcagaggagatactccttttgatatgttaatgattaagagtggttgcccaggcctagtttcagtggcagaataggattggaattaaaaagcagaactcatctggcttcagcagattgccaccaagaggatacaggtggtcaggtcctggctggctttgtctttgggcctgggcaggcttaggatttgactttctttgaagtacctgatgctgattgattccactaatagtaggaagcaagagacttaactatgagggacgttatgtgaatcttaagtcttaccagtccttgcattagtacattaaatttggatgttttggaagcaaattcatacgatcgtgagtgatttctccaaagaaaaaaagccttgtccagcctgaccaacatggtgaaaccccatctctactaaaaatacaaaaattaactgggtgcagtggtgcgcatgcctgtagtcccagctacttgggaggctgaggcaggagaattgcttgaaccctgggaggcagaggttgcagtgagtcgagatcgcgccactgcactccagcctcggtgacagagcaagactccatctcaaaacaaacaaaacaaaccaaaaaaaaaccctgatgccattcccagtccccgttgtaggacatcacatttataaatccaggctttagtcttctgggctccaccagtctctgccccaccatattcctttgtcactacctctaagtttttttccccacttgaggatttggagttaaacgaactcaaaatgtcttgtcattgtatgtattcttgcccctgctttgaaaacagggccatgggaactctgtttatgccctgttttaatgtttctgttttatgttttactgttaatatgaaaataaagaatttgctatgtaaaaaaaaaaaaaaaaaaaaaaaaaaataaaaaaacaaaaaaaaaaaagaatccttttttcaaaaaaaaaaaaaaaaaaaaaaataaaacccttgtgggccgcttgggccaagtcaattttagactggggaaggtttatccttgcggccgaatttggggctaattggcccatttccccttatggggggcggtttaacatttaattgcccggggtttcaaaacgtggggactggaaaacccttggggtaccaactttattggcttggaaaaaatccccttttggcagggtgggtaaaagaaaaaggcccccaccggtcgcccttcc

SEQ ID NO: 708776 - DNA, 782 bp, Homo sapiens
  misc_feature (62)..(62): n is a, c, g, or t
  misc_feature (104)..(104): n is a, c, g, or t
  misc_feature (107)..(107): n is a, c, g, or t
cattcggggtgggcgctctttctttttctcttagaagagggtttagcacaggttttttcgtnctcacttccacaccacctaccgcctcccaccccccctctccnccnaccccacctatcgtcatgacggcctctccggattacttgagctgcgtgctttttgggatcactgctggggccaccggagtccaacgctaggctcggatgagaaggacttgatcctgctgtactgcacacagtcgcgcctctggccaacaacgacggtgggacagttgcacgaagctgctagttacgaccgcgaatcagtcggaactgatcggagagactgctcaccaaggaaacctaccacatagacgtcgaaatgcctgtcctcggcgtcgcagctggacctaagccctccgacaggtttaaccagtcagtgagcaatgaactgaatcattggactagggacttccttctgtctctgtacctgatgggcagcttcatgtcaggcaagtcctgcatcctgcggcttccaagaacaatgtcctattacctgaactgctctatgccttccgggatcttcgacaaagcaattcacgacactgtcgccctggtgtcaccttgatattgcccaaccttggactgttgccacagggacggaagtatctacacattttgacgcaggagtcgttcgagcctctcagattgggtcgcctctcacgttgaatgattggggcactctcatggttaccagcatgattcagagccctctataatccccggttccagttcatagaacgt

SEQ ID NO: 708777 - DNA, 5491 bp, Homo sapiens
  misc_feature (347)..(347): n is a, c, g, or t
agcgggatcactgaaggagccgagttcgctgctgcggggcctgccctggccggggtgggaggtcgcccggcccttcccccgagagcctagcctcgggctcctcagcggcgttgcctgcgcccgctctgagcgccattacttcatcactttaaagttgatggaagaacttcatttttaatttcatcacggaaactgtggagtaaagacttgtattatccctgttttacaggagaacaaacggagtcttactctctctcccggtctggagtgcagtggcgtgatctcggctcaatgtaacctccactctccgggttcaaggggttctcctgcctcagcctcccaagtanctaggaccatcagtgatggctcatgaagcaatggaatatgatgttcaggtgcagttaaatcatgccgaacaacagccagctcctgctggcatggccagcagccaagggggaccagccctcctccagcctgttcctgctgatgtggtcagcagccaggggtaccatccatcctccagccagctcctgctgaggtgatcagcagccaagcgacaccacccctgctccagcctgctccgcaactgtctgttgacctgacagaagtggaggtcttgggagaagacactgtggagaacatcaatccaagaacttcagaacaacataggcagggatctgatggtaatcacaccatcccagcatcttcgttgcattcaatgaccaacttcatcttcaaaccacagtgtagggccaatgagaacaagaaggagggtatctgcttcacggagggcaagagccggagggtctcagaggacagacagtgccaggttgagagcaccattggatgcttactttcaggtgagcaggacccagcctgacttgccagctaccacttatgattcagagactaggaatcctgtatctgaagagttgcaggtgtctagtagttctgattctgacagtgacagctctgcagagtatggaggggttgttgaccaggcagaggaatctggagctgtcattttagaagagcaactagcaggtgtctcagcagagcaagaagttacatgtatcgatggaggcaagaccctccccaaacagccatctccccagaagtctgagcctctgctaccttctgcttctatggatgaggaagaaggggacacttgtacaatatgtctggaacagtggaccaatgctggggaccaccggctctcagcattacgctgtgggcatctctttgggtataggtgcatttccacgtggcttaaaggacaagtacgaaaatgtccccagtgcaacaagaaagccaggcacagtgacattgtcgtcctttatgcccgaaccctgagagctttggacactagtgaacaggagcgcatgaaaagttccctactgaaggaacagatgctaaggaaacaggccgagttagaatcagcacagtgccgactccaactgcaggtcctcactgataagtgcactaggcttcaaaggcgtgttcaggacttgcaaaaacttacgtcacatcaaagtcagaatttacagcaacccaggggctcccaagcatgggtcctgagctgctcaccctccagccagggccagcacaagcacaagtaccacttccaaaagaccttcacagtatctcaggcaggaaactgccggatcatggcatactgtgatgctctgagctgcctggtgatatcacagccttctcctcaggcctcttttcttccaggctttggtgttaagatgttgagtactgccaacatgaagagcagtcagtacattccgatgcatggcaaacagatccgtggactggcgtttagcagttacctcagaggcttgctactctctgcttccctagacaacactattaaactgaccagcctggagacaaataccgtggtccagacttataatgctggacgtcctgtctggagctgttgctggtgtcttgatgaggctaactacatctatgctggactggccaatggttcaattctggtatatgacgtgcgaaacacgagcagtcatgtgcaggagttagtagctcagaaagccagatgcccactggtctccctgtcatacatgcccagagctgcctcagctgcatttccatatggtggggtgctggctggaaccttggaggatgcttcattctgggaacagaaaatggacttttctcattggcctcatgtgctgcccttggagccagggggctgcatagactttcagacagagaacagctcccggcactgtcttgtgacctacaggcctgataaaaatcacaccaccatacgaagtgtgctgatggaaatgtcctaccgactggatgacactggaaatccaatctgctcctgccagcctgtacatacattttttggaggacctacttgcaaactattgaccaaaaatgccattttccaaagcccagagaatgatggcaacatcctggtgtgtactggggatgaagcagcaaattctgccctgctgtgggatgctgccagtggctcgttgctccaggacctacagaccgatcagcctgtgttggacatctgcccatttgaggtgaaccgtaacagctacttggctaccttaacagagaagatggtccacatctataagtgggagtgactgtggtctcgaaaccttgaaggcatgctgctggttagatgttgtttgctagcgcctagcagccccaagcaagatccctgtttattgtctgcagtctagaacattgggaatcatggtttgtttgcattagtatgattctaggaccctaggtcactgagacactacagattgtgtatctgttatgtccactaaaagagtaattgatgggtactttatctacattatccatttcttgggtttaaagccttcattaaccattattgtatgttggaaattcttattttctttattttctgtgtgactttctggaccttagagagtgtcctctcatcatctaggatgtgagtgggcatcaagcattttctggggaatatgacatcccatctgagttgtcctgtcacttaagtatccttgaagggactaaccatcgtcttggtactgatttgatgcaacgtagatgtaaaagagtattattcagttgaacacaagagggcactgtagaaccttgtgtccggtttatttctgaccttgaaggctgacaatcttttagtaacttgtctcatctccacacaagtgtgtgatagcacacctgggtgtgctttgtggcaataacacttgtgttccaggtgtgaagtgctgggacattggcaggcccagtgatggaagcagctagtgaacgattccctttgctaatgcctagtgcattaagttcattgctttgcgaaaggtaaggaaagaggccagttgtttgagcggtggggaagattttgttttttctagccagcttaggatctcaggattggttttatccaagctagtgctttgaagaacactatctcttgccaggaaaagatgagtgataggtcaaagcttttacttgagtctcccctagtgtcagagatcaggagaaaagacataagagaatttacaaaagctattcagactgctattgaaaacatgagaagaacttgtctcccattttgagagttcctatctaaataaagccaattcctcagactgaggggctgttcttaagtgttctttatacattccagttatccagttaaagccttccccatgtgaagctgatgtttgattccagtttcctttgatttgcctccctaaccttttctagggctcagtttgtatttctttgccttgcctcagactactttgccaacccacttccacaacagaatatgcttcaagatgtgggcaggtcagtgtcctgttcatgggagaaaatggcttaacagtctgattttctcaaatgattattgaagagttgttatcgtttttattataaaacacttctgacctgtcaattcaagagctgtttctaggatctttctctccggcaaggggttgttgcactagatttccccagagttccaagttctagttgtgccttttaatgaccctttaatattttaggacataattttttccttttttaaatttttttgtagaaatagatgtttcactacgttgtccaggctggtcttggactcctggcctcaagcaatcctcccacctcagcctcctaaagtgccaaaattataggcgtgagccactgcacccggcccctatttgaagacgtcttttgtaaaagctagcttctagaacctgagaaaagctcttttctcagaggagatactccttttgatatgttaatgattaagagtggttgcccaggcctagtttcagtggcagaataggattggaattaaaaagcagaactcatctggcttcagcagattgccaccaagaggatacaggtggtcaggtcctggctggctttgtctttgggcctgggcaggcttaggatttgactttctttgaagtacctgatgctgattgattccactaatagtaggaagcaagagacttaactatgagggacgttatgtgaatcttaagtcttaccagtccttgcattagtacattaaatttggatgttttggaagcaaattcatacgatcgtgagtgatttctccaaagaaaaaaagccttgtccagcctgaccaacatggtgaaaccccatctctactaaaaatacaaaaattaactgggtgcagtggtgcgcatgcctgtagtcccagctacttgggaggctgaggcaggagaattgcttgaaccctgggaggcagaggttgcagtgagtcgagatcgcgccactgcactccagcctcggtgacagagcaagactccatctcaaaacaaacaaaacaaaccaaaaaaaaaccctgatgccattcccagtccccgttgtaggacatcacatttataaatccaggctttagtcttctgggctccaccagtctctgccccaccatattcctttgtcactacctctaagtttttttccccacttgaggatttggagttaaacgaactcaaaatgtcttgtcattgtatgtattcttgcccctgctttgaaaacagggccatgggaactctgtttatgccctgttttaatgtttctgttttatgttttactgttaatatgaaaataaagaatttgctatgtaaaaaaaaaaaaaaaaaaaaaaaaaaataaaaaaacaaaaaaaaaaaagaatccttttttcaaaaaaaaaaaaaaaaaaaaaaataaaacccttgtgggccgcttgggccaagtcaattttagactggggaaggtttatccttgcggccgaatttggggctaattggcccatttccccttatggggggcggtttaacatttaattgcccggggtttcaaaacgtggggactggaaaacccttggggtaccaactttattggcttggaaaaaatccccttttggcagggtgggtaaaagaaaaaggcccccaccggtcgcccttcc

SEQ ID NO: 708778 - DNA, 173 bp, Homo sapiens
atccgccttcctcggcctcccaaagtgctaggattacaggcctgggtcaccgtgcctggcctgtttttgtttttgacaggagtgagttcctatctcaaaaagaaaatgataacagtaattttcatattgattacatgttaaaagaataatagttttgacataattgggttaaa

SEQ ID NO: 708779 - DNA, 5211 bp, Homo sapiens
  misc_feature (347)..(347): n is a, c, g, or t
agcgggatcactgaaggagccgagttcgctgctgcggggcctgccctggccggggtgggaggtcgcccggcccttcccccgagagcctagcctcgggctcctcagcggcgttgcctgcgcccgctctgagcgccattacttcatcactttaaagttgatggaagaacttcatttttaatttcatcacggaaactgtggagtaaagacttgtattatccctgttttacaggagaacaaacggagtcttactctctctcccggtctggagtgcagtggcgtgatctcggctcaatgtaacctccactctccgggttcaaggggttctcctgcctcagcctcccaagtanctaggaccatcagtgatggctcatgaagcaatggaatatgatgttcaggtgcagttaaatcatgccgaacaacagccagctcctgctggcatggccagcagccaagggggaccagccctcctccagcctgttcctgctgatgtggtcagcagccaggggtaccatccatcctccagccagctcctgctgaggtgatcagcagccaagcgacaccacccctgctccagcctgctccgcaactgtctgttgacctgacagaagtggaggtcttgggagaagacactgtggagaacatcaatccaagaacttcagaacaacataggcagggatctgatggtaatcacaccatcccagcatcttcgttgcattcaatgaccaacttcatcagcggactgcagagacttcatggcatgctggaattcctgagaccttcatcttcaaaccacagtgtagggccaatgagaacaagaaggagggtatctgcttcacggagggcaagagccggagggtctcagaggacagacagtgccaggttgagagcaccattggatgcttactttcaggtgagcaggacccagcctgacttgccagctaccacttatgattcagagactaggaatcctgtatctgaagagttgcaggtgtctagtagttctgattctgacagtgacagctctgcagagtatggaggggttgttgaccaggcagaggaatctggagctgtcattttagaagagcaactagcaggtgtctcagcagagcaagaagttacatgtatcgatggaggcaagaccctccccaaacagccatctccccagaagtctgagcctctgctaccttctgcttctatggatgaggaagaaggggacacttgtacaatatgtctggaacagtggaccaatgctggggaccaccggctctcagcattacgctgtgggcatctctttgggtataggtgcatttccacgtggcttaaaggacaagtacgaaaatgtccccagtgcaacaagaaagccaggcacagtgacattgtcgtcctttatgcccgaaccctgagagctttggacactagtgaacaggagcgcatgaaaagttccctactgaaggaacagatgctaaggaaacaggccgagttagaatcagcacagtgccgactccaactgcaggtcctcactgataagtgcactaggcttcaaaggcgtgttcaggacttgcaaaaacttacgtcacatcaaagtcagaatttacagcaacccaggggctcccaagcatgggtcctgagctgctcaccctccagccagggccagcacaagcacaagtaccacttccaaaagaccttcacagtatctcaggcaggaaactgccggatcatggcatactgtgatgctctgagctgcctggtgatatcacagccttctcctcaggcctcttttcttccaggctttggtgttaagatgttgagtactgccaacatgaagagcagtcagtacattccgatgcatggcaaacagatccgtggactggcgtttagcagttacctcagaggcttgctactctctgcttccctagacaacactattaaactgaccagcctggagacaaataccgtggtccagacttataatgctggacgtcctgtctggagctgttgctggtgtcttgatgaggctaactacatctatgctggactggccaatggttcaattctggtatatgacgtgcgaaacacgagcagtcatgtgcaggagttagtagctcagaaagccagatgcccactggtctccctgtcatacatgcccagagctgcctcagctgcatttccatatggtggggtgctggctggaaccttggaggatgcttcattctgggaacagaaaatggacttttctcattggcctcatgtgctgcccttggagccagggggctgcatagactttcagacagagaacagctcccggcactgtcttgtgacctacaggcctgataaaaatcacaccaccatacgaagtgtgctgatggaaatgtcctaccgactggatgacactggaaatccaatctgctcctgccagcctgtacatacattttttggaggacctacttgcaaactattgaccaaaaatgccattttccaaagcccagagaatgatggcaacatcctggtgtgtactggggatgaagcagcaaattctgccctgctgtgggatgctgccagtggctcgttgctccaggacctacagaccgatcagcctgtgttggacatctgcccatttgaggtgaaccgtaacagctacttggctaccttaacagagaagatggtccacatctataagtgggagtgactgtggtctcgaaaccttgaaggcatgctgctggttagatgttgtttgctagcgcctagcagccccaagcaagatccctgtttattgtctgcagtctagaacattgggaatcatggtttgtttgcattagtatgattctaggaccctaggtcactgagacactacagattgtgtatctgttatgtccactaaaagagtaattgatgggtactttatctacattatccatttcttgggtttaaagccttcattaaccattattgtatgttggaaattcttattttctttattttctgtgtgactttctggaccttagagagtgtcctctcatcatctaggatgtgagtgggcatcaagcattttctggggaatatgacatcccatctgagttgtcctgtcacttaagtatccttgaagggactaaccatcgtcttggtactgatttgatgcaacgtagatgtaaaagagtattattcagttgaacacaagagggcactgtagaaccttgtgtccggtttatttctgaccttgaaggctgacaatcttttagtaacttgtctcatctccacacaagtgtgtgatagcacacctgggtgtgctttgtggcaataacacttgtgttccaggtgtgaagtgctgggacattggcaggcccagtgatggaagcagctagtgaacgattccctttgctaatgcctagtgcattaagttcattgctttgcgaaaggtaaggaaagaggccagttgtttgagcggtggggaagattttgttttttctagccagcttaggatctcaggattggttttatccaagctagtgctttgaagaacactatctcttgccaggaaaagatgagtgataggtcaaagcttttacttgagtctcccctagtgtcagagatcaggagaaaagacataagagaatttacaaaagctattcagactgctattgaaaacatgagaagaacttgtctcccattttgagagttcctatctaaataaagccaattcctcagactgaggggctgttcttaagtgttctttatacattccagttatccagttaaagccttccccatgtgaagctgatgtttgattccagtttcctttgatttgcctccctaaccttttctagggctcagtttgtatttctttgccttgcctcagactactttgccaacccacttccacaacagaatatgcttcaagatgtgggcaggtcagtgtcctgttcatgggagaaaatggcttaacagtctgattttctcaaatgattattgaagagttgttatcgtttttattataaaacacttctgacctgtcaattcaagagctgtttctaggatctttctctccggcaaggggttgttgcactagatttccccagagttccaagttctagttgtgccttttaatgaccctttaatattttaggacataattttttccttttttaaatttttttgtagaaatagatgtttcactacgttgtccaggctggtcttggactcctggcctcaagcaatcctcccacctcagcctcctaaagtgccaaaattataggcgtgagccactgcacccggcccctatttgaagacgtcttttgtaaaagctagcttctagaacctgagaaaagctcttttctcagaggagatactccttttgatatgttaatgattaagagtggttgcccaggcctagtttcagtggcagaataggattggaattaaaaagcagaactcatctggcttcagcagattgccaccaagaggatacaggtggtcaggtcctggctggctttgtctttgggcctgggcaggcttaggatttgactttctttgaagtacctgatgctgattgattccactaatagtaggaagcaagagacttaactatgagggacgttatgtgaatcttaagtcttaccagtccttgcattagtacattaaatttggatgttttggaagcaaattcatacgatcgtgagtgatttctccaaagaaaaaaagccttgtccagcctgaccaacatggtgaaaccccatctctactaaaaatacaaaaattaactgggtgcagtggtgcgcatgcctgtagtcccagctacttgggaggctgaggcaggagaattgcttgaaccctgggaggcagaggttgcagtgagtcgagatcgcgccactgcactccagcctcggtgacagagcaagactccatctcaaaacaaacaaaacaaaccaaaaaaaaaccctgatgccattcccagtccccgttgtaggacatcacatttataaatccaggctttagtcttctgggctccaccagtctctgccccaccatattcctttgtcactacctctaagtttttttccccacttgaggatttggagttaaacgaactcaaaatgtcttgtcattgtatgtattcttgcccctgctttgaaaacagggccatggacattgctctgcctgtttataatgttttcatggaaaaatctcctacgtggtaacagtacaactacgattccc

SEQ ID NO: 708780 - DNA, 98 bp, Homo sapiens
gcgggagcagctacatgctctgcgtgctgcggtgcaggctctgcaggctctgcaggaacgactccttggccttcacctcctccatggtggacaccccc

SEQ ID NO: 708781 - DNA, 5194 bp, Homo sapiens
  misc_feature (347)..(347): n is a, c, g, or t
agcgggatcactgaaggagccgagttcgctgctgcggggcctgccctggccggggtgggaggtcgcccggcccttcccccgagagcctagcctcgggctcctcagcggcgttgcctgcgcccgctctgagcgccattacttcatcactttaaagttgatggaagaacttcatttttaatttcatcacggaaactgtggagtaaagacttgtattatccctgttttacaggagaacaaacggagtcttactctctctcccggtctggagtgcagtggcgtgatctcggctcaatgtaacctccactctccgggttcaaggggttctcctgcctcagcctcccaagtanctaggaccatcagtgatggctcatgaagcaatggaatatgatgttcaggtgcagttaaatcatgccgaacaacagccagctcctgctggcatggccagcagccaagggggaccagccctcctccagcctgttcctgctgatgtggtcagcagccaggggtaccatccatcctccagccagctcctgctgaggtgatcagcagccaagcgacaccacccctgctccagcctgctccgcaactgtctgttgacctgacagaagtggaggtcttgggagaagacactgtggagaacatcaatccaagaacttcagaacaacataggcagggatctgatggtaatcacaccatcccagcatcttcgttgcattcaatgaccaacttcatcagcggactgcagagacttcatggcatgctggaattcctgagaccttcatcttcaaaccacagtgtagggccaatgagaacaagaaggagggtatctgcttcacggagggcaagagccggagggtctcagaggacagacagtgccaggttgagagcaccattggatgcttactttcaggtgagcaggacccagcctgacttgccagctaccacttatgattcagagactaggaatcctgtatctgaagagttgcaggtgtctagtagttctgattctgacagtgacagctctgcagagtatggaggggttgttgaccaggcagaggaatctggagctgtcattttagaagagcaactagcaggtgtctcagcagagcaagaagttacatgtatcgatggaggcaagaccctccccaaacagccatctccccagaagtctgagcctctgctaccttctgcttctatggatgaggaagaaggggacacttgtacaatatgtctggaacagtggaccaatgctggggaccaccggctctcagcattacgctgtgggcatctctttgggtataggtgcatttccacgtggcttaaaggacaagtacgaaaatgtccccagtgcaacaagaaagccaggcacagtgacattgtcgtcctttatgcccgaaccctgagagctttggacactagtgaacaggagcgcatgaaaaggctttggtgttaagatgttgagtactgccaacatgaagagcagtcagtacattccgatgcatggcaaacagatccgtggactggcgtttagcagttacctcagaggcttgctactctctgcttccctagacaacactattaaactgaccagcctggagacaaataccgtggtccagacttataatgctggacgtcctgtctggagctgttgctggtgtcttgatgaggctaactacatctatgctggactggccaatggttcaattctggtatatgacgtgcgaaacacgagcagtcatgtgcaggagttagtagctcagaaagccagatgcccactggtctccctgtcatacatgcccagagctgcctcagctgcatttccatatggtggggtgctggctggaaccttggaggatgcttcattctgggaacagaaaatggacttttctcattggcctcatgtgctgcccttggagccagggggctgcatagactttcagacagagaacagctcccggcactgtcttgtgacctacaggcctgataaaaatcacaccaccatacgaagtgtgctgatggaaatgtcctaccgactggatgacactggaaatccaatctgctcctgccagcctgtacatacattttttggaggacctacttgcaaactattgaccaaaaatgccattttccaaagcccagagaatgatggcaacatcctggtgtgtactggggatgaagcagcaaattctgccctgctgtgggatgctgccagtggctcgttgctccaggacctacagaccgatcagcctgtgttggacatctgcccatttgaggtgaaccgtaacagctacttggctaccttaacagagaagatggtccacatctataagtgggagtgactgtggtctcgaaaccttgaaggcatgctgctggttagatgttgtttgctagcgcctagcagccccaagcaagatccctgtttattgtctgcagtctagaacattgggaatcatggtttgtttgcattagtatgattctaggaccctaggtcactgagacactacagattgtgtatctgttatgtccactaaaagagtaattgatgggtactttatctacattatccatttcttgggtttaaagccttcattaaccattattgtatgttggaaattcttattttctttattttctgtgtgactttctggaccttagagagtgtcctctcatcatctaggatgtgagtgggcatcaagcattttctggggaatatgacatcccatctgagttgtcctgtcacttaagtatccttgaagggactaaccatcgtcttggtactgatttgatgcaacgtagatgtaaaagagtattattcagttgaacacaagagggcactgtagaaccttgtgtccggtttatttctgaccttgaaggctgacaatcttttagtaacttgtctcatctccacacaagtgtgtgatagcacacctgggtgtgctttgtggcaataacacttgtgttccaggtgtgaagtgctgggacattggcaggcccagtgatggaagcagctagtgaacgattccctttgctaatgcctagtgcattaagttcattgctttgcgaaaggtaaggaaagaggccagttgtttgagcggtggggaagattttgttttttctagccagcttaggatctcaggattggttttatccaagctagtgctttgaagaacactatctcttgccaggaaaagatgagtgataggtcaaagcttttacttgagtctcccctagtgtcagagatcaggagaaaagacataagagaatttacaaaagctattcagactgctattgaaaacatgagaagaacttgtctcccattttgagagttcctatctaaataaagccaattcctcagactgaggggctgttcttaagtgttctttatacattccagttatccagttaaagccttccccatgtgaagctgatgtttgattccagtttcctttgatttgcctccctaaccttttctagggctcagtttgtatttctttgccttgcctcagactactttgccaacccacttccacaacagaatatgcttcaagatgtgggcaggtcagtgtcctgttcatgggagaaaatggcttaacagtctgattttctcaaatgattattgaagagttgttatcgtttttattataaaacacttctgacctgtcaattcaagagctgtttctaggatctttctctccggcaaggggttgttgcactagatttccccagagttccaagttctagttgtgccttttaatgaccctttaatattttaggacataattttttccttttttaaatttttttgtagaaatagatgtttcactacgttgtccaggctggtcttggactcctggcctcaagcaatcctcccacctcagcctcctaaagtgccaaaattataggcgtgagccactgcacccggcccctatttgaagacgtcttttgtaaaagctagcttctagaacctgagaaaagctcttttctcagaggagatactccttttgatatgttaatgattaagagtggttgcccaggcctagtttcagtggcagaataggattggaattaaaaagcagaactcatctggcttcagcagattgccaccaagaggatacaggtggtcaggtcctggctggctttgtctttgggcctgggcaggcttaggatttgactttctttgaagtacctgatgctgattgattccactaatagtaggaagcaagagacttaactatgagggacgttatgtgaatcttaagtcttaccagtccttgcattagtacattaaatttggatgttttggaagcaaattcatacgatcgtgagtgatttctccaaagaaaaaaagccttgtccagcctgaccaacatggtgaaaccccatctctactaaaaatacaaaaattaactgggtgcagtggtgcgcatgcctgtagtcccagctacttgggaggctgaggcaggagaattgcttgaaccctgggaggcagaggttgcagtgagtcgagatcgcgccactgcactccagcctcggtgacagagcaagactccatctcaaaacaaacaaaacaaaccaaaaaaaaaccctgatgccattcccagtccccgttgtaggacatcacatttataaatccaggctttagtcttctgggctccaccagtctctgccccaccatattcctttgtcactacctctaagtttttttccccacttgaggatttggagttaaacgaactcaaaatgtcttgtcattgtatgtattcttgcccctgctttgaaaacagggccatgggaactctgtttatgccctgttttaatgtttctgttttatgttttactgttaatatgaaaataaagaatttgctatgtaaaaaaaaaaaaaaaaaaaaaaaaaaataaaaaaacaaaaaaaaaaaagaatccttttttcaaaaaaaaaaaaaaaaaaaaaaataaaacccttgtgggccgcttgggccaagtcaattttagactggggaaggtttatccttgcggccgaatttggggctaattggcccatttccccttatggggggcggtttaacatttaattgcccggggtttcaaaacgtggggactggaaaacccttggggtaccaactttattggcttggaaaaaatccccttttggcagggtgggtaaaagaaaaaggcccccaccggtcgcccttcc

SEQ ID NO: 708782 - DNA, 4244 bp, Homo sapiens
  misc_feature (347)..(347): n is a, c, g, or t
agcgggatcactgaaggagccgagttcgctgctgcggggcctgccctggccggggtgggaggtcgcccggcccttcccccgagagcctagcctcgggctcctcagcggcgttgcctgcgcccgctctgagcgccattacttcatcactttaaagttgatggaagaacttcatttttaatttcatcacggaaactgtggagtaaagacttgtattatccctgttttacaggagaacaaacggagtcttactctctctcccggtctggagtgcagtggcgtgatctcggctcaatgtaacctccactctccgggttcaaggggttctcctgcctcagcctcccaagtanctaggaccatcagtgatggctcatgaagcaatggaatatgatgttcaggtgcagttaaatcatgccgaacaacagccagctcctgctggcatggccagcagccaagggggaccagccctcctccagcctgttcctgctgatgtggtcagcagccaggggtaccatccatcctccagccagctcctgctgaggtgatcagcagccaagcgacaccacccctgctccagcctgctccgcaactgtctgttgacctgacagaagtggaggtcttgggagaagacactgtggagaacatcaatccaagaacttcagaacaacataggcagggatctgatggtaatcacaccatcccagcatcttcgttgcattcaatgaccaacttcatcagcggactgcagagacttcatggcatgctggaattcctgagaccttcatcttcaaaccacagtgtagggccaatgagaacaagaaggagggtatctgcttcacggagggcaagagccggagggtctcagaggacagacagtgccaggttgagagcaccattggatgcttactttcaggtgagcaggacccagcctgacttgccagctaccacttatgattcagagactaggaatcctgtatctgaagagttgcaggtgtctagtagttctgattctgacagtgacagctctgcagagtatggaggggttgttgaccaggcagaggaatctggagctgtcattttagaagagcaactagcaggtgtctcagcagagcaagaagttacatgtatcgatggaggcaagaccctccccaaacagccatctccccagaagtctgagcctctgctaccttctgcttctatggatgaggaagaaggggacacttgtacaatatgtctggaacagtggaccaatgctggggaccaccggctctcagcattacgctgtgggcatctctttgggtataggtgcatttccacgtggcttaaaggacaagtacgaaaatgtccccagtgcaacaagaaagccaggcacagtgacattgtcgtcctttatgcccgaaccctgagagctttggacactagtgaacaggagcgcatgaaaagttccctactgaaggaacagatgctaaggaaacaggccgagttagaatcagcacagtgccgactccaactgcaggtcctcactgataagtgcactaggcttcaaaggcgtgttcaggacttgcaaaaacttacgtcacatcaaagtcagaatttacagcaacccaggggctcccaagcatgggtcctgagctgctcaccctccagccagggccagcacaagcacaagtaccacttccaaaagaccttcacagtatctcaggcaggaaactgccggatcatggcatactgtgatgctctgagctgcctggtgatatcacagccttctcctcaggcctcttttcttccaggctttggtgttaagatgttgagtactgccaacatgaagagcagtcagtacattccgatgcatggcaaacagatccgtggactggcgtttagcagttacctcagaggcttgctactctctgcttccctagacaacactattaaactgaccagcctggagacaaataccgtggtccagacttataatgctggacgtcctgtctggagctgttgctggtgtcttgatgaggctaactacatctatgctggactggccaatggttcaattctggtatatgacgtgcgaaacacgagcagtcatgtgcaggagttagtagctcagaaagccagatgcccactggtctccctgtcatacatgcccagagctgcctcagctgcatttccatatggtggggtgctggctggaaccttggaggatgcttcattctgggaacagaaaatggacttttctcattggcctcatgtgctgcccttggagccagggggctgcatagactttcagacagagaacagctcccggcactgtcttgtgacctacaggcctgataaaaatcacaccaccatacgaagtgtgctgatggaaatgtcctaccgactggatgacactggaaatccaatctgctcctgccagcctgtacatacattttttggaggacctacttgcaaactattgaccaaaaatgccattttccaaagcccagagaatgatggcaacatcctggtgtgtactggggatgaagcagcaaattctgccctgctgtgggatgctgccagtggctcgttgctccaggacctacagaccgatcagcctgtgttggacatctgcccatttgaggtgaaccgtaacagctacttggctaccttaacagagaagatggtccacatctataagtgggagtgactgtggtctcgaaaccttgaaggcatgctgctggttagatgttgtttgctagcgcctagcagccccaagcaagatccctgtttattgtctgcagtctagaacattgggaatcatggtttgtttgcattagtatgattctaggaccctaggtcactgagacactacagattgtgtatctgttatgtccactaaaagagtaattgatgggtactttatctacattatccatttcttgggtttaaagccttcattaaccattattgtatgttggaaattcttattttctttattttctgtgtgactttctggaccttagagagtgtcctctcatcatctaggatgtgagtgggcatcaagcattttctggggaatatgacatcccatctgagttgtcctgtcacttaagtatccttgaagggactaaccatcgtcttggtactgatttgatgcaacgtagatgtaaaagagtattattcagttgaacacaagagggcactgtagaaccttgtgtccggtttatttctgaccttgaaggctgacaatcttttagtaacttgtctcatctccacacaagtgtgtgatagcacacctgggtgtgctttgtggcaataacacttgtgttccaggtgtgaagtgctgggacattggcaggcccagtgatggaagcagctagtgaacgattccctttgctaatgcctagtgcattaagttcattgctttgcgaaaggtaaggaaagaggccagttgtttgagcggtggggaagattttgttttttctagccagcttaggatctcaggattggttttatccaagctagtgctttgaagaacactatctcttgccaggaaaagatgagtgataggtcaaagcttttacttgagtctcccctagtgtcagagatcaggagaaaagacataagagaatttacaaaagctattcagactgctattgaaaacatgagaagaacttgtctcccattttgagagttcctatctaaataaagccaattcctcagactgaggggctgttcttaagtgttctttatacattccagttatccagttaaagccttccccatgtgaagctgatgtttgattccagtttcctttgatttgcctccctaaccttttctagggctcagtttgtatttctttgccttgcctcagactactttgccaacccacttccacaacagaatatgcttcaagatgtgggcaggtcagtgtcctgttcatgggagaaaatggcttaacagtctgattttctcaaatgattattgaagagttgttatcgtttttattataaaacacttctgacctgtcaattcaagagctgtttctaggatctttctctccggcaaggggttgttgcactagatttccccagagttccaagttctagttgtgccttttaatgaccctttaatattttaggacataattttttccttttttaaatttttttgtagaaatagatgtttcactacgttgtccaggctggctcctgctcaagcatctccaccagctctaagtgcaatataggctgccactgaccgtc

SEQ ID NO: 708783 - DNA, 3904 bp, Homo sapiens
tttcccctcagaatcccaaagtgctgggattacaggcatgagccaccatgtccagcctttttaatttattattttatttccttagaactcaagaggaaaacctgtggcccccaaaacaaatgttatggaatttaaaggagttacctgggcagattctagaaaaaatagggaatccagatagtttgggtgtatgagtgtgttctcagtaaggattaatgatcatttaaatgataatctttacatctttgtcatgtatttgattttcttaatgcagttgtaaaagtcttttgtaactccacagcctggagacaaataccgtggtccagacttataatgctggacgtcctgtctggagctgttgctggtgtcttgatgaggctaactacatctatgctggactggccaatggttcaattctggtatatgacgtgcgaaacacgagcagtcatgtgcaggagttagtagctcagaaagccagatgcccactggtctccctgtcatacatgcccagagctgcctcagctgcatttccatatggtggggtgctggctggaaccttggaggatgcttcattctgggaacagaaaatggacttttctcattggcctcatgtgctgcccttggagccagggggctgcatagactttcagacagagaacagctcccggcactgtcttgtgacctacaggcctgataaaaatcacaccaccatacgaagtgtgctgatggaaatgtcctaccgactggatgacactggaaatccaatctgctcctgccagcctgtacatacattttttggaggacctacttgcaaactattgaccaaaaatgccattttccaaagcccagagaatgatggcaacatcctggtgtgtactggggatgaagcagcaaattctgccctgctgtgggatgctgccagtggctcgttgctccaggacctacagaccgatcagcctgtgttggacatctgcccatttgaggtgaaccgtaacagctacttggctaccttaacagagaagatggtccacatctataagtgggagtgactgtggtctcgaaaccttgaaggcatgctgctggttagatgttgtttgctagcgcctagcagccccaagcaagatccctgtttattgtctgcagtctagaacattgggaatcatggtttgtttgcattagtatgattctaggaccctaggtcactgagacactacagattgtgtatctgttatgtccactaaaagagtaattgatgggtactttatctacattatccatttcttgggtttaaagccttcattaaccattattgtatgttggaaattcttattttctttattttctgtgtgactttctggaccttagagagtgtcctctcatcatctaggatgtgagtgggcatcaagcattttctggggaatatgacatcccatctgagttgtcctgtcacttaagtatccttgaagggactaaccatcgtcttggtactgatttgatgcaacgtagatgtaaaagagtattattcagttgaacacaagagggcactgtagaaccttgtgtccggtttatttctgaccttgaaggctgacaatcttttagtaacttgtctcatctccacacaagtgtgtgatagcacacctgggtgtgctttgtggcaataacacttgtgttccaggtgtgaagtgctgggacattggcaggcccagtgatggaagcagctagtgaacgattccctttgctaatgcctagtgcattaagttcattgctttgcgaaaggtaaggaaagaggccagttgtttgagcggtggggaagattttgttttttctagccagcttaggatctcaggattggttttatccaagctagtgctttgaagaacactatctcttgccaggaaaagatgagtgataggtcaaagcttttacttgagtctcccctagtgtcagagatcaggagaaaagacataagagaatttacaaaagctattcagactgctattgaaaacatgagaagaacttgtctcccattttgagagttcctatctaaataaagccaattcctcagactgaggggctgttcttaagtgttctttatacattccagttatccagttaaagccttccccatgtgaagctgatgtttgattccagtttcctttgatttgcctccctaaccttttctagggctcagtttgtatttctttgccttgcctcagactactttgccaacccacttccacaacagaatatgcttcaagatgtgggcaggtcagtgtcctgttcatgggagaaaatggcttaacagtctgattttctcaaatgattattgaagagttgttatcgtttttattataaaacacttctgacctgtcaattcaagagctgtttctaggatctttctctccggcaaggggttgttgcactagatttccccagagttccaagttctagttgtgccttttaatgaccctttaatattttaggacataattttttccttttttaaatttttttgtagaaatagatgtttcactacgttgtccaggctggtcttggactcctggcctcaagcaatcctcccacctcagcctcctaaagtgccaaaattataggcgtgagccactgcacccggcccctatttgaagacgtcttttgtaaaagctagcttctagaacctgagaaaagctcttttctcagaggagatactccttttgatatgttaatgattaagagtggttgcccaggcctagtttcagtggcagaataggattggaattaaaaagcagaactcatctggcttcagcagattgccaccaagaggatacaggtggtcaggtcctggctggctttgtctttgggcctgggcaggcttaggatttgactttctttgaagtacctgatgctgattgattccactaatagtaggaagcaagagacttaactatgagggacgttatgtgaatcttaagtcttaccagtccttgcattagtacattaaatttggatgttttggaagcaaattcatacgatcgtgagtgatttctccaaagaaaaaaagccttgtccagcctgaccaacatggtgaaaccccatctctactaaaaatacaaaaattaactgggtgcagtggtgcgcatgcctgtagtcccagctacttgggaggctgaggcaggagaattgcttgaaccctgggaggcagaggttgcagtgagtcgagatcgcgccactgcactccagcctcggtgacagagcaagactccatctcaaaacaaacaaaacaaaccaaaaaaaaaccctgatgccattcccagtccccgttgtaggacatcacatttataaatccaggctttagtcttctgggctccaccagtctctgccccaccatattcctttgtcactacctctaagtttttttccccacttgaggatttggagttaaacgaactcaaaatgtcttgtcattgtatgtattcttgcccctgctttgaaaacagggccatgggaactctgtttatgccctgttttaatgtttctgttttatgttttactgttaatatgaaaataaagaatttgctatgtaaaaaaaaaaaaaaaaaaaaaaaaaaataaaaaaacaaaaaaaaaaaagaatccttttttcaaaaaaaaaaaaaaaaaaaaaaataaaacccttgtgggccgcttgggccaagtcaattttagactggggaaggtttatccttgcggccgaatttggggctaattggcccatttccccttatggggggcggtttaacatttaattgcccggggtttcaaaacgtggggactggaaaacccttggggtaccaactttattggcttggaaaaaatccccttttggcagggtgggtaaaagaaaaaggcccccaccggtcgcccttcc

SEQ ID NO: 708784 - DNA, 3748 bp, Homo sapiens
  misc_feature (347)..(347): n is a, c, g, or t
agcgggatcactgaaggagccgagttcgctgctgcggggcctgccctggccggggtgggaggtcgcccggcccttcccccgagagcctagcctcgggctcctcagcggcgttgcctgcgcccgctctgagcgccattacttcatcactttaaagttgatggaagaacttcatttttaatttcatcacggaaactgtggagtaaagacttgtattatccctgttttacaggagaacaaacggagtcttactctctctcccggtctggagtgcagtggcgtgatctcggctcaatgtaacctccactctccgggttcaaggggttctcctgcctcagcctcccaagtanctaggaccatcagtgatggctcatgaagcaatggaatatgatgttcaggtgcagttaaatcatgccgaacaacagccagctcctgctggcatggccagcagccaagggggaccagccctcctccagcctgttcctgctgatgtggtcagcagccaggggtaccatccatcctccagccagctcctgctgaggtgatcagcagccaagcgacaccacccctgctccagcctgctccgcaactgtctgttgacctgacagaagtggaggtcttgggagaagacactgtggagaacatcaatccaagaacttcagaacaacataggcagggatctgatggtaatcacaccatcccagcatcttcgttgcattcaatgaccaacttcatcagcggactgcagagacttcatggcatgctggaattcctgagaccttcatcttcaaaccacagtgtagggccaatgagaacaagaaggagggtatctgcttcacggagggcaagagccggagggtctcagaggacagacagtgccaggttgagagcaccattggatgcttactttcaggtgagcaggacccagcctgacttgccagctaccacttatgattcagagactaggaatcctgtatctgaagagttgcaggtgtctagtagttctgattctgacagtgacagctctgcagagtatggaggggttgttgaccaggcagaggaatctggagctgtcattttagaagagcaactagcaggtgtctcagcagagcaagaagttacatgtatcgatggaggcaagaccctccccaaacagccatctccccagaagtctgagcctctgctaccttctgcttctatggatgaggaagaaggggacacttgtacaatatgtctggaacagtggaccaatgctggggaccaccggctctcagcattacgctgtgggcatctctttgggtataggtgcatttccacgtggcttaaaggacaagtacgaaaatgtccccagtgcaacaagaaagccaggcacagtgacattgtcgtcctttatgcccgaaccctgagagctttggacactagtgaacaggagcgcatgaaaagttccctactgaaggaacagatgctaaggaaacaggccgagttagaatcagcacagtgccgactccaactgcaggtcctcactgataagtgcactaggcttcaaaggcgtgttcaggacttgcaaaaacttacgtcacatcaaagtcagaatttacagcaacccaggggctcccaagcatgggtcctgagctgctcaccctccagccagggccagcacaagcacaagtaccacttccaaaagaccttcacagtatctcaggcaggaaactgccggatcatggcatactgtgatgctctgagctgcctggtgatatcacagccttctcctcaggcctcttttcttccaggctttggtgttaagatgttgagtactgccaacatgaagagcagtcagtacattccgatgcatggcaaacagatccgtggactggcgtttagcagttacctcagaggcttgctactctctgcttccctagacaacactattaaactgaccagcctggagacaaataccgtggtccagacttataatgctggacgtcctgtctggagctgttgctggtgtcttgatgaggctaactacatctatgctggactggccaatggttcaattctggtatatgacgtgcgaaacacgagcagtcatgtgcaggagttagtagctcagaaagccagatgcccactggtctccctgtcatacatgcccagagctgcctcagctgcatttccatatggtggggtgctggctggaaccttggaggatgcttcattctgggaacagaaaatggacttttctcattggcctcatgtgctgcccttggagccagggggctgcatagactttcagacagagaacagctcccggcactgtcttgtgacctacaggcctgataaaaatcacaccaccatacgaagtgtgctgatggaaatgtcctaccgactggatgacactggtcttggactcctggcctcaagcaatcctcccacctcagcctcctaaagtgccaaaattataggcgtgagccactgcacccggcccctatttgaagacgtcttttgtaaaagctagcttctagaacctgagaaaagctcttttctcagaggagatactccttttgatatgttaatgattaagagtggttgcccaggcctagtttcagtggcagaataggattggaattaaaaagcagaactcatctggcttcagcagattgccaccaagaggatacaggtggtcaggtcctggctggctttgtctttgggcctgggcaggcttaggatttgactttctttgaagtacctgatgctgattgattccactaatagtaggaagcaagagacttaactatgagggacgttatgtgaatcttaagtcttaccagtccttgcattagtacattaaatttggatgttttggaagcaaattcatacgatcgtgagtgatttctccaaagaaaaaaagccttgtccagcctgaccaacatggtgaaaccccatctctactaaaaatacaaaaattaactgggtgcagtggtgcgcatgcctgtagtcccagctacttgggaggctgaggcaggagaattgcttgaaccctgggaggcagaggttgcagtgagtcgagatcgcgccactgcactccagcctcggtgacagagcaagactccatctcaaaacaaacaaaacaaaccaaaaaaaaaccctgatgccattcccagtccccgttgtaggacatcacatttataaatccaggctttagtcttctgggctccaccagtctctgccccaccatattcctttgtcactacctctaagtttttttccccacttgaggatttggagttaaacgaactcaaaatgtcttgtcattgtatgtattcttgcccctgctttgaaaacagggccatgggaactctgtttatgccctgttttaatgtttctgttttatgttttactgttaatatgaaaataaagaatttgctatgtaaaaaaaaaaaaaaaaaaaaaaaaaaataaaaaaacaaaaaaaaaaaagaatccttttttcaaaaaaaaaaaaaaaaaaaaaaataaaacccttgtgggccgcttgggccaagtcaattttagactggggaaggtttatccttgcggccgaatttggggctaattggcccatttccccttatggggggcggtttaacatttaattgcccggggtttcaaaacgtggggactggaaaacccttggggtaccaactttattggcttggaaaaaatccccttttggcagggtgggtaaaagaaaaaggcccccaccggtcgcccttcc

SEQ ID NO: 708785 - DNA, 780 bp, Homo sapiens
gtacacctggctaatttttgtgttttttgtagagacagggtttcaccatgttgcccatgctggtctctaactcctgagctcaaggaatccacccacctcggcctcccaaagtgctgggattacaggcatgagccaccacactggactgctgtgtcaaagttttgcatctttttttttttttttcccaaaaggagttttcactttgtgtcacccaggctgtggagttgcaggggagtgtgactcatgtggctctcactgtgaaaccttccgccctcccaggtttcaaggattttcttccgtgccttcagccttccttgagttagcttgctttacagggcacctgtgccaccacgcctttgcaaatttttggtatttttaaggggaaaagggggtttggccattgttgggccaggctgggctctcaaacctcctgtgacctcagggtgactccgcccgccttcagccttcccaaggggcggggatttaacgggcgtgagccatgtgtgccgggccccaagtttggctctctttaaaggccctcgttgaacaattacttagagaaacttctcagaacatttaaacccgtgcagagcaaccaggtgtcccccatgtctaaggttcacaagttggcctctaaatttctaattccatattttcctactcctcaagataatcatgtggtgggtactcttcctaaagagtcaaagacgacttttaagtggctacaattttttggtccgtgcttaaaccaaaaacttcattttccctttactcaatttg

SEQ ID NO: 708786 - DNA, 642 bp, Homo sapiens
gcaatctgttctttgggggcccccggctcccttcgcgcctcttgatgcccctgtgccaccgggacggacgcgatagatcttgtgcgccgcttggtgagtgagtcgcccccgcccctgtttttcctcctccaccacgtagcaacgagccctcttgtgtggggtgaagaacagagggagtggtggggtgcctctcccttcggtgctgttatttgtcgtctttttgttctttgttgctttggttgtataaattccacttctgggagttccactcagaaggcgcgctggggctttcttgggccaactggttgccccctgttggcgcctccccgacctcattcccttggtgttggtggccctcgttgcctagtagccccttggccctggcgcaaccacccccgccacacgatgctggggagccacgccccccttgtcgcttgcctagctgtttcttcgcccgccaacccccttatgagttgggaggggaaagaacgaaggaagaaggggagaggggatcctgcccccctccccccggcatttgtggggggcccctccccccacggggttttccccttcctcggggtttttcccccaaaccattttttaaatccaacccggattaatacccaattttaaatggcaaca

SEQ ID NO: 708787 - DNA, 1349 bp, Homo sapiens
ctcttccagaaccagcttgcctagcggctgacgctctaagtgccgactctacgcgtagcgcctggttccggccgctatcagcctacgtcgtccgtggcccctacgtcctcagacccgtggaaacacaggctctttcggtcagaggagatactccttttgatatgttaatgattaagagtggttgcccaggcctagtttcagtggcagaataggattggaattaaaaagcagaactcatctggcttcagcagattgccaccaagaggatacaggtggtcaggtcctggctggctttgtctttgggcctgggcaggcttaggatttgactttctttgaagtacctgatgctgattgattccactaatagtaggaagcaagagacttaactatgagggacgttatgtgaatcttaagtcttaccagtccttgcattagtacattaaatttggatgttttggaagcaaattcatacgatcgtgagtgatttctccaaagaaaaaaagccttgtccagcctgaccaacatggtgaaaccccatctctactaaaaatacaaaaattaactgggtgcagtggtgcgcatgcctgtagtcccagctacttgggaggctgaggcaggagaattgcttgaaccctgggaggcagaggttgcagtgagtcgagatcgcgccactgcactccagcctcggtgacagagcaagactccatctcaaaacaaacaaaacaaaccaaaaaaaaaccctgatgccattcccagtccccgttgtaggacatcacatttataaatccaggctttagtcttctgggctccaccagtctctgccccaccatattcctttgtcactacctctaagtttttttccccacttgaggatttggagttaaacgaactcaaaatgtcttgtcattgtatgtattcttgcccctgctttgaaaacagggccatgggaactctgtttatgccctgttttaatgtttctgttttatgttttactgttaatatgaaaataaagaatttgctatgtaaaaaaaaaaaaaaaaaaaaaaaaaaataaaaaaacaaaaaaaaaaaagaatccttttttcaaaaaaaaaaaaaaaaaaaaaaataaaacccttgtgggccgcttgggccaagtcaattttagactggggaaggtttatccttgcggccgaatttggggctaattggcccatttccccttatggggggcggtttaacatttaattgcccggggtttcaaaacgtggggactggaaaacccttggggtaccaactttattggcttggaaaaaatccccttttggcagggtgggtaaaagaaaaaggcccccaccggtcgcccttcc

SEQ ID NO: 708788 - DNA, 298 bp, Homo sapiens
  misc_feature (18)..(18): n is a, c, g, or t
  misc_feature (22)..(22): n is a, c, g, or t
  misc_feature (25)..(25): n is a, c, g, or t
  misc_feature (28)..(28): n is a, c, g, or t
  misc_feature (33)..(33): n is a, c, g, or t
  misc_feature (52)..(52): n is a, c, g, or t
  misc_feature (56)..(56): n is a, c, g, or t
  misc_feature (71)..(71): n is a, c, g, or t
  misc_feature (76)..(76): n is a, c, g, or t
  misc_feature (78)..(78): n is a, c, g, or t
  misc_feature (88)..(88): n is a, c, g, or t
  misc_feature (95)..(96): n is a, c, g, or t
  misc_feature (177)..(177): n is a, c, g, or t
  misc_feature (192)..(193): n is a, c, g, or t
  misc_feature (196)..(196): n is a, c, g, or t
  misc_feature (205)..(205): n is a, c, g, or t
  misc_feature (235)..(235): n is a, c, g, or t
  misc_feature (260)..(260): n is a, c, g, or t
  misc_feature (266)..(266): n is a, c, g, or t
  misc_feature (281)..(281): n is a, c, g, or t
  misc_feature (288)..(288): n is a, c, g, or t
  misc_feature (292)..(292): n is a, c, g, or t
tcgccctattcttcatancggnatncgngaacnttattataataaacacccncacngctacaatcttcctnggaangnaatatgacgnactctcnnatgaactctacacaacatattttgtcaccaagaccctacttctaacctccctgttcttatgaattcgaacagcataccccngattccgctacgacnnacncatacaccncctatgaaaaaacttcctacggctcacccnagcattacttatatgatatgtctcnataccnattacaatctcaagnattcccngggnaacggg

SEQ ID NO: 708789 - DNA, 101 bp, Homo sapiens
tggaaaaaaagcccccccttgggcccccggggggggggggggggggggaattggggccccgggacccccccttcccccggggtcaaggaatttcccccccc

SEQ ID NO: 708790 - DNA, 1114 bp, Homo sapiens
  misc_feature (34)..(35): n is a, c, g, or t
  misc_feature (265)..(265): n is a, c, g, or t
  misc_feature (270)..(270): n is a, c, g, or t
  misc_feature (403)..(403): n is a, c, g, or t
  misc_feature (466)..(466): n is a, c, g, or t
  misc_feature (473)..(473): n is a, c, g, or t
  misc_feature (594)..(594): n is a, c, g, or t
  misc_feature (668)..(668): n is a, c, g, or t
  misc_feature (702)..(702): n is a, c, g, or t
  misc_feature (713)..(713): n is a, c, g, or t
  misc_feature (898)..(898): n is a, c, g, or t
  misc_feature (949)..(949): n is a, c, g, or t
gcagtgtgcagtttctatcgtgtctcagcattannggcacagggcaggtgtcatcccaggcacgcacgtcgaaggttttcccagtatcttcaatgcgcaaatgcagagtcaggctttccttcttccaagcaggcacatcctcgcgccagcataaacttggcactggtccctctcaccagcacagtgcagtgcacaacacaaggggcaccatgtcgcgcacagcacaattccacacacagcaacacagcaaaccctggctcgcagnccagntccacacaatatctcaggcagtgggcctcgtattacttgagattgcacatccttcctctggcgctggaatccatcaaagtgggccgccacacgcacgggcaacattccaaggcaaagagcccttgctacaggnttatctagcaacaagtggcgttcacaagcggaagcaaaacacaaggcgttatatctaggaggngcatggncgttcaaagtggcaaaggccaaataaaacaggtggcctcaaaggccaaaggaccattcttcattgcgacaaagtgcgaggccaacgctcacaggcgcacacatgcattggtggcaagggcnttgtggcacaaggtcttcacgactaccccccgaaagatatgtgattggcaacaaactgccttagacacgtggtngcagcaatttacgcagtatttctcaacactacanatggagtttgngcagttcatacagcgaatcagacacaaagaagacaacacgacacatcaaacgacacaaacacattggtacgggccggcccttcgagcaccaaggtcagaactcatagaagctcgacggcgagcttatatgcattgcgggccgccaaattcgaagcctcacatgtgcgcactatcgcccctatagnagaagtcgcaattacacctaccaggggcggtgtattacaacagttcggaantgtggaaactcagtgggtaaccacagtaatatgcatgtagcaattcccatttgcagcggtggtatagcaaaggcgccacgtatgtcatctcagatgtgccctcatgtgtgtgaatatgcgtatgtgtacacaggcaatggtagccactttaccaagagacgtaat

SEQ ID NO: 708791 - DNA, 587 bp, Homo sapiens
attatcactacgatatatgcgctcatatcggtggggtcagccatatgtttaaatgactctcgcgatgcatacaaatcagtcctccgtgaagacaggatcttctgtcacttacggttctgacatttactcgtggtgtgaccctgtacacttaatcttctgcaaaggagaaaaaaaaaccattgtaaaaaaagcaaaaatgacaacagaaaaacaatcttattccgagcattccagtaactgttgtggggtgtatgtacttagctgtactataagtagttggtttgtatgagatggttaggaaaggccaaagataaaagaggtttctttttttttccttttttgtcgtatgaagttgctgtttattatatatattgtggcctgtgtgatgtatgtgtgaaacaggtgttgtccaacaattaaacaggaatgtttattattggcttgagttagttctatcaggggaaaaaaaagagacagaagaaacaaaaaaaaaatctttgtggggggcatgtgggccctggaaaagggttttttaagaacaaaattggttggtgggggcacggggggccaagaagaggaaaagtgga

SEQ ID NO: 708792 - DNA, 107 bp, Homo sapiens
acccctattagaggaaggattgagagactagcaatgtgaagtaacaaagatcaggcagctgcaggtgactcctgaatcttgagtccagtgctttcgccactccaata

SEQ ID NO: 708793 - DNA, 95 bp, Homo sapiens
  misc_feature (8)..(8): n is a, c, g, or t
  misc_feature (13)..(13): n is a, c, g, or t
cactgtanctatnattatcccacccccaggggtgaccttgtgagccacacacacaggtacacacatgcacgatatgtacacactgcacgatatgt

SEQ ID NO: 708794 - DNA, 1197 bp, Homo sapiens
caggcgccttggggtcggggacgacgctgtgggccctcaacgcggcctggggccaggcggtccggtgtggatcacggagacgcgctacccgccacctgcgttcccgagactttcttggcaccgcaccgcgcgctgcaggcgcgcttcgatgacggccaggttcctggagcatttgctccatgccctcgcctgccatgcgagggccccggtgtggccccggtgctgctgctgcgcgctagacccccgcgggtctgtctctccaacttgcagcggtccgccgtcttcgagcgcgtcctcagcgccgtggccgcctatgccatgcccggccttcgcctgcctcgctgggccaggcgccgtcttactacactgccctagaacttgcggcaggttcccccttgcggcaactccgggttgagccaagcctgcgatacggtgctcgtggccgatcaccttggcggcgagccctttgggcggctcacggggggtggtgcggtgacgcctaggttgccacgcttgtgccgggaatccgcacgattgctagacctttaccctgcaggcaaactgcgggggtggaccttggcccccggtggccttcgggagaagcgaggttccttcccaaaacccgtagagggacgccaacggcctctttggaaagaacttataaccccttctagcataattgaccggcggaggagacccacttgtccccctgggcaatccgtagggccagaacttggtgttcttggaaagagagcctggtgtgggaacacagaccaggggcccggcacaggcttggctaatgaccccccaaagctttggacccaaatcttgtctgggtggacctgagggagtcctcccctcttctggtggccgggctttgacgccttcgccaagcaatgcgcttcatactggcgctttttgcgccccgcgtatgttcacgagggccaccccccaggggccacttgggtcattggtcggcccctctagggaaataccgctgtagtttacacagcgggctcgggcttgtccccttggattgggtcacactttgttgggctccaggccttggtgatacggtacggcgtctttccactaggcaaacgcaggaacgaggttgtgggcacccactgtcaatttcgtggccggcaacatgtttggggttggacaacggaggcctcccacttcacagtcgacgcg

SEQ ID NO: 708795 - DNA, 150 bp, Homo sapiens
acgaagacaaccgatgatacagctacagcatctcccgtccaaaggcgccaattttggcaggcatgtagagcatcaaaggcactacaggagagtcttcatttccatagatgatgaagcacatctctttcaggcgtctcctgcaatacctgg

SEQ ID NO: 708796 - DNA, 422 bp, Homo sapiens
aatagctcggtaccgacgctctctctgttggggatggcctctagttttgccagtcggctaataagggactacattgagtccacgttttgctagcgtcgaagcgagtacggctgttcccaatttccatcgcctgctccaatgatcactgcccactgtcccattgatcgcaagatagactttggcaaaactattccagtagttcagtaaaacacatctggagaatctcacctgcacttcgccaggcaggccaggtcacaccatcaggcctgtgaggatgaacaactgttccaggacgtgccccatgggtgcactgcaacagactgtttcaggccctggctcgtggctctctgatgtatgcctcctgggaccacgctgctctggagacctccagatgccccacagagagagcgtcggggatcctc

SEQ ID NO: 708797 - DNA, 166 bp, Homo sapiens
  misc_feature (23)..(23): n is a, c, g, or t
  misc_feature (110)..(110): n is a, c, g, or t
  misc_feature (137)..(137): n is a, c, g, or t
ttaaaattaattctgaaaccatngcgccaataagtggggagtgggatcttggacaacaatattttattgtttaaattaaatactgtgtaccccccccactcatgaatgcnggttcactaatgtgaacagtttgcttnaagtatgcatgttttacatactccagatg

SEQ ID NO: 708798 - DNA, 110 bp, Homo sapiens
acctggtcagcccaccacgatgacacggtgctcgggggcagaagtgcttgattcctgggtccacactgtcttgacctggtggacgcggaattgcggggacaacgcgattg

SEQ ID NO: 708799 - DNA, 136 bp, Homo sapiens
  misc_feature (12)..(12): n is a, c, g, or t
  misc_feature (18)..(18): n is a, c, g, or t
  misc_feature (74)..(74): n is a, c, g, or t
  misc_feature (110)..(110): n is a, c, g, or t
  misc_feature (112)..(112): n is a, c, g, or t
aatacccttggnaagagngacgaacacctctgggttttttcaataccaaattaacatggaaccttttctgtaantgggtacaatgaagaagtttcttaaaaacacacacnangcacattgggccaactatttagta

SEQ ID NO: 708800 - DNA, 875 bp, Homo sapiens
  misc_feature (152)..(152): n is a, c, g, or t
  misc_feature (468)..(468): n is a, c, g, or t
tgtatgtgtgtgtgtgtgtctcccattctctcttctctctctgtctctcagtctctgtgtgtttctttcccactctctgtgggtttgtaccagccgaagttgcgtcagggctaccaggtcggtggaggattgggggtgttgcgaaattggcngaaacctctttgctcctctggtaggcatttgaaaacgtggcttgggtcaggcacaggaggcccccctaccccacggttcccaggtgttgtttgtttttccttggcgttgacggaaatgtcacccgtttcccccttccaccggcatatccctggaccccacccttcatttcgccgtcgccccgtatgcctccggtgacacacattaacaccaactgctgtgggattggccagtgccacgcgtggtcacatggtctccccctggatttcgcctctgttcctctttgcagttgtcctgtaaagcacggtcggctttccngaacccctgggcttttacaagcggggcaggccactgctctttcaaaggaggagggaggcagagggctgatggatgaatgagtttgctctgacactaggccttgagaactatggggtcattgtgtgctgcagcgaggccctgccggcctgaccacatgtggtgagcccatcctatgtcactcggagggggccagaatgggatctcaacgggagtccagagaacacagcaggcgtcctgaagctccccctcccttggtggaagtcggctcaagcaggtcctgaggacaggagccctgggggtttgggcctgggacaggaccagacacccgtcgccccctctcccacgccgcctgaaacaggacccaggacacaggcgctgccggggcggcagcaggagcatcgcggccg

SEQ ID NO: 708801 - DNA, 308 bp, Homo sapiens
cgtcgacactctaaccactaggctacctgctggcccctccactctaaccactaggctacctgccgcccctccactctaaccacttggctacctgctggcccctccactctaaccactaggctacctgccgcccctccactctaaccactaggctacctgctggcccctccactctaaccactaggctacctgctggcccctccactctaaccactaggctacctgccgcccctccactctaaccaataggctacctgccgcccctccactctaaccactaggctacctgctggcccctccacgtcgac

SEQ ID NO: 708802 - DNA, 360 bp, Homo sapiens
cctttgagatcagagcatctggtcccgcctgcaggagacgggcctccgtggctaatgcggagtgcatctgcgaacgcgaaggccaccctgcaggagctacagacggtgcactcggaagtccacaccctcctgtatggcacgaaccccctcaaccggtcataaactggacagtaagataccttctaggtatttcaggaccttcctttcctcccatatcgggtttgaagtcccctgaggttgtgtttccagctctcaagcccttgtgtctggggcacctgtgcgtgttgcctgccacggttatcaggtaaagggcctgaaagggaacctttcaccctctgttcataagccacggtcgaccca

SEQ ID NO: 708803 - DNA, 837 bp, Homo sapiens
gcagggcgtgctggttgtccggcccaaaccttcacgtgttccaatgggaagtgcctctcgcacaaagaccagcagttgcaagtggcgaaggactactgtgagagaggggtcctatgaggcctcctgccccattgtgaatgtcaatcatcttgtaccagaaacgaccacgcttaccggcgtgccctcaaggtggggcatcatgtcttgtgagtccaaaggtggcatacctcacatggaagtggtggactgtgaaagagagtgatctgtaggcgtacgtgcgtcagaatgtggataggacttgcgatctggtgggctgcgaggtcatgttccatcgatgaacaggtctcgcatggttgatatggggggcacgtgaacttcaggattgaagggccgatgtgagctccttggccgggtgtaacagaccatgtgattgtctctcatgtggctcaaagaggaccatcgagtctagcagagtgacttcgcactcatctagtgctccacatagctctgagcatgtatcctcatgtgcgtaacatctgtgcttacatctctgattcatcatgatggagttctagagtacatcaaagaacgccccaaaaagctcaagtggtgaccggcacatgtaccttcgtgtggcatttgcgtcacaggaacacacagaaaggacgaagtcccgcgacggcagcactccccttgggggagggtaaagcgatggggatgcgggcaagatgccttctaggaagcccgccgatgcaatgctttccacgaccccaccatttgcatttcagattgggcttttgcagggctttctggaccttattgactttccaggagctg

SEQ ID NO: 708804 - DNA, 797 bp, Homo sapiens
  misc_feature (170)..(170): n is a, c, g, or t
  misc_feature (235)..(235): n is a, c, g, or t
  misc_feature (280)..(280): n is a, c, g, or t
  misc_feature (286)..(286): n is a, c, g, or t
  misc_feature (288)..(288): n is a, c, g, or t
  misc_feature (293)..(293): n is a, c, g, or t
  misc_feature (349)..(349): n is a, c, g, or t
  misc_feature (432)..(432): n is a, c, g, or t
  misc_feature (439)..(439): n is a, c, g, or t
  misc_feature (765)..(765): n is a, c, g, or t
gagtgagaggaccgcgcgagagtcacgccgcaagtcggcaaccgggcaggagtggggaatccgcggcggcctttgttcccccaagagacccagaatcctggcagccgggttcaaagcggtggtgagtgtctgacaagcagaggcatgagcgggggccaggccaccctacnggcccgaggccgcgggagggccgggggaggcaccggcggggccgccctcacaggaacctccatcnctcagggcccccgccggcgccctcggggcctccacggcagcgcancgctcnantagcnctgaacagtcccggggtcccagcccaccggaaccccggcagaggcccaccaaggcnctggggccctttgaggaccgggtggggcaggcgccggggggggaacgggacaaggcgagcggccggcagacggggcagaaatnggcgganacagcgtgcggaagcggggccacagggacggcagcgaccgggcccggcgcaagaggcgggagtatggtgtcgagcgggaccgggcgggggacaaccagcggctcaacatcttccccaaggagggcttccggcctcgcaacaacatccagcgcatcggcggccacgaccctcggcagcaggagtgtgggattgctgtcctggagcagatggagaaccacggtgtgatgcccaacaaggagacggagttcctgctgattcagatctttggacgcaaaagctaccccatgctcaagttggtgcgcctgaagctgtggttccctcgattnatgaacgtcaaccccttcccagtgccccggga

SEQ ID NO: 708805 - DNA, 253 bp, Homo sapiens
tccatccatgcccgcgtttgtggcgggtagagtcagtgacaggaaggcaggcctcctttggtagtatatagagtgagctagatttgggctcaggaaaacctaagctcgcttgattagctctcgtctgtgatatttctcgtacactggttctgctacgtcatggcaaagaaacagtacaaagccccactgagaatagataaaagcaagagacaacaagctcatctcaacacaagaaaaagtaaaccaaagaggc

SEQ ID NO: 708806 - DNA, 230 bp, Homo sapiens
gaccccgagcaggctacctgacaagatcactgctgacactatggagcactggatggaacctgtcaaagaccagagcattgagagcactgaccgacgtatttggctccctgtccccgtatttgacctctgcttcctgacttgtgtgcccttccttgctgttggaagtagagtctctttcttctaccgtaccttctgcctctttgtcggaggtatctgctgctcttcctctc

SEQ ID NO: 708807 - DNA, 138 bp, Homo sapiens
aacaaagtggagcgggactggaacccaattgccgaggatagatacatatcgctcggcaatggtcccagctgccctcacgttagttcccggcgacgaccaccccacgtagactactcacaccgagccgccgtggtgcct

SEQ ID NO: 708808 - DNA, 158 bp, Homo sapiens
  misc_feature (130)..(130): n is a, c, g, or t
  misc_feature (141)..(141): n is a, c, g, or t
aatgtaggatgggtcaagaaaacgataataccgtactactcataagcagcctctcagaagctgttagtgatgttgcaactcataggcaaagatagttaccctcctttcaaagcctaaatttaatgcttcnaacttctaccnaactctttaggtacagt

SEQ ID NO: 708809 - DNA, 132 bp, Homo sapiens
cggcacgagggctcccacaatctttaaacacacagccattggaaggacgatcttgagcaggaagggtttttaaagattgtgggagcttcgttgaacgttaatgtgtagtaaatgcacctccttgtattccca

SEQ ID NO: 708810 - DNA, 270 bp, Homo sapiens
atctatactaatccagctcgtagagctcctgggcaatggcaggcgatctgcaccacgcgagtcctggatgcgcagccaggtcgcactcgaaggcctcgagacatgcgaatgagggctatatgatgtccgatagtgtggacgtctacgtagtcccggtgcttcagcatggacttccttcccgtcagtacaggacctcgataggatggaggcctcctgccggaacttctctgccaggtggtcgagccgctccagcctgcggatctcattcag

SEQ ID NO: 708811 - DNA, 222 bp, Homo sapiens
aggagaatattcaggtctattgtgatttcgagatgcattagccgcacttagagttaaggatcaactttggcttctgtggaagctgctgagatttaaagggtaagagcttcatcccatttagaacatggtgtattctttccctccttgctcatatcatttatgaaaggataaaagactggagaaagtgtcagagtagattctggaggtacttatattgctagg

SEQ ID NO: 708812 - DNA, 674 bp, Homo sapiens
gtctcaagccctcccgtttccacgcacgccgtcgatcggccgttggacgccaccggcgacatggatcccctccgcctactcctcccccgcgcccaggcccagccattgcttccgctccccgccggcgtcccagcgccgagcgtcaggccccgcctcgtcccgcggcgacgggcgcgccgccaccgcaacggggccgcgcggatgcttccagcctcggccgtggcgtccgagtcgccgtggacggagcaggatccgccgtctggggagaaggaggagcggttcgactggctggaccagtggtaccccttcgcccccgtggaggacctcgaccccggcgcgccgcacggcaagatggtgctggggatccgcgtggtggcctggtacgaccgcggcgccggcgagtggcgcgtgttcgaggacgcgtgcccgcaccgcctggcgccgctctcggagggccgcatcgacgacaagggccggctgcagtgcgtgtaccacggctggtgcttcgacggccgtggcgcctgcaagttcatcccccaggcccccgccctcggccccccggtgcacaccaacagcaaggcgtgcgtggcgtcgtacccgtgcgtggtgcagaacaagctcctgtggttctacccgcgcgccgggccggagcacagggacgtgctgcagcggaa

SEQ ID NO: 708813 - DNA, 590 bp, Homo sapiens
  misc_feature (583)..(583): n is a, c, g, or t
  misc_feature (585)..(585): n is a, c, g, or t
atgatttctaagtttcagcaatcagtcatagcaaccctttaactattatatactcaatacagagctaggtattctgtggaaagtatagttgaagaaatgacaacagtcctcaggtgcttgactgacttatgtgaaagtataaaagtattctttgtaattccagtaagcagaaatagctttgtttagggggttgggagggactaaatttacaaagaggcagaatctcagtctaagggagagcttttggaaaaaaaaatagattattgaaaaaattggatttcccctcactggctcttttctgatgtgttgcttctcacttagcaacagctatagtttcctgagctctctccttgattcttcaaggcaacaagacttcgggttttctattaaggtttagtcctgcatggcactgactggttttgccctcagaataaaagctgtcaaaatgggaaactcggtaccatttcttccaattatcacatcccctccagtatcttcctgcttttggttgctctccagtattttcagatagctgttttctatattgtccacagttttgggttcacatgcttggtgtgagggnanaaaaa

SEQ ID NO: 708814 - DNA, 273 bp, Homo sapiens
  misc_feature (5)..(5): n is a, c, g, or t
  misc_feature (21)..(21): n is a, c, g, or t
  misc_feature (37)..(37): n is a, c, g, or t
  misc_feature (176)..(176): n is a, c, g, or t
  misc_feature (208)..(208): n is a, c, g, or t
gtaanatccccgagaaaatcncggggatattatgacnctgtaattgggggcatataaacctaactaaaacaacttttttattttattttatttttatttatgtatttatttatttatttcaagactcagtctcaagaaaaaaaaaaaaaagaatatacaccagcctgggcgtgggngcacgcctgtaatctcagcacttttgggatgncgaaggcaggtggatccacctgaggtcagaattttgagaccagcctgaccagcgtggtgaaaccc

SEQ ID NO: 708815 - DNA, 926 bp, Homo sapiens
gcccctcatgtacatgaatattatactagcatttaccatctcacttctaggaatactagttatatcgctcacacctcatatcctccctactatgcctagaaggaataactactatcgctgttcatatatagctactcgtcataaccctcaacacccactccctcttagccaatatggtgccgtattgccatacatagtctttgccgcctgcgaagcaggagggggcctagccctactagtctcgaatctccaaacacatatggcctagactacgtagatgacctaatagctagctccaattgctaaaacataatcgtccaaacaagttatattactaccatctgagatgactttccaataaaagctgataattggaatcaacaagagaccacccacagcctaattattaggcatcagtccctctactattgttctaaccaaagttcagaacaaactatttagttgtgcccccaagcttttcttccgaccccctagaaagcccgcctactaatactaggtacctgactcttacccctcaacagatcgtggtaagccaacagcccaatttatccagtgaaccattatctgcgagaaaaaaattctacctcctatatataatctcccctaagaattctccttacgtgtatacaatttcacagacacacaggaaagtaatcaataattgtatatttacgttcgaagcccaaaattattcgcagtgtgttatcacacccgagagggaacaggcagaagctggtagaaggcatatgttcgtatttaaccctagtaggccctccctagcatggaaattaacacacccgggctgaaatttatattactccgtcaaaataactgcaaattgatagagcacagatataaaacacgggcatacccaaggccccgataggagcaaagggatcacaacg

SEQ ID NO: 708816 - DNA, 253 bp, Homo sapiens
agctaccttcaatcacatccctacaatagtatttattgagcactgaccgcgtgcataaagactgttacatggtgtcagcggaaacacgctgtcttacagcgttagggtagaaggacgggcaagcaaacgaaacaagggctcccgcccttcaacatgagtataagtaatgatgcactttcactccagggacggacaaatgagggcaaaccttcatcatccatgagcagcgatttcgccaacgcaacaattgtca

SEQ ID NO: 708817 - DNA, 202 bp, Homo sapiens
acgaactaggccgtagccgcacgcggtaacagccgagcaccgcgcggtatgctgtgtctgatcacacgatcactcgacaataccaccaggctacttggaagttgtatgagcattacacttaagagaacagagcttctgccaatgtcagcttgacaattgtggactcctgtcagtgaccgacacgggtgatgctggtaaaaca

SEQ ID NO: 708818 - DNA, 151 bp, Homo sapiens
  misc_feature (7)..(7): n is a, c, g, or t
  misc_feature (47)..(47): n is a, c, g, or t
  misc_feature (73)..(73): n is a, c, g, or t
  misc_feature (81)..(81): n is a, c, g, or t
  misc_feature (115)..(115): n is a, c, g, or t
ggatttngcgagactgcgtacatcacggtatttattggatgtggaancctaaaataggaggggcgtggtaaancctcagancagaagtactgacaaagagtttccccaagcaatngaaccgccatagcccgcacacattcccaggacacat

SEQ ID NO: 708819 - DNA, 1121 bp, Homo sapiens
gagcgccttacgaaaggcggcaaaaagggagccaagaagaaacgtggtctggatccattttctaagaaagattggtatgatgtgaaagacacctgcatatgttcaatataacgaacactattgggccaagacgctcgctcaccaggacccaaggaagccaaaacttgcatctgatggtctcaaggtgtcgtgtgttgtgaacgtgagtctctgctgattatgcagaactgactgaagttgcatttagaaacctctcaagcctgagtaactgaaagaatgttcacgggataaaagactgccatgacgtaacttccatgagcatggatcttacccgtgacaacaacatgtgttccatggtcaaacaaatggccagacaaatgattgacagctcacgttgatgtcgaagactaccgatggtataaacttggcttccagactggtactgatgttatggcgatctatagctaaacaatagagcaaggaaacatcgagagatacgggaacgacccatctttactgctcaagaaccacaaacaaggctcactgacaacactacccggacagacacgaatgactggaaaattccatgacccccgagagggattgcacagggacccaaactggcaacgtagcaacgagaaaagtcggggatccacataaagaatttgcaagttgccaggtaccaggccatcttggccaaacacagaccgactcggcacaccaagcggccttggccctcaatcgattataatacataccttcatcccacgtgcatcggtcgtgaccgagtacaggaacaaaagtaaacaacatgcatcggacgagaaagcacccaacggatttaggacacgttggtgcgcaaaaggctcgccacatggaaccagaccaaccaacgggcgaggcaaggggacacggccacgaggcccatcacgaaaacaaggaccacaagggagaaccagatgaccagaggtgcctcaaagaggagaaaacacgacacccgacatgcgcaatagtgacccccaggcagagtacaccagaaaaacgaggccaaaagaggcccagacacgtacagaacagagtgcccacgacagaacaactgccgaacaggacaacaccaccaa

SEQ ID NO: 708820 - DNA, 251 bp, Homo sapiens
catgctggcatacattcatatgcggactgcaaccataggatatactggcaatttgttgtgcatttcataccactggccccactgcgcataaggttggggatatcaatttgattctgctgtagcgcgggattcatcatatcaagagtttctttgccccaatagcatatcacaagatgaccttcaatggtagtaccattagcagaaacaattgcatgtgctgcactatcatgggagttgcaccggatagcttg

SEQ ID NO: 708821 - DNA, 288 bp, Homo sapiens
  misc_feature (114)..(114): n is a, c, g, or t
cctggtgtgggacgtgacttcttctgtcttaggacattcaggattcttcgtcccaaattccatcccactaaaaatgtgctcttggtggaggtgggcaccttaattgtactcccnctgcctatagatagtgtggggaaatgatggtgaaagacgtggcaggaaactagaaaaatttttgaaaaatgaagcatgagtggagatccaataatgcatgacgtgcagagatgtagcttgagaagatttacatgagacaggtgaattaatgccgagaatgtagcagggggaaga

SEQ ID NO: 708822 - DNA, 561 bp, Homo sapiens
ccatcgccacatgccgtccggctcgatcgacctcagtcacggcagccaccttacagatcagtcctccaatctactcaggggggtcggggtcttccactcgctactctctcacagagctcaatatgggcaggtggcaataaatggacagaccagacccggatctacctagggggcatggccaatgtcaccttgatcgaccttcgaggatgcaagcagatcactcgaaaagcctgcgagcacttcatctcagacttgtccatcaacagcctctatggccggtctgacgagaagctgatacagaagatcagttaagacacacccagcccagattcaacaggaaaccgatcttcccttgattccccacggaggagagcctctcctcgacccggcaggggctcggaggccagcgtcacactccctctcggctctccggtcccttgagcccttcctctacggggggggcagagagggtggtggacaccaggctaatctggctgctcctctccctcctaaggaaacgggagtagccgattgatctgaggggacagccaggctgtggtg

SEQ ID NO: 708823 - DNA, 366 bp, Homo sapiens
tggccaggtctctacctaaaactgaacctcggatcctatctggatggtctctttgaagcctccaagtgcacacaggggggcaagggccgggcgtgcaattctctgaagttgggcaagtttccggccacggctgctgccattttccagaaggctttcggcgtatttccccaatgggggaaggtacatcagggctctagacagaaccttctcggcggtgggggtccatattggagcagcattggattcaggtgccatgagcaagctatgtagcaaggcgatcacttctgcagccatgcggtttggcacatgcccacggatgaagggacgcacaggatcagtcctggcaagcggggtacggagctcgaa

SEQ ID NO: 708824 - DNA, 643 bp, Homo sapiens
tctccctctccccacggtcctccgctctccctgtccctctgggatcatcgctataaacgatgaaggtctctttacggtagactctcatatgcaaagtcagtttgcccagatcatgacgtgtgagacaggcagaggaagtgcactagctgagtacatcacgacagacataatagcgtaccgacattgtgatacagggaaacgcgtgcggagccgcctggtaagcctatgggccccacatcaaggcgcatactcgtaagatgcggaccgcacactataagttatgcccgacacaggaaactgccttaatggaataagcacgcgacacggcaaaaaccgaacgtcccaacaaaaacgagaccaaagacaaatcacgaaaacaagaaagaatgcaagaacaaagaggaagcataacaaacaaatgagcaacaacgaaacgcacaacagaaaagaggcagtcacaccaaacgaacattcccaaacaagacacgcaaacaaggactgacaccacaccacgacgagcgactacacagaacccaacaggcgaacgaaacaaacataagccacgcaccgaacaaagcacagaaagaaacaaacaaaacgaacaacacaagaccaccaaaacaacaagaacacaacaaagaac

SEQ ID NO: 708825 - DNA, 487 bp, Homo sapiens
acaggaacagctataacatgttgaatgtgagaaactaatcgaggtactctaccgtataagcgctatcacatttagcctgcgaccctcagctagttatcggtgtcagtgaacgtgtctctaaactagctctagtgagatgtactgattttctctatttgcatataaacgttgacagttatttatagaatgcagcctatttgtagcaaatagtaatacgacaataagtagtcaaaatccgagtaagtccaacatggtacctcaggtaaagttacaggtagtacaaaatctgagacagacagggataggggtagtacgctagtctaagatagacatatgacagaagggacatttgtaatgcataatatatcaggaagattactcaagcagagctaaacactagaaacaatcttaatggtaatagatagaaacaccgggagaagatagagaataactatagaaacaatatatatttcaaacaaacagagga

SEQ ID NO: 708826 - DNA, 137 bp, Homo sapiens
cggctgcggcaggagtgccataccacggagaagcgcctgtcagcctggccaggcccagggcagcgtcgcctttgattaccgaaagcgcaacattcttcaagctgggcttacaggatgtgaaaagaatatttattcca

SEQ ID NO: 708827 - DNA, 209 bp, Homo sapiens
ttaattttttcccttgtttttaaggcaaaaccctttgttcaggggtttatttgctgcccttttcccccctatttttttatgaccctgccccccccccctttccgaaaaacccctaaaaatgatcaataaatattaagggaattaaaaggccggggggatcccccgtattttgaaccccggtccccggggccccctttttttttttttta

SEQ ID NO: 708828 - DNA, 2605 bp, Homo sapiens
gctcacttttctaatttacaggctggcagcagactgagagccctccttgctagggacagcagaattgcggcttctagctgcgcactctgttgctacaccttaacaccttgtgagacaatcccgcccatatatttctattactttaacttactgcaaactgccctagccttccctaacactaggacttgcgcagcgccaacactctaccccgttacacaccttctctcgacacacctaagctccctttacattacgtagctttctatggcaacatcacctgccacttactaccttgctatctgtcgccaaactaccgttacacaacgtgcgtctattatccctggcttcactcctcgctcctctaacgccatctgtcctcactccacgcgcgccgccacagacgtatatagcgggcttaccgccgcaatacatcatctaccttcggccgccctcacaacccgaatcgctctcctcttatcccccgtcgtcgcctcaacctatccgccaccacctcgccctgccttacctttcccccatcgccctccctctcccttctcctactgctcatcctcggccccctatctcactctccagcctaccctcactctcggtcgctatactcatccatatcgatcagtccccacctacaccgctatccaaacgacaggcaccatacacacgattacactcaaactccatctacaatcaccacttcgcaatctctccacctcccacctctacctcgcctatcacctatccatcaatcaatcacccaccgcccaccctacccccacttccgtgtcagctctcttctgtactgcgtcaacgtcgcttcaatgttcggcagttatgtcgcagctcctaccctcggcgcaccgcggccccccacaccttatgccttcttccggtccccgccctatgtctcatatcgctcctcgatctccctttggcgcctcccccttctccatcccgtcgccctctcctgccaacagccagtatcttcccgtctaccccgttgtcacccacagcgcgtgccaactccttccccccctcctctacgttagagaacacatgctaccaccataatccacatacgcacctccaatcactcacctatctcctaccgatattctacatctcacccataccactactaatcacaacatgcttcaacacctctactccctcactagattcgcttaccctccgcatctactcatactatatacatatccactcaacactcctccctcacccacccactcacatcacttctgcgctctcaatcttccccctcttatccccccaacatccacacacctccacacacctactaccccacctctacatccgacccatcctctcatcattactccgtcacgccttctccctgcatcaatcactcacatactatccacaatcactaccatcaccacacctccccacctacatcaacaacacccctactaccaccctcacaaacctacactccacacactacacccacccaccccactcgcatcttccactccatcatcacctcccccacaccccatcatcctacccccacccccatactcatccccccacacccaatcacctcactcctcacaacccctcaccactctacgtcccatctgcacccacacctatcgacatcatcatatacccccccgctcccattacaccccactacctcctcacctcctaccactactaccatcacacattcatactttagtccaccctctctacacgcctccacgctcctctctccctaccttcacatcacccatcccccactcccttccaccatccaactaactacttcactactcatctataactcatcacctcaccgtctacatcatcctaaacatcgcccttgactcaacctcctccctttacctaccactatcacctcatactcctttgttagtacctactacgtcatctgctgtctacagttgcattctgtcacctatgcgcgtctcctttcctcgatccgccgtgtgtcgtcacaatgcttactgactccgctagactatacgctaccgataccactctccctgcctctactctatgactactctcttctcactgctgtacgctcctcacttcttcaatctctacgctcttgtctctcttcgttccgcctctgccgctagcctctctgctgtgcctctacctcatcgtcgtctatcatctcctcctctccttgcgctcgtctacttttcccactcctctctactcgtcgtcagcccgccgtctatacaaccaaccatacgctacgctctcactatctcctcatcctcatcaccaccgtcctcctcaaccctcaccacttccaccacgcttacccacttccatcacacataccactcatatccacccacactatctcctatctaacatatcttaactacacctcaatactcacttccaccccagcatctcatgacccctccaacccatcccacaacacactccatactaagtcccaataaactcacctaactaaccactattagcaccactcatcacacctagattgacgcactcctcacacaccctatacactcacctagatctacccttcacccct

SEQ ID NO: 708829 - DNA, 184 bp, Homo sapiens
  misc_feature (154)..(154): n is a, c, g, or t
atggaacctcagttgcagcaccatgtgggcttcaaaagaagattccttatgtgggatacctaaggacagttaattaagccagacaaacccaatgggattaaagatgggaaatttgtcttttgacatcttccagttttgcaaaggagtttttggnatatggagtatttccgaggagatgagtttt

SEQ ID NO: 708830 - DNA, 217 bp, Homo sapiens
cctagccgcctgggaggagcgcctggactcgcgggccgcggcgagcgcctttacaatggccctgaccctgttttgatacagatgaatatagacctccttgtttggagatcttacttatatcagctacaacaggaaggccctcatcctcggagaattacctgtacttgcgaggtggaaaacagaccaaagtattatggagagagtttcatggcatgat

SEQ ID NO: 708831 - DNA, 178 bp, Homo sapiens
gcaactcacaatctttttagtttgcgtctttttatcatttcaatccaaagcgcatgtcattttggtaagtgcctgcattgtagttttcatggcaaaataattctatcccacgtattcaattactcatacgtttaaggtctcgggtgtatcccagtctcactactgttgtccatcattt

SEQ ID NO: 708832 - DNA, 575 bp, Homo sapiens
  misc_feature (1)..(2): n is a, c, g, or t
nntcgctttctccgcggtcttccgagcggtcgcgtgaacgttcctgcaggctggcatggcgcttccaacgtctcccccacaggctccgggcttgcccagatgctcaaggagggagcgaaacacttttcaggatctagacaagacggctgtgtatagaaacatacaagcttgcaaggagcttgcccaaaccactcgtacaggccatactggggaccaaatggaatgaacaaatggttatcaacacttgggagaacgttgttttgtgacaaacgatgcagcaactattttaagagaactagacagtacagcatcctgctgcaaaaatgattgtaatggctttctttcattaatgggcaagagcaagaagttggagatggcagcaaaacctttttgattctggtatttgctggagctctcctggaacatttaagcgtgggacagaacttctgaggactggctgtcagtttcagaggtcataggaaaggggttatgaaatagcctgcagaaaagctcatgagattctttcctaaaatttggtatgttgttctgaaaaaacttcgagaatatttgatgaa

SEQ ID NO: 708833 - DNA, 920 bp, Homo sapiens
gtcgggcggtctttgtgtgcggagtgtgtggtggccgggggtgcttggggcctggttgcgggcgcgtttgcgggacggagtggtggcacgagcggggggttctcgccgcgcgggggccctggcccttgggggccgggcgatgtgggcgtgggcctgggcttattgccccccctgtggggcgttttgtgtttttgggacctccgctgtgggtggtgtgtggagcaacccttgccatggtgcctggggagggggcacgggaccctcactggggtggggcccggaagctggcccctgtccctgtttacgttttcccctgcgtgtggaggccccacgagaaaggcgttgcaggcccttttatgtgggtgggggccagaaggcgaagagcgcctttggttccccaggggggacacccaccgccggaagttctcccccggccgtccataggtccgcacggggggcgcagcgcccgattgtacgtgagaattgtgagggaggtaccacgtgcttgcgtctcccacggctccccagcgagggcccccggagctctggggggtgttcttggtgtgttgggggaacggccgagagccccggttccggagttgaggagagtcttgccaccctggccgcttcctcgtagctgaggcctgcatcctcatgctgggcctcccctcccctcccccctctggtgcatggggtttgctgccctctcttttgcccccgcaggtggaagagacttattagggcacctggtggtggatggcccccgcggaggtgctggagctaggtttcccggggggcctggtttcccggcaacaggtgggaacctgggcctggaattgaggggcggtcaggaaggggtacaagtgggttcccttatttggagttcccccctccattaaacaaggtttggaccccccaca

SEQ ID NO: 708834 - DNA, 306 bp, Homo sapiens
gcgtcatcagtagatactcctttcatggaatctacctggttatgcagccacagctgacgcacagagcaactggaactaggtaagacattggtattgttgatactactcttcaacaaacaagtctattgtgtttgaagggactgtttctattgattaaataactcttatttccttggagcttattattgattgacagtttgtcctcggtttcaataaatttcatttgaattacctattatactgccactcagagttcctacattcgccagaattggcattcagttcattggttcatttcactttaac

SEQ ID NO: 708835 - DNA, 782 bp, Homo sapiens
gaaataatgctagcgatggaggtgttgccgaaataaatgtatagcatagccggcgtaaggcggcaacgagtgtgtcgctagagcgacatgatgctacaagcagaatagtctagctataaagacagcaagcagtaacacactcgcgacaggctattacaagcagagtaaagcgctaaacactacgccaactatgactatagacacagcaacataggtagactactatacatcggcgacccaggttatcaaaccattggccaataacaagacatgacaataccaatgaacataaggcaagcagcgcacatgctatgaaacgagtgaacgcacaatgccaccagaagtaggtggaacaccccaaaaaaaacgacttagtaaattgtccaggtgccacaccttcaatttccgtttgccaaaaggtagcgctcgcgcaatctggcaacaaaatactgggcgcgcaaaaggggtaaagccatctacaaaagatacacaaagagccttgcacgcggacacacggagcacgttaggaataaaaaaagcgctctaaaatctgggtacccagcaaggcaccaggcaaaaattttacaaaggttaattgcttcgcgggatagggtatacagaaacacccgtgtacatatcacacacgccgttatagtgaccacagaacgacaaacagggaaaacacaattatgcttgcaaagcaaatgctggagcgcaatttccctccacaaattggacgaataccaggaacacgtgggataaaacagacaatacactggagt

SEQ ID NO: 708836 - DNA, 376 bp, Homo sapiens
  misc_feature (6)..(6): n is a, c, g, or t
  misc_feature (11)..(11): n is a, c, g, or t
  misc_feature (46)..(46): n is a, c, g, or t
  misc_feature (370)..(370): n is a, c, g, or t
gatgcnggtanggaacctggggataagatgtatttaagggtccccngaaggttaccgaataggggccatgctgagctggggaagtcccagcctctgcccctgggcttccttcaccctgatgcagttatttcttgttaaagattcactgtaaaatgccaaataaacttaataactaactaataaccatctttgtcagttgaggacacttacattttatgaattttggggaaaatataggaagatacctgaggaaatagaattttcaatatcataggtctagcttttgatattacagaatttttgtgcacatgtggcaatgtgcttgctttggctttctaaaaagaattcaggtagcggtagacatcttgcnaccagt

SEQ ID NO: 708837 - DNA, 318 bp, Homo sapiens
aagctttttttttttggttatgtcctttctggttttggcattagggtgattctggctctatggaatgaattagggagggttccttctttctctatcttgtggaatagtgtcaaaagaattggtaccaattcttctttgaacatctggtagaatactgctgtgaatccatagaggagtggtgagaatgggcatccttgtcttgttccagttctcagggggaatgctttcaacttttccccattcagtattatgttggcagtgggtttattatagatgggttttattactttaaggtatgtcccttgtatgccgaagctt

SEQ ID NO: 708838 - DNA, 326 bp, Homo sapiens
  misc_feature (53)..(53): n is a, c, g, or t
aaaacgcaaaaggactttaattaaagtttactgcacagtttaataatccggtntggaatcgcctataacagggattgtcaatacaacctaatggttcctgaaaaaaaattctaccacacagaacaacattgggaattacatagtgctcgggactaaaaaataaatacatttacttttgggaaggtcatttcagaactgggttgtgaggtggttccaataagtcagttgggaaactaatatctgacaagaacggttcagcctcatgaataattactataagactatactattaaagaggtgtattgccgaaagcatctctgggtctg

SEQ ID NO: 708839 - DNA, 493 bp, Homo sapiens
ggatatgacttagtatcttcacaatgaacatctattacaggtgcaaaggggacacccgaatcctcaccgaggtaatatagattatcaccagtcagtaatggggaccaatacaacggcaagagcctcctgatatatacgcagtaagaaaaatatgacatcgcttctacggtgttcttgctaaaattgcttaaactgaatccaatcatgaggaaacctgacaaaccaaaatagaggaacattctacaacataactgaccagaactcttgaaaaccatgaagagactaagcaagacagaggatctgtcatggattagaggatactaagatgacagctcatctcgacttcatgtgtgatccttaaactagaaccctgaaccagaaatttgaattggacattagcaaggcaacaagtgaaatttcagtaagattgagagattatagtattacctctgtgttaatttcctgatttccaccttgccagggtaccgagctc

SEQ ID NO: 708840 - DNA, 533 bp, Homo sapiens
  misc_feature (425)..(425): n is a, c, g, or t
  misc_feature (458)..(458): n is a, c, g, or t
  misc_feature (480)..(480): n is a, c, g, or t
  misc_feature (497)..(497): n is a, c, g, or t
  misc_feature (519)..(519): n is a, c, g, or t
ttttgttgaagaacattatcccagaagagaacttgtaccaatgtaaagatggatattttggggatatggaagcctgagactaagttgaattcaaaatatcatggatctggctgggtgcggtggttcacacgtgcaatcccagcactttgggaggctgaggcgggtggatcgcttgaggcccggagttggagtccagcctggccaacatggtgaaaccctgtctctactaaaaataccaaagattacctgggtgtggtggtatgcacctgtagtcccaggaactcaggaggctgaggcatgagaattgcttgaaccctgggaagtggaggttgcagtgagcactgaggttgcagtgagcactgggcaacacagccagactctgtcttcaaaaccaaaccaaaaaatcatggttcttagcaaatttnatggtgagttaaagttatatgttagttacattntttcttaggcacccaaatcttnatttacgtacagcttgnaaattagacttaagcttacttnagggtccaaaatta

SEQ ID NO: 708841 - DNA, 894 bp, Homo sapiens
  misc_feature (61)..(61): n is a, c, g, or t
  misc_feature (117)..(117): n is a, c, g, or t
  misc_feature (125)..(125): n is a, c, g, or t
  misc_feature (260)..(260): n is a, c, g, or t
  misc_feature (313)..(313): n is a, c, g, or t
  misc_feature (316)..(316): n is a, c, g, or t
  misc_feature (323)..(323): n is a, c, g, or t
  misc_feature (330)..(330): n is a, c, g, or t
  misc_feature (348)..(348): n is a, c, g, or t
  misc_feature (465)..(465): n is a, c, g, or t
  misc_feature (806)..(806): n is a, c, g, or t
ctgatcggaacgaggcgactccgtcgctctcaattcgtcacaggaggaagacggagctggntgcccagcccaaaggcccatgaggggatgcagttatgggctctgtcgccgtggatngttatttngtgtcagtaagtaatccataaagtgccaacatgggaaagaaacggacaaagggaaaaactgttccaatcgatgattcctctgaaactttagaacctgtgtgcagacactttagaaaaggattggaacaaggtaantttgaaaaaggctttagtgaatgtggaatggaatatctgccaagactgtaagnaantgacaantaaagtngaaacgataaagctgaangaagaaacagaagaaaagccttcagtttgggctgtgtcttaaatgtggccatcagggctgtggcagaaattctcaggagcagcatgccttgaagcactatctgagcgccaagatctngaactcactgtctggttcttagttgtggacaactggagtgtatggtgtcacgtatgtgataatgaggtccagtattggtagttcaaaccagttgggtcaagtggttgattatgtcagaaaacaaggcagcattacaaattccaaagccagagaaagatatggaatattgacttgacataacaatttggacccacacaacaaaaaaaaaaaaaattgtgggggcgcggcgcccggaaaagtttttaaacatcggggggcgggggcccagaggtaatggacacggccaaaggggcaagaaccgggccgagaaggtggttccccaaaaaagccggcggcggtcngaaacccagggtccggtccgtcacgccgtcatcccccccgtgcgggggtccacccgcagcaagagcacctacgcggaatcgacggctg

SEQ ID NO: 708842 - DNA, 621 bp, Homo sapiens
  misc_feature (1)..(1): n is a, c, g, or t
nggaacacctttcttaaaaagggggcgcaatagcctttaaaaaaagaacctttgcccaagggaggccaatagaaaggaaatcttgcttaaaacccggcctccgggggtagggggcacttccaaaatagggttcttaaccccggaggggcccagcattccaaagattgggccaaactggaggccaaagtttgtggccgcaaaaaaagcttacagaaggaaggagttttttgggacaaaaacatttgttttaaagttgcaaaagagccgtataaacgcccactttatggccaggggtggtgggtcaagcccgtaatcccaccccttcagaagggcaagggggggcgatcccaaggtcaaaagatcctgaccctcctgacccacaaggtgaaaccccctctttactaaaaaaacaaaaattaggtggggcgggggactttccccgggaagcctaaaaacctgggaggctcaggcaggggaatcccctgaacccaaaaggtggaggtttcagttaactgatttggcacccctgcactcccccctggtggcaaagcaaggctccctccgaaaggaaaaaaaaggaaggaaaaaggaaaacaaaaaataaacccaccccggggtata

SEQ ID NO: 708843 - DNA, 184 bp, Homo sapiens
tggggggtttttttgggggtttttttaacccccttttttggggggggccggttccccccccccttttgggggggttcaaaaaaagggggttttttttccccccccccccctaaccccggggggggaaaatttttgggggcccccggggggggggggttttaaattaaattttttgggtttttta

SEQ ID NO: 708844 - DNA, 321 bp, Homo sapiens
tcctggaagctcatctagtcttatgaactggtaatagaccacgcttttctttattcttctgggccacttctattagcctcatattctggtgagagagttgaaagtgctgagctaagtcagggaaggttagagcaggccggttactggtaagacacttctgttctaccttttctgacaccttatattctggcaggacgaaaggccctatttattgattgtgaacgccgtggaaaccttctttctggggattccttcttgagtccacctggcagggcttccagctttggacttgcccttcgttttaccacgttcctgacttgg

SEQ ID NO: 708845 - DNA, 769 bp, Homo sapiens
  misc_feature (230)..(230): n is a, c, g, or t
  misc_feature (254)..(254): n is a, c, g, or t
  misc_feature (303)..(303): n is a, c, g, or t
gtcgacgtgggctcagagcagacactgggcttcggatcctggacaaagtctcccaagttgagggtatcgaggacgcctagatctctctcccagggccatggcgaacccgaagctgctgggaccggagctaagcgaggcggagagcgatcgagtactgattcggctcgatttgaggagctactgctgcaggcctcgaaggagctccagcaagcccagacaaccagaccagnatcgacacaaatccagcctcagcntggtttctgcataaagaccaactcctcggaagggaaggttttcatcaanatctgccactcccccatctatccctcgctccacgccgacgtgaccgaggcaggagctgcttcagatgctacgaggaggacccaacgctgggttcgcatccccatgagatctgggagcagcctcatgcagaaatggatgccaacggccaggactgctccgcctacgacgtaaactgcaaacaggcgaccttcctaccgggagggatgccagaaaaccacgccgactatccttagcccggggagccacggtggatctcaccaattacggcggggtaagggccagtcaggcgcaaacatcacaaccctggcacctgaattctgcacactgcgtgcatgtcatgaaagaaaccgggcaaacaacaggagctcccatcgcagacgctacacatccgcccccacccaggctctcccacaaggaactggaggcctgaacagcacgccccgagaaacagacaaggccgacacac

SEQ ID NO: 708846 - DNA, 919 bp, Homo sapiens
  misc_feature (175)..(175): n is a, c, g, or t
  misc_feature (180)..(180): n is a, c, g, or t
tattctatttactctcaattccttctatataataataccaccttccatcccaccaagtccccgtcaaaattgataccagtggatactccaaagtgcctaagtgggtatcaaggcagaggcagagacaacgaacaaaatactctcgttgggtcgcgcgtaggatccgaaatcgatntatcnttgcatgctagtttatcccgtactcatagcttcacgtctccagatttcttttccatgcagttcatctggtgaatgcagagtatctcgagtcactatgtgtgagatcttggctggttagcttgtcacatgtctaaggcaggtatacgtgattgcacaaacgaagagttttgcattagtcatttgacgctgcaactggagcagtattgactactttaggtgtgttacataattgtccatttgaactggacttaagttgcttgacaaaagtttcacacagttctgattcatactcttgggagggactcacatgattaggttccatgaactcttaagtcctaccaatcgtatttccgaactttcagctatgaggatcgatatatgcgttcagtggtaacatgagtttattaagagctgtctagagtcactatatggttttatctaaatgaattgcttgcttaggcttacttgctttttaggttacctgttgcactagattgaggcaaataaaaatatactaaagtgaaaacatggattatagttgatataactttggagattggggtaaataagtggttaacaaaggttgcaataccaaattgctggcttcaaaaacgtttcggttatggccaggcaccggtgggctccaatgcctgtaaatccccaggcacttttggggaaggcccgaggccagtgggatcaagaaggtcacgccagttccaacaccaggcctgaccaactg

SEQ ID NO: 708847 - DNA, 540 bp, Homo sapiens
tatacgaagtcgagctcgtaccggcatgtgctgtaagccagtcggttggccgacgacgatgcccgatgcgcgaacgcctgcggcaactgtacgcggcgcactggcgggcgcagtctcgaacagattgcccaggacctgagggactacgtgccgggctagaaggcgtacttccgactggcgcagacccccaaggtcatgcgcgaactggacgagtggctgcgtcaccggctacgtgccgtgcagttgaagcagtggcgccgggggggcaacggtcttccgggaactgtgccggttgggcgcgagcgcggacctggcagcgctggcctacagcacatgccggcatgtgctgtaggccagcgccgccccgtcgtcgtctgccttcgcttcacggcgccgagccgcggtccgaagtcttgctgtgtcgcccaggctgccaggctggagtggagtggcatgatctcggctgacggcaacctctgcctcccaggttcaagcaattgccctgcctcagcctcccgaatcgctggcctacagcacatg

SEQ ID NO: 708848 - DNA, 352 bp, Homo sapiens
accaaaaagataataaaggaatactactaacaactctacacacataaatttgacaactaagatgaaatggaccaattcttcaagaagcacaaactactataatccactcaacgttaaaacaataatttgaatagccctgtagctactaagtaaactgaatgtgtaatttttaaattcccctgaaagacctcttcaggcttaaatggtctcattggagaattctaccaaatgtttaaagaagaattaacattaattttatacaatctcttccagaaaatagaagaaaaacagatgcttctcaattcatgtcggatccctacgtaactttgataccaaaagagacagacagttt

SEQ ID NO: 708849 - DNA, 1307 bp, Homo sapiens
taagggtaaataccctctttagctgagtccaaaacttgggatatattaaattactggtccctaaaaagagtaaaatgtgggtggccagggggtgtggcttcacgcctgtgcaactcccagcactttggggaggccaaggaggggtggattcatcgtgaggtctcaggagtttcgaaaccagccgtggccaacggtggttgaaaccccatctctactaaaaatacaaaaattagccgggcgtgtgggtgggtgcacgctgtgtgtggctcccagcttactctcagagaggcttgaggcaggaaaactcgctttaaacctaggaggtgtggaggattgaaggtgagcgccacaagagtggcgccccacaacatgtggacaattatcacgtggcactgtggggacaaacacacagagacacaaagaagttcaacaggtgggaacaccatatgtgcacacaaagggatatggggagaaaggggtgcgccctcaacagagaggcgcttataagactttcacagagaggacaagtggaagagagagacagaggaaacagagtgagaggggaacatatactctgtggaagaggtataaggataacgtgggaatgtggagaaacaccaaaaaaaaagagactgtgtgtagatattataaaagacgagaatttagaggaaggttccatgtatatagaacacaggtgtgtgttctcaagagttacagagagatatacaaaaacgagggctgtgtgagaaaaagaactctgagggggggtaaatattgtgagggagttaaacccatgagattcctaaggaggatctgaggagagaaaatcaccatattccaaggtataagtggggagaaaatctcagaaagggtataaaagacattatgtatagagtccgagaggaggaacaaatttgagggaaaatgtagaggtggcctattgaaaaagaaagttgtacattagcaaaaaaaaagagtccgttaaggtgtgaaacacacaaggagattacagtgtggggcaaaatattatcagccatttgtaagatagaaaaaggagtaattatggccgcaagacgacgaaagaaaaaacaactaatgaggtaatggattacgaggtgaataaaaaaagagatttaaccgcccattgaatatagaagacgcccaaacaagtagtggtgtgctagacaaggggaagaaaagagagaggtcatgatactttttaagacaatgtagttgcgaacaaatatgtgtgagaccaacctgattaagcaatataccgagagaagcaaatatgacacaccaagaat

SEQ ID NO: 708850 - DNA, 776 bp, Homo sapiens
tgtgggcccatacgtggatatggggaccctcacaggtttcctacaggaccagaacaccggaggtttttcagataacaactgggcgccgatgaccataaagcttggcccgggttgaaccgcggtggtaacgcagcacgccgtttcgcacgcctgctgccccgcgccttcttgggtgttaggacaccgcagcgcctggccggtgtgctttcaaagatactcgccccgggtgaaccccccgtcataacactcgtgaaaggatgatgctccccgaggagtcacattccccccgttgcagggcttggttcccaattggtaaggttcccccaagctttttacagagggcacgcgctcctgactagggtcataacagcatacaagtggcgcaccgaaaaaggggggaggaaaactcggcgttcgcgaccccctctggtggtggtcaccgcccttcttggcaatggcccttgcaccccctatggcgagagtccgccctctattcgaccacttgtgtggtaccccctcccgggtggcacgaggtcactcgtgcgaggcgccccccacgggcatggcacacctcctccggcccagcgggctttcttccacgatttaccaagaccggctcaaaaaactcttgttcagccaccacccaccgacgggactcaaaccccgggggaagatgtgggacgttgtgcgacaaggatggcggggccagaagggggcccccgcggggccggggacccccgcccccacggaaaaaaccccccggggcccaaaaaaaa

SEQ ID NO: 708851 - DNA, 333 bp, Homo sapiens
ccgaggccggactcttggggtgaggacaactgggagggcgtcgagactggacagtcgacaggtcagaggctgaggtggcgcggaggaagcgcgagaggcggcggcgggagatggaggccaaacgcgcggagatggaaggtgccaagggcgcgaggaagctgggaggccggagggtggagtgaacggtggcggtggcccgtgccggctgcggaggagcgcgccccacaggggtatttgttgtacagaccatgtgggggccggccgggcagcgaggccatctcacgtgtacagtaatgagaggcgcacaataaattctaggtcacaaaaaaaaaa

SEQ ID NO: 708852 - DNA, 119 bp, Homo sapiens
  misc_feature (4)..(5): n is a, c, g, or t
ttanncagataagctgtctgacccaggagaacaggaactatacagcatagtggagttttgtgtactaaaacttgctatctactggtcctttggaagttgaagtagtagaaacctaaagg

SEQ ID NO: 708853 - DNA, 484 bp, Homo sapiens
ctctctagaggttccatgatgcatccatattcagcgtttcccgagttaagcccacccatgcaggtctgcagttttactcaacaggttttgcctcagtggctctccctgtggttcatctaaattctctcatttttttttaataactgctttattgagatataattcacatgccacacaattcacctatacagtatacaattcagtagtgtttactatattcagagttgtgcgactatcatttttctcacccccaaaagaaaccctatgcccgttagtattcactctgttttctcacaactctaggtaaccactaatctactctccatctctatagatttgcccatgctagacatttcatataaatggaatcatacatgtggtctttttcactgagtatattttcaaggtgcatcccagctgtggcatgaatcagcatctcattcctttttattgcccaataatattctatcatatggatatgtcg

SEQ ID NO: 708854 - DNA, 535 bp, Homo sapiens
ggtcggtaccgtgatggaactcactagctccagtctgtgcgggtgcagctaggaggtagtaggttttctgattgttctgacagatttgcctcccactctgcttgtgtgatgagatgatccccaagaatttaccctgtagcctcaatggcccatctgtgaaagacatgatcgtatggatagtctgtcaaattgattgcggccagtgcaaaacttttcctgataaaaacagctagccggaattgagcactagctctgggtcatgagctgactcaaatacttcctccctcacttctcccattctacgagtggcagagaagacctgggccatattagcaagggctgagatcaggactcacactcaggccagctgcctatgccccaggctggtgatgtctgggagctcagggtcaacgagaggggagtgcggattcttgaacgacaccaagagggagccattcgagcagctcccatcttccttcagagttctgctgagatttctcccctctaggctggcggtatcctgccacatggctgt

SEQ ID NO: 708855 - DNA, 253 bp, Homo sapiens
cagcgttgactggtgttttgttcggggtcccccaaaaggcaaaaggagaggtggccgaaaacccagcaaaagtccagaccggagacgtcgctgacaggtcctttgttgtccaggggttctcttcaagattccctttgcccatgcacccttggccaaataggactggggtggaccttgctgtgtttatatttaatctcttcccgtatatgggtagtttttgagttgggaataaatgttccctttttgtttttta

SEQ ID NO: 708856 - DNA, 269 bp, Homo sapiens
ggtccacggaaacctctgcctcccaggtcccagtattcggaaataatagtgagctatgataatgcctctgtaaccggcccaggcaacagaaacaagaccgaccctgtctctaaaaataacaaaaatacttaattgagcaattccaaaatctaaaattgttaagcagtttacggcaaattagttaatatcatattttatacatatggttacttcattatggctatctaaaatttccatggcttttaaccatatggttccacttggccact

SEQ ID NO: 708857 - DNA, 232 bp, Homo sapiens
cgacccacgcgtccggttttatttaacaggtataggttcaatactacaaggggaaaagagctatagaaatggaaggtggggaagggcacacaacattataaatggagtaatgccactgaaccgtacacattaaaaaataggtaagatgggaaaatattataggtgatcatataggggcgccaaaaaacgaacaaacaaacacacaaaaaaacacacgggccatgcctgggga

SEQ ID NO: 708858 - DNA, 647 bp, Homo sapiens
catcgcgctcggatcagtcatcatccattcattgacttactcgtcagtcaatgatctaatgctatagaccatacttggtgcagatgccatgggcgttttccgggcgtgacgcccgacatcgaggatgattcatgaacattcgcttccgcatcaatttccttcactgcaatcgcaggctttgccctgctgctatccgccaacgcttcggcccaatgggctggaaggggccgcatagttcagcaaaattcttctggagggattactactcatgcggcccaggccggggctggatacaaccgaggctacgaccggcgccatgagaccatcaccgatggaacgggcaatgccaccagaaatggcagttcctatgcaggcaacgcattcggtggctatagccagagctcgggcagcagctatatcaatggcaatgacgcgggctactcacgccagcgaaatgggcaaactgcacagggcgggacattcaatggaaacagcacctggccagaacggacagggcttcacgcatccaggaaccgcgaccgccgccgacggacagacgtatagcggacagacatctattacgaaagatggtgtcactcgcagtgggacttgtacgacgctagcggatcgtggtgtcttgctaactc

SEQ ID NO: 708859 - DNA, 153 bp, Homo sapiens
tacaaactatatgtatacacgtataaattaaataaagatgttgagttggtctgcactttcctacaaaaatacagcttaacttttttggtcttcctataacctgcaccttggttgcatgtgggaaatgcttttcccatgtagcacaatggtgga

SEQ ID NO: 708860 - DNA, 211 bp, Homo sapiens
tccctgtcgccgcgaggggcggggcaggacgcgcaatccggccgagctgtccggggtcgtgagccggcccgctttggtggggcgcccctcggttccagaggccagacgcatcgggtggctcgggtctccagccccggccgggaggaaggggacccgcgtctgcggagcgggggacacctcgggggcctcgggcggggccggcgacacacgc

SEQ ID NO: 708861 - DNA, 330 bp, Homo sapiens
aaaaaataaaaaaggaattaaattaattaatacagcgtttattatgtttaaactcttaggattcaaatgagatggatctaatggatatttctgatttgggtctttaaaacccttaatctcttttaagcattttaggcctgcattcagaaagaaatctgtcttctaaaagaccttttcctagcctttccctgcggagaactggcaatcaaaatcccctccaaagggaactaaagattaatatacccctttttttagtccttaatatggttctgtttttaatacagttccactcctgttgcaatgttgaatttaatgtttttttttaaatga

SEQ ID NO: 708862 - DNA, 338 bp, Homo sapiens
gtatccactttggaggctgaggcagacggatatctgagcagagtcagacagacggacatatgtgaacttgttcttaaatataaaagtaggcggcgcgtgctcacgctgtatccggcacttgaaggccagggagtgatcacaaggtcaggagatcagacacctggctaacacggtgaaatcccatctctgtaaattactaaaattagcaggtgtggtggtgggcgcctgtactcccagctacgtgggagactgaggcaggagaatggcatgaaccaggaggtgagcttgcagtagccgagatcagccattgcacgggtccgagctcaatcgtaacatgg

SEQ ID NO: 708863 - DNA, 755 bp, Homo sapiens
gattggtgccccggggcgcgggaaataagtgtatacttgtcacggggcaagggggggtttttctttaagccaaagccagggcgcctggggtaagccaaatcgccaataatgtgccctccattaaggcccaagcagttccttgaaggtctagaggggagggggaaaagacgcctgtagaaataataaagccccccaggattcccttccccaatggagtccaaaaggtcgtagttttaaaggaaaaggaaagggtaataagctgcccagcctgggtttggtaaaggaaaagtcccgtttcagggcaagaaaacgaaatttgctagtgatgatgcacctgatgaacctgatgaaaatggggcccctggcccttgtaaaagagcaaaagaagaacccgccaaagaagcccctgcctcccacccacagaaaaccgaaaatgggggtggggccccgtagtttagtaaacccattttttattccttttaaaaagggtttaaacgacttttgtttgcggggcttttaaaaggaaacccgaattaggtccccttcaatgtccccccgggagaaaggaaaaatttttttgttgtttaacttgtctttttgttaagccaaagagatttctttgaagggattgttctgtttgggttttttccgatgattccaaaatccaaagggagatttttcccttaaattgcctttgtaatatgggaaggttttgggcccacctaccttattaaatttttcctttttggaaagga

SEQ ID NO: 708864 - DNA, 145 bp, Homo sapiens
acagtggaaataaccgcactctcgtctacagaatgaatacgcgcgatagtacacattcaagaattcaggacggtccgatagcgggataccatcgataatgggcataatcgacaggtgaatgtccgcctccccggcctgcgaggtt

SEQ ID NO: 708865 - DNA, 330 bp, Homo sapiens
ggctatagcggtctcttcctagacaggtacctatcacgatactattcatattcagtatcacacaaaccaatggataggtttgaacactatttaatccccatatcattcacccggaaacttgcttcatgaatataagaaatattggccaaagtcatgcactactgagtggcaaagtagggaacagaaaccaagttttagggctcaaagccacactcatgaccactgaccccaactatatctctgcctcccctgctaatacctacccaaaacctgcctgatagatgcccttaagtccaagcagaagaagtactaactacattcctttacttc

SEQ ID NO: 708866 - DNA, 212 bp, Homo sapiens
tggtgcttgaggatccgccacggtagatttatacaacgaaatattatacaaaaataaaaagaaggccgggcgcagtggctcacacctgtaatcccagcacatgaggcaagtggatcacctgaggtcaggaattcgagaccagcctagccaacatggagaaaccctgtcactactgagaaaaaaaaagaaaaatcacctgggcaaatctaccg

SEQ ID NO: 708867 - DNA, 669 bp, Homo sapiens
ggtcttataaggaaaaatttgttaaggcctctacagaaaccacgtctggtgcctatggatggactgttgtttttagtcctttggaggaacaaagtttcctagtgtttaatatctattattattattttaaaagtaattttaaaaatcctcggggaatggctatgaaaaagataagaagaaagtagtgatttttaaattttcattctattccctgacttttggctgtataaattttggtagcagtcttgtggcctagaccttatttatcaagccatagtctatttgaatagtaaacccccaaaaatctggttttatggctgacagatctttaataaaaatgaatccctctgcccctttctcattaaacatttgctggggactttttatgtactggctatttgtacttggatgtaggatgtacatgtgagatacagctatgcccttgctagtgagtttatattctcgtgtaagagctcagtaagtaagctagtcatcacaatgaaatgggataagtactgtgccggtgagtagggtgctgtgaaagcatacccctgtcttgtgaagagagaggggcaggaagtcttcatggaagacagaatgtctgaatgatcagatcatttcacagatagattgagaggtaggaacaggtaatttagttgaagagaataa

SEQ ID NO: 708868 - DNA, 424 bp, Homo sapiens
tcttcctgatcagggaagaaggcccgggacctttttcgtcgtcgctcaaagagcctccacaatctcaggacgacggttcagcatcctctgtctgtgctgcgtgtacattccaccaaccaaaatagcagttttaattcctgtaaacctggccacagcatcattgtgctgtttgacctgtacggtcagctctcgagtgggagtcagaaccagtccaagctgaggacgctttggatatgccttacaggtgctgcttttgtcatccaactcttgttccagatttccagtctgttctttatcaagatttgcctcctccaagtaacaccgaagcaccacctggagagaccagaactgaggcccggagctgagactagatcaccaggcaaggcttgatgctggagtctgatgcattgcctgacgatacttg

SEQ ID NO: 708869 - DNA, 592 bp, Homo sapiens
tacattttcggacctctcaagttcatacataaaattccaactaaaagagtttcatatccataattcatttttagaaaaacaaaatcttttcctttaagagatggggtatcattctgttgcccagactggagtacagtagcatgaccatagttcactgcaacctcaaactcctgggctcaagcgatcctcccacctcagcctcccaagtagctgggactacaggcgcccaccaccatgcccagctagggtgttgggtctcactggatttcaatattacatcttttattttttaagttttaaatgttaattataacacaaatacagaaaaccacagcagttgacattctattctgttaccaagagtcttcccttattctaagttaatggtcaccattgacccatgaattttaatttttctcaagggttatcatcctttactgtccttaattatttaggtgtctaaatggtctcagattgggccagtaggaaccccctcaagatggatcctgtgtgtgatatgaccccatcttttttttggtcttattatttaagacttcattactttctgatgtaccaagctgttctgcatcat

SEQ ID NO: 708870 - DNA, 155 bp, Homo sapiens
gacggcgcctcctcctatcagcagcatagccgactccaccatgtccctcaaaatacgtaactgtcacgctcaacatggaaagacatcacttaactgggcatcagcatcgtggggcagagcaacgaccgtggagacgagcggcatctagattggct

SEQ ID NO: 708871 - DNA, 142 bp, Homo sapiens
tgcttaccaagctgggccgcgacgacgtgctgctggagctgggacccagcattgaggaggattgccaaaagtatatcttgaagcagcagcaggaggaggctgagaagtctttacaggtggccgctgtagacagcagtgtccc

SEQ ID NO: 708872 - DNA, 223 bp, Homo sapiens
cgctggccccgagttaggtccagtaacaatacaagcatacaaatttcacatcttcagcacaattaattagacacagactacagactcaatacacctgtaagtaaaaataataaacagcaaattccaagcacagctatctcctgaggtcccactgcaaatctttgtggaaagtgaggagaatgaggaaatatggtatggatgagagatgagcagtccaaagggt

SEQ ID NO: 708873 - DNA, 110 bp, Homo sapiens
catttgtctagtacattccagtttacaaagtgcctgatatacatgatctcctcttattcttgcacccattcctgttaaggtaggcgttggcatcccccatttgccagtga

SEQ ID NO: 708874 - DNA, 861 bp, Homo sapiens
ggtctgcggttaatcgcaccagacgcgcagcaaccgttgcgggtatatgattttgtgtgcgatcgcggcgagtcgaaattcatccagatttattcccgcgtggtcgtagcgcctggcatgagtgaaacaacatgcgccgcgatgtgacttaaatgtgtacatggcgtgcctaggtgtattattcgacgatggtagaagcttagacagtggaataggtctggtgcagctcccaggaggaacgttcggagtcgagtttactagggtggcgatattcggaccactggatccaacacgcagtacgtcgtgcgaaggattctctccgctagagtgaactatcgagaatgcggcgttctgccaagttctgtcggtgcggccggtgtgcgggtttgccatctatcagacaacctgtgggcgctcggtgattcgttgagcacaagcggctagcgtttacgcctgtgatcactatgtttatccggcacatatcggctgtgcggaatatgcaccagcaaacaattgcatgaaatgatcgattccccgcaacagcatggcgctgaggtgacgataaattcaaggcagtataccggacggcagatgtctgacagcttgtaacgtgttacaacgcgtgctgggggatggctgcccgagaataccgtcttcatagctcgattgcccatgcgggcaaagcgggacctgaagttatcttcgtgatgccgggtatcagcggtattctccgccatctagccgccatatcttcaaagacaagtggccgtgataatgctggcgcacggtcggcccgggaacagccgacattcattgcatgcgccagttgtgcatggtgggtggagtaagctaggaaacatc

SEQ ID NO: 708875 - DNA, 164 bp, Homo sapiens
gcacttttattttagattcagagggtgtatgtgcaggtttgttacctgggtatattgcatgatgctgagctttggggtacaaatgatcttgtcacccaggtactaagtatagtacccaacagtcggattttcaaccactgcccacccccttctgtcgtcttctc

SEQ ID NO: 708876 - DNA, 673 bp, Homo sapiens
  misc_feature (611)..(611): n is a, c, g, or t
ggaattcggcacgagggctatcatttctttgtcttaggaatgtcaccaaatacaaaatgctcaactttcaggtaaccataggtagggtgagaaaaagctgtgatactattggcctcaggataaattattagaattaaatatatagaccataatagacctaagaatataaaagaattgggtatattataaacatgacatttcagatctattagaaaaggtgggattattaaattatattgggatagctcggtagctatatcttgagagaaagaatagacctatacctcataacctgtatcagcacaaaatgcagatgaaataaagatttacatattcaagcacataaagtaacatacaacaggactagcaggcacagagaatggagatttatataaatttagtgtgacagaagcctttctttgagtgacaccaaagtgaactaacagcttggaaggatgggtggcatttgagtgcataaaaatgctatactcctatatagtgaaagcaaaccaaattgtgagaacaatatatgctacagaaagttagatctcaagacatacttagagcgtaaacaccacaactttggggacattagcatgatctacaatacncctctcaaacaagagtttccatctaatcttttcttaatgaacggtttcatttggtagttgcc

SEQ ID NO: 708877 - DNA, 187 bp, Homo sapiens
tatgctacacatgttaaaagatctacactcctctgccatgtgtatttgatgtcatgtgtcatgtattatatcttcacgtctatcctttgtatattgtagttatggttgattttgcaatttattgtcttctagggtttttcctttcctataaattcttacttcttgtgtagccttttctttttccact

SEQ ID NO: 708878 - DNA, 745 bp, Homo sapiens
gcaccgctgatctgaactgctgatgcgccaaagtctctaaggacagaggctgcccattacagtacataacgctcgaggtaccatgtccttggcctgatgatagcgaagaatcatcgcaactcctactttctagacacatcacgatagaggtgcattcacagctcgatcgcgctcgcgctagctgctcgcacctgagtatctccacatttccccacctttttgtgaattgcaatatacgaggttcgaggcacgcaatcataattcaatctcaatagagtaagagctagtagtgctcaggcagtctgtagcggtatgacgttcttcgcatgtgcagctaccaaggtactcgcgagtagactacgtatgtgaggaatcatcccgcatctcatatttacaccatgagaccatatactcattcaatcttgcttgaacatgcgcggatacaacagataccttgatacgccttgtacacaattgattacccagtgctcgtcacaggcttatgtcgacaatatttgacgttcaccaagagagtctctgtgcaacctaccagcgaccaaaaccggctactctcggagccagacgtccacaatttccacaattgctagccaacatacacctatgaccaacaactcgtcgttgcaacgtagcgacggatctattctcattgtaaccttactagccaaatccttttgtaacaacagaattgttcagcgcgggaccaaggttattgtcataccccgaa

SEQ ID NO: 708879 - DNA, 167 bp, Homo sapiens
gaagccagggcaggtaggagcgccctgttcgcgggcactgagtggcggcgacccatcataccagtatgtcgagtccgggaacgacaagaactccaactacttcagcatggactctatggaaggcaagaggtcgccgaaagcaggggtcaccagcatgagggcatgcc

SEQ ID NO: 708880 - DNA, 296 bp, Homo sapiens
ggctatcatattatatcacattatcctttttttttctccacaactttcacagataattcttagacatgcctcaactttctgacttgccgcaaacacctttttttttttgtgaaatggagtctccttctgtcgcccaggttgaagtgcggtggtgccttctgggctcgttgcaattctgcctccggggttcaggccatttctccttcctcagcctccgtgagttaggtggggcaacaggcacccgccaccctttttttttctccacaagtttcacagataatgtgatagggtcccga

SEQ ID NO: 708881 - DNA, 463 bp, Homo sapiens
  misc_feature (6)..(6): n is a, c, g, or t
  misc_feature (78)..(78): n is a, c, g, or t
  misc_feature (85)..(85): n is a, c, g, or t
  misc_feature (105)..(105): n is a, c, g, or t
  misc_feature (150)..(150): n is a, c, g, or t
  misc_feature (199)..(199): n is a, c, g, or t
  misc_feature (209)..(209): n is a, c, g, or t
  misc_feature (215)..(215): n is a, c, g, or t
  misc_feature (227)..(227): n is a, c, g, or t
  misc_feature (424)..(424): n is a, c, g, or t
tttttncatttttctggaaagatgttccaagcaaatggacctaagaaacaagctggggtatccattttaatatctganaaatttnatttcaaactaaaactaatnatatgggataggggaggacactacatgctcgtcaaaggaaaattnaccaagaggacattttaattctgaacatctaggcaccaaacacaagggnagccaatttntaaaanaaatattactanaggttaaatcatacactgagcctcacacactgatagtgggaaacttcagtacccgccactcaccaagaaataaagccaaccagccatgtgagatttcaggtaagtggccactggtcacttccccgtttgggcccagggtagcaggcagacgattagacgtgcccagccattgagctaaacagtacattaaaaataancttctctctgtgtgtgtgtgtgtgtgtgtgtctgtgtgt

SEQ ID NO: 708882 - DNA, 247 bp, Homo sapiens
acataaagatctttgaacatcacctacgagattattatgaaccagtagtgtaaattgaagtgattgaaatcatgactagaccgaggaagtggcaagaaaaggggctaagccatattgtaacctattgacgaccatagactaccgtgaatacgattagtcattcagaaaataccatactagtggataggccacaacatgtaaagattagacaaggccctgtacaaagacaagagataggctaagtagc

SEQ ID NO: 708883 - DNA, 396 bp, Homo sapiens
agccggcccggctgagcagctggagctgcccccttggagatacatgcacaagcgactccccaagccagctcccaccactttctggtacaagttggctctaatgttgagcagaatattgggagacactattttaggtatttatataccatatagcaacgatattttaacagattctccagcaaattttctagagtccagactattttctcatagccaaatttcacaatgactggctctgaatgacttattttttaatatatatcctattttttatgtagtggtcatgcgtagcctctatctcgaatttttttctatttctcctccccacaccatcaatgggactattctggtttggcggtattcactagttcttaacattggtacaaagtttgtaca

SEQ ID NO: 708884 - DNA, 1403 bp, Homo sapiens
ggtggtgctagttttctctaagccatccagtgccatcctcgttgctgcagcgacgacacgtctcttgctgtccgacatgactgatcagatgacccttcgatggcgacccgtcgaagggccagaacggctgggtaacccaggatcgatacgtaccccgtagtgtcccggacagtgatccgtcgtcgcgcgctcttcgagcataagaccatcatcatgtggaaactgaccagggatgagagcaactatggaattccacagacgtactctgcggggtcactcccacttatgtcatgtgatgtggttatcatcgctcagatgtgacagtatagacgctctcaggcatccatgggatgtgactcctgacgtcctctgggatctcacaaaggggcaggcagcacgaggagatcaagtgtggccataccaaggatgtgctgagtgtggcttcttccttcttgacaaggcgagaagaattgtctctgggatctcggagataagaaacatcaaaggctatggaataccctgggtgtagtgccaacttacactgtccatgggatgatcagccacatcagaatggagtgtcttagtagtccgattctctgcccaaaaaagcaaagaaccccttattcattcggtctcctagtgggcatgtgcgacaagcttggtcagacacagtactcggagaggccttgtggctaagcatgccaaggctcgaaacaaacgaccacagcattggggccacacacagggctattttttgaacaccgggtgcactgtcttctacccagatgggaatccccgtcatttgctttctggagccacacgcattgtccacaccgaccattgcttatttatagacttcttccaacacgaaaaggtgaacaccacccgtattaggagcggcttagaatgtgcgtttggggacacttccactcaaggccccctgatgatagcagcctctttatccgaatacatggttagatgttgcctgccatagggccctcaagactcatgaaatctgcgaactccaggagcggaaaggacatcattgtacgactagacctgtaaccgcagcgaaagctattacgtgaagccaacgctacactgggtgcagtaaacccatccacccaggtgaacacctctcccgttgggcctgttatttgacgaacgtcgcacagaaccatggtgttagtcaggagcaccacagaggaaaaacccctgctcacatatgttgtgtaacgctgtcccaattgtgcacaaagcgtaacaagcttcagttgcataacatataccacattcaaaacaaagtgtgacaacaccacaaaacacatgcaggaatatattgtggtgtggaagacaagcgtagatatgggcatggcactaataggtcgaccacaatttagtcc

SEQ ID NO: 708885 - DNA, 738 bp, Homo sapiens
gagcacgccccgcctcgccccggcggcagagaggagactatggaacgtcaggtgctgctgagcgagcccgaggaggcggcggctctgtatcggggccttagccgccagcccgcgctgagcgccgcctgcctgggccctggaggtcaccactgcagtactggctggccacatacctggacggtgcacacgtgagtggacccatgagggaccatggaacgcatggcagaacattcagatatctgccgccaataaccgtggtgttccatagacgtgggactcacgtggtgtttagcaggacctgcagtgcaacaagtgtggagacccagggggagaactcgctgacgcagacgcgtctccattcaggacaccactgaaagctgtgcttgcgcaaggcctgcatgtgcactgaggccctggcggaacgacgaacgcagttcctcggaggtcatgggagcaagaaccaggaagctcaacgagcttcaacctgtcagcgctggagacaacatgggcctgatcatgaggatgactgcttaggctgcctgtcctggtcgcacatcggagacacactatgtagtatgtggcagagaagaagcgccccaaggcacgagtcacatactgaacagacaaaagcctaggacacgtcaagagccagcgacgatgagatagccaggctgaagaagccagacacaagccatcaaggagggatcagcaaagagcaaacgaagacgggggagcaca

SEQ ID NO: 708886 - DNA, 178 bp, Homo sapiens
ccccattcattcagaagaaacaagaagaaaagttattttcttttaacacaaaacaggaattcactattgttcccaaaaaaaaaagcacccaaaagaaaacaaaaaccaaacccctattgctgacactgatgttcagtcccctgaaccagtgccccaaaggccattgttcaaaattaaa

SEQ ID NO: 708887 - DNA, 343 bp, Homo sapiens
  misc_feature (70)..(70): n is a, c, g, or t
gatacccggatgtcgcggataggtaagtttgataagggagtacatgaagactgatcactatagggcatanagaacagtgctacttactagctgggtagactgggagaggtggtagtaactaagttcttgatgatcccacttcctgtttccctctgctatgggatataccagagtttaccacaagtgttctgacgatatactcctgagctttcactctgctgcttctcccaggcctcttctactatcgtcatggagatgtggtgtgctgttgcaaagtattcacgtcatcgtttcctggcttgttcatttcattaagtggctacatcttaacatatgcatttgg

SEQ ID NO: 708888 - DNA, 194 bp, Homo sapiens
gcacgcatttcattcatccatccagtggctggcacggtgcagggtgtgcaccgccctgccggcgccccagtccctcggcaggccggcgcgtggtcagtcccggctcatgtcctcctcttcgtccttcttgtccttcgtgtcgccctctttctgctcgggcttggccttgccatcatgcacgggtcaccgcagct

SEQ ID NO: 708889 - DNA, 773 bp, Homo sapiens
gtccattcacagaatggacaaaaacagtgtttccaaactactgaatgaaaagaaacgtttaactctgtgagatgaaactacacatcacaaagcagtttctcagaaagcttctttctagcttttatctcaagatattttctatttcaccataggcctcaatgcactcccaaatattcctttgcagaatggacaaaaacagtgtttcaaaactgttgaatcaaaagaaagtgttaactctgtgagataaatgtacacatcacaaagcagtttctcagaaagcttctttctagttttatatgaaaatatgtactttttcatcatagatctcaatgcagtcccaaatattccctcacacgatggacaaaagcagtgtttccaaactattgaatgaaaagaaagtttcaacactgtgagatgaatggacacatcacaaagcagtttctcacatagcttccttgaagtttttatcccaagatattcactttgtgctccatgtggcctcaatgatcaccaaaatagccatgtggcagaatggacaaggacagtgtttacaaacattttgaaataacagaaggttttaacactgtgagatgaaagaaccatatcaaaaagcagtttctcagaaagcttctgtctagttattatggaagatatttcctttttcaacatagaacctcaattgtttccgaaatctcctttgcagattctacaaaaacagttttccaaactgttgaatgacaataaaggttaactctgtgagatgaatgccaatg

SEQ ID NO: 708890 - DNA, 120 bp, Homo sapiens
ctgtagtcttagcctctaagcataactatcttccacgttatcacaaggttcaactgccccacatactatatagaagatgtggggcagttgaaccttgtgataacgtggaagatagttatg

SEQ ID NO: 708891 - DNA, 589 bp, Homo sapiens
gccaagtaccttcctgtgtcgtgtgccctccattactgtgcatgattccgtccaggtgtgtaatggtgacaatgcagctgatcggaaagtctcttgtctggggcaaatagaaggggttccggtagtgcgtgctcgtggtcacgttcggtcatccatccgctcgttttccctgcctaggagctcaaccacgcttcatttggtaaatgttgcttgggagcattgtacaatgggtggggcagtgagctacagaacaggatatggctgagagatggtcgatggaaggagaaagagctcattgccgtggtatccgttggcgaagaaggcatgtctactaaggaggttaggtgacgtctcagtaatacttactaaaatttctcacgtgagagtgccttctactcgttactaccacactctggcgatagagtacagggctgtgctggtccccgtctcaattaccataggatttatctttggcccacacaattgtgatccatgttaatgccgagctctcccctgtttcttttccagaaacaaattttgaacacactctgattgctgagggggacaacaaggtgtgtccgtctcctgg

SEQ ID NO: 708892 - DNA, 310 bp, Homo sapiens
gtggagtctcctgagaacattctaggcgtccctgggcgaacacgtgctggtcttgtgtgctgcgccatccacactttggcacaagaattcaccccacccagtgcaggctgcctatcagaaagatggtggctggtgtggctaatagcctggccccacaagtatcactaaggactcgcttttttgctgtgcccaatattttattaaaggtgtcctttgttccctaagatcccaactactaaactgggggatattattaagggccttgagcatttggattttgcctaattaaaaacatttattttccttgcca

SEQ ID NO: 708893 - DNA, 257 bp, Homo sapiens
caaatcagaattgtagccagtttctttggccagaaggataatacttggatattactgaaaggaggggtggagatgggtgtggcagtgtctggtgtgtgatttttattttcttctttggtcatgggggcaaggagaaaagcatgaatcttccctgtcagctcttacagccacagcattgtgtctactgtctggaagacatgtccccgtgactgtggggccgctgctcctgtttaaataaaagtcggctgtggttaaga

SEQ ID NO: 708894 - DNA, 345 bp, Homo sapiens
  misc_feature (10)..(10): n is a, c, g, or t
cccgtattancggatataatggtgttgatagattaaataacttaaaacaggtcatcttaaagcttacaaatatactcaagaatatttaaaaaacagaaaaacaaaaaacaccaccaccaaaatcataggttgcgcacggtggctcaggcctgtaatcccaatactttgggaggacaaggtgggattataggcgtgagccatcacatccggcctctactgtttttctattctctgttttatttatttctcttctaataattatttcctttataatgctaactctaggtttggttcattctttttctaattcctacatttgtaaacttagcttgttgatttaagatc

SEQ ID NO: 708895 - DNA, 1092 bp, Homo sapiens
ggcacatgtaaaagtgatgatttggaaaagcttcgacctatgtgcacacccacgaaacccttcccatggtccacggtgaacctcgtcacccacagcatgtcctcctgcctgtgtcctcccagccccttgcaccctcattgctgttcagattaaagcctctgttttgcacctgtcaaaaaaaaaaaaaaaaaaaaaaaaaaaaaaaaaaaaaaaaaaaaaaaaaaaaaaaaaaaaaaaaaaaaaaaaaaaaaaaaacaaaaaaaaaaaaaaaccaaacaaacagaaaaacaccagacgaaaggaacaaaacacacccaacaatcaaaccagagcgccggggcggccgccgtcaccccaatcacccgggccgggcaccccacaccgccaccccgctcctatagttgccgagcgacgcacaactgctgcaggaccaaacataccaccccaccaccgcacgccccccccactacagcgtacgactcaggaccacaaaaattaccatcaaataattccaatctacaccacacaacaacacctccctcctgcggacacactaaaaatgaacacaacaacacccactccatcacaaattcaacctacctaccagacactcacatactcctcctctctcttctctttccactagaactcacgccaccaatctgctgcttctcccgcatcaacaccacacaaccccgctctacaacaaccatacaaaaccatcatctgcgcttcctattcatcatactctccccaccccatcaccttaacgacaattcatccacgtacagcgattacacacagacaactactccctagcctcccccacaccaataatacataccctacctaacatagcaccacaacctaacagccatcacacaccaccatacccaacactaactactccctaacacaacacaccaacccccaacaaccaccacccacacaacaccacaaaaacaacacacactgacaaatacacaactatcacatcacccaaaccatcacccccaaactcactctaccgtccacactcacacaaactcaacacctcccacaccccatctccaccctcctctcccacccaag

SEQ ID NO: 708896 - DNA, 280 bp, Homo sapiens
ctcatcttcattttcttcttcctcctcctcctcctcatcttctggttcgttcttcttcttttgagcctcgttggcggccagggcccttctttctgttcatttggccttggacgatatgcagaatatccttttcatattctccttagcttagtgcttctgtcatatggcgttatctttggctgatgctcagacacatttacccaatttctttgcagtatccccaatggataggccagggtgtgcactttttgatctcttgggcgatgttcaagagcaaaaa

SEQ ID NO: 708897 - DNA, 977 bp, Homo sapiens
gagctagtctgcggacgctgtataccctccgccatttcccggtggatccaataaaggccgattacataccagtagtcatgtgtgttcgcgtacatttgttccgggactgcagagcttcggggagagctgatagcagccgcctgttcggatacgcaggaaatttgcaagagtcgttctcgccgtggatcctcagggccgtcttctcggcttgtgatgtaggaggtggagcggctatcacaataacgcttcgtctggcgtctgaagcctatacgcgccgataatctccgaggagttggctcagcagcttagaaggtcgtgaaatggcatcacagcgatatgcacgaccgacctgagtgcaatgggaaggacagatgacacggcccccgttttgccagggtcatcagcttggtcgtgaataggtgtgccatggccagggtaacacggatggtcgtcatgggaaatcgagtcatgacaattaggcaccgaagtcgcattcgataatttgtgggccaactttgtttccgcgcaattccttgttctggaacttggagatgtaagttgtataggcggattcacccggaacccggaagaggttcccaatggggtggacattcccgttaaccatggcccgaattataggcgttggccaaacgtggaacggggacacaccaagtgtggccttagagcccgaaggtaccgcattcatttgaccagaaaggattcgcgcttcggcggcaatgcggttagggggcgcctgtggttcgacgaggcaaccgttatccgccaatggaccaccttaaattggattaacaccaaatggcgaccccagtccaataaaaagaaacccgagaagaatatttctgtacgccaaagctaagagccccaaagcgtttgggggaaagttgggttggccatttgggaaagaagcagcatagggggaaaccggatagtcataatccgattcacccgatagggtg

SEQ ID NO: 708898 - DNA, 450 bp, Homo sapiens
accactgctcgaaagtgctgcagcacttgtaagatggtggacatcaggaagttgagcaacgcccagagctcgggaaggttgttctgcagcggtgtacccgtcagcaacaggcggcgggttgccacatagtacgtgttgagcccctgcgtcagattgcagtggtgattcttgattcggtgaacttcgtccacaatcatataactaccaaccggatcttggcgatgatgtgcttgtctctgatgatatacacgaacgtcgacagcaatacgttgaacttcccactccggagctgagggaacaaaggcccgacatagcagctggggatcccttgtaagaacaccttcagcaaggaaggggcccacttgtcaaactcgtacgcccagttggacaacgatgacataggcacgatgatgacgaaggggccatttatgcgtttgtggtccatgaggt

SEQ ID NO: 708899 - DNA, 639 bp, Homo sapiens
  misc_feature (91)..(91): n is a, c, g, or t
  misc_feature (139)..(139): n is a, c, g, or t
  misc_feature (150)..(150): n is a, c, g, or t
  misc_feature (163)..(164): n is a, c, g, or t
  misc_feature (183)..(183): n is a, c, g, or t
  misc_feature (187)..(189): n is a, c, g, or t
  misc_feature (201)..(203): n is a, c, g, or t
  misc_feature (207)..(208): n is a, c, g, or t
  misc_feature (212)..(213): n is a, c, g, or t
  misc_feature (225)..(225): n is a, c, g, or t
  misc_feature (233)..(233): n is a, c, g, or t
  misc_feature (235)..(235): n is a, c, g, or t
  misc_feature (253)..(253): n is a, c, g, or t
  misc_feature (272)..(272): n is a, c, g, or t
  misc_feature (298)..(299): n is a, c, g, or t
  misc_feature (362)..(363): n is a, c, g, or t
  misc_feature (389)..(389): n is a, c, g, or t
  misc_feature (391)..(391): n is a, c, g, or t
  misc_feature (399)..(400): n is a, c, g, or t
caggtgagccgaggagcggagacacggacccagcagggtcacgcgggatggagactcgggacacccactcgctggctgccaccgggagcanaggggggctcgtgcctgccccctcccacatcagtctccagacccttgngtgcttcaganggccgctcctagnnctcctcggagtgaggcgcnggtnnntcttcttttccnnnaganncaannctttcctcggangatgcctngncatggatgatgccgcggnccccggagaggacgggacngcctctgatcgccgcctgcgtgcccnngccactgcccatggccatggaggccccagggaacggacatgcccgacctcttaggcgcctggnnccctcaggctcagatcagtggccgangnccccaganntttgcagaactcagctctggagttcacgcaagcagacatgcaagcaagggaaaaaaagccctgcgccccttggctcgcggggctggcacgctgagggagcagccagaaacgcagagaacgcaaagcaaccgaagcaaggacggggaagcacacacgagaggacccggcgcacggggcaccgcgggcccacaacccgccgacggcaggcaccacacgcgcgaacacgaacaaccacgccc

SEQ ID NO: 708900 - DNA, 430 bp, Homo sapiens
agcatccgtaccggacatgtgctgtaagccagcggttaggcttggctctgcgttgctgatcttggtcgattggttcaaactgtttttgaactgttttcccttaaagagaacataaagcttttcaaggttttggtatgagaattattatttttttagtttctgtgcctaggtatagagggagtactgttttctaagaaaccgttcttggaagcaatgtttctgcgtatcttagagctctggctggtttacagtgcatataagttggggcagccccagcccccagtgaggcccctgtagcagaggtagagaccgctggcagatgctgttttacacacgccaatgaaaatctttaagctgtcaaacccagagctcctcaaactggctctgaaattatgagattagcatttactacgctggcctacagcacatg

SEQ ID NO: 708901 - DNA, 895 bp, Homo sapiens
ttcggggccttgcctgtgggaaaaacctgctgctcctgagcccagagtacaggaagttcaagagccgtttagccacgaagtcctattaatttaacatccctccgttaactgaagggccaggaccttgctgtgaacgtcctcctagggcgtggctgtcgacagtgagggacagaactgctagatgagcagctaggtgggaggctgcggggcactggcgagatgcctacttttttttttgagacagagtctcgctctgtcgcccaggctggagtgcagtggcgtgatctcggctcactgcaacctccacctcctgggttcaaaggattctcctgcctcagcctcttgagtagctgggactacagatgcgtgccaccatgcccggctgcttattaggtatttttaacagagacgggatttcaccgtgttagccaggctggtctcaatctcctgacctcgtgatccgcccgcctcgacctcccaaagtgctggagattacgggcctgagccacatgtgcctggccccactgctggtttttgatagaatcaagttgctaaaggagacctgagcctggctagccgaaggcatgggccccaggactgaaccagcaggaagagactgtgggacaagccagcccaggagggcggaaaccctaacgcttatccgaaggagagggaccgcaggcccatccgggaagtaaagcagaacctgggccccgtggacgaaggggtctatacctaaagcccaacgcgtgtatggcaaggtactcactcgaagaacgcaccactggtgcctactagggaaggcgacatcatttgagagacctcaggcgattatcactagtaccgaggacaaagagagcaggcgactatgagcgcctacatagaaacaagagct

SEQ ID NO: 708902 - DNA, 413 bp, Homo sapiens
taaaggatcccccgccgctaccgacgcaaacatgcacatcattataagcaccctgacttgataaaccataacccttgaggtcgagcccagtgacaccattgagaatgtcaaagccatgattgaacacagggatggcttcccacctgaccagattaccatgatatttgccggcaaacagctggaggatggccgcactctctcagactacaacatccagaaagagcccaccctgcacctggtgttgcgcctgcgaggtggcattattgagccttctctccgccagcttgcccagaaatacaactgcgacaagatgatctgccgcaagtgctatgctcgccttcaccctcgtgctgtcaactgccgcaagaagaagtgtggtcacaccaacaacctgcgtccggcgtccgtaacgg

SEQ ID NO: 708903 - DNA, 412 bp, Homo sapiens
agagatcccggtgtttccttagacttgctcctctcttgatacaccctacgcttattaataggttcgcttcatatcatcgtctccatcttctataattttctttataacattcatcaatccctcactaagatctagtttcagattcatatgagtgcttcctttaaaaagaaaacatatacgacaatagggaaactaaagcaccgtaagatactatcattcaggttgttaacactggccggcagttaaaagatgagaaggaagtacagagtacccaaagattattaacggatcaaaacggtacgcacaaattcatcttaatgaaaacaacacacacgtatcaggcatgcacacacttggtgcacgaaagaggtcatcaaaatagttaggggctatttatagacaaagggaaaca

SEQ ID NO: 708904 - DNA, 695 bp, Homo sapiens
tcaagatcctgaagcatttcttgaaaaaattaaaacagatgaaacatgtctttaccaatatatcctgaagacagggcataattaaagcaatggctaccaagaggtggaagtggtccagtcaaagcaaaatggactggtcatggcaacagttttttgggatgctcaaggtattttgcttgttggttttctggagggccaaagaatgataacatctgcttattatgagaatgttttgataaaaccaaagctttagcagaaaaacactagggagaaatttgttaaagagtccttctccaccatgacaatgctcctgctcattcctgtcatcaaacaagggcaatttttaaagagtttcaatggaaaatcaatatagtcctgatttggctccttctgacttctttttgtttcctaatcttatattatgaatgtaaaaaattatttgtttgtttgtttttgagatagtgtcttgctctgtcacacaggctggagtgcagtggctggcacaatcttggctcactgcaaccttgacctctgggctcaagcgagcatcctacctcagcctcccaagtagctaggactacaagtgtgccaccatgcctggctaattttgtttattttttgtagagatgagatctcagtatgttcgccagtctgggctcaaactcatgcctggtgacacagtgagactctgtctc

SEQ ID NO: 708905 - DNA, 687 bp, Homo sapiens
cggacgctacgaaacttgggggagtgcacagaagaacttcgtggagcgcacgcgggacctaggaccaggctgagactcggggcgccagtccgtgcaggggcagcgggagccggccggagatgccctgtatccaatgcccaatatgggacaccatgcacctgagtccgtggaccccgttgaccacctggcagagctgacccctcgtgtaccccctgatgttcatcaagcccaccatggacctcgccagccccgaggcagccctcgctgccccctactgccctgtccagcttcagctccttcttggacgggctacacaggagacgtctgagcaccttcctctaccagtctgccaggaacagtccagccatgctcctcagcctcctcctcggcctcctccgcatcctcgtcctcaggcacctcccctgcctctggctccttcaagttcgaggacttccaggtgtacggctgctaccccgggcccctgagcggcccagtggcatgaggccctgtcctcctagtggctctgacgtactatggcaagcccctgctcggcgcccgtcgccctccacgccgcagcttcgcagcgcggcccgatctctctccctgggctggctccttcggccacttctcgcccagccagacttacgaaggcctgcgggcttggacagagcatctgcccaaagcctc

SEQ ID NO: 708906 - DNA, 1243 bp, Homo sapiens
tccgatcgcttgagaccaggaagtcaaggctgtactgagccttgactgggccactgcactccagcctgggtgacagaatgagaccctgtctcaaaaaaaaaaaaaaaagggaaaatttatttaaggattaaagatgggcatttaaattaattgagaaaggggcaatttattccaaaaaaccattaattaattctcttataagtttattgcagggttaacaccagcattcttaaattacattgagaacaaaaattttattaaaaccttgcaagaaagaaattaatctcaaattttaattatttatttctaatctacattatttttcgggagagatctcttcaacattcccttattatttaattaaccaggctataatttctcaaccaaggcaggaaatctcagggacaaattgttctcaacctgtgaattagccacttaaccaattgtaaaccaggggactctataactgtgttctcagagttagcagccgagaaaattacatttaatctccaagttaacgagccagaaattacattattttccttcttcaaagtttctatttattgggaacttttattgccacaaattagaaccaacatttccgtggggcgcttgacaaagagaattgtcccttcaacaaatctttacaagagcaatttagaaagggttttataccgggcatgtggtgtcttccttagcacctattacgtgcaacatttttaaccttgggaaaactcgaggtgcccagaaagaaagaaactcccagaaaaggtttcccgcgaaaattagtttgctggagtacttaagtttaacctattaacttctttattttctaaacccacgtatttagcgtctccaacaacgcaaaaggaaagttccttcacagcgggcacaacctctctaccacagacttatctttccgaaaactttaaaacccaaaaacttgtcaaacagtggctgttcctttccaccaacttttatcgggcggaaagtggcctccagcggaaaaaaaaaactagctatgggggaacatgccctgtagggttcaaatacccctcggggtgtaccagcggcttcgacactggggtgccgggaagaaagtcccccattgtgtacccggttttaccttgtttttaaaaaaagcgtcacatcctgcgcattttcccgtggaaacggcaacacacgcgcgtttcacaagaagcgacaagagaaaatcctttttcccgcaacaaaaaaaatcatc

SEQ ID NO: 708907 - DNA, 99 bp, Homo sapiens
gaactgcagaatgtgttacagaaagagtctacaattggcatcccaacggagcagttggcgtgggaagctctaaagtctgtatgagactagcactactat

SEQ ID NO: 708908 - DNA, 390 bp, Homo sapiens
  misc_feature (332)..(332): n is a, c, g, or t
  misc_feature (375)..(375): n is a, c, g, or t
atatattgtatatattagattaaatataatgtattattcaaattaatttcttttgtttctttttactttttaaattttactctttagaaaatttaaagttatatgtagctcacattttgtttctgttggacaacactggcctacagaaatgagatgcttgtttcctctagttgctaagactctatcttgtttttcttgctctctttacaaactcaagttcctttaaagattcttcacgttgatataaggagcctgcttcctcattgccatttgggtgcagagttcttcctgtcagcccactcatcatgctcatcataccttggctgccgggnctctctatggctggatggactcgagggaaaacacggctcctcnggggttggcaaggag

SEQ ID NO: 708909 - DNA, 469 bp, Homo sapiens
  misc_feature (19)..(19): n is a, c, g, or t
  misc_feature (272)..(272): n is a, c, g, or t
  misc_feature (453)..(453): n is a, c, g, or t
atgccaataacctccaggntattgtgttcaaggaaggccacagcgtgatgctggtattcgccgcccatgagcaattgcaggaagggttgaccaagaccctgaaggccgtgactggcaaagccgccaaatggcgcaagggtgaactggtgaccttcaaggctagcgagtaggcgataaatacgctgtgcatctttgtcttttggaacctctactacagttgagttgacttaactattcagaggcttcgcgcattcgcagcaaagccgttcgcnatgactgcgaaaacgcgaggtgcacaggcatgaaaggattgaagtcactgctggcggcgggcctgacgaccctgagtctgtcattgccggtatcggctgcccaggcaccggtgcattttgccgacctgaactgggaaagcggcagcctgatcactgaagtactgcgttttatcgtcgagangggaggttattggcat

SEQ ID NO: 708910 - DNA, 345 bp, Homo sapiens
  misc_feature (19)..(19): n is a, c, g, or t
  misc_feature (27)..(27): n is a, c, g, or t
ccccctttttccttcccantgcccctncaaaaatttttcaaaaggccccctgccccctttttaacagggggaggggggtggttttaagcccccgggttcccccttcccctttttgggaaaggcccaacttttgggggggggcacaaacctccggggaaagggaaacccccggggtgtttacattttccggccccctttggggtgggggaacaacccttccccatgtgttccctctttccgccctgttttttgggcagcggggggggttggggatggggggcccccccccttgttggggcagggttggggggccccggggccccgttaagggcctttttcctttta

SEQ ID NO: 708911 - DNA, 121 bp, Homo sapiens
  misc_feature (11)..(11): n is a, c, g, or t
  misc_feature (28)..(28): n is a, c, g, or t
  misc_feature (32)..(32): n is a, c, g, or t
  misc_feature (75)..(76): n is a, c, g, or t
  misc_feature (111)..(111): n is a, c, g, or t
tactgtagcangctcccagaggcttggnggcngcagagacatggcatccagcttcatctcaaatcctttcccctnngtcttctcccagccttctttatacttaacctcacngaagagttgg

SEQ ID NO: 708912 - DNA, 305 bp, Homo sapiens
ttttttgggggccccttttttttttttggggcggggggtttaaaaaaaaaaaccagcggggggtttttgggggggggttttttcaaattccccggggtttcccctttttggtttttaactttccgcggggggcctttttccccttttagggggggggaggggggggtttttcccccgttttttagttttcctttttggggggccggggggcttttttcgggggggggggggttttggtttttttgaagggggtttttgtttttccccccccccttcctttttcggggtttcccccccccccctta

SEQ ID NO: 708913 - DNA, 611 bp, Homo sapiens
  misc_feature (552)..(552): n is a, c, g, or t
  misc_feature (583)..(583): n is a, c, g, or t
gggagaggccacagcccggactccatcgactcccccggctcttagactaaaatcatgcccaagttcaaacaacgaagacgaaagctaaaagccaaagccgaaagattattcaaaaaaaaagaagcctctcactttcagtccaggctggtcttgaactcctcacctcaggtgatccacccatctcagcctcccaaagtgctgagattacaggcgtgagccaccacgcccggccagagatccacatctatatttataacacatttatggatgaaaattaaacaggtgtccgggtgcggttgctcatgcctgtaatccgagcacttgtggaggccgaggcaggcggattacttgaggtcaggacttcgaaaccagcctggccaacatggtgaaatcccatctctactaaaaatacaaaattagccaggtgtggtgtcacgcacctgtagtcccagttacttgaacctgggaggcggaggttgcagtgagccgagattgcaacactgccactccagcctgggtgacagagcaagagaccctgtctcaaaaaaaaanaaaaaaaaaaaacctcgagggggggcccggnacccaaattcggcctatagtgaggggat

SEQ ID NO: 708914 - DNA, 247 bp, Homo sapiens
tgtattcgtagatcggcaggtcatggtcaccactgacacgtgtgatgtggggacacggaagggcatgcagtgagcttcccgttcagctcagggatgaccttgccacagtcttggagcgctgtagaggcaggggatgatgttctggagagccccggggccatcacgcgacagtttccgggagtgtccatcgcacggtcttcatgggtggcagtaatggcatgcaactgtggtcatgagtccttccacg

SEQ ID NO: 708915 - DNA, 1692 bp, Homo sapiens
  misc_feature (1633)..(1633): n is a, c, g, or t
  misc_feature (1664)..(1664): n is a, c, g, or t
gggagaggccacagcccggactccatcgactcccccggctcttagactaaaatcatgcccaagttcaaacaacgaagacgaaagctaaaagccaaagccgaaagattattcaaaaaaaaagaagcctctcactttcagtccaagctaattacacctcctcctccaccaccctcaccagaaagagtcggtatttcttcaatagatatatctcaaagcagaagctggctaacatcatcctggaacttcaattttcctaacatcagagatgcaataaaactttggacaaatagagtatggtctatatacagctggtgccagaactgcataacccagagtttagaagtattgaaagacaccatctttccatctcgtatctgccaccgagaactttacagtgtaaaacaacagttttgcattttggaaagtaaattatgcaagctccaggaagcactgaagaccatctcagaaagttcttcctgtccaagctgtggtcaaacatgtcacatgagtggtaaacttacaaatgtgcctgcctgcgttctgatcacccctggagactccaaagctgtgcttcctcccacactgccacagccagccagccattttcctcctcctcctccacctccacctctgccacctcctccaccaccactagcacctgtgttgctcagaaaacccagtctcgctaaagcacttcaggctggaccattaaaaaaagatggacccatgcagataacagttaaagatctgctgactgtaaaattaaagaagacacagagtttagatgaaaagaggaagcttataccatcgccgaaagcacggaatccactagttaccgtctctgacttgcagcatgttaccctgaaacctaactccaaagtgttatcgactcgagttacaaacgtcttaatcactcctggaaaaagtcagatggatctgcggaaactgcttagaaaagtcgatgtagagaggagcccaggtggaacccctcttaccaataaggaaaatatggaaacaggaacaggactgactccagtgatgacgcaggccttaaggagaaagtttcagctggctcaccctagaagcccaactccaactctgccactttctacaagcagctttgatgaacaaaactgatgccaactctgcctcactccatgagatgatccataacaaatacagataaaaacacccagctgggtgcagtggctcacacctgtaatcccagcactttgggaggctgaggcaggtgatccacccatctcagcctcccaaagtgctgagattacaggcgtgagccaccacgcccggccagagatccacatctatatttataacacatttatggatgaaaattaaacaggtgtccgggtgcggttgctcatgcctgtaatccgagcacttgtggaggccgaggcaggcggattacttgaggtcaggacttcgaaaccagcctggccaacatggtgaaatcccatctctactaaaaatacaaaattagccaggtgtggtgtcacgcacctgtagtcccagttacttgaacctgggaggcggaggttgcagtgagccgagattgcaacactgccactccagcctgggtgacagagcaagagaccctgtctcaaaaaaaaanaaaaaaaaaaaacctcgagggggggcccggnacccaaattcggcctatagtgaggggat

SEQ ID NO: 708916 - DNA, 269 bp, Homo sapiens
agctcgactccctgatcgctgcctgctgagatcgcgccattacacaccagcctgggcaacaaggcatgactctgtctcaaaaaaaaaaaaaaaaggggggaaaaaagggggtttgcaacctcattttgccccggattgtctttcaaggcgggtgctttttttgtctgcaagaaaaacattcaagggggcgggggttgccccacttttccggggggatgcagttccttggggacacaggtgtttctgggggggccctgaccatttctcgg

SEQ ID NO: 708917 - DNA, 1663 bp, Homo sapiens
  misc_feature (1151)..(1151): n is a, c, g, or t
  misc_feature (1165)..(1165): n is a, c, g, or t
  misc_feature (1170)..(1170): n is a, c, g, or t
  misc_feature (1182)..(1182): n is a, c, g, or t
  misc_feature (1604)..(1604): n is a, c, g, or t
  misc_feature (1635)..(1635): n is a, c, g, or t
gggagaggccacagcccggactccatcgactcccccggctcttagactaaaatcatgcccaagttcaaacaacgaagacgaaagctaaaagccaaagccgaaagattattcaaaaaaaaagaagcctctcactttcagtccaagctaattacacctcctcctccaccaccctcaccagaaagagtcggtatttcttcaatagatatatctcaaagcagaagctggctaacatcatcctggaacttcaattttcctaacatcagagatgcaataaaactttggacaaatagagtatggtctatatacagctggtgccagaactgcataacccagagtttagaagtattgaaagacaccatctttccatctcgtatctgccaccgagaactttacagtgtaaaacaacagttttgcattttggaaagtaaattatgcaagctccaggaagcactgaagaccatctcagaaagttcttcctgtccaagctgtggtcaaacatgtcacatgagtggtaaacttacaaatgtgcctgcctgcgttctgatcacccctggagactccaaagctgtgcttcctcccacactgccacagccagccagccattttcctcctcctcctccacctccacctctgccacctcctccaccaccactagcacctgtgttgctcagaaaacccagtctcgctaaagcacttcaggctggaccattaaaaaaagatggacccatgcagataacagttaaagatctgctgactgtaaaattaaagaagacacagagtttagatgaaaagaggaagcttataccatcgccgaaagcacggaatccactagttaccgtctctgacttgcagcatgttaccctgaaacctaactccaaagtgttatcgactcgagttacaaacgtcttaatcactcctggaaaaagtcagatggatctgcggaaactgcttagaaaagtcgatgtagagaggagcccaggtggaacccctcttaccaataaggaaaatatggaaacaggaacaggactgactccagtgatgacgcaggccttaaggagaaagtttcagctggctcaccctagaagcccaattctcctgcctcagcctcctgagtagctgggattacaggtgcgcactgccacgcctgactnattttgtatttctngtggngatggggtttcnctatgttggccaggctggtcttgaactcctcacctcaggtgatccacccatctcagcctcccaaagtgctgagattacaggcgtgagccaccacgcccggccagagatccacatctatatttataacacatttatggatgaaaattaaacaggtgtccgggtgcggttgctcatgcctgtaatccgagcacttgtggaggccgaggcaggcggattacttgaggtcaggacttcgaaaccagcctggccaacatggtgaaatcccatctctactaaaaatacaaaattagccaggtgtggtgtcacgcacctgtagtcccagttacttgaacctgggaggcggaggttgcagtgagccgagattgcaacactgccactccagcctgggtgacagagcaagagaccctgtctcaaaaaaaaanaaaaaaaaaaaacctcgagggggggcccggnacccaaattcggcctatagtgaggggat

SEQ ID NO: 708918 - DNA, 134 bp, Homo sapiens
acagaaactagaaaggggcaggagggcgagcattaccaaagaaataatataacagaatttcccggaggtaaaggacatagagtcttagacatttacaacggtctacaaagatacttcagcacaacaggcactgg

SEQ ID NO: 708919 - DNA, 637 bp, Homo sapiens
  misc_feature (125)..(125): n is a, c, g, or t
  misc_feature (139)..(139): n is a, c, g, or t
  misc_feature (144)..(144): n is a, c, g, or t
  misc_feature (156)..(156): n is a, c, g, or t
  misc_feature (578)..(578): n is a, c, g, or t
  misc_feature (609)..(609): n is a, c, g, or t
ccaggctggagtgcagtggcgcaatcttggctcactgcaacctccacctcccaggttcaagcaattctcctgcctcagcctcctgagtagctgggattacaggtgcgcactgccacgcctgactnattttgtatttctngtggngatggggtttcnctatgttggccaggctggtcttgaactcctcacctcaggtgatccacccatctcagcctcccaaagtgctgagattacaggcgtgagccaccacgcccggccagagatccacatctatatttataacacatttatggatgaaaattaaacaggtgtccgggtgcggttgctcatgcctgtaatccgagcacttgtggaggccgaggcaggcggattacttgaggtcaggacttcgaaaccagcctggccaacatggtgaaatcccatctctactaaaaatacaaaattagccaggtgtggtgtcacgcacctgtagtcccagttacttgaacctgggaggcggaggttgcagtgagccgagattgcaacactgccactccagcctgggtgacagagcaagagaccctgtctcaaaaaaaaanaaaaaaaaaaaacctcgagggggggcccggnacccaaattcggcctatagtgaggggat

SEQ ID NO: 708920 - DNA, 657 bp, Homo sapiens
  misc_feature (598)..(598): n is a, c, g, or t
  misc_feature (629)..(629): n is a, c, g, or t
cacgagggctatgttgcccaggctggagtagagtggctattcacaggcataattatagtgcactacagcctcaagtgatcctcccttctcagcttcctaagtagctgggactataggcatgtgtcaccacagctggctgatttttgtatttttaatagaaacggggtctccctgtattatgttgcccaggctggtcttgaactcctcacctcaggtgatccacccatctcagcctcccaaagtgctgagattacaggcgtgagccaccacgcccggccagagatccacatctatatttataacacatttatggatgaaaattaaacaggtgtccgggtgcggttgctcatgcctgtaatccgagcacttgtggaggccgaggcaggcggattacttgaggtcaggacttcgaaaccagcctggccaacatggtgaaatcccatctctactaaaaatacaaaattagccaggtgtggtgtcacgcacctgtagtcccagttacttgaacctgggaggcggaggttgcagtgagccgagattgcaacactgccactccagcctgggtgacagagcaagagaccctgtctcaaaaaaaaanaaaaaaaaaaaacctcgagggggggcccggnacccaaattcggcctatagtgaggggat

SEQ ID NO: 708921 - DNA, 410 bp, Homo sapiens
gtcgaccccttcctggtggcgagggacatgtgaagtcggaactgttcactttggggcagcctgtaaagagaataatatgaatccagctcacgttaaagtctcaaaagtcacatgcactctgatcagcttcatccaactagaatattactcctaaatgtccacagagctattattggtggatttaaccccataggaagaacatcaatatcaaacaaccagacccaccaagcttccagtgtctaaaccaccaaccaagaagtatacatggagggacctgtggctctagctgtatatgtagcagaggatggcctgatcagacatcagtgaggggagaggcccttggtcctctgaaggcttgatgcccgagtgtaggggaatgccaggacagggaagcagaattgtcgacgcgg

SEQ ID NO: 708922 - DNA, 241 bp, Homo sapiens
ctttttattgaaagtcactaatacatcctgtgaaagcgaagtaagtatcaggaccccaaaaccactaagccaaggaaaagtcaagctgggaactatgtcagacaaacctgtctcctggttttttcctaaataagatagctacaaggataaaaagctacatacctccctcaccatttgcccacaaggaaattccttgtggataaaggacggacagaactcagtcacccctctgaggttcacc

SEQ ID NO: 708923 - DNA, 1132 bp, Homo sapiens
ggacgctgctgctgtccaagtaccgactggggagtagctgtcacacatgctgtccgtgtcgcgttgcgtgcggccgtggtccgcgcccttcctcggcggaccggagtggtctccaggaaatgctattgggcttcactctttgcattgcatgcagaggaacttccatgccctctaagcacgtcatcctactaaaaaggacctgggacgtgcttgaggattgtcctcttagttctgtgaaggatgcgtattctttggagctgatatcctctgttgattcttgaagaaactgggcgtgtcttaagtagttgggtcgatggtattgcaccggcagtaccagttggtgcatgacggaactgttcattgctatgaagacaatgagtagagtatgtcattcagcgctttcaagggatatgtcccttgaatttggaagctgatgatgtaggggttggtccgcgttccgtggaaattgcatagagactaaatcttaagccaatggcatatgatagatcgaacgaatgcgatcagggtaggcaccttggaatggacgcaacggaaatggggtgcatggtagtcacgaggcgttgtgcatcgctaaagtaggattgctctcatccgaggaagatgaactctctgtcctgggggaactggggaagtcggcatccatgtgggaatgtctgacaacagagcgctgactaggggccgcatgtcgtgggactgaacacaaggcgctcgcgggttattaaaattaacaccatcggcacagtaaactgagtgggacacgcgataggatccccaggtggtgaatcaccttggggcaactatggaacgggggcattggtgcgggagctttatggggttgggaagatgacttcgatccttggcagatacatgtcatcggaccgcagggcttggagcacacgcaccgaattttctaggtcacgggctgaaagcggcggacccaggcacctttggccggagaaatacgtgctcacaatacgtgtgggacttcatatagagacagaggagactttccatttgaggaaacgcggaaaaaaccaggttcttcccatcttaaatgggacatgcatcgtgagagcacatgggtggatggcatcgtctaattacactcgat

SEQ ID NO: 708924 - DNA, 1475 bp, Homo sapiens
gttgggttattttgtggcttccttcgtgattggagccaggcctacacgccagacaaacatgtccaagggacctgcagttggtattgatcttggcaacacctactcttgtgtgggtgtttccagcacggaaaagtcgacagatcattgccacatgatcagggaaaccgacaccagtccaagctatgtcgccatttacggacactgaacggttgatcggtgatgccgcaacaggaatcaaggttgcaagtgaaccccagcaacacacagtttatgatgccaacaagtctgattggacgccagcatttagatgcatgcatgaagtccagatctgcatatgcaacaacattggccctgtcatggtggtgcacatgcatggctggccaggcaccgacggtccccaagtagcaataccacaggggaggaggacccaaagagcgttcatcatccaagaaggcaggatgtcattgccgtacatggggtgaccgtggacacacacagaactgacaggggacaaactacgcacagagaggaccctaacacattggggaacagaacctggtgtaacccaagtgcctagtgggtaccccaagaggggccagcggtgaaccatgaaagatgcaactcttcaagcaggtccggggacataacccaaagcagaatgcctgggaacacggtaatacagcacagggggaactcacaaaggggatacacgatacaaggaacaatataagccgaagacaggaaagagcacaaaaccaggcgctggcagatgcccataaagggcaataaacgacaggcgataaaggacagacgaaaacaacggaggataaggggaagagccaagaaaccaaggcaaacacccgagtggacgaccacaatcaactaaggacacccctagcacaacgacgaggggaccaacacacagacgagacaatggaacgagcaccacacaaacaccgtccaccaacgtaaagaaagacgcagccacggggaaaacgaacccaataaggaacgagggcatccaagagctactcaccaaggacaggggaacgagacgaacaacaccacaccactggggacgacgaaacagacacgcagcaatacctagggacacacacaagaccgcgaagaaggagagtaccaaaaaccacagataataaagcgaggcacggacgagtagaaagagggaacaaagaccaataagaaaggggaacaaatcacagagtggaaaaaaacacaagcaagcaggagggagcaagacacagaccacagaccgagacaacaggagaaagaaagaaaacagagaaagaacaaaagcggacacacacgtgagagtgatatcaccggacgcaccacgcggacacacgaaatagagagcaacgacgaaacagacgacacaacaaaagcaagaaaacgcggaaaatcaagagacaacacaaaagcgcggtgaccagacaagagagaacaaagcaagg

SEQ ID NO: 708925 - DNA, 191 bp, Homo sapiens
agacttagaggatccctggacagcgctatagcgccgccaccttcttgccgtgccactcctccgggatcaccgggaggggcggcgccgtggtcaggttcatcagcgcggtgacctcgtccggcgcgtcgggggcccagtcgcggaaggcccgcaggagctcgcccgccgcgtcggccgggtagaacacgggg

SEQ ID NO: 708926 - DNA, 113 bp, Homo sapiens
tcgaggatcccctgatgtttgctggcctatgctgtatattttgcaattctctttactagagtaaaaagaatatcttaatagaagagagctggattcggccaggcaaacatcaa

SEQ ID NO: 708927 - DNA, 927 bp, Homo sapiens
ggaggaagtgacgacaggcgtgcccttgacaggcaggagggctaggctgtgcatccctccgctcgcatgcagggagatggctcagcgacttcttctgaggaggttcctggcctctgtcatctccaggaagccctctcagggtcaaggtggccacccctcatttccagagccctgaagaccccaaacaattgcagtcctgggtggcccttgattgtaaaaacccaagcccaggtctcggacaaataattccaccacgagggatctccttgacaacctttaatatccagggatggacctgacttttacaaggacctggagtggtcccaacagttggacgacccccacgtgtgttgtggcattcccaacgcacaggggggtgtgggacccctgcaaggaatcctggggaccgcgggttacgagaaagatgggtggccaagacaggcactgggacaggtggttgatgggccacaggggtggcttatggatgacacacaagacttcgcattgagtatggagggtgtcagtggtgccactgtgcttggccatgacgaatggcgacgtggtggacaaagttcgtggcgcatcaagaatgaggtaagttggaggcctttcttggaagaagcggattggtgacaagcagggatgagtcctgttcatttcccggtggacccaatagaactcaagccttccatgcagccctcctgctgctcctgccggttggtcctggggccatgctagagccaggcccagctcgagtgtcgacgcggactgccaggcacgaggcgagggcgcgcagaccggacgtgttcttacaagctgacaccccttaggctggagtcccggtggggcgggaccccggcaagggcgacatggccccgcccaagacggggcggcatcagggaaacaagaaaaacgggacgcgagcag

SEQ ID NO: 708928 - DNA, 240 bp, Homo sapiens
cctgctcgctgtcctgtataccttgatcccagacgctgccgcgctctgtgtgagtggctgcgcgcgctgatgctggcgtctctgggtgctggcggccctcgttttctcagaggagactggcggagagatagcctggatccatgtgtccatttcctcatcgtctttggcttggaagaggtcctcattgccatcattgagtcttagcttgcatatgtgtcccttctcttctgtaatcaaggg

SEQ ID NO: 708929 - DNA, 136 bp, Homo sapiens
  misc_feature (120)..(120): n is a, c, g, or t
ggattcagaagaaaagaaaaggaagagaggagttgattataatgccgagatcccattttgagaaagaggcctgcccttgggtttggatgatacttctgaggaaaactaccaagctgtttnacgcagatattcagag

SEQ ID NO: 708930 - DNA, 448 bp, Homo sapiens
gactagcagtggtggtggtagtgacggcagacactctgatatacccaatgcgacgtctctgaaaacattcaggccccctaccggggagggctttcgagcttggaggacgtggattggaacagcgttgcccgccggtctcccaatctcttcaccaacatgcagcccacttcatagcataagcagccccggccctggccatcagccttggacacagggagcccatagtcctctggaaagcattccgagcggcatcacaagaccgtgtagtgtggctccctgccctgtctgaactcctgcagctcagggggcgctgactccgactccagcagctgccggccgggcctgccttccttcgtgcaggtaatcgggcacccgccccgggaccaccgcgcttcctccgagcaagcgctggtgcaggccgggagctacagcagggactcagaaggca

SEQ ID NO: 708931 - DNA, 197 bp, Homo sapiens
ttaaaataactttttagcccccgtcttcctattttgagtttgggtcagatcttaagcagctccatgcaactggatttatttttgatgacaagactcccatttaaagtttttttcctgcctgatcatttcattggggggtgaaggattttaaagaaccttttgtttttgcaaggaaaacaagaatcccaaaccagtga

SEQ ID NO: 708932 - DNA, 517 bp, Homo sapiens
gtgtgtgctcatctcaacgcctcgtgcgaggcgtttaggcagccagcgcaggggcttcgtgctgagggggcaggcggagcttgaggaaaccgcagatcagtttatttctcttagaaagatagagatcaatacaactacttaaaaaatactacgtcaataggttacctaacgactactggcttacgcgttccgttttacacgtacattttacatacgcttaccgactttaccgacgaccactactgacacgaccttacgaacgacgtacccatgaggacacggacaacagactcaaacggtctctacaaaccatgacggacggttgacgactgaccgcttcttcctggagtccacactgtctttaaacagaccactcgacgacgaacaggacctaccagcgccccgaatacataccacatacgacagggcactgcttttacgacttaaaatgaacggtgaacttaaccagcttaaagtttagtttaaacgtggtaggtgattaaaataattagaaggc

SEQ ID NO: 708933 - DNA, 146 bp, Homo sapiens
tttcagctctgcaaggtgaacggagcgcgcagcccgcgacaccgtcattgaaaaattggggttgttttaagggggctactcgggctttaaatgggaatgcaagggaggagaccgccattattattattattacctctattaaaagg

SEQ ID NO: 708934 - DNA, 232 bp, Homo sapiens
  misc_feature (83)..(84): n is a, c, g, or t
ctgtgacgttctgcaggagtggggggaggtggtggggggggagagggggaaggctaggggtggtgggggtaccatacatccannagttcatcaaaacaactaagccaagacatgctaataaattttcaacactaggggggcgggggggaagaggatgaaattgtacgaagtaaaaagtttctgcttcaaagttccccttcttgttaaagaataaatcataagtcttagaaat

SEQ ID NO: 708935 - DNA, 126 bp, Homo sapiens
tccgggagagcggacgctcttcctctcctcttcctcttgctgtctgcgcacttccagtaagtccaatgtagtccgcctttccagggcagagaaactccccaccagcgtcgtcaccatgatgcagct

SEQ ID NO: 708936 - DNA, 762 bp, Homo sapiens
  misc_feature (45)..(45): n is a, c, g, or t
  misc_feature (82)..(82): n is a, c, g, or t
  misc_feature (89)..(90): n is a, c, g, or t
  misc_feature (185)..(185): n is a, c, g, or t
  misc_feature (221)..(221): n is a, c, g, or t
  misc_feature (237)..(237): n is a, c, g, or t
  misc_feature (240)..(241): n is a, c, g, or t
  misc_feature (248)..(248): n is a, c, g, or t
  misc_feature (256)..(256): n is a, c, g, or t
  misc_feature (262)..(262): n is a, c, g, or t
  misc_feature (267)..(267): n is a, c, g, or t
  misc_feature (282)..(282): n is a, c, g, or t
  misc_feature (286)..(286): n is a, c, g, or t
  misc_feature (302)..(302): n is a, c, g, or t
  misc_feature (314)..(314): n is a, c, g, or t
  misc_feature (316)..(316): n is a, c, g, or t
  misc_feature (337)..(337): n is a, c, g, or t
  misc_feature (379)..(379): n is a, c, g, or t
  misc_feature (392)..(393): n is a, c, g, or t
  misc_feature (406)..(406): n is a, c, g, or t
  misc_feature (420)..(420): n is a, c, g, or t
  misc_feature (460)..(460): n is a, c, g, or t
  misc_feature (475)..(475): n is a, c, g, or t
  misc_feature (486)..(486): n is a, c, g, or t
  misc_feature (549)..(549): n is a, c, g, or t
  misc_feature (564)..(564): n is a, c, g, or t
  misc_feature (654)..(654): n is a, c, g, or t
  misc_feature (680)..(680): n is a, c, g, or t
  misc_feature (717)..(717): n is a, c, g, or t
ttggagctgaaaaaggaagcaatgtggagaatcctatggtaaaanaacgggactgacaattgataaaatagtctctgtgtcncaagaannggccgtatttacagggttaaaaatattcacagctcagagtacagggaggccaaaggggagtgggaatgtttctccaggtgaaaaggccccggacncccctgccggggtaaaagggggagtgggggcgcggncggcccgctgccgggngtnnggggccnggaaagcncgccgngagcngggctcagacgtccnctcnctcctgggcttctgtngggaggtgggtncngctgggccctgcccgtgcccncggtgtgctggggtccctctctggctgggccgggccgtgggnctgggttggctgnngtgcctgctggtncctgtgtgcccggntgctgtgtgcggtgctgtgggctggtgccctccctcggcnggcctggtgcccgcntgctccctgtngtggcttcgttcctggcgggctctcctggttttgcgttgtgtcgctggggggctggtcttggncgccttcttctgtgnccggcgccgccccgggtctcgccgctccacaccagggctccagggaccccgcctgccctgtgggggacagggacccgggctctggggganacctgcccttatgccccgtgagggtnggtccctgatccccccccagggtcttggcctctgccncccagatttggttttgcggacagagctcctggctgcctagcccgc

SEQ ID NO: 708937 - DNA, 352 bp, Homo sapiens
ttacactggagcagatcattctctctcctgccgcctgtgaagaggtgcttctgtcatgattgtaagtttcctgaagcctccccagccatgtgaaactgtgagtcaatgaaaccttttttctttataaatcgcccagtctcgggtacttctccatagcagcgtgagaacaaactaatacagatggctactatcaaaaagacagaaaataagttttgaggatgtggcaaaattggaacccttgtgcactgctggtgggaatgtgaagtggtgccgcagctatggaaaacagcatgatggttcctcgaaaacttaaaaatagaattactcttcttctccaagacaaaatctcaaa

SEQ ID NO: 708938 - DNA, 509 bp, Homo sapiens
tgtcgatgatactgcagtcgagaactgccgacagctggttttaaaagaatgaaatgttctgttgatcacatttttcaccagcattttttgttttttttctttagatggagtcttgctctgtcatccaggctacaatgtagtggcacagtcagctcactgcagcctccaactcctgggctcagcaatcctccagcctcagcctcccaagtagctgggactataggcatgtgacatcacacgctggctttttttttttttttttttttttttataaaaacggggctcccacttttttccccaggcgggtcttgaacccctttgcttcaaattgtcctcctacctcggacccccaaagtgctgagattacgggtgtgacgcatggtgcccagccttttcccagcattttttttaaggacaaacgtgattatttttgctcatgattagaatttggagcagtatggaaagatggaaagcacaagggaaaaacccccagtccatccctctttcta

SEQ ID NO: 708939 - DNA, 164 bp, Homo sapiens
aagtccagatcacatacaagtatgatctccaaagaatctgtaaggtcacagtcagcagcttttcaggactgtaggatatttgcgttaaatgctgcatgtgacacaaagttctgtaaacctttcagtgacaccctagtggtctacttttggaagtggaaacattc

SEQ ID NO: 708940 - DNA, 122 bp, Homo sapiens
tattgaatctactcatacttcctccccaagagaagaggtgaaaagaaattaagagggatgtctttttgagacggagtcttgctcttgtcgccaggactggagtgcagtggcgcgatctgggg

SEQ ID NO: 708941 - DNA, 1710 bp, Homo sapiens
aagcttgcggccgcttgtgacctaaccgcagcgcctgtgtgcaacgtggtggggctcccggcagggctcggctctgcccaagaggcccgccctggggctgcgcgagccgctttgccaaggggtttccttctcactcagacgcatgatggccccaggtgtggccgcgggaccgagggatggacgggctggacctggctcgccgtaggagacgccccccacccctgggctggagtccagccaggccgctgatcctgcatccccatgcaaggaggttcagagctcctgtcgtgtggtccccgaggatggctctccagagaagaggtgcccgggcggcgtcctctcctgcattcctgacaacaaccaacagcccaagggcatccctgcctgcgagcagaatgtctccagaaaggacacccggtcagaacaggacaagtgcaaccgggagcccagcaagggccggggccgggccaccggagacgggcttgctgaccggcacaagcgggagaggagccgggccaggcgggccagcagcagggaggacgggaggccacgcaaggagcggcggccccacaagaagcacgcctacaaggatgacagcccccgccggcgcagcacgagcccggaccacacccggtcccggaggtcccacagcaaagacaggcaccggagggagcggagccgggagcggaggggcagcgccagcaggaagcacagccgccaccgccgccgaagcgagcggtcgcgctcccggtccccgagcaggcaccgcagtacctggaacaggtaatgacgggcacggcctccccacggcctgtccgggaaagaccaggacctgctcgagcctcctggccgctccttggccgctctccgtccacccctgcaaagccaagacccttctgcagccacgaatgtccacggagcccgccggcaggaaggaagacaccatgctttagagatccatctttctccactcaccgcagcgtacttggcacttcagtttcaaacacgtagtcctttaaaacttgatccgatagctttaatgcggccggtcctctctcagtcaggaaaattgcacagaccgacagtcgtgaggatggcagagctgctgcattcccccacatggggatttctgtgtctgcttggcgacctccctgcgtgcacggcctaggaggtgcacgggccaccatagtcacactggcactgaaaagaaagcgttgccctggtgattctttcccccccgtttgtaatgttaactgatcaggaagtgcagtttgggtgggatgccgaatcgtcgtgctgacattgagtcacggatgaggaaggtacaagtcctttaagatcaaaactcaaacgggccgttctttctaaggtgtcggtatgtggggagtggtacaaaatggtctgatgctccttcaaaaacattcactttttacaacgtcaaggaattaagcataaaaaagattggttaaaagctttggtttctagtaaaggttagtgtgtgtggtttttttaagaagctgttttgctaaattatttttacttggaatgtttcaaacagatttcaggctgcaaacttgttttataatcgtttgcttctccaagtgaagctcagaaatacctaaaaatagctgtaacgttcgcgttaggaaagatggtgtttattccagtttgcatttttatggtgaaataaaatccttttccaatgaacta

SEQ ID NO: 708942 - DNA, 2743 bp, Homo sapiens
  misc_feature (30)..(30): n is a, c, g, or t
  misc_feature (2743)..(2743): n is a, c, g, or t
ggagcggggcgacggaatgtggaaatgcgncatagagggcgggcggcgacggcggtggcggcgtcggaggcgcctccgggggacggtggcggctcccggcggtgaggccgcgcctgtccggggatcgtcgagggacggcgggagcttgggccagcggcggcggcggcctgggacgcaggcggagccccgcgcaggcccaaggtcccggaggctatggcagcggctaccatcgtgcacgacacgtctgaggccgtggagctctgccctgcttacggcttgtacctgaagcccatcaccaagatgaccatcagcgtggcactcccgcagctgaagcagccggggaagtccatctccaactgggaggtgatggagaggctgaagggcatggtgcagaaccaccagttctccacgctgcgtatttccaagagcaccatggacttcatccgcttcgagggggaggtggagaacaagagcctggtcaagtcttttctggcctgcctggacggcaagaccatcaagctcagcggcttctccgacatcctgaaggtgcgcgcggccgagttcaagatcgacttccccacccgccacgactgggactccttcttccgcgacgccaaggacatgaacgagaccctgccgggggagcggccggacaccatccacctggaggggctgccctgcaagtggttcgccctgaaggagtcgggctccgagaagcccagcgaggacgtcctggtcaaggtgtttgagaagttcggggagatccggaatgtggacatccccatgctggacccctaccgggaggagatgacgggccgcaacttccacaccttcagtttcggggggcacttgaacttcgaggcctatgtgcagtaccgtgagtacatgggcttcatccaggccatgagcgccctgcgcgggatgaaactcatgtacaagggcgaggacggcaaggccgtggcctgcaacatcaaggtttcttttgattcgaccaaacacctgagtgatgcctcaattaagaagcggcagctggagaggcagaagcttcaggaactggagcagcaaagagaagaacaaaagcgcagagagaaggaagcggaggagaggcagcgagcggaggaaaggaaacaaaaggagctggaagagctggagcgagagaggaaaagagaagagaagcttcgcaagagggagcagaagcagagggaccgtgagctgcgccggaatcagaagaagctggagaagctgcaggcggaggagcagaagcagctgcaggagaagatcaagctggaggagcgcaagctgctgctggcccagaggaacctgcagtccatccggctcatcgccgagctgctcagcagagccactgtgaagctacgggaacaggagcagaaggaggagaagctgaggctccagcagcaggaggagcggcggcggctgcaggaggccgagctgcggcgcgtggaggaggagaaggagcgcgcgctgggcctgcagcggaaagagcgggagctgcgcgagcggctgctgagcatcctgctgagcaagaagccggacgacagccacacacacgacgagctgggcgtggcacacgccgacctgctgcagcccgtcctggacatcctgcagaccgtgtcgtccggctgtgtgagcgccaccacgctgcaccccctcgggggccagcccccggccggtgcccccaaggagagcgcggcccacccagaggccgacggcgctcccaaaagcgtgaacgggagcgtggccgaggaggccccatgcaaggaggttcagagctcctgtcgtgtggtccccgaggatggctctccagagaagaggtgcccgggcggcgtcctctcctgcattcctgacaacaaccaacagcccaagggcatccctgcctgcgagcagaatgtctccagaaaggacacccggtcagaacaggacaagtgcaaccgggagcccagcaagggccggggccgggccaccggagacgggcttgctgaccggcacaagcgggagaggagccgggccaggcgggccagcagcagggaggacgggaggccacgcaaggagcggcggccccacaagaagcacgcctacaaggatgacagcccccgccggcgcagcacgagcccggaccacacccggtcccggaggtcccacagcaaagacaggcaccggagggagcggagccgggagcggaggggcagcgccagcaggaagcacagccgccaccgccgccgaagcgagcggtcgcgctcccggtccccgagcaggcaccgcagtacctggaacaggtaatgacgggcacggcctccccacggcctgtccgggaaagaccaggacctgctcgagcctcctggccgctccttggccgctctccgtccacccctgcaaagccaagacccttctgcagccacgaatgtccacggagcccgccggcaggaaggaagacaccatgctttagagatccatctttctccactcaccgcagcgtacttggcacttcagtttcaaacacgtagtcctttaaaacttgatccgatagctttaatgcggccggtcctctctcagtcaggaaaattgcacagaccgacagtcgtgaggatggcagagctgctgcattcccccacatggggatttctgtgtctgcttggcgacctccctgcgtgcacggcctaggaggtgcacgggccaccatagtcacactggcactgtcagggtgcgtttgggtgggtgccgtcgn

SEQ ID NO: 708943 - DNA, 2421 bp, Homo sapiens
  misc_feature (30)..(30): n is a, c, g, or t
ggagcggggcgacggaatgtggaaatgcgncatagagggcgggcggcgacggcggtggcggcgtcggaggcgcctccgggggacggtggcggctcccggcggtgaggccgcgcctgtccggggatcgtcgagggacggcgggagcttgggccagcggcggcggcggcctgggacgcaggcggagccccgcgcaggcccaaggtcccggaggctatggcagcggctaccatcgtgcacgacacgtctgaggccgtggagctctgccctgcttacggcttgtacctgaagcccatcaccaagatgaccatcagcgtggcactcccgcagctgaagcagccggggaagtccatctccaactgggaggtgatggagaggctgaagggcatggtgcagaaccaccagttctccacgctgcgtatttccaagagcaccatggacttcatccgcttcgagggggaggtggagaacaagagcctggtcaagtcttttctggcctgcctggacggcaagaccatcaagctcagcggcttctccgacatcctgaaggtgcgcgcggccgagttcaagatcgacttccccacccgccacgactgggactccttcttccgcgacgccaaggacatgaacgagaccctgccgggggagcggccggacaccatccacctggaggggctgccctgcaagtggttcgccctgaaggagtcgggctccgagaagcccagcgaggacgtcctggtcaaggtgtttgagaagttcggggagatccggaatgtggacatccccatgctggacccctaccgggaggagatgacgggccgcaacttccacaccttcagtttcggggggcacttgaacttcgaggcctatgtgcagtaccgtgagtacatgggcttcatccaggccatgagcgccctgcgcgggatgaaactcatgtacaagggcgaggacggcaaggccgtggcctgcaacatcaaggtttcttttgattcgaccaaacacctgagtgatgcctcaattaagaagcggcagctggagaggcagaagcttcaggaactggagcagcaaagagaagaacaaaagcgcagagagaaggaagcggaggagaggcagcgagcggaggaaagcagctgtgagcgggtggctcttccccaccttgccagcaggctctgtgctccttgaagcaagcgctccagaggctccggaagccacggctggattggagacaagatgggatcctcagaggaccaggcctatcgcctccttaatgactacgccaacggcttcatggtgtcccaggttctcttcgccgcctgcgagctgggcgtgtttgaccttctcgccgaggccccagggcccctggacgtggcggcagtggctgcaggtgtgagggccagcgcccatgggacagagctcctgctggacatctgtgtgtccctgaagctgctgaaagtggagacgaggggaggaaaagctttctatcgaaacacagagctgtccagcgactacctgaccacggtcagcccgacgtcacaatgcagcatgctgaagtacatgggcaggaccagctaccggtgctggggccacctggcagacgccgtgagagaaggaaggaaccagtacctggagacgtttggcgttcccgctgaagagctttttacggccatctacaggtccgagggcgagcggctacagttcatgcaagctctgcaggaggtctggagcgtcaacgggagaagcgtgctgaccgcctttgacctgtcagtgttcccacttatgtgtgaccttggtgggacacggataaagctggaaaccatcattctcagcaaactatcgcaaggacagaaaaccaaacaccgcgtgttctcactcataggtggggctggagctctggctaaggaatgcatgtctctgtaccctggatgtaagatcaccgtttttgacatcccagaagtggtgtggacggcaaagcagcacttctcattccaggaggaagaacagattgacttccaggaaggggatttcttcaaagaccctcttccggaagctgatctgtacatcctggccagggtcctccatgactgggcagacggaaagtgctcacacctgctggagaggatctaccacacttgcaagccaggtggtggcattctggtaattgaaagcctcctggatgaagacaggcgaggtcctctgctcacgcagctctactctctgaacatgcttgtgcagacggaagggcaggagaggacccccacccactaccacatgctcctctcttctgctggcttcagagacttccagtttaagaaaacaggagccatttatgatgccattttagccaggaaataactgtttcttgtgacctggaactaacgtcaaagcacacaagacataataataaagacatgtacctctcctagc

SEQ ID NO: 708944 - DNA, 151 bp, Homo sapiens
  misc_feature (89)..(90): n is a, c, g, or t
gcgtggaagtgacatcgtctttgaaccctgacgtggcaatcccatgacgcaccgcgcgtgatgccgcagtgcaagcacagtgactgacnnctggattgtcctctgtttctctttcctctctgttgtcctcctttctgttcttcccgctggc

SEQ ID NO: 708945 - DNA, 396 bp, Homo sapiens
ccggtccaggcttgacgcagccagcgcagggcttctgctgcggtgggctggcggagcttgagtgaatccgctagattagtttttttctctttgcaaagatagagattattacaactacttaaaaaatatagtcaataggttactaatatcttgctttcagcgttcacacgtttttaactgttaattttaatcagcttaagattttaagcagaaaatatgaagcacttagaagcagtagcatgaggaaggaaaagattaaaggtttctaaaacatgacggaggttgagatgaagcttcttcatggagtaaaaaatgtatttaaatagaaaattgagagaaaggactacagagccccgaattaataccaatagaagggcaatgcttttagattaaaat

SEQ ID NO: 708946 - DNA, 2387 bp, Homo sapiens
  misc_feature (30)..(30): n is a, c, g, or t
ggagcggggcgacggaatgtggaaatgcgncatagagggcgggcggcgacggcggtggcggcgtcggaggcgcctccgggggacggtggcggctcccggcggtgaggccgcgcctgtccggggatcgtcgagggacggcgggagcttgggccagcggcggcggcggcctgggacgcaggcggagccccgcgcaggcccaaggtcccggaggctatggcagcggctaccatcgtgcacgacacgtctgaggccgtggagctctgccctgcttacggcttgtacctgaagcccatcaccaagatgaccatcagcgtggcactcccgcagctgaagcagccggggaagtccatctccaactgggaggtgatggagaggctgaagggcatggtgcagaaccaccagttctccacgctgcgtatttccaagagcaccatggacttcatccgcttcgagggggaggtggagaacaagagcctggtcaagtcttttctggcctgcctggacggcaagaccatcaagctcagcggcttctccgacatcctgaaggtgcgcgcggccgagttcaagatcgacttccccacccgccacgactgggactccttcttccgcgacgccaaggacatgaacgagaccctgccgggggagcggccggacaccatccacctggaggggctgccctgcaagtggttcgccctgaaggagtcgggctccgagaagcccagcgaggacgtcctggtcaaggtgtttgagaagttcggggagatccggaatgtggacatccccatgctggacccctaccgggaggagatgacgggccgcaacttccacaccttcagtttcggggggcacttgaacttcgaggcctatgtgcagtaccgtgagtacatgggcttcatccaggccatgagcgccctgcgcgggatgaaactcatgtacaagggcgaggacggcaaggccgtggcctgcaacatcaaggtttcttttgattcgaccaaacacctgagtgatgcctcaattaagaagcggcagctggagaggcagaagcttcaggaactggagcagcaaagagaagaacaaaagcgcagagagaaggaagcggaggagaggcagcgagcggaggaaagagcaggctctgtgctccttgaagcaagcgctccagaggctccggaagccacggctggattggagacaagatgggatcctcagaggaccaggcctatcgcctccttaatgactacgccaacggcttcatggtgtcccaggttctcttcgccgcctgcgagctgggcgtgtttgaccttctcgccgaggccccagggcccctggacgtggcggcagtggctgcaggtgtgagggccagcgcccatgggacagagctcctgctggacatctgtgtgtccctgaagctgctgaaagtggagacgaggggaggaaaagctttctatcgaaacacagagctgtccagcgactacctgaccacggtcagcccgacgtcacaatgcagcatgctgaagtacatgggcaggaccagctaccggtgctggggccacctggcagacgccgtgagagaaggaaggaaccagtacctggagacgtttggcgttcccgctgaagagctttttacggccatctacaggtccgagggcgagcggctacagttcatgcaagctctgcaggaggtctggagcgtcaacgggagaagcgtgctgaccgcctttgacctgtcagtgttcccacttatgtgtgaccttggtgggacacggataaagctggaaaccatcattctcagcaaactatcgcaaggacagaaaaccaaacaccgcgtgttctcactcataggtggggctggagctctggctaaggaatgcatgtctctgtaccctggatgtaagatcaccgtttttgacatcccagaagtggtgtggacggcaaagcagcacttctcattccaggaggaagaacagattgacttccaggaaggggatttcttcaaagaccctcttccggaagctgatctgtacatcctggccagggtcctccatgactgggcagacggaaagtgctcacacctgctggagaggatctaccacacttgcaagccaggtggtggcattctggtaattgaaagcctcctggatgaagacaggcgaggtcctctgctcacgcagctctactctctgaacatgcttgtgcagacggaagggcaggagaggacccccacccactaccacatgctcctctcttctgctggcttcagagacttccagtttaagaaaacaggagccatttatgatgccattttagccaggaaataactgtttcttgtgacctggaactaacgtcaaagcacacaagacataataataaagacatgtacctctcctagc

SEQ ID NO: 708947 - DNA, 1176 bp, Homo sapiens
catagtggcacatgcctgtaaccccagctactcaggagctgaggcaggagaattgcttgaacccaggaggtggaggttgtggtgagcagaggttgcaccattgcactccagcctgggcaacaagagtgaaactccatctcaaaaaaaaaaaaaaaaggttttttaaaacaaccccagggggttgggtgcgggggttcacactctgtattccccagcatcttcggggaggccaaggacaggcggatcatgaggtccgggactaattgagccacatcctgggccaaaacccaatctcctactaaacaatacaaaaatttacgttgggattgcggtggttgccgcaccttgggaattccccaagcatattcggggaaaacttggaggcgcaacggagcacttggcgttcgagacaccttgggagcataaccaggtggcgcattcctaaagacaccgcctggagccataaataccggagattcccactggaagcaacgatagattgttaccaacacaatgtgttcgcccaacggccgggtatctccgaagaaacatctccatgggcccatcacaagatgtagactcccaaccgcaagccgcttagaagggccttcttacaaaaaaggttgcaggggaaagctctatcacaccgggcggccatattagcgcccaccaccggagtcgccttggcgccaataataacagtaaagtagctacccgagtgggtagtatttccaatagaaaacctaattccttcgttacgaggaggtaaagactacttgttcgacggacgcgttaccaaaccactctgtccacagcgttggcaggaacaaatctgtccaatctgtcgggcgagagaaacgatctagacacaggccacacacagaggggggggttacacccccagctacacccagacgtcaccgaaaagagttagtaccgccacaaagaagctgtctgctaaagcagcacggggggtcaagggatccccaagaaaaagcacacacagaacgacaagcctggggaaccacccaagaaaaagtcaaccagcgtgaaacccccccaagaaggctgggcggcgggggacaacccccgcgcgctcagcaaaaacaccagagggcagcaccaataacaaggagtgcacaacggggcgcgacaggggagcccccacaggacaaa

SEQ ID NO: 708948 - DNA, 361 bp, Homo sapiens
ccccccaggaaaaaaaaaaaatttctgtttaaaaaagcaatctgtttcttggccctggaaactttcgctacttaaattcccaaaaaaaaaaaatttaaattttttaaatgggactcccccatccccctccagggggggggggttttttaaaaaatccttttggtcaccccccccagacattagccccacatttaaacttttttcttaaaaacggggttgggggggttaacttcacccccgttcggggtacttttaatctcgggaaagtttcttgggattgcgggggaaacccaacccgtctaaattaacaggaaatccttcttttggggggagaaaaaaaaatcggtttttttcaaagcca

SEQ ID NO: 708949 - DNA, 2270 bp, Homo sapiens
  misc_feature (30)..(30): n is a, c, g, or t
  misc_feature (1400)..(1400): n is a, c, g, or t
  misc_feature (2258)..(2258): n is a, c, g, or t
ggagcggggcgacggaatgtggaaatgcgncatagagggcgggcggcgacggcggtggcggcgtcggaggcgcctccgggggacggtggcggctcccggcggtgaggccgcgcctgtccggggatcgtcgagggacggcgggagcttgggccagcggcggcggcggcctgggacgcaggcggagccccgcgcaggcccaaggtcccggaggctatggcagcggctaccatcgtgcacgacacgtctgaggccgtggagctctgccctgcttacggcttgtacctgaagcccatcaccaagatgaccatcagcgtggcactcccgcagctgaagcagccggggaagtccatctccaactgggaggtgatggagaggctgaagggcatggtgcagaaccaccagttctccacgctgcgtatttccaagagcaccatggacttcatccgcttcgagggggaggtggagaacaagagcctggtcaagtcttttctggcctgcctggacggcaagaccatcaagctcagcggcttctccgacatcctgaaggtgcgcgcggccgagttcaagatcgacttccccacccgccacgactgggactccttcttccgcgacgccaaggacatgaacgagaccctgccgggggagcggccggacaccatccacctggaggggctgccctgcaagtggttcgccctgaaggagtcgggctccgagaagcccagcgaggacgtcctggtcaaggtgtttgagaagttcggggagatccggaatgtggacatccccatgctggacccctaccgggaggagatgacgggccgcaacttccacaccttcagtttcggggggcacttgaacttcgaggcctatgtgcagtaccgtgagtacatgggcttcatccaggccatgagcgccctgcgcgggatgaaactcatgtacaagggcgaggacggcaaggccgtggcctgcaacatcaaggtttcttttgattcgaccaaacacctgagtgatgcctcaattaagaagcggcagctggagaggcagaagcttcaggaactggagcagcaaagagaagaacaaaagcgcagagagaaggaagcggaggagaggcagcgagcggaggaaaggaaacaaaaggagctggaagagctggagcgagagaggaaaagagaagagaagcttcgcaagagggagcagaagcagagggaccgtgagctgcgccggaatcagaagaagctggagaagctgcaggcggaggagcagaagcagctgcaggagaagatcaagctggaggagcgcaagctgctgctggcccagaggaacctgcagtccatccggctcatcgccgagctgctcagcagagccaaggtacccgggggctccctctgcagccgccagccgcncccgggctgccctcagtgccctcccctgaaatgcgggcggcgtcacggccgtttccccgccggctgcagctgtagctacgaaaccagctttaatgccgaggatgacggctccttcccgggagggtgtagcgctcgtctgtcgttcccgatgatttcagagctgtgacggtttccttttgcaaagctggtgcattcaggttccccgagcaggctggcagcctcccgggggccagggcagaggctctctgtttcctttgggtcggggcagtggcagagagtgcaggaggccgctccctctggcccgcgcctctgtgtgtggtcagctggcctggctgtgacctcaccagtggcccagagcagaggggcaaggtgggctggggggagggctgagcgcacagagggggcctgccgtgggcccgggtccctcctccgcagcgtgaacctgacaggtctcaccagcgccggtactgacgaccccctcagcaccaagagcctccctgctcctcctgcaggcgcgactggtaactcccatgagcccggggccagggcccacagacagacagacctccccaggacagacgtccccggcacgctccttgtcctcaggagggctgcgtccccctggagtccaacgcggggcgaccccataacctgttgtctgattacagttgtgataagtccccgggaaggagcatgacaagaggctgagacatgtggcagcccagtccttacctcatggtgaatattgaagacactaacccaggctaggccaggctcgccccgcagctacggcggtggcatgcgtctgcggcgtcatctcagctccctgttgctggcggccgcaaagcttaattcccntttaagttgagg

SEQ ID NO: 708950 - DNA, 2196 bp, Homo sapiens
  misc_feature (30)..(30): n is a, c, g, or t
ggagcggggcgacggaatgtggaaatgcgncatagagggcgggcggcgacggcggtggcggcgtcggaggcgcctccgggggacggtggcggctcccggcggtgaggccgcgcctgtccggggatcgtcgagggacggcgggagcttgggccagcggcggcggcggcctgggacgcaggcggagccccgcgcaggcccaaggtcccggaggctatggcagcggctaccatcgtgcacgacacgtctgaggccgtggagctctgccctgcttacggcttgtacctgaagcccatcaccaagatgaccatcagcgtggcactcccgcagctgaagcagccggggaagtccatctccaactgggaggtgatggagaggctgaagggcatggtgcagaaccaccagttctccacgctgcgtatttccaagagcaccatggacttcatccgcttcgagggggaggtggagaacaagagcctggtcaagtcttttctggcctgcctggacggcaagaccatcaagctcagcggcttctccgacatcctgaaggtgcgcgcggccgagttcaagatcgacttccccacccgccacgactgggactccttcttccgcgacgccaaggacatgaacgagaccctgccgggggagcggccggacaccatccacctggaggggctgccctgcaagtggttcgccctgaaggagtcgggctccgagaagcccagcgaggacgtcctggtcaaggtgtttgagaagttcggggagatccggaatgtggacatccccatgctggacccctaccgggaggagatgacgggccgcaacttccacaccttcagtttcggggggcacttgaacttcgaggcctatgtgcagtaccgtgagtacatgggcttcatccaggccatgagcgccctgcgcgggatgaaactcatgtacaagggcgaggacggcaaggccgtggcctgcaacatcaaggtttcttttgattcgaccaaacacctgagtgatgcctcaattaagaagcggcagctggagaggcagaagcttcaggaactggagcagcaaagagaagaacaaaagcgcagagagaaggaagcggaggagaggcagcgagcggaggaaagcagctgtgagcgggtggctcttccccaccttgccagcaggctctgtgctccttgaagcaagcgctccagaggctccggaagccacggctggattggagacaagatgggatcctcagaggaccaggcctatcgcctccttaatgactacgccaacggcttcatggtgtcccaggttctcttcgccgcctgcgagctgggcgtgtttgaccttctcgccgaggccccagggcccctggacgtggcggcagtggctgcaggtgtgagggccagcgcccatgggacagagctcctgctggacatctgtgtgtccctgaagctgctgaaagtggagacgaggggaggaaaagctttctatcgaaacacagagctgtccagcgactacctgaccacggtcagcccgacgtcacaatgcagcatgctgaagtacatgggcaggaccagctaccggtgctggggccacctggcagacgccgtgagagaaggaaggaaccagtacctggagacgtttggcgttcccgctgaagagctttttacggccatctacaggtccgagggcgagcggctacagttcatgcaagctctgcaggaggtctggagcgtcaacgggagaagcgtgctgaccgcctttgacctgtcagtgttcccacttatgtgtgaccttggtggggatttcttcaaagaccctcttccggaagctgatctgtacatcctggccagggtcctccatgactgggcagacggaaagtgctcacacctgctggagaggatctaccacacttgcaagccaggtggtggcattctggtaattgaaagcctcctggatgaagacaggcgaggtcctctgctcacgcagctctactctctgaacatgcttgtgcagacggaagggcaggagaggacccccacccactaccacatgctcctctcttctgctggcttcagagacttccagtttaagaaaacaggagccatttatgatgccattttagccaggaaataactgtttcttgtgacctggaactaacgtcaaagcacacaagacataataataaagacatgtacctctcctagc

SEQ ID NO: 708951 - DNA, 1393 bp, Homo sapiens
cacacgctttgtgatcccctaatacggttaatgcaaatttctagagtgatccgtctttgtttgagtactgggcaggcagcagggagagtcaggcagcagctgtgagcgggtggctcttccccaccttgccagcaggctctgtgctccttgaagcaagcgctccagaggctccggaagccacggctggattggagacaagatgggatcctcagaggaccaggcctatcgcctccttaatgactacgccaacggcttcatggtgtcccaggttctcttcgccgcctgcgagctgggcgtgtttgaccttctcgccgaggccccagggcccctggacgtggcggcagtggctgcaggtgtgagggccagcgcccatgggacagagctcctgctggacatctgtgtgtccctgaagctgctgaaagtggagacgaggggaggaaaagctttctatcgaaacacagagctgtccagcgactacctgaccacggtcagcccgacgtcacaatgcagcatgctgaagtacatgggcaggaccagctaccggtgctggggccacctggcagacgccgtgagagaaggaaggaaccagtacctggagacgtttggcgttcccgctgaagagctttttacggccatctacaggtccgagggcgagcggctacagttcatgcaagctctgcaggaggtctggagcgtcaacgggagaagcgtgctgaccgcctttgacctgtcagtgttcccacttatgtgtgaccttggtgggacacggataaagctggaaaccatcattctcagcaaactatcgcaaggacagaaaaccaaacaccgcgtgttctcactcataggtggggctggagctctggctaaggaatgcatgtctctgtaccctggatgtaagatcaccgtttttgacatcccagaagtggtgtggacggcaaagcagcacttctcattccaggaggaagaacagattgacttccaggaaggggatttcttcaaagaccctcttccggaagctgatctgtacatcctggccagggtcctccatgactgggcagacggaaagtgctcacacctgctggagaggatctaccacacttgcaagccaggtggtggcattctggtaattgaaagcctcctggatgaagacaggcgaggtcctctgctcacgcagctctactctctgaacatgcttgtgcagacggaagggcaggagaggacccccacccactaccacatgctcctctcttctgctggcttcagagacttccagtttaagaaaacaggagccatttatgatgccattttagccaggaaataactgtttcttgtgacctggaactaacgtcaaagcacacaagacataataataaagacatgtacctctcctagc

SEQ ID NO: 708952 - DNA, 2335 bp, Homo sapiens
  misc_feature (30)..(30): n is a, c, g, or t
ggagcggggcgacggaatgtggaaatgcgncatagagggcgggcggcgacggcggtggcggcgtcggaggcgcctccgggggacggtggcggctcccggcggtgaggccgcgcctgtccggggatcgtcgagggacggcgggagcttgggccagcggcggcggcggcctgggacgcaggcggagccccgcgcaggcccaaggtcccggaggctatggcagcggctaccatcgtgcacgacacgtctgaggccgtggagctctgccctgcttacggcttgtacctgaagcccatcaccaagatgaccatcagcgtggcactcccgcagctgaagcagccggggaagtccatctccaactgggaggtgatggagaggctgaagggcatggtgcagaaccaccagttctccacgctgcgtatttccaagagcaccatggacttcatccgcttcgagggggaggtggagaacaagagcctggtcaagtcttttctggcctgcctggacggcaagaccatcaagctcagcggcttctccgacatcctgaaggtgcgcgcggccgagttcaagatcgacttccccacccgccacgactgggactccttcttccgcgacgccaaggacatgaacgagaccctgccgggggagcggccggacaccatccacctggaggggctgccctgcaagtggttcgccctgaaggagtcgggctccgagaagcccagcgaggacgtcctggtcaaggtgtttgagaagttcggggagatccggaatgtggacatccccatgctggacccctaccgggaggagatgacgggccgcaacttccacaccttcagtttcggggggcacttgaacttcgaggcctatgtgcagtaccgtgagtacatgggcttcatccaggccatgagcgccctgcgcgggatgaaactcatgtacaagggcgaggacggcaaggccgtggcctgcaacatcaaggtttcttttgattcgaccaaacacctgagtgatgcctcaattaagaagcggcagctggagaggcagaagcttcaggaactggagcagcaaagagaagaacaaaagcgcagagagaaggaagcggaggagaggcagcgagcggaggaaagcagctgtgagcgggtggctcttccccaccttgccagcaggctctgtgctccttgaagcaagcgctccagaggctccggaagccacggctggattggagacaagatgggatcctcagaggaccaggcctatcgcctccttaatgactacgccaacggcttcatggtgtcccaggttctcttcgccgcctgcgagctgggcgtgtttgaccttctcgccgaggccccagggcccctggacgtggcggcagtggctgcaggtgtgagggccagcgcccatgggacagagctcctgctggacatctgtgtgtccctgaagctgctgaaagtggagacgaggggaggaaaagctttctatcgaaacacagagctgtccagcgactacctgaccacggtcagcccgacgtcacaatgcagcatgctgaagtacatgggcaggaccagctaccggtgctggggccacctggcagacgccgtgagagaaggaaggaaccagtacctggagacgtttggcgttcccgctgaagagctttttacggccatctacaggtccgagggcgagcggctacagttcatgcaagctctgcaggaggtctggagcgtcaacgggagaagcgtgctgaccgcctttgacctgtcagtgttcccacttatgtgtgaccttggttggggctggagctctggctaaggaatgcatgtctctgtaccctggatgtaagatcaccgtttttgacatcccagaagtggtgtggacggcaaagcagcacttctcattccaggaggaagaacagattgacttccaggaaggggatttcttcaaagaccctcttccggaagctgatctgtacatcctggccagggtcctccatgactgggcagacggaaagtgctcacacctgctggagaggatctaccacacttgcaagccaggtggtggcattctggtaattgaaagcctcctggatgaagacaggcgaggtcctctgctcacgcagctctactctctgaacatgcttgtgcagacggaagggcaggagaggacccccacccactaccacatgctcctctcttctgctggcttcagagacttccagtttaagaaaacaggagccatttatgatgccattttagccaggaaataactgtttcttgtgacctggaactaacgtcaaagcacacaagacataataataaagacatgtacctctcctagc

SEQ ID NO: 708953 - DNA, 485 bp, Homo sapiens
  misc_feature (452)..(452): n is a, c, g, or t
agggttgggttagtggtaacgataatataatcagaaaagctcagccgggcgcagtggctcacacctgtgatcccagcactttgggaggctgaggcaggcagatcacgaggtcaggagatcaagagcagcctggctaacatggtgaaatcccatctctactaaaaatacaaaaaaattagccgggcatggtggcatgagcctgtagtcccagctactcgggaggctgaggcaggagaatcacttgagctcaggagtttgagaccagcttggcggacatggtgaaacactgtctctactaaaaatacaaaaattagccgggcgtggtggcacgtgtatgtcattccagttaggaggttgaggcacgagaatcatttgaacccgggaggtggaggttgcagtgagccgagattgtgccactgcactccaacatgggtgacagagagagatactgnctttaaaaaaaaatggatcaaaaaaaaactcaa

SEQ ID NO: 708954 - DNA, 2089 bp, Homo sapiens
  misc_feature (30)..(30): n is a, c, g, or t
  misc_feature (1964)..(1964): n is a, c, g, or t
ggagcggggcgacggaatgtggaaatgcgncatagagggcgggcggcgacggcggtggcggcgtcggaggcgcctccgggggacggtggcggctcccggcggtgaggccgcgcctgtccggggatcgtcgagggacggcgggagcttgggccagcggcggcggcggcctgggacgcaggcggagccccgcgcaggcccaaggtcccggaggctatggcagcggctaccatcgtgcacgacacgtctgaggccgtggagctctgccctgcttacggcttgtacctgaagcccatcaccaagatgaccatcagcgtggcactcccgcagctgaagcagccggggaagtccatctccaactgggaggtgatggagaggctgaagggcatggtgcagaaccaccagttctccacgctgcgtatttccaagagcaccatggacttcatccgcttcgagggggaggtggagaacaagagcctggtcaagtcttttctggcctgcctggacggcaagaccatcaagctcagcggcttctccgacatcctgaaggtgcgcgcggccgagttcaagatcgacttccccacccgccacgactgggactccttcttccgcgacgccaaggacatgaacgagaccctgccgggggagcggccggacaccatccacctggaggggctgccctgcaagtggttcgccctgaaggagtcgggctccgagaagcccagcgaggacgtcctggtcaaggtgtttgagaagttcggggagatccggaatgtggacatccccatgctggacccctaccgggaggagatgacgggccgcaacttccacaccttcagtttcggggggcacttgaacttcgaggcctatgtgcagtaccgtgagtacatgggcttcatccaggccatgagcgccctgcgcgggatgaaactcatgtacaagggcgaggacggcaaggccgtggcctgcaacatcaaggtttcttttgattcgaccaaacacctgagtgatgcctcaattaagaagcggcagctggagaggcagaagcttcaggaactggagcagcaaagagaagaacaaaagcgcagagagaaggaagcggaggagaggcagcgagcggaggaaagcagctgtgagcgggtggctcttccccaccttgccagcaggctctgtgctccttgaagcaagcgctccagaggctccggaagccacggctggattggagacaagatgggatcctcagaggaccaggcctatcgcctccttaatgactacgccaacggcttcatggtgtcccaggttctcttcgccgcctgcgagctgggcgtgtttgaccttctcgccgaggccccagggcccctggacgtggcggcagtggctgcaggtgtgagggccagcgcccatgggacagagctcctgctggacatctgtgtgtccctgaagctgctgaaagtggagacgaggggaggaaaagctttctatcgaaacacagagctgtccagcgactacctgaccacggtcagcccgacgtcacaatgcagcatgctgaagtacatgggcaggaccagctaccggtgctggggccacctggcagacgccgtgagagaaggaaggaaccagtacctggagacgtttggcgttcccgctgaagagctttttacggccatctacaggtccgagggcgagcggctacagttcatgcaagctctgcaggaggtctggagcgtcaacgggagaagcgtgctgaccgcctttgacctgtcagtgttcccacttatgtgtgaccttggtgggacacggataaagctggaaaccatcattctcagcaaactatcgcaaggacagaaaaccaaacaccgcgtgttctcactcataggtggtaactgaacaatgagaccacatggacacagggaggggaacgttacacactgtggcctgtcagggcctggggggctggtaggctgatngaggtatagcactttgccaaatccttattgtaaatgactaatttatgggttcaggaaactaccatggcacatggatccttatgtaatcccgtatgttttggacattgtccctatattttggtttt

SEQ ID NO: 708955 - DNA, 1217 bp, Homo sapiens
  misc_feature (30)..(30): n is a, c, g, or t
ggagcggggcgacggaatgtggaaatgcgncatagagggcgggcggcgacggcggtggcggcgtcggaggcgcctccgggggacggtggcggctcccggcggtgaggccgcgcctgtccggggatcgtcgagggacggcgggagcttgggccagcggcggcggcggcctgggacgcaggcggagccccgcgcaggcccaaggtcccggaggctatggcagcggctaccatcgtgcacgacacgtctgaggccgtggagctctgccctgcttacggcttgtacctgaagcccatcaccaagatgaccatcagcgtggcactcccgcagctgaagcagccggggaagtccatctccaactgggaggtgatggagaggctgaagggcatggtgcagaaccaccagttctccacgctgcgtatttccaagagcaccatggacttcatccgcttcgagggggaggtggagaacaagagcctggtcaagtcttttctggcctgcctggacggcaagaccatcaagctcagcggcttctccgacatcctgaaggtgcgcgcggccgagttcaagatcgacttccccacccgccacgactgggactccttcttccgcgacgccaaggacatgaacgagaccctgccgggggagcggccggacaccatccacctggaggggctgccctgcaagtggttcgccctgaaggagtcgggctccgagaagcccagcgaggacgtcctggtcaaggtgtttgagaagttcggggagatccggaatgtggacatccccatgctggacccctaccgggaggagatgacgggccgcaacttccacaccttcagtttcggggggcacttgaacttcgaggcctatgtgcagtaccgtgagtacatgggcttcatccaggccatgagcgccctgcgcgggatgaaactcatgtacaagggcgaggacggcaaggccgtggcctgcaacatcaaggtttcttttgattcgaccaaacacctgagtgatgcctcaattaagaagcggcagctggagaggcagaagcttcaggaactggagcagcaaagagaagaacaaaagcgcagagagaaggaagcggaggagaggcagcgagcggaggaaaggaaacaaaaggagctggaagagctggagcgagagaggaaaacaaaacacagtcgtacagctcaaaaactcattacaaatctttccaactcaaa

SEQ ID NO: 708956 - DNA, 224 bp, Homo sapiens
tcgagctcggcaccccagcgcaactagccatttagaatgtttttacattggctgggcgcagtggctcacgcctgtaatcccagcattttgggaggccaaggctggaggatcatttgaggtcaggagttcgagaccagcctggccaatgtggtgaaaccccgtccctattaaaaatacaaaagttagccaggcgtgatggtgcaagcctgtaaccccagctactc

SEQ ID NO: 708957 - DNA, 321 bp, Homo sapiens
  misc_feature (9)..(9): n is a, c, g, or t
  misc_feature (12)..(12): n is a, c, g, or t
  misc_feature (31)..(32): n is a, c, g, or t
  misc_feature (35)..(35): n is a, c, g, or t
  misc_feature (37)..(37): n is a, c, g, or t
gctcgaccncanggtcaggtccttgagctgnnccncnagcttgtagcttgtggccagtttgaactgacgttccgggcgctccggactgatgcgcttgtgctgctcatcacgaggctgagcgtaggtataaccggcgagcacttgccaacctggcaacacttcaccggaagcctgcagttcaaagcccttggtggtattggtcacgccttcgtaagcgtccctgccgtcttcggtgctgccgacgtattgggcgaagttgtcctgcttggtcttgaacaccgcgatactggtattgagcgcaccccgtagaactcgtcgacg

SEQ ID NO: 708958 - DNA, 289 bp, Homo sapiens
ggatggagagaaaactaagcactgctaaggtaatagatacacgggaatacgggagtcaagaataaagcacttcgacctaacaatagagatccagagatctagacaggggtcacgtgggctagcacccctcagggtcgtatatcctggggcactgcaggctgtcaggactgcctgggcccttacttggtatttggcattagtcaggcattatagggaacaatctttgagtttttcttgcttgactgtctgctactggatcgtctcggggccgtcttgttttcacaatctc

SEQ ID NO: 708959 - DNA, 248 bp, Homo sapiens
  misc_feature (21)..(21): n is a, c, g, or t
  misc_feature (42)..(42): n is a, c, g, or t
  misc_feature (87)..(87): n is a, c, g, or t
aaaacaagttcttatttttangcctttgttcatttacttaanccaataaatatgcattgaatgcctgctttgcgcttatgctaggcnattagggtaaataatacataagatcggctgggcgtggtggctcatgcctgtgatcccagcactttgggaggccgaggcgggcagatcacaaagtcagaagatcgagaccatcctggataacacggttaaaccgcgtctttactaaaaatacaaaaaaaaaa

SEQ ID NO: 708960 - DNA, 301 bp, Homo sapiens
ccgagagcacttattactggccagacaggtactcagagcctgggtaaggatgcaaaagggaagagtggggagttgggcccctctgtatattgtccctgtctctctggcatctacagattggggtggagcatgtggtggtgtatgtgaacaaggctgacgctgtccaggactctgagatggtggaactggtggaactggagatccgggagctgctctctgtgcccttgaggtgaacgcggggtcaggcagggcagctgctgcagagggtggggctggatgggcacccagagctctgctttgt

SEQ ID NO: 708961 - DNA, 398 bp, Homo sapiens
agtgggctctacgctccatcttcggagtgatccagctgctgtgcttgctgagggccccgtcatgggctaatcatgggactggaggcggaaggagtgtgaagatgcctctgaggagcccgaggagaatgacgccaaccacggcgagcagcaaaagaagacgcgggaccggcagatccagaagatcactaatgccatgcgggccttctgccttcaccaacctgctgctcgtgggctttggggtgcctgcctcattcccacccgtgcctctccagatcctctccttcatcctgcacacaaatcgtgcgagcactcatccactctgcttgtcgggggcctgtacgctgcctgtgtacccctccaacccagtccgggcagcctcacgagactgccctctctga

SEQ ID NO: 708962 - DNA, 256 bp, Homo sapiens
tatgagcggtctgaacattaagtttgccctttgggagttcctgtcgtggcgcagtggttaacgaatccgactgggaaccatgaggttgcacgtttgatccctgcccttgctccagtgggttaacgactccggccttgccggtgaggctgtggatgtacggttgcagcacacggctctggatccccacgttgcatgtggctctaggcgtaggccgggcagcatgtagctcacgattagaccccatagccgtgggaac

SEQ ID NO: 708963 - DNA, 393 bp, Homo sapiens
  misc_feature (33)..(33): n is a, c, g, or t
  misc_feature (246)..(246): n is a, c, g, or t
ttctaatatatctctctatacgcatcctgtctnactggaagaaccctgatacggttaggctttgtgtcctcattcaaatctcatcttgaattgtaaatcccataatccccataatccccatgtgtcaggggagggatcaggtggaggtaattgcatcatgggagcagtttcccctgtgctcttctcacgatagtgaaagagttctcacaagatctgatggttttataaggggctcttccccctttntctgcacttccccttcctgctgccttgtggccttgtgaagaaggtgtcttgcttcccctttgccctcctccatgattgtaagtttcctgaggcctccccagtcatgcagaactgtgagtcaattaaacctctgtcctttataaatta

SEQ ID NO: 708964 - DNA, 192 bp, Homo sapiens
caagttaggactacgttctgtccagcacagtggttaataactatgggctctggcagtcacatggcctggcgtgcaatgtccctgctactatcccacataatcttgctgcaaatttcttaaatactcagcctcagcgttctccactctgctaaaagtggggattatacatgaatttcgtacccttcatcagta

SEQ ID NO: 708965 - DNA, 411 bp, Homo sapiens
  misc_feature (126)..(126): n is a, c, g, or t
  misc_feature (217)..(217): n is a, c, g, or t
aaatgttaggaagcttgtcagctgaatgagaggaggtgccttctgggtatctctgtgttggtgtatctgtgccattggctacagaacaagaaaaaatactatttgccatgctattaccttggcagntgtgtaggtgatatcatctggacttgcaatgaaaaggttcatgggttgtcaaatcccccataatcatatatcgagtggtatgagatatatncaaacatagcgaccaacacatttctattactagtgatcaaacaaactgccaccgagttatcaaaacaattgtttttgcgcacacagttgcatgcatggcaagctgttaacctctgggtggcattttcattatgaatttgttcaccacctgtcaaacttaagctacaaaataaatgcatttatcaaaaacagaaa

SEQ ID NO: 708966 - DNA, 310 bp, Homo sapiens
  misc_feature (1)..(1): n is a, c, g, or t
ncaggtcagccgtcttccatctcagcctccctgagtagctgggactataggcgccatcatcatgcctggctaattttggtattttttgtagggacagggatttgcctgttgcccaggctggcctcaaactcctgagctcaggcaatccatgtgccttggcctcccaaagtgctgggatgacagcatgagccaccatacctggcctattctccaatatttgctactgtcaatctttctttttttttttttaatttttggggaacagggtctacactctatctcccaggtggacagcaagacccttaatcac

SEQ ID NO: 708967 - DNA, 392 bp, Homo sapiens
  misc_feature (208)..(208): n is a, c, g, or t
caatagcagcaggcatatcaagactttatagctaatcactgttgtggcaaagtagtcacataaaataaaggatcattttgtaattgttgttcagcacgagcgacgcgctaaagaagagtttacgattaagactcaacttacagtaacacccagtagggacagttcactgagaatttgttcaaactgctggaaagtgattgcaacgcanatttcacctagtagcatcattatttgtcggtacaacacgccatgctgcaacggtaagaccttcagctgtaatttctttgttcagaatatttttggcattttgagctaaagcagggttcatattttaaaatccagtacccgcagcaaaaatctcagtaagattagtaccttacttctgagcttcg

SEQ ID NO: 708968 - DNA, 1073 bp, Homo sapiens
  misc_feature (47)..(47): n is a, c, g, or t
  misc_feature (66)..(66): n is a, c, g, or t
  misc_feature (69)..(69): n is a, c, g, or t
  misc_feature (136)..(136): n is a, c, g, or t
  misc_feature (146)..(146): n is a, c, g, or t
  misc_feature (268)..(268): n is a, c, g, or t
  misc_feature (270)..(270): n is a, c, g, or t
  misc_feature (410)..(410): n is a, c, g, or t
  misc_feature (454)..(454): n is a, c, g, or t
  misc_feature (953)..(953): n is a, c, g, or t
  misc_feature (992)..(992): n is a, c, g, or t
attcctggagccccgagccggaacacgttttgtccaggagaaccagntatcggggcagccgccacngangcaggagagaaccccctggagttctgcggaccagccccattccagaacatgcggcaggtgattcagnagaaccctgngctgctgcccgccctgctccagcagctgggccaggagaaccctcagcttttacagcaaatcagccggcaccaggagcagttcatccagatgctgaacgagccccctggggagctggcggacntntcagttgtggagggggaggtgggcgccataggagaggaggccccgcagatgaactacatccaggtgacgccgcaggagaaagaagctatagagaggttgaaggccctgggcttcccagagagcctggtcatccaggcctntttcgcgtgtgaaaaaaatgagaacttggctgccaacttcctcntgagtcagaactttgatgacgagtgatgccaggaagccaggccaccgaagcccccaccctacccttattccatgaaagttttataaaagaaaaaatatatatatattcatgtttatttaagaaatggaaaaaaaaatcaaaaatcttaaaaaaacaagcaaacagtccagcttcctgtcctcctaaagtggcccctgttcccatctcccgggccagacagctgtccccccgtcctcctccccagcccagcctgctcagagaagctggcaggactgggaggcgacagatgggcccctcttggcctctgtcccagctttctgcagccagacggaaaggcggctgcttgcctctccatcctccgaaaaacccctgaggacccccccccatcctcttctaggatgaggggaagctggagccccaactttgatcctccattggagtggcccaaatctttccatctagggcaagtcctgaaaggcccaaggccccctccccagtntggccttggcctccagcctggagaagggctaacatcagntcattgtcaaggccacccccaccccagaacagaaccgtgtttttgataaaggttttgaagtgaataaagttttaaaaacta

SEQ ID NO: 708969 - DNA, 248 bp, Homo sapiens
  misc_feature (70)..(70): n is a, c, g, or t
gttcggcacgatggggaagacgcagaaggtgaaggtgctcacgggcacgggtaacgtgaacgttattcancctaactatctgcggcacgcgtgacttcctgcagactttccgccgtggctgctgggttcgtgatgctggacctcgacgtctgcggggcacccccggctgagactttgccctgaacttgtccgggtagggagggccggacgatgtggcctcccagacctcctgacctgggtggttgagg

SEQ ID NO: 708970 - DNA, 376 bp, Homo sapiens
ggaagggggatgaggtagcgcgagtagccgctaggcctctcccacagtaaagacaagtgacccaaccaagtcgttcctcagtcttggtaaagcaagaagaatgacacccatagtggggagactgaaaggcaataatattggcctagcgtcccagggccgggcccatagtaggtgctatactaatggttatttcccatcgttctcccactggctttatttttcccttctggttctgtcttctatcttctggcgtcggatctttgggtggtgctggccccttctctccccgtgatctcctgcaccagcctctgcccttctgggtggaagggactgtgtagacctcgggcgtgttttcccttggggtttctcgtgagcc

SEQ ID NO: 708971 - DNA, 1782 bp, Homo sapiens
  misc_feature (249)..(249): n is a, c, g, or t
  misc_feature (1782)..(1782): n is a, c, g, or t
ggctgtcaggagagtgagctcactgtctgttatcacacctcccgagggagccgtgacgcttaccagagggcaggtgaatccagtcctccagtactgggtatgatgggatgtcccagagtctacggggctgagttggtttgagctctcgttcaagagtgcaagctggggggcctgtgctgttgccagggccctttctccgtgtagacgcgccctcagcagttcgctgtctcgcgtcgaccgatatccaanagcaggaggattgatacacgttgcacacggcgggactggcagcgagatagctcaggcatggctgtgccatgaggccttgtgaggtcccaggctgtccatgccatggcgagcacctagctcatgggaggctagtgcgttgtaccattgttgatccttgcacttgggctctcaatcgatagtcggagtgcgcgctacctcacttgcacccagtacgttggtccaggtgaacgaacatagcccatccagcgaagactcctgaacgccagtggtctcgacattgcctgacccaaacgtaatagggcatgtaggaccgcggccaatgggattggatggccctacgccactgagattgagaaggcgtcgctagttctaactcggggtgttaaccttggaattgaccatgcgtactgggcattcaacactcgtacatggggtgccggagcccctgtgataggacgtagcattttcgctaggcagcgcggaatcacttggcgttgggaccgcacttagcccgctcccaggcgaactaggcgaccattttggctcggtccccgaggagcgacacccaattacttagccgtcactttggggtgctaatactttatctaggctttcgcaggacataggtgcgctttagcgcaaacacgagacaaacggtcgtggcaccggttgctaggggcaacgaaggcactcgaggtcggagagggggctcactggcttgtctggagggccccaaagaagcattacccggcggaacatcggggttcggactacacctctggctgtgagccgccttgcgagttccaagcgggtcctcgagcccgacggcaccgcggcgctaggcaagagaaaccggtgctcaaaattagccccggtagcagtggacagccgagtggcgcaacccaccccaagcggagatcgcgccaagtcgcgactgaagccacacgggcgggagaccaaggggcagatacccgacgcgccggtctaaacgagccggcgcaggcacggcgcggcgcgacagggtgggaacaccacactgagtcctgggaagggggccgcatcaccacaaaaataccgagcgcctccagagggaccgagagtcgccagctgggcacgtgccgggaccaccccgggaccacgaaccacccgcctgaccccccggggaagccctgcccgaagagaggtggctccaggggccagaggccccccggcggccacacaccctcacaactggccgcatagtcaggaccccacaccgtacaccagcgtacagtgcctacagggcaagagccaagacgcacgcacaccagcaagacgacacccatcacgccagccacgaagagccagacacagacgccaacacacatcagctgacacgtgcccacacagccaccccacacagcgacgtgcacggactgacatacagacgaaacaccacacaaccagcagcacccaaacaccacgcaggcgacagcaccgatcagatgccacagtaatcgacaggatgacagacagcagacacatcgacactan

SEQ ID NO: 708972 - DNA, 841 bp, Homo sapiens
  misc_feature (841)..(841): n is a, c, g, or t
cggacccgcgggcaggcactgcccgggctggacgacgtctggccgtgctcccggcgaagggcagcggaggagcggcccagaagcgcgcagatagggcactggcgaaaccccgggacagtccctctccgtgcgggggcggcgcgaaagcagtcccatccctcggtggtccctgggctgctggtgtgactgctctggctggttccctgctgcgcagtagctcccctgtagccgggctgcaccggagggcggcgagatggtctgcgcgcgtcggcctcctgctgcggcgcccttgcagcttgctacttgtggtggccaccttggacgcccagccctgcgggagccggctggatggcccagtgatgctgcgcaatggatgtgcgtgagggcatttcctaggagaaagtacgggatacctcaaattgaacgaggtccccgaaaggctcccaagcttccactcgaattccagcggatgcccatcgagaagcggtttcatgtgtggtgtcccaggcttacccttgtcaagcagggcggtgttgggaccggcgccaacccttgcggccagaattgacatcgtccccctgcatgcgggggttacaggaataccgaacaggttatgcgtgccctggggcctggagaagcgatcacgttggactttgattatggctaggaccacccgggaagccaaagaattgagcgcggtacgaaaccgcttttggccaaaaaggcaacgggttaaacaaagtgggtacaaaggccagcacccgtcatcctaacccgccctggggtgaaactgggtccttgaggcattcttgccgggggaggccgggcaagattacagggn

SEQ ID NO: 708973 - DNA, 1393 bp, Homo sapiens
  misc_feature (30)..(30): n is a, c, g, or t
ggagcggggcgacggaatgtggaaatgcgncatagagggcgggcggcgacggcggtggcggcgtcggaggcgcctccgggggacggtggcggctcccggcggtgaggccgcgcctgtccggggatcgtcgagggacggcgggagcttgggccagcggcggcggcggcctgggacgcaggcggagccccgcgcaggcccaaggtcccggaggctatggcagcggctaccatcgtgcacgacacgtctgaggccgtggagctctgccctgcttacggcttgtacctgaagcccatcaccaagatgaccatcagcgtggcactcccgcagctgaagcagccggggaagtccatctccaactgggaggtgatggagaggctgaagggcatggtgcagaaccaccagttctccacgctgcgtatttccaagagcaccatggacttcatccgcttcgagggggaggtggagaacaagagcctggtcaagtcttttctggcctgcctggacggcaagaccatcaagctcagcggcttctccgacatcctgaaggtgcgcgcggccgagttcaagatcgacttccccacccgccacgactgggactccttcttccgcgacgccaaggacatgaacgagaccctgccgggggagcggccggacaccatccacctggaggggctgccctgcaagtggttcgccctgaaggagtcgggctccgagaagcccagcgaggacgtcctggtcaaggtgtttgagaagttcggggagatccggaatgtggacatccccatgctggacccctaccgggaggagatgacgggccgcaacttccacaccttcagtttcggggggcacttgaacttcgaggcctatgtgcagtaccgtgagtacatgggcttcatccaggccatgagcgccctgcgcgggatgaaactcatgtacaagggcgaggacggcaaggccgtggcctgcaacatcaaggtttcttttgattcgaccaaacacctgagtgatgcctcaattaagaagcggcagctggagaggcagaagcttcaggaactggagcagcaaagagaagaacaaaagcgcagagagaaggaagcggaggagaggcagcgagcggaggaaaggtaccttctgcgggacgggccctcggcgctggtgtccggcacctgggagtgtgcgcagacccgtgtgcgtgtgtctgcatgtattcctgtgcgtgtgtgtgtgcatgcatgcttgtgagcttgtgtgtgtacctgtgtgcatggacgcacgtgtgccgtgaaccggtgtgtgtactttgtatgtctctatgtgcgcccgagtgtgtgcctgagccctgtgtgcacgtgtgcctgtgtgtgcgtgcatgtgtgtgagctcgtgtgtgtac

SEQ ID NO: 708974 - DNA, 474 bp, Homo sapiens
gaagagactacttggtgccatggggtaggggtgagggtataagtagatcagagtgggaagacctcagccttgggtggcttgtctctgcttcttgccaggtgggagggcctgtccacaccctggatccccgtaccacagtgccagccatgcccttcccctgggctaccattgtccctttcctcacccagttggtagaggagtcaggaggtgggaggccgtgggctttggttttataatgtaaccactgtgggggtgggggaggatggtgaaccaaagcccatgcccttcccctgggctaccattgtccctttcctcacccagttggtagaggagtcaggaggtgggaggccgtgggctttggttttataatgtaaccactgtgggggtgggggaggatggtgaaccatgtatttcagtgaaatatttaatatatttaaatatcaataaaatcaaactctttgtaaaaaaaaaaaa

SEQ ID NO: 708975 - DNA, 796 bp, Homo sapiens
gctatggttgaatgagtagcctatcattcaacaatagccctggcgaagctaaacgtaacaatactgcaggccactactcatgcacctaattggaagcgccaccctagcaatatcaaccattaaccttccctctacacttatcatcttcacaattctaattctaactgactatcctagaaatcgctgtcgacttaatccaagcctacgttcatcacactgtctagataagcctctaccatgcaacgacaacacataatgagccaccaatcacatgcctatcatatagtacaacccagaaccatgacccctaacaggggcccctctcagaccctccctaatgacctccggaactagccactgtgattatcacatatccacaactccataaacgactcctcaatactaggcctactaaaccaaacacacgtaaacataataccaatgatggcgcgacgtacacacagagaaagcacgctacccaaggacaccaacgacacccgaccgtgtccaacacaacgggacatcgatacagggataaatcctaacagcacagaccctccaagaacgttcaacccctaacacacgcaagaatctctaccattgcagccctataccagcgccaggcctagctgccctacccaacccaaatcacagaagggcgaacggggctcaccaacaagagcatcaaccccggtaaataccacgtaaggagagcccgaaccaccgaaacacatccgtagtaaccagactgacgggagtcacaacccatgagcccccaacagcaaatcgaaaaaag

SEQ ID NO: 708976 - DNA, 186 bp, Homo sapiens
ggctctattttcgataatgggacttcgactcatcatatcaagcctgtatgtaccctgcgtgttatttgagctattatgatcacgagcttgttagaggtacattctctttgctcgactctcagaattttcttttctgtgtgagctcttactctcttggtttctgtaattgtctttgtttctgctttg

SEQ ID NO: 708977 - DNA, 1439 bp, Homo sapiens
aggacaaagtgggaaaaggacataaatagggaggccgaggcgggtggatcacgaggtcaggagatcgagaccatcctggctaacacggtgaaaccccatctctactaaaaatacaaaaaattagccaggcgtcatggcgggcgcctgtagtcccagctactcgggaggctgaggcaggagaacggcatgaacccaggaggcggagcttgcagtgagcggagatcatgccactgcactccagcctgggcaacagagcaagactccaaaaaaaaaaaaaaaaaaaaaaaaaaaaaattgggggggggcgtcgggcccggaaaaggtttttaaaaccatgcggtggggcgccgggggcgcccagtagggaagtgtggaccaggcgccaaacgcgtgtccctagggaaactcgtgcgcagaacaacggtgcgggatttctccccaattaaaaagccgcccgcggggcagccggacgcgttcgtgaacaaccccaaggggagtcagaacgccacacgggggctctacacaccaagggaggcccccaaggagaggctccaagataataaaattaaccgcgggcagggggtagggtgccagaacgcgaaagcaccgcgcagcagacaactgagggacatcaagacaacaagagtcagcagaacccggcacgcaggatgatcgagccacgacgcacgcgcgggacccccgaccacagcagatcatgaccgcgcaccacacacacacgccaccacaggacaacgcgaccaggcgaacaacgactaccaaggaaagcgaagccgggagatgaacagacagcgacacacgcacgacgcacgccacgcgcgcgcacgctgaggacgccggccacgcggccgccaccaccagcagacagaggccacagcgatggatatcgcgcaccagcccccgagtggtcacgacacacagcgcagaggacggacacgacagcgcgacgaacgcacgagcagaagcgcgcgaagaccgaccaggagaggggacaacccgcgggcaaaggactgaagagaagacgaggatgaagggagatgagaagggaacggagggtgaagaagcagagagcagaagacagtaatgagagtagaagagggaaacagagtaaggacgaaggggaggagcgacagggagaaagtaagggcagcgatgatgaaaggtacgaaggcgaagaagaaggagagaagagaaaagaagacgaccaagagagagccagcagaccgagagcccacaaacaagaccagacgaacgagagagcacacaccgagcaagcgacagagaacaacgcacaagcagcgaggcagaagcagaaaggcaagagaccgaaagtcagaaacgacaacgcaaaaacacccagcagcaacagccacaagcagaccacagaagccgcaagagggcacaaaagacccaaccgacga

SEQ ID NO: 708978 - DNA, 100 bp, Homo sapiens
gaaaggggcccccctttttttggcccccttgaaggggccctccccccccctaatggcccttttttccttggagatgaaaaaatatgagggggccctgcca

SEQ ID NO: 708979 - DNA, 840 bp, Homo sapiens
gccatgcagcgtgacggtgaaggcgctgcagggccgtagtgcagtctgcagtgtgccagaggacgagctggtgtccagctgaagcggtggctccagaagctgaagtccagtgtgccagagggtgttgtcaaggcaggcctgggatgggaaagagtctcggattatagcatcgtggtccaagtccaagctcaatctagtggtcaaacccctggagaaggtgctacgtagaagaaggcgaggcccagaggctggcgattcgccaccgcgagaggtctggcagctgatctccaaagtctttgtgccgccacttcagtgccgggcagatgccagcagggtcctggaacagctaccagagggattacgagaggtccctgaagtcgcctgacgctagggacgaacatcggaacagggttgggccagcctgcttcctgcacccctgaagtgactgagacaatggagaagcggcttcctccaaaataagaattctcgggagcatgggggaggttgccaaacgccaaggctacccggtgtcttgtcgcaacgtaaggtgtggtctccttgttgcaagcttggggctcatcatcggtcatacgcttggattgtcacctggctctggccaagggtgctaaggcagctccatcacaggtttgacgctaggattgcttcacacccctctagaaaatgaaaagccggtacaagcagaagggcccgggcgataaagttggttacccccagtggaaatccacggctctaaaaatgcttggtttaacagtgggaaggggccgcgtgaaaacttgggctcgactttttttttcccctggatataccgaggggggcccg

SEQ ID NO: 708980 - DNA, 1136 bp, Homo sapiens
ctcaagtttcaagacaacaaggctccatttctgtgttattcagagaaaccatgaacatcagttctatgggacagtcaggccagttcaacaccagatctgatctgccatgacacctgctgctcggccctcagataaagcccagaatccagtgtcctctcccccagcccaggctggccccacacccacaactcacccacttcacccatgggaacatcatgcaacatctcgccacagaggggtcagggagcagctcacagccacacgacgtgcaccaaggagacacgatggcaatatacagatgcaccatggagtacacaagaaagacacagacctaagtgggaagagatccaaatgctagtaacactgcaggtggatgaggacatcccagaggaatgtcagcggacgtcagccagacgcaaggcgagctgagggacccccagaaacatgacgtgggctctcagatacgcaagtctgagtgcgatgaagcagcacacaaacagcacagcgctaagtaaaccgagcccacatcgatctagctcaaaggagcccatcatcacaacagacggaagggagcagccaggaatacacaggatcaatagcaaggcaaacccagggaacggggacccacaacagtgaggaaatgacgcaccaaacgaagagtgaacaaagttagaacaggcatagacacatacaacaacaacacacgacaaagacaagtaacacgagagaagaaaaatcaagcggaaaacgaaagaacaaagacaaaccagacaaaacaacagagaacgcaaagagcacaagaacaagaaaaaagaacgcaaaccaagagagacacaagacacaacagcaccacaacaagaaacgacaaagacaagaaggacggaaaacaccggaagagaggcagagcagggaacatcacacagaacgaaaaagaaaacaaagggccaaagaaaacacacacacgaagcgaacccaaaagaacaggaaccgaaacgcacaagaaggagcagacacacacgaaaacagacaaagaaagagaaagaaaaacgcgagcaccaaacaggcaacaacaagaacacgaacacaaagaagcacaccacaagaagaagaaaaagaagacgccagaaacacgacaa

SEQ ID NO: 708981 - DNA, 364 bp, Homo sapiens
agtggcaacaaagggtgtcgggggtgggaaggtttccaagtttgcccagaaaggttagaggggtaaatgcaaattttccctaaaacctgcccccccctttttaatcagggggggaagaagggttttcaaactgtttgtttcaattggccctttaagtttagggggaaaaggcgggtttatgatccccatgctttgttcacccctcagaaggaaggggaaatgtttttggggcccccttgggttttttttttggggggggggggttttaaggttttggtttttaaaatcgggtctttttaaggggaaccacttggcccaaaatttgtcccagaattttggggccccttaaaaaagtttaatggga

SEQ ID NO: 708982 - DNA, 236 bp, Homo sapiens
taagggaacccttggggccttttttttgggggggggggttttcttttttgggggggatttgtttttttttccggggttttccccccggggttttttttggggtttttttttttttttttttttttaaaaccaggttttccccggggggcccgggggggggtggggtggcccaagttcccccccctgccttccccccggggccaaaaggggggcccccttttcccaaaaatttttta

SEQ ID NO: 708983 - DNA, 503 bp, Homo sapiens
gctcgctggttctccgagtttgtcttgacttgtagcaaccttggggagaaatgagattacacacttcttaggtgcaaagaagttttatttgtccccctcagtagagagaggatagacgcgatctggtgcatattagcatgaggaagcctggacgggacagccaggagtcctctttatatggtgccagtcatgcacggcaaagtggcttatccacctccgcaacactcccattgcaactgtctgaacgcacacgtgctccattgtccgggcttgtggctgctttgcgcggaggtgactatgatttctcatttactgacgtatcaacaatggacgggggtgggtctctccaagctgctttttagcggtgaacagtaggaccatgttttagttagacggctgtagagactaggtacttctaaagttttacttaagattttgtttttagtaaaaaatagttcttcagttgttttgcttgtatcttttgtttgtatgctgatgatgac

SEQ ID NO: 708984 - DNA, 163 bp, Homo sapiens
  misc_feature (36)..(37): n is a, c, g, or t
  misc_feature (105)..(105): n is a, c, g, or t
  misc_feature (132)..(132): n is a, c, g, or t
gcaggggtcgtggggatgcactgagggccgcctgcnnagttaccacaggggcgcccgagagtcactggttcacattctgaacaccgtcgcttggaagacactgcnttccttgtttgcgtgttccaggagganggaccgccagctggggtcttgttttatctgc

SEQ ID NO: 708985 - DNA, 336 bp, Homo sapiens
atgatcaaatgccatatgcacatatgaccaattaactacctgtctcctatcctttaccaatacattacgcgatacccgggggccatacacccctgacacagtcttttctttcatctgccccatccctgcttgtccaaggtacaaacttagacaacagatccttgctgtcctgagtggtaacttgctgtagcctagggctctgtctgctacctgggtcccgatctgaactgggcgtgggaagcaaagcagccatgggggcaggagacctccctcagaaggtgtgagggttcaggcccctgtaggattgtgggggtgagggtccatgccccacctctg

SEQ ID NO: 708986 - DNA, 499 bp, Homo sapiens
gactctagaggacccgagtgtctcgaaggacagttggatccaagccaggcattgctgcaggttctaataattcttgctagatcatgagagagctagacaaattagaatagattgacaatagtctttaaactaatctctgcaaggcatatcagctacaggaccagctgtgcttcccgatgacccaagagatgttcctttgccaatgtcatggtctgtgttgatgcaaccatgttaacagaaactccttcaaggcaggatgtaccgttttattaactatctcaggtaccctaaaatagagcctcagcacgtggtggcatgcttcagtggtttcatgatgtgctcacggaatgcatacttatgctagtgtcgcctctgacttatccccagccttctaggtgcaggaggatcagatccagacatcgaaggatgtggtcacttgtaaggatatatgatcattcttaagacacactttgtcttgacgaaacacctcgggtacccg

SEQ ID NO: 708987 - DNA, 104 bp, Homo sapiens
ttacaacggaagggaaatctgtctaaatgcaccatgaaactttgagtgaacctcttgctgaggacaatgagggcttcaatgtcaagaatgtgtctgtcaaggat

SEQ ID NO: 708988 - DNA, 1026 bp, Homo sapiens
  misc_feature (58)..(58): n is a, c, g, or t
  misc_feature (116)..(116): n is a, c, g, or t
  misc_feature (131)..(132): n is a, c, g, or t
  misc_feature (154)..(154): n is a, c, g, or t
  misc_feature (171)..(171): n is a, c, g, or t
  misc_feature (278)..(278): n is a, c, g, or t
  misc_feature (294)..(294): n is a, c, g, or t
  misc_feature (308)..(308): n is a, c, g, or t
  misc_feature (310)..(310): n is a, c, g, or t
  misc_feature (313)..(314): n is a, c, g, or t
  misc_feature (317)..(317): n is a, c, g, or t
  misc_feature (366)..(366): n is a, c, g, or t
  misc_feature (392)..(392): n is a, c, g, or t
  misc_feature (394)..(395): n is a, c, g, or t
  misc_feature (400)..(400): n is a, c, g, or t
  misc_feature (443)..(443): n is a, c, g, or t
  misc_feature (469)..(470): n is a, c, g, or t
  misc_feature (479)..(479): n is a, c, g, or t
  misc_feature (484)..(484): n is a, c, g, or t
  misc_feature (490)..(490): n is a, c, g, or t
  misc_feature (494)..(494): n is a, c, g, or t
  misc_feature (507)..(508): n is a, c, g, or t
  misc_feature (512)..(512): n is a, c, g, or t
  misc_feature (520)..(520): n is a, c, g, or t
  misc_feature (531)..(531): n is a, c, g, or t
  misc_feature (535)..(535): n is a, c, g, or t
  misc_feature (562)..(562): n is a, c, g, or t
  misc_feature (573)..(573): n is a, c, g, or t
  misc_feature (601)..(601): n is a, c, g, or t
  misc_feature (865)..(865): n is a, c, g, or t
  misc_feature (994)..(994): n is a, c, g, or t
aagaatacaaacacaaaataactcttaatttaaggagaataagaaaacatcaggtgantcttgagtactgacaaatacagccttcacctacagtaaaaattaagccaatttcaatnattttggtcatcatnncgagtctttcttcccacttggnggcttgggcccaccagntggttttgccatgatgatctgatccactctaagtacagtgactgcagcattagtagcgagtttgatagccgcgatattttcgccaggtagaggatctagaatgagcnagcttccagcatgtgncttgtacagcaggnanttnngcntcaatatcgtaatccaagcgtttttagtttccttctgtgatgtagctgnataaagtgttagagattacttcattngnnttatntccagagttttctgccagtgcgcggggaatagcttcaaatgcntcagcaaagcttcgttagtaggatanngttcaagtncaggngatgtntctncatatgatgtggnntggntggcgaantcaatttgtgntgcnccacctccgggtacaagagcgtttatnccttgtgagancgttgtggaagtattgaacaccatcgtntactgccctttctatgtcatccatcagattgtctgtagagcctcgaagtactatggtagaaatggcgccatcttccttttcatgcttaaaaaccaccacctgagtatctccaacttctgagaggtaaacactgtcacagtgtcccatttcttcaaggacaggaggtgtcaatctaggaagagctgtagcaccaacagttttacaaagtcttcggagatcccattttgagtttagcctcactaacatgatattatatttatttgnataatgaagagccatgtctgccactttgccacctgttactacgacatttgcaccagtatcagcaatagctttgacttgtgcatccatgaggttttcttctcccttactaaaattcatcaattcttcagnagtctttatcaaaactgttcccttagtttctg

SEQ ID NO: 708989 - DNA, 146 bp, Homo sapiens
  misc_feature (27)..(27): n is a, c, g, or t
cgatgatggtacatcttagtggattcnaggccaatcatcctcccaactggtggctttcattagttttacaaagacagtttagggttggggagggctattatcatttaaattataaatttctcccaaagttagctttggccatgcct

SEQ ID NO: 708990 - DNA, 293 bp, Homo sapiens
tcaatacctgcttctataacccattattctgttctagatgtcaaacatgctttctttactattcctttgcacccttcatcccagcctctctccactttcacttggactgaccctgacacccatcaagctcagcaaattacctaggctgtactgctgcaaacttcacagacagcccccattacttccatcaagcccaaatttcttcctcatctgttacctatctcggcataattctcataaaaacacacgtgctctccctgccaatagtgtccgactgatctctcaaaccccag

SEQ ID NO: 708991 - DNA, 157 bp, Homo sapiens
tcccacattgacatgtccagctgtcaatgcccacatacttcttccactgcttgaaccactggctgtcaataagataccactgcgccccgcgttggagtgtggcctcattaagggtccaagctcggacttctgagtcattgcaacacggtctctcagt

SEQ ID NO: 708992 - DNA, 834 bp, Homo sapiens
agcggaggggccggggcgcgggcgggtcggtcgtggtgcggcagcagcggcgtggaagcgcgggggctggagctcgacgggcgctgggctccggggcggtggcggacggggagggggccgccagggcgggtggctgcgggatgcgtggtaacggtgcgctggtgccgggcgcgtaggcgggctgctggaggcggactggcgggtggcctctgctcatttgtctcgggctctgctccatattgtgctgcgtgctgggcgcttgacgtgtgagccgcctgtggcgttgtcggcctgtgctgcagtggcttggtaggctggtgcaaggctccggccgaggccctggtggaaactagcgcgcggggcataccgggggcggctcaggctcggagcaggggacgcagtgcacctgagtagatggatgggccatgaggaggcgggagcggaggaaaacggggatggggacgtggtcagacagacccagccccatggttgagcaggagggaccgagacaggccacgggtgcgccctcgggagaggccgggctggcggggtgagaagtcttggggatccgctctcttgggactttcaagcccgggttgcccgggtctggttgagggaaagaggggttcctagacgacgacaactggaatcatgacgtcggacactcctaaaatcggttgagccacagcacacgatggggcctttccgcatctcacatttttaaagtccaattaatagcaccaggacaggcacactgaagcgtgaactggataacccggcagcaccagagcttgcctttgggagaactagagaagatggtcggataagcaacgt

SEQ ID NO: 708993 - DNA, 841 bp, Homo sapiens
  misc_feature (36)..(36): n is a, c, g, or t
  misc_feature (72)..(72): n is a, c, g, or t
  misc_feature (94)..(94): n is a, c, g, or t
  misc_feature (104)..(105): n is a, c, g, or t
  misc_feature (108)..(108): n is a, c, g, or t
  misc_feature (128)..(128): n is a, c, g, or t
  misc_feature (188)..(188): n is a, c, g, or t
  misc_feature (206)..(206): n is a, c, g, or t
  misc_feature (225)..(225): n is a, c, g, or t
  misc_feature (231)..(231): n is a, c, g, or t
  misc_feature (258)..(258): n is a, c, g, or t
  misc_feature (338)..(338): n is a, c, g, or t
  misc_feature (347)..(347): n is a, c, g, or t
  misc_feature (358)..(358): n is a, c, g, or t
  misc_feature (364)..(365): n is a, c, g, or t
  misc_feature (377)..(377): n is a, c, g, or t
  misc_feature (841)..(841): n is a, c, g, or t
ctccccaccccacgcgtaccttttcccgctcctgantctgcgagagtttcagcagctaccaatctttgctancctcactctttttgggtggtcncctgctctcnnccntccctgctctcgcggttggngaggtgggtgggcggggagggggcggcgggtgaggcccgccctccgctgacctctctccntttctcccagggcttccngctgctggcttggtttccnttcaancccacttcccacaagtctccagggcantgtcacttcctccaccctggttctcttcttccagcatcctcagctcctccattctcctgcggcttctccactatcttttntaaaggttnttctagctttntggttnnttatcttctgcncacacctcccacccctgctggggccccaggtcagcgccggcccgccgcgtggcgtcgggtggtggcgggtgaggtggggggtctgggggaaggcctttccgcagtcatcgcacttgtaaggccgcttgctattgtggaggtggtgatgctgcagaagcgtggaggagcggcagaagcccttgccgcacacggcgcacctgtagggccgctcgcccgtgtgggagcgctggtgctggatgagagtggaggagcgattgaaggtcttgccgcagtcggggcagctgtaggtgcggcctggcaggtgggtgcgggcgtggatggccagcaccgagctctggccaaagcgcttgccgcactcagggcacttgaagggcttctcccgggcgtggctgcgggcatgggggataagggccgaccgctgggagaagctcttgccgcagatgccacagctgaagggcctctgn

SEQ ID NO: 708994 - DNA, 1180 bp, Homo sapiens
gttgcggggctcttggttggcggtttccgtgctcgattggggtgggtttgtggtggcttcccgtgtgtggccctttgtgggttctccttgttcctcttggtcgcctgtgtgcctgtattttcttttatgtctgcgatgttcttgcatcccctttttttctggttatcccctctgggtcactttcgggtgtgtcccctggttccctgtcctcggttgtgccccgggtgatgtcccccatgcatttgccctgcgtgtccatccacttgtccctgttttcctctcattggggtgtagtgatgaggctctttatgtcttttcttggccatgggggccctcttcccttcttgtgccttgtgtcctttgtgtgtcttccctcttgttgctcctggtatctgttgctgtggaagtatacccttcaggggttattggtactggtccctcacctagggtacagggagaagagagatagtgtgtgtccctcataggtatatattatccaccctcagaaataattcgatttgtctgtaccaagtgccatcaaaggaatcctacgttgtacaattgtactgtccaggtctccggggtcaggtatacggtactgtcatgggagtcgctgtagatgcggtctccttcatccgcttctagtaattaccacctcagacactgcctcagtctgctcctaatatgtccgaaaggtaaatgggatcaggtggacgatctcttccttgctactagtggacccgtgttacactcgtgtgtggtctgctagtgtaagtaacctgttaccggcaattatttgtgtagtgtcaaaccttgttcacagtgcttctaaattggcagcctcttgcctcaatgggaccgtgcacctctccctgccaggagttaactagtacatccgtgtgcaccctgccatgcaggtttctttctaagagaaatacgagtgtgtctcctgtagtaactgtaagaaaagtccatggagtgcacgatagttgtgcctaccccagattgtagaatgttaagggcactgaggactcaggcaccacagtgcgtgttgcccctggtcattttctttaggtctttgccttgtatccctcctcttcattggtttaatgtatcgctaccaatcggtggaagtcctagctcttactccattgttataaccggggatcgacacctgcta

SEQ ID NO: 708995 - DNA, 231 bp, Homo sapiens
agcatcgatactttgacaaagctgacaaacaagcagtgaggaaaaagagtccctatacaataactggggatactggctaggctagccatatgcagaagattgaagctggactcctttcttataccatacacaaaaattaactgaagatggattaaagacaaggtaaaacccaaaactataaaaatcctggaagaccggccggacaaatatatttgtccggccgtccaaata

SEQ ID NO: 708996 - DNA, 1149 bp, Homo sapiens
  misc_feature (851)..(851): n is a, c, g, or t
  misc_feature (956)..(956): n is a, c, g, or t
aactgggagtggtgtttgttcaaccaacagcacgttgttttgcctctagccattagcacgtagtgccgatcgcaccacaatataatagtgccgacgaccaggttgagaagatggtattgtatgagcattgtgggaagaaaaaaagaatggtggcctgtgctccaccggcacaggaagaagtggggcgtcggtaataccacagatataaaacctcttcgtcactatggggcacgctctagcacgatcgggtggtagtggtccccgaccaccttcggtcgtcagttggtggaagaaagtataacaggggagaagatctcacctacggcgggtctcttctgctaaagagagaagaggggcggccccgtctttggtcagcatcattatcatgtgggtggaagacctcgttcttttagaagagcgcaacaacaacatcttttcttccggcagtgcttacgtgggacacagcgggaggaaaacatgttctctctgcagaggcggagcacaataattttatgtgctctcctctcctaaaagagggctgtttcacacacgacactctctgttgccacacatctgctcacagcagagagagaggagtatgacacacacagcagagagcgaggtctcagagagtgtaagagtgtttttgttgtgtgggagattcccaacagctgttgagaattgtggtgtgttcccacacggcacacacagcgcgggcgcatctgctctgtgagagactctctttgagagagaactctgtggagatatgtagttctacagaggcactatgtctctctggccatctctttaatatatcttcgcgtgagaaacacagcacatatatatatttntgggggtgtggttaagagagagccacacacctaagagacttctttttgagagcccccctctcacactcacactatgcctcttcacccactcgtggcgctctgtcnctcttgagagagagtgataaggtgggggtgggagagttgagaccacagagagaaaaggggagagaagaatttcgcgggaaagagaccccaaagtggtttgtgaaattctttttgtgtcccttttaccctacagaaaaggtcacaagggttttaattataaaagccctgtatataaaacatttggggccctgta

SEQ ID NO: 708997 - DNA, 1168 bp, Homo sapiens
ggctctgaccgctgcagctaccccgttagcatatcattacagcgtcgcagcataccccatatattggttggccacgtcttgttacatgactagagtcccacaaatttgtctgcgtcgtatgagatcgctggagaaattcgcttgtcatggtctgtgactatatactggcccggaagttgctgttgtcgcggctgctacattaaatgctttcatatcgacgcttggtttaactggtcggcacactctgacatacgtagtccttaactagtggcagccacaatagttctccggtgtgttagatatgatcgtgttgcttccaacgaggctgtgcgcacttccagaagggcccacggagagtaaccgtgtgttcataaccggcgtgatttgtgctctcacagtttctttgtttgcccgccaccgttgtaggtgttttaacagggagtgtgtgcgcttttggtattcgagatatagtggtatgcttggcaccaaagatatttgtggcaaaggaggttcttgttggtgtactgtaatggcgcctgtttagagttacatgcagtaagtatgtctgtagagagatggtttctagtgtgctcgtgttagttaagtgtgcaatttgcgcctcactcaatatgtagtaggtatttcccaacctgctggaggtcagccaatcttgtgaacctcacgggaatgttctacactacgtgttctgataatctctggtaataacgactttcacgtattggctgtccgttgctttccgtggtcccgcttccaaacgagtattgtctagtcaatacagaggttggctaaagtatttagtcgtaatatcggacttgtttgttgtccccctggagtctctgtataatttgtatacggtgttcctagtataatactgtagtgatccttcatgaagaccgcaaaggctcaaaatttacggtccattgaaggaccattctcattgaggactgtattcttattcaatggtcaatttgcttccatgatatctcagttttagaaatagaagttctttatgaacttagtgtccattgtcatgccatgtttttttttttccattcctttttcgctgtaattattggaatttctggtcctgggaagaatcaaacaaaatcttaagttctatgagataccgctggggaacatattctgc

SEQ ID NO: 708998 - DNA, 249 bp, Homo sapiens
atttaattttggttggtttccccggggggggggtttcccaaattaattacccccggttcccccttttcccttttttttttaaataaaaagccaagccttttttttctttggtattttaaaaactggaaaaaaaaaaactgaaaaaccttggggggaattttggacttttttcctgggtaaaaaatggaccttttttagctttatcgtgggtgtttattttaagtaataaagtaaaaaagataaagttga

SEQ ID NO: 708999 - DNA, 917 bp, Homo sapiens
aggtgtttgttccgcgcagggtgcgcgcgcgtccctttgtggaggtcctcgccgccgtctgctgcttgtaatgccaggcgggggacccgccgagtccccacccctctttctgggggggacccggactcttcgcagcaccttccctgtcggccgagacacttggtgtgcgtcttttcggcccgctcgcgcacaaattgcgccccttggtgggcgcttctgaacacaccgcccgctgtggccagtggcctatgctccgccctccacgtgggagcaattcttggtccgccccccagtttaaggagcaccacagggcccccacccaggctgtctgtgaatcggctctgtgaagggattcccccccccctctctgcccccgaccttttttgggaccccctcccccttggagaacaccacactcacccgcgtttccacaacctgaaggattggaacatgggagagccccgtataattctcttgcgagaaaaaaaaagaggggtatacaaacactcgttggttactccacactatctcgcggcttatttcattttacaatactgacgcgatattctccttaacgcctcttcttccctccccccccattatttgcttcgcacgcacggtggacacctacacaacgccttctttaaattacccctccgcaaccccgagttcttctattaaatcctatcatcgggtttcaatgccctatatcttattgtcaccacaacaaagctccttctggtccacaatgacatatgtggcgccccccccgcgcgaataagtataataacatgctgcccgcctcttgcaaggcgatcacaaacaccccaccccttcttttctttgtcgtttcacatttttacgattttaatacccccctgtggggtaaaaacccccaaaaaaccccccacaaaaca

SEQ ID NO: 709000 - DNA, 895 bp, Homo sapiens
  misc_feature (137)..(137): n is a, c, g, or t
tacttcagactatcttgatggtcaaagtgtacgaactgtaattttacaatttatactgccacatgattgtaaatttgagtgtcttaagttaggacatggtgaaacagctatttatggctggattgtggcgtcaaaantgacgttattttgcacaaaaagataacataatgcggaaggaacagggctggtataacatgaaattactgggcaagacttcactatatttggtgtggaacatttcccttcaagatcaccttacctgattaaaccctttagatttcccttgtggttttcaagtttccctcaaaacgaatgcaaatggaaataataggcagaattgttaagcccattataaacaataaaggtgtaccacaaatattgtacatgtattattgctgctccttcttcaaaattaaatacagggtttaaaaaccacattaatgtggtaatcaacatctcaatggatacaaataaggtgtgcttggtatacattaatattttcttccaaagatatatcttgtggttagaaaccacaaaaaaaataaaactagtaatatgtgtatgttatctatctctacatattccaggcatatgtttagggttaataagaatctgtcctggtaacctgtgtcttgtgggatttccatttgtggttccaatccaaattaggcaccacgaactggttaaggtgtatatgaattaggctagaggattttgtggagcagacaccgtgctgttgtagtcagataacttagtacagacccctaaagtgtcatttgtgttctcccacgaatagccctttcttgcggtttcccagggacactgcgtttaaaaacatcttgcgtctgaacaattgttccaggtgataccctagccaaaagggtcgataaatacc

SEQ ID NO: 709001 - DNA, 384 bp, Homo sapiens
  misc_feature (342)..(342): n is a, c, g, or t
tgtgtttgctgcaagccaaggggcttggcttggctccctggctcctggggctgctgatcctacccttggtccagggctggagccttacaacttgtgtgaagaggagggccctttcggtcccactctctcggaagggaggaagtcttaccagcagacccttcagaccaaattagacgattggctcaaagaggagttctgtcctaatttgcaccacagtcctccatgactgtcccctttctcacatcttcccactcacccccaccctgctggctggagcctatgacccgtcagctcctagtcactgccaggcagagccagctcttctcccagaggtgcatctgncccagcctgtcagggccttgctgttgtcatcccttcttcctc

SEQ ID NO: 709002 - DNA, 417 bp, Homo sapiens
ccgggtcatcataaaaaagtactacacgcgcctgggcaacgacttccacccgaacaagggggtgtgcgaggagatcgccattatccccagcaaaaagctccgcaacaaaatagcaggttatgtcccgcatttgattaagcgaattcaaaaaggcccagtaaaaggtatttccctccaactgccgggggaggaaaaaaaaaaggaaagcccattatgttcctgaggtttcacccttggatcaggaaattattgaagtagatcctgcccctaaggaaatgctgaagcttttggacttcggcagtttgtccacccttcaggtccctcagcccccagttgggatgaatttcaaaaccccccgggggcctgtttgaattttttttgtagggctgtattattttcaataaatttggggcccca

SEQ ID NO: 709003 - DNA, 263 bp, Homo sapiens
tctagaggatccctgtggtactgctggagatctcaccgagtcgcgctacaggttaccaccacggcgagcgggaaatcgtgcgtgacattaatggagaagctgtgctactgtcgcccctggacttctgagcaagagatggccacgggtgcttccatgctcctaccctggagaaagagctacgagcttgcctgacggggcagggtcatcacccatcgggcaatgagcgggttccgcgtgcccctgaaggcgagtctttccagcgg

SEQ ID NO: 709004 - DNA, 314 bp, Homo sapiens
ttacaggcaggaactaccatgcctaaccctttcccctacctttcttttttggaacaggatctccctttgtcacaaaggctggagtgcagtggcgtgatcatgactcactgcaggcctcaacctctcaggctcaagtgatcctcctgaatgcttgggaccataggtatgcaccactgtacctggctaatttaaacctcctatttcttgtataccaggtctgcgaggctcacacctgtactcctaccactctgggagaccacaggctgcgaggaccgcttgaacccacgacttcgcgactagcctgggccacctag

SEQ ID NO: 709005 - DNA, 281 bp, Homo sapiens
ggccccccaggccctttccccccccccagggtttttaggggccaaggccccgcccccctttttgggtggttaaatggggggttaggggggggggtccccacctccctttaagggcccccccattttttgggcccttttccgggggggggaggtcctttggggcccctaggggttcttccttgggaaggttttgggggggggtccccgggggggtgggccccaaaggcctttgaaaacgggggttctttcctgggctgaattaaaagggggtttccccctga

SEQ ID NO: 709006 - DNA, 214 bp, Homo sapiens
  misc_feature (1)..(1): n is a, c, g, or t
  misc_feature (7)..(7): n is a, c, g, or t
  misc_feature (9)..(9): n is a, c, g, or t
  misc_feature (24)..(24): n is a, c, g, or t
  misc_feature (35)..(35): n is a, c, g, or t
  misc_feature (50)..(50): n is a, c, g, or t
  misc_feature (59)..(59): n is a, c, g, or t
  misc_feature (73)..(73): n is a, c, g, or t
  misc_feature (75)..(77): n is a, c, g, or t
  misc_feature (79)..(80): n is a, c, g, or t
  misc_feature (87)..(87): n is a, c, g, or t
  misc_feature (120)..(120): n is a, c, g, or t
  misc_feature (129)..(130): n is a, c, g, or t
  misc_feature (145)..(145): n is a, c, g, or t
  misc_feature (150)..(150): n is a, c, g, or t
  misc_feature (154)..(154): n is a, c, g, or t
  misc_feature (157)..(157): n is a, c, g, or t
  misc_feature (162)..(163): n is a, c, g, or t
  misc_feature (166)..(166): n is a, c, g, or t
  misc_feature (169)..(170): n is a, c, g, or t
  misc_feature (174)..(174): n is a, c, g, or t
  misc_feature (178)..(179): n is a, c, g, or t
  misc_feature (181)..(183): n is a, c, g, or t
  misc_feature (189)..(191): n is a, c, g, or t
  misc_feature (193)..(193): n is a, c, g, or t
  misc_feature (205)..(205): n is a, c, g, or t
  misc_feature (207)..(207): n is a, c, g, or t
  misc_feature (209)..(209): n is a, c, g, or t
nccgctnangcgcgctgcagcaantgcagtggggnagaggcgcagagcgngcgcagctntatgccaggtgtgngnnncnnctattcngcgggtaataacaactactaacctcttctatantctaaatcnncacctatcaaaatanacctnaaanatnaacanncanacnntttnaaanntnnntcaatnnnanaaaacccccccncncnccccc

SEQ ID NO: 709007 - DNA, 519 bp, Homo sapiens
tgaagctaccgcgcacaacagaagtaacccatccctgtcggtcttaaagtggtagggttttacaattcatgataccagtgacacagtaagttgttaacggatactatatcgcactgggcgaaatctagcccagtatgtcattgtgtgcccctcgtatctgaggaggcctgtgttggcactatcgtggtactctgcgttcactgtgctctagatttacctgatctatatagttgtttctgagtagcacggagtaggaaagaaccacatgtaaatatccttagagaccatcctgcagaagacggtgctaactcggggctggaatcctccatctatgatcctggatgttctcctgaaggaatgagcgtagcctgttttataacgtcgcgactggaaaaacaaatgacataaatgtcataaagtttattcctgtgtatacacactctgggttcaggaggtttcgtgcttacatttcactactcaaatgccttcgcgaatttcagaacattcctcaccatcact

SEQ ID NO: 709008 - DNA, 539 bp, Homo sapiens
ggcacccggggtgtgctatgggatgagcagcggggagtgtgggggtcccgagcaggaggatccgtgctgtccggcgcgacaggccagaggatgattctgccttggggatgatacagcatgataaaagcatatgataaagctgtggcttcattaggcattgtctaaagaatgtgacttgtgaaaatttcgggtaaaccaaaaaacaaattaaaagaaaagtgttagaagaataaaggccaaaaaaaaaaaaaaaaaaaaaaaaaattttggggcgcgggggcctaaggaaaagaggttttgaaagccatctctgtggggggccggcgcccaagaggtgtatggtagcacccgtgcggcaaagggtgggcccaagagaaacccggcgacacaggatagggggggtgggtttccaccccaaaaaaaaaaaccggcggggggggcaaccgagcgtgttggggacacaccccgaggggaggacggagggcatacggggtcaccacacgaggggcagaggaggccaagtaattacagcgcagggg

SEQ ID NO: 709009 - DNA, 146 bp, Homo sapiens
gggtaaagaaaaggtaaatttaaaaattccaataattaaatatttccatggaaaactaatgggaagactaatggattttttatattgcaggggaaaaggtaaacttgtttttgatggtatcaagataaaatttatttaaccttgga

SEQ ID NO: 709010 - DNA, 897 bp, Homo sapiens
  misc_feature (307)..(307): n is a, c, g, or t
agcgggaccggcgtgaggcggcgcggcagcgcgagggacggcagtctcgcgcgggtactgcagccactggggtgtcagtgtgtaggtcggagccatgaacgcgttcagtttctgctgtctgcgagagggatatatagatagactgagttgcgtgtgcctctgtttaactagagagatgaagtactggatacacgtgaagcgatggcagagagaagacgcttcacgctagagcaactgaataccaagtgggggaattttggctaaactgcacctggcagggaagactgatggaaggcaggaactaaangcaagttgtagacacaaggatcataagtagaatcatcgttgaattgatgaatggggttgaaagtgtagcgtcgaattgcttgcatatcagttagcgaatggaatgcatggggggcaaagtgaatctggacacagagggaggcacagacatattcaaaggctgctcccgtatcaagtagtacagatggccaggtggtttgcaagattccaagacgcgacagttgggcccctgaagccgcatattgggacgtagtccagtggctggatgagtgggaatacaagtttgggaggaatagtctctgagacgaacatatctagtccgcgtagcctttggaacgaggggcctggcaggtgtgcgcaatgcatccctactgcatagccagacgcagtgctcccggctcggaagtctgaatgcctgtgggaatggctgtaaatttacgcaaactagtaatacacacgggagtggagcttttgatctgggcgtagttggagggctggttgaattcagtcgaggaagtcttagcagagagcgaattgatttgggggtccaatgggtgccttacactgcaagaggaactttacggagaagat

SEQ ID NO: 709011 - DNA, 380 bp, Homo sapiens
caattggacgaagtctctcaatttcttctgtacaacccgtcaagtaggaatgaggagcactgaaataggatgcatatgtatcatgcagtagggagttggtataagtaagcgtaggtccaacggtgagccagactggtcgaatcgtactatctcttccaaatatatgaaggcgtcttctaccaagacaaaacagctcaattatatgaaagatgtctacaggttagactagtatagccaatatcaggttacttctgtgatacattaagtcaatgtcaacgtacagcatgaatgacgtccccggtgtgtgctaacgcttctacagatcctgtggcatcccccatggatgacagagtgcacttttgtactcatgaaaagaccag

SEQ ID NO: 709012 - DNA, 615 bp, Homo sapiens
  misc_feature (199)..(200): n is a, c, g, or t
  misc_feature (615)..(615): n is a, c, g, or t
gaatatgatgaatagctgaaacacaaggaaagctagaagaaaaacttcaggagtggaagcgaatcccccaagtgatgtatatctctcagtcaaggagacaggacaaagtacttgattggcacttctgtgcaaagtcttgcaatttggctagatgccacgaccgtcgtctcgaaggctcgtctccgcgttaagcactggnngatcagggcatggaatggcaccttatcgtgcgagggtattcacaccgtggtgccccagacaccgaaccctatggagcaccagagcttcaaaaggcgacaaactggggggcattaacctttcccgaatggtttggtttgggccccgtgtgctggagggcctttattatcaaggcccagagggaaaacaggggcccccgtttaaagaaaaccgcaatttttataacaacccacacctgtggagaacaagttaaaccataggctcttaagggttgtggcccgggtaaaccaaaagggaggggatatatcccggagccgttataaacccaaagcaggggcgcgccactttttctcaagggcggcaaacttggggcttcggcccacaccgggttgggaaaatttaaaacgcccttgggan

SEQ ID NO: 709013 - DNA, 117 bp, Homo sapiens
atgtgcggggtccatggtctgctatctttctgtaggtatcacacgatgaacaagttgagaaccaccatactgaagggatagggtatcacatgatcgcatagagttcccctaataagg

SEQ ID NO: 709014 - DNA, 643 bp, Homo sapiens
  misc_feature (248)..(248): n is a, c, g, or t
ccattctaatcgcaatggcattcctaatgcttaccgaacgaagaaattctaggctatatacaactacggcaaaggccccaacgttgtaggcccctacgggctactacaacccgttcggctgacgccgatagaaacgtgcttcagccaaggcagccgccgtagaaagcccgcgcacatctaccatcagcccgtcgtacatcaccggccccgacgctgtagctgctcaccagtcgctgcgttctactatngaagcgctccccgctgcccgcgatagccgcgaatctccccgcgtgggtgcagagcctcctacaacgcgtgatgggcctgcgctaatttctaattcgtaaggcgctagcgctctgagccataggccgatttactcgaaagtccttctggatcaggggagtgaagacaagttcaacacgtgcagaatcctatcggcacgcgtgcaatacaggtcggcaagcctggggcgtaggacaagggtaaggtcaccctagaaatccacaatacatcctactaattccgatacgtttccacccccagtgaggacacgactccattctgcgtaaaccatcactcaagaaccaagtgtgaccgtaacaatgaaaacgctggcggctgcaccttgtataacatcgca

SEQ ID NO: 709015 - DNA, 1416 bp, Homo sapiens
  misc_feature (445)..(445): n is a, c, g, or t
tataattggggaaagggggggctcccccccttcccattaaaaaccctttttttgccccaaggtgggggggggggtgtggggggtgtgtaaaataaaatttgtagaaaataggtgtggggacgccgtgttacagggggtctccggaagagggggtgtgtgggcaggacagagaggtctcagggaccccgtgaggccgtgggggtgtgcccggtggaaaacaccctctcctgtggggcgcctcgaggggtgtgtgggcccccagttatcttctgtgccctcgctgtggcaccaggtgcagcgtggctcctcgcgtaccgcccgtgtgtttctctcctctacaccctctctggggtggacgcgggcgagccacatgtgtgtgtatccggcgagtctttctgtgtgcaccctctctatcagagagacgcctctcacactctctcctctnctctctatgagagcgcacaagtgtgtaaaaacagaggcgcctccccccagaacacacacgcgcgcgcacgagagtgcactccgcgcgcgcaagagacacagaatctcggaaacacgggcgcgcgccagagaagagaggcgtggccccccccgcgagcggcgagagagaggtggcgcgtgcgaaggggcacaagcggtgtgtacatcccgcgagagggttgtgtaaagccagaccccccccagagaaaaagatgcctccgtgacccgcagactcttgtgttgtccccatacgtagtagttgccccccccgcgtggagtcactatactgtgaagcccccactgatatataattaaaacaaagaggagtgtcgcccccacgaggtgatctttcacatagtagaaaaaagacgcagtggtggagtgctaaatacaacccacaaagttgcgtagaaaaagagaatctccaccgacggggcaccccatctcagagtgacgagccgctctatgaggacgtagagaggagagacaacaaaagagggggcagagaaggccgacaccacacaaaagaagtggggatatcatcaacgagaaagacaaacagaccaactttctacaaatcagccaacataaaaaaaggagggggtctaattaacacaccccacctttctgatgaagtggcgctactgactcaccagagatagtagcaaaagggtcaccccacaagaaaaaaggcgagcgatgtatatgtgtgctagctcccccccctagtcagtaaaaacgtcggttaagcttaacgaaggacgagggtgtgattccacactatacctcacactgagtagggccccccctttttcaacacagaagaatactagccgcggcagcgagtctcgccagatatacatactccaagcagaagactgcataaagtaggaggcaggtagaatatatacagtggcatgcagtgcgttgtgt

SEQ ID NO: 709016 - DNA, 106 bp, Homo sapiens
acttcctggaggagcaggctgagaagaggggaatctccggaccccgaaaccctacacatctggaagaacaacagccttcctctccggttctggggtgaacatcctg

SEQ ID NO: 709017 - DNA, 467 bp, Homo sapiens
  misc_feature (430)..(430): n is a, c, g, or t
ctggaagaatgactgggaggcctcaggaaacttaaaatcatggcagaaggcaaaagggaagcaaggaccttcttcacatggtggcagaagagagagagagagatgggggaagtgccacacacttttaaacccgtcagatctcatgagaactctttcactatcacgagaacagtaaggaggaaatccaccctcatgatcccctcccctgacacagggggattacaattccgacgtgagatttgggtagggacacagggccaaaccacaccagatatagataaagataaaaaaaattaagaaagacaaagttagataaataaccctataaaggttaaataacctttaactctataaccctataaagataaataaagaaaaagatagataaagttggtatcataaggtattgggctatgtggattatgggagnctaagaagtccttacaatctggccatctggaagctgg

SEQ ID NO: 709018 - DNA, 394 bp, Homo sapiens
  misc_feature (93)..(93): n is a, c, g, or t
  misc_feature (142)..(142): n is a, c, g, or t
  misc_feature (186)..(186): n is a, c, g, or t
  misc_feature (191)..(191): n is a, c, g, or t
  misc_feature (218)..(218): n is a, c, g, or t
  misc_feature (237)..(237): n is a, c, g, or t
tgatttgtgtgaaggtaatcctgttaatcccacagtatctcttattttattagctcttcccatgagagagccaaggaacccatgctaaggccnccaagagttaagccatttggatggcaattaaaatcaacagggctgggcntggtggctcatgcttgtagtcccagcattttggggggccggggncggcngatcgcctgaggtcgggagttcggcgnacgcctggccggcatgatngaagcccatttctactgaaactgcaaaacgtagcccggtgtggtggcacatgcttgtggtcccagctgcttgggaggctggggcgggggagtcgcttgggcccgggaggcggagattgcggtgggctgagattgcgccactgcactccagcctgggc

SEQ ID NO: 709019 - DNA, 521 bp, Homo sapiens
gggcatttgtggaaaccagatgtgctggcagcttacgggggaagtggcagtgtggggtgggggatttatgcattggcggttggttccatttcggccaccaggactgaccctcgccccactccgtccgcaattcctatggagcctctctattttacctctttccgtgcatccactgcacaccgcacaaaagccacattcagctatgctttaggagatcctggattgggaatctgaggagggaagagaggaaggacaggtcagagtatcaacagaagatgcacaccatacatgctaccgttgtctaacctcagattgtcctgccaattcgactgagaagcattccaaccagtccgccatcatatgggataatcattccacgagaacaccggcacccaaatatataaacccagttcatagaacatatataaccataggcatatcaggtattacacattacccaccttgagttggatgataggcttagaaccccacatcaataaccaaacaacacttccccatgg

SEQ ID NO: 709020 - DNA, 232 bp, Homo sapiens
ctagtgactctagagtatccccccgccaaactggattcactgggtttggtaccttcagccctctaaaagcatagggcttagccatgcaggcttccttgggctttctctgtgtgtgtagttctgtaaacactatatcatctgttaagatccagtgtccatcgaaaccttcccacattccgtgactctagaccccttcagtttttggaaagcagggttcctctgccagtgatat

SEQ ID NO: 709021 - DNA, 117 bp, Homo sapiens
  misc_feature (64)..(64): n is a, c, g, or t
ggaccctcctgggccttaaaggatgcggactcatcctcagccagcgccatgttgtgatacaggngtgtttgttggatgggtttaaaaataactagaaaaactcaggatgcttcttga

SEQ ID NO: 709022 - DNA, 807 bp, Homo sapiens
catgagactgttccccccatcgaaagctgacgctggtcctttctgtggatggatttctcagagtacacagatatcagcatgggtgtgtttcaggtctcccaaaattcacacctttgagataagtaccatcagcacgtcaaaaatgtacacccatttagattgtggtatgcaaatgtgcaattgcgaaattgaatgagaaactgagattcctcagtaatggtgaatatttcgctctttagacctaaaacatcttcattgagtagcttatatttgaccatgatggttaaacatttgcctctacctctgattatgctgtgctgtcgacgtttaacaccttccaagttacttatgtgtgtcctgtaacacaggtgactgaccgtactgagagggaatggccaagagaaaggaagccagacactaggagaatgattaacttctcatagttccccacattgagaagcatacggagtgtatttagcctgtagatgtggtgatatgcaacatatcccattgcctggttactggcattcctaagatcttcatggtatttgcaaactgggataattcacagattagaagagtatctggacagttaatctctgttctccttacaaattcctttgtgctgtggaacggatctggctagtgatgactagtctatcaagccttgctcaaagccttagtagaacacccactatggatcagcttacgttacttggtagacgttttgccacctctggttgtccggaaattgcgtacaggtctcgcttccaagacggaacctgtttccggagcgcaggtacttct

SEQ ID NO: 709023 - DNA, 385 bp, Homo sapiens
agcatctaacgacagtcatatcaggttagtcgagtaggaaggctaaaactctgagaacactttacatcaaacccccttatccaccaatattaatacttccaggtcttgcgaaactgcagacaagtcattctcggtatgaaactcagagatgagatggggatatgatgaacattctgttgcagttgtttgtgtgagaacacaggaatataccggatgcgccagtctcaacacgatttctcctccaccctaaactccctctttcagagcagcccttggagatgctcttcctaagccctcattaagtccatctgtgaatttagctaagcctgccttgaacttgtctactatttcaggttgcataaactctcggggagggagtcccaca

SEQ ID NO: 709024 - DNA, 892 bp, Homo sapiens
gaaacgccagaaactggtgatcagcagcttcccagtaagatctcaggaggtgggtgagtgggcttaagcatgtgcatgaagaggcaaaatggttgatgcttagctggtacatgaccttcctctaggaacactcaactgataagggaagaacacctcaagtgagcacacatatagcttcagtaaacacactcacatgcagcccctcccaagtgctggcaggccattgtacatgcagactgccaacatataaaaccacaagtcaaaggtcaaaccatgcacttgaatctctcaaggtccctactggccctcttccacgtgtactttatttccttgcattcctgttctaaaactttttttttttttttttggaaagggagtttcgctctggtggctcagggctgggagtggcaatgggggcagatctcagctcacaggcaacctccacctcccagggttcaaggccgattctccggcctcagcctccggagtagctggggattatagggcatgtggccatcatgcccgggctaattgaatattttaaggtaagacgacaggggtttctccaggtgggctcaggctgggtctcgagctccgggacctcaggtggttctggcccacctcccaaagtgctggggattacaggcgtgagccaccatggcccagttaaaacttttaataaggtttcactccgtgcggtgaaactggcctgggttacttactcggtcttatgcccctgggttgaatactctcttctgaggaggcaggatacaggttgctgaggcccgtttggattccacgggtactaaatctccatacaagagaatataatggggccataaattgaattgaagttttgatacaaagctaacatgtcgaattaccttgtgat

SEQ ID NO: 709025 - DNA, 164 bp, Homo sapiens
aagatcacgccactgaaactcagccagggtgacagagtgagacctggctcaaaaaaaaataacaataataatgagaatggtccagcagtggcagcaccagcacattttggggtctagaattgacacaggcaaggaacatgaggcgactgggtccagggtaccga

SEQ ID NO: 709026 - DNA, 397 bp, Homo sapiens
  misc_feature (276)..(276): n is a, c, g, or t
tgttgtgtgggggtgtcccgtgcattgcaggacatccagcagcatccccggcctcctgctccgtgccagtagcgccgcaccccgccgttgtgacagcccaggtctcccggtgtgcagaatgcccgctggtcatgctgagaggtacaggggtgctgcccccagggtttgaacgctgtctaactcccacctctggtgtgtctctcccctgtgtgtagcgtggagtcactggatgagtgtggtgacctccctgtgtccagctgccctgggctgcaagcnggtccctcctgcagcctccaggccacccttaagcagagctggaccagcctggccaacatggtgaaaccccatctctactaaaaatacaaaaattagccaagcgtggtggaactctgtctca

SEQ ID NO: 709027 - DNA, 471 bp, Homo sapiens
agccatacctgcttctgctacagcccaccattgatgggcgtcacacctgtgccgtcacgtttgcggcgtgcgcttccctcgcagccctacactgtcactgttggcaagcctgtaacccgagtgcctgccgggtggttggccggggcctccagcccaagggtgtgcgggtgaaggagacagctgacttcaaggtgtacacaaatgggcgctggcagttggggagctgaaggtcaccgtgaagggccccaagggagaggagcgcgtgaagcagaaggacctgggggatggcgtgtatggcttcgagtattaccccatggtccctggaacctatatcgtcaccatcacgtggggtggtcaggaacatcgggcgcagtcccttcgaagtgaaggtggggcccgagttgtggcactcagaaggtacgtggcctggggccctgggctgtccgggggctgctgacgggtaccgagctc

SEQ ID NO: 709028 - DNA, 188 bp, Homo sapiens
tgactctacaggatcttaaggtcgtataaaatgtagagcgatggtaaaagaactgagagatcatgctgatagtaacattgtaatcatgcttgtgggcactaagagtgatctacgtcatctcagggcagtcctacagatgaagcaagagcttttgcagaaaagaatggtttgtcattcatcgaacctct

SEQ ID NO: 709029 - DNA, 142 bp, Homo sapiens
agttcaggtttcagaacaggggacaggaaaggcagaaaggagagttgcaatgatgccacactcctagcacattacccccatcctatacagaggctgtgagagaaagggcgacaaaacgattagggaaagtgaccgggtccat

SEQ ID NO: 709030 - DNA, 433 bp, Homo sapiens
  misc_feature (112)..(112): n is a, c, g, or t
ttttttttttgagggggaggtttccggggaccccccataaagaaatcaatggcccaagcgggctcgttgaaacccccccgctctgggttcatgcaattctgcctcagcctcntgagtagctgggattataggtgcccgccacccgtaccccagctaatttttcaatttttagtagagatggggttttgccatctcaaagcctcagtgatgtttagtagagatggggtttggccatctcctgacctcaagtgatccacctgccttggcctgccaaagtgctgggattacaggcatgagccactgcgcccagcctggtgtaatgttttcaagattcatcaggttgtagtatcattacttcattcctttttattgccaaataataccccattgtatggatatgccacattttattaatcccttctgtcgtcttctc

SEQ ID NO: 709031 - DNA, 242 bp, Homo sapiens
aaagtagggaggtattggttaaactaagggagaactcctaactctcaaggtgagaagaaagaaaaacaggaagaaagtcgtggactggattgtcttccctggagtgcatcgcgttgcgatccagagaagcagaagctatgacaacataactccccgcgcaccatgctacaactcacaacccccagatctttctgctgtcacttccctttcacaggcccctcactctccttcgcgaacgccac

SEQ ID NO: 709032 - DNA, 103 bp, Homo sapiens
atgtgccactagctcatgcctgggcgacagagaaagactcctgtctgaaaaaaaaaaaaggagagagagagagatggggtttcgccacgtttgcccaggttag

SEQ ID NO: 709033 - DNA, 821 bp, Homo sapiens
gtgctgtctcactataaagttctccgctcccagacatgggtccctcgagtatcctgccatcggaatgcgcagcagcaggcatacgtggagaaggtgaagagcttccctaaggatgacccatccaagccggtccacctacacagcctatcctgggatacaaggctggcatgactcacatcagtgctgggaagtcgacaggccgggataccaaggtgaacaagaaggaggtggtggaggctgtagaccatatgtagagacaccacaccatggtggtttgtgagagcattagtgggctacgtggaacacccctacgaggcctaccggaactaacaagactgtcttatgctgagacacatacaagtgatagaatgcacagaggcgtatctataagaaatggcactaaatctaagaagaaggcctattacccacatactgcacagaaacggacaggatgaggatggcaagcaagccagcaggagaacggactacaggcagcactgaagaagtacgtgacaaggtcatccagtgatcaaagacacagcacaccagaataacagcctgcaacccgtcagcgccaagaacgcaaggcccacacaggactgggagaaacacagggtgaaacgggaggccacctgtggcccgagcaagcatggacaggggaccgcgaaccaggccatgcacagcaagagtacctgaggaaccaacggagaaaggacaggaatgacatgaacgacgacaatcggggatgccaaagggcaaagagcacaagggggaccaaccgtgagacacaggaaacagcccgaaaacaacaggctacacag

SEQ ID NO: 709034 - DNA, 803 bp, Homo sapiens
tgctgccttctttacactgccagttttgacaaatacaggtgtttgtctattttattttacatacaacatatgcctacatttctgtcagcgtattgcacagtaacttttcacagtgcattgtgattacttattggtaactgtatagggctgatggcagctttactagatcactggttataatttgggacaaaaactgctacatcaactttcatctcgcccagagtgctcaaggctggtatgactcatgtggatcaggaactgcaattgtgaattccgtgcccagttgcctctcttggtgaactgtggaaatggccacctgggtttacccatatcaggaagggctccgggatggcacctatattggctgataattgcaggatgcaaacattccattcattagctgtgactcgagctgttaacttttctagactatagatcaaaatgtgacacattttatgttcaatccactatttgtcttgcagcattataaatatcacttctttattcttttagtaatttaggggagcgcgacggacggagaaagggatcctgatgcccttggcatacttcacaaaagcagctgtgacaacctccaaatcagtttacttcactttccaaaacctatttccaatcaccaggacaagatccatccaaaatatactcgtacattctcacctgtggattgtctataccttcaatcctcagtatgtgcccaaatctgtgctgtcattgaacaggacaccacctcatactagtggggtacacctactaatcattatccgaagcattattccccaacacaa

SEQ ID NO: 709035 - DNA, 441 bp, Homo sapiens
acgctgctaggcacctggctcaaaggcaatgtgctgaccgccgcggaagcgggcggctggtccgccgagttcgatcacgatggcacaatgcacgagatcggcgtgctggatgtcggtaccgacggcgcgtttgaggcagaattgctcctcccggacgcgagctacggtcgcagaaggtcgacactcgtcttgcgccgcggcgctctgcagatccgcggcttcgtagcctttcccgacgcgatcgagctgaacaaccggtggggtggcgcaatcggaccgatgatacgcgtagcgggcgggtcggacgacgacgacgatctcgctggcgtgctcgagcatttcgccagcaatccccgcgagacggcgtcagcttggcggagatccgccaaggccgcgccagaagccaggcagacaggctctcggctcgtatcgttgtccgag

SEQ ID NO: 709036 - DNA, 83 bp, Homo sapiens
  misc_feature (79)..(79): n is a, c, g, or t
cctaaataaagatttaaaaatttaagcttttaaaaagaaaaacagttacataaaaattgaccagtgaaaaaaaaaattnaaaa

SEQ ID NO: 709037 - DNA, 338 bp, Homo sapiens
cgtcgaccgtaccattccgttccattccattccattccattccattccattccattccattccatgccattccatgccattccactcggtttgattccattccactccattccttttgggttgattatattccattcaattccattccattccacttgggttgattccattccattcctttccattccattccattcccttccattccactcgggttgattccattcctttccattcctttcggattgaatccattccattccattcctttccattccattccattccattccattgcactcgggttcattccattccattccattccattcgtcgac

SEQ ID NO: 709038 - DNA, 887 bp, Homo sapiens
  misc_feature (305)..(305): n is a, c, g, or t
  misc_feature (308)..(308): n is a, c, g, or t
  misc_feature (312)..(312): n is a, c, g, or t
  misc_feature (320)..(320): n is a, c, g, or t
  misc_feature (330)..(330): n is a, c, g, or t
  misc_feature (340)..(340): n is a, c, g, or t
  misc_feature (356)..(356): n is a, c, g, or t
  misc_feature (397)..(397): n is a, c, g, or t
  misc_feature (399)..(399): n is a, c, g, or t
  misc_feature (658)..(658): n is a, c, g, or t
  misc_feature (669)..(669): n is a, c, g, or t
  misc_feature (672)..(672): n is a, c, g, or t
  misc_feature (675)..(675): n is a, c, g, or t
  misc_feature (712)..(712): n is a, c, g, or t
  misc_feature (722)..(723): n is a, c, g, or t
  misc_feature (837)..(837): n is a, c, g, or t
  misc_feature (839)..(839): n is a, c, g, or t
  misc_feature (842)..(842): n is a, c, g, or t
  misc_feature (848)..(848): n is a, c, g, or t
  misc_feature (855)..(855): n is a, c, g, or t
gttattattcattatggtagaatcattttaattcacgtgcttgtgttcagtttgtggtctgagagatgtaccaatgtcaaattaccgtgtaccacctaatgtttataggagaaagcaaaatacatcagcttggtagttaacacatcaaatatttcttgctgcttctaggagaactttttggtgtgtgtggaatggctgagcaaatattaaaattgttaatatgcagccatatatggaaggttcctgtggggttgttttttcgtgttttttttttttgggggggggattatgtgcctcccattcantanaaantgagaaantggtctgggnttccaaaatnttgactttgaatgggntcaatacacacacacagacttttttttttattttgcccacntntataggcagttgcatgctagcatgggttttttataacaatataactgagttatatgggaattataaatatttccgtcacttaaattggtccttggtttagcctgaaaacctttatggctcaagatcagattcctgataacccctctttagagctacagggagctggcttaccagttaaaacacttcttagggatcaaatatacgatgtaattttccaaaatcgttttaattaaacggtgtttcagtgtaaaatggttanccttgtaaganggntantgtgtataagaatgtaggccttaatatttcacatgantcaaaacaanncagttttaaaaaaatattgtggaagcacaagtgcatggcattgactgaatgctgtaatatttctaaaaagtttctacatccagattatatgtctgattcatagtaaaatacctntnatnaaacantgttttntagaacaagagaaaaacaaaaacaaacaaaaa

SEQ ID NO: 709039 - DNA, 347 bp, Homo sapiens
  misc_feature (41)..(41): n is a, c, g, or t
  misc_feature (49)..(49): n is a, c, g, or t
  misc_feature (74)..(74): n is a, c, g, or t
  misc_feature (112)..(112): n is a, c, g, or t
  misc_feature (114)..(114): n is a, c, g, or t
  misc_feature (161)..(161): n is a, c, g, or t
  misc_feature (253)..(253): n is a, c, g, or t
  misc_feature (267)..(267): n is a, c, g, or t
gccatcctgcacaagctggaccagttggatgccagccgggnccgcgcantccccttctgtgggcagcggggccncttcaagtacgagatcctcgtcaagacaggctggggcngnggctcaggtgaggggccgcggcggggtggcagggcctcccctgctcntcactggctgtgctgggttgcaccctctgggaaatgagtctcgtcgcaggcgtcagaacaaaggcagtttttgcaagtactgtgtgaagggntccgtgtgttcatncttgggaatgacctcgttgagccactcaattgttccttgaagaactaggacaagcttccttaacttggaaagtaaggttt

SEQ ID NO: 709040 - DNA, 177 bp, Homo sapiens
  misc_feature (8)..(8): n is a, c, g, or t
  misc_feature (65)..(65): n is a, c, g, or t
  misc_feature (142)..(142): n is a, c, g, or t
  misc_feature (176)..(176): n is a, c, g, or t
ttgccagntcccggagtgaggaagggcctgagcggcgtgggcggccgtagatggagtagcggggngccgtcgtgccgcgcacggtcatgcgagcgggcaccaggtggcctgccggggccgcacgtcgtctgctgcgtggggnaagcgcgccgaaggtgaaggcgggggcggcggtnc

SEQ ID NO: 709041 - DNA, 923 bp, Homo sapiens
  misc_feature (26)..(26): n is a, c, g, or t
  misc_feature (83)..(83): n is a, c, g, or t
  misc_feature (90)..(90): n is a, c, g, or t
  misc_feature (166)..(166): n is a, c, g, or t
  misc_feature (170)..(170): n is a, c, g, or t
  misc_feature (178)..(178): n is a, c, g, or t
  misc_feature (180)..(180): n is a, c, g, or t
  misc_feature (189)..(189): n is a, c, g, or t
  misc_feature (197)..(197): n is a, c, g, or t
  misc_feature (209)..(209): n is a, c, g, or t
  misc_feature (504)..(504): n is a, c, g, or t
  misc_feature (509)..(509): n is a, c, g, or t
  misc_feature (512)..(512): n is a, c, g, or t
  misc_feature (516)..(516): n is a, c, g, or t
  misc_feature (518)..(518): n is a, c, g, or t
  misc_feature (545)..(545): n is a, c, g, or t
  misc_feature (572)..(572): n is a, c, g, or t
  misc_feature (576)..(576): n is a, c, g, or t
  misc_feature (579)..(579): n is a, c, g, or t
  misc_feature (591)..(591): n is a, c, g, or t
  misc_feature (611)..(611): n is a, c, g, or t
  misc_feature (615)..(615): n is a, c, g, or t
  misc_feature (665)..(665): n is a, c, g, or t
  misc_feature (684)..(684): n is a, c, g, or t
  misc_feature (749)..(749): n is a, c, g, or t
  misc_feature (896)..(896): n is a, c, g, or t
cacgcgcggcgtgggcccctgccggnaggcttcaaggtccgccccctcccccacctaaagggttcaacctccaacaacttggnaattgtnaccaacccaaccccaactggttcggggtaaggcctcccggttcctcctggcccctggcctacttggctggctggtncctngtgccccngnatgcccctngctaggtncccccccctgcncccccactcaagagttaagagcaggtggctgcaggccttgggcccggaggaaggccactgccggccacttggggcagacacagacacctcaaggatctgtcacggaaggcgtcctttttccttgtagctaacgttaggcctgagtagctcccctccatccttgtagacgctccagtccctactactgtgacggcatttccatccctcccctgcccgggaagggaccttgcagggacctctccctccaaaaaaagaaaaaaagaaaaagaaagaaaaaataaatgaggaaacagtngtttnagnacangnaagttttcttctccttctggtcccctngtttctcatacccccaaactcagatgntggnggncaaggccggcgngtgttcacccaggcaggagngggntgtgtccagggtggggcggcccctttggctctccctcctgttccaggggnagcatagggacgggaaagnaggtggcccggggggggatatgggggggccccagccctgttcccaaagctccctgctcggctgcncctcgcccgcctttatataaattctctgaatcacctttgcatagaaaataaaagtgtttgctttgtaagaaaagtctggaaagtagcagaatcatctcaaggtgtcaaaggagccttcagtcatcgtctggggggcaggacaggcanaggggttggtccacttaggtgttgcct

SEQ ID NO: 709042 - DNA, 803 bp, Homo sapiens
ggacatgaactcatcatttgtatggctgcatagtattccatggtgtatatgtgccacattttcttaatccagtctatcattgttggacatttgggttggttccaagtctttgctattgtgaataatgccgcaataaacatacgtgtgcatgtgtctttatagcagcatgatttatagtcatttgggtatatacccagtaatgggatggctgggtcaaatggtatttctagttctagatccctgaggaatcgccacactgacttccacaatggttaaactaaagagcttctgcacagcaaaagaaactaccatcagagtgaacaggcaacctacaacatgggagaaaattttcgcaacctactcatctgacaaagggctaatatccagaatctacaatgaactcaaacaaatttacaagaaaaaaacaaacaaccccatcaaaaagtgggtgaaggacatgaacagacacttctcaaaagaagacatttatgcagccaaaaaacacatgaaaaaatgctcatcatcactggccatcagagaaatgcaaatcaaaaccactatgagatatcatctcacaccagttagaatggcaatcattacacaagtcaggaaacaacaggtgctggagaggatgtggagaaaataggaacacttttacaactgttggtgggactgttaactagttcaaccattgtggaagtactcttttactgatattttcttattatattgctacaggcaacatcagtagaagctatctagtaccctaactaaggatcacattcacattcttacagccaagg

SEQ ID NO: 709043 - DNA, 159 bp, Homo sapiens
atatagcttgagaggtctgtgtctgtgatgtggtgtgtgaggtttgatgatagtgtgtgtggtgtaaaatctgtgtgtgtgtgaggtctgtgtgtggagtgtgagatctgtatgtgtgaggccagtgtgcttcggtgggaggccaggttgcttcggttg

SEQ ID NO: 709044 - DNA, 931 bp, Homo sapiens
gttgctggaatgaagaagaagggtgatcttgattactgcagctagtaaaagtggaatttgatgaagaattcagtggagcaccagtagaaggtgtaggagaagaggcattgactccatcagttcctattaataaaggtgccaaacctaagagggataagaaggagccgtggtaccagacgtgaagaataagacacctaacatacatcgtgtgtaaatcctagatgctagagaggaaaagtgaagaaacggtaatccttgggtcagatgatgaaatccaagtcaagaaagtgatttggaagaacacagaacctgtggttattccgaaagagattctttgcgttagaggagagctagcgagtccgaaagtacctaaatacgacatttgatttctcgagaagacggaggatgatgatgctgatgatgatgtatgatgacgaaatagagtgatttagaggaatagaacacgttaaagcatctcccataacaaatgatggggaagatgacctttgttccttcagatgggttagataaagatgaatatacattttcaccaggcaaatcaaaagccactccagaaaaatctttgcatgacaaaaaaagtcaggatttggaaatctcttctcatttccttcatattctcagaagtcagaagatgatcagctaatatttgacagtaatgaagaagattctgcttctgtttatttcaccatcatttggtctgaaacaggacagataagttccagtaaaacggtagctgatacaaaggcaacacgtcttcagaatacaggccttagcccagaaaccgaaaagagaagtgatgcatgatggcgacttgactgaattcagatgggattcgatcaacaacacacaaggaagcagggaaaaaggcacctggctgaaaaggatatccggaggacttaactacgacgaa

SEQ ID NO: 709045 - DNA, 145 bp, Homo sapiens
gatgggtggaaatacagagggggcatgagtacagattcccagttatctccctttcttcgccatactttttatctcaagttctcagtttaggccttctgatcaataccatcctacaggactctccccaacatcccccaccagttcg

SEQ ID NO: 709046 - DNA, 954 bp, Homo sapiens
  misc_feature (25)..(25): n is a, c, g, or t
  misc_feature (90)..(91): n is a, c, g, or t
  misc_feature (104)..(104): n is a, c, g, or t
  misc_feature (116)..(116): n is a, c, g, or t
  misc_feature (143)..(143): n is a, c, g, or t
  misc_feature (153)..(153): n is a, c, g, or t
  misc_feature (165)..(165): n is a, c, g, or t
  misc_feature (175)..(175): n is a, c, g, or t
  misc_feature (187)..(187): n is a, c, g, or t
  misc_feature (189)..(190): n is a, c, g, or t
  misc_feature (198)..(198): n is a, c, g, or t
  misc_feature (207)..(208): n is a, c, g, or t
  misc_feature (244)..(244): n is a, c, g, or t
  misc_feature (246)..(246): n is a, c, g, or t
  misc_feature (251)..(251): n is a, c, g, or t
  misc_feature (318)..(318): n is a, c, g, or t
  misc_feature (320)..(320): n is a, c, g, or t
  misc_feature (330)..(330): n is a, c, g, or t
  misc_feature (341)..(341): n is a, c, g, or t
  misc_feature (343)..(343): n is a, c, g, or t
  misc_feature (345)..(345): n is a, c, g, or t
  misc_feature (368)..(368): n is a, c, g, or t
  misc_feature (374)..(374): n is a, c, g, or t
  misc_feature (376)..(376): n is a, c, g, or t
  misc_feature (397)..(397): n is a, c, g, or t
  misc_feature (405)..(405): n is a, c, g, or t
  misc_feature (443)..(443): n is a, c, g, or t
  misc_feature (457)..(457): n is a, c, g, or t
  misc_feature (464)..(464): n is a, c, g, or t
  misc_feature (531)..(531): n is a, c, g, or t
  misc_feature (550)..(550): n is a, c, g, or t
  misc_feature (565)..(565): n is a, c, g, or t
  misc_feature (584)..(584): n is a, c, g, or t
  misc_feature (602)..(602): n is a, c, g, or t
  misc_feature (790)..(790): n is a, c, g, or t
  misc_feature (863)..(863): n is a, c, g, or t
  misc_feature (867)..(867): n is a, c, g, or t
  misc_feature (887)..(887): n is a, c, g, or t
  misc_feature (890)..(892): n is a, c, g, or t
  misc_feature (933)..(933): n is a, c, g, or t
cttgaaaaagatgggcttcaagacnggaggggaaatgcagtttctatttacctttaggccgatttcccaaaccatttgcgaagccggttnnagaagaggagagncgaaggatcccncccgtctgatagccatccgccttaagnacttactttngatccccattgnatccataatncctacccccgananngtctttgnctggcaagnnagggatggagaggcagaggcccagggggcctctgancnaaagncgcatgggtggtctgaaaatagagttgggcctaatgttgacttctattacgcctgcatggagcagtngngatgaatacnaatacatcacntngnaacgcccgtaaaacacagatcanaatacncnatagggaatggttaacaaatngcctgaanaatatacaatttggctttttcagttgtaaactgaggtnaacagagaaataangaaagcnatgagaaaacgaaacagttaccaaaggaccattttctataatcccgtcttatgtagcactttgagtnactcatcaaaatattaatntaatatatatctgtnaagtgttagaccaggtgcnggggacaaaaggcaagcnaaaatagacacactatccttagaatttataatctagtcagagagggacattcaaataatcacataaagatacataaaattacaggcctggcgcagtggctcacatctataattccagattttcggaggccgaggcagtggatcacttgaggtcaggagttcaagaccagcctcgccaacgtggtgaanctcgtctctactaaaaatacaaaaattagccaggcatggtggtgcgcacctgtaatcccagctactcaggaanctgnggcagaagatttgcttgtanccnnntggtagaggctgcagttagccgagatcgtgccactgcactncagcctgggcgacagagtgaa

SEQ ID NO: 709047 - DNA, 129 bp, Homo sapiens
aggggggggggggggggccccaaaaaccgggttttttccccccccccccccccccccccgggggccccctttttttttccccttgtgtgtttttattttttttccccttggggggggggggggggggga

SEQ ID NO: 709048 - DNA, 1274 bp, Homo sapiens
gtggacgcgtgagtgcggaggcgcgggcggcggagggaggccggagctgggcagctgctggctgtgcgccatgtcctgtgaacatggactgagctcaagcaccagtgtcatgatcaaccagattctgtgctgactgtgctgggctgcgcggccgaccaggcgaagcaactgctgcagtgcgtgcccactggcagttcgagacagccctcagcgccatttttccatggagaccaacatcccctacagccaccatcaccaccagatgatgtgcacccccgccaatacccctgctacaacccccacaagttccctgacagctctcaccatgattctcccgatcatcaaggccatccgagagcttccacagacggtgtgcagcagtgcagccccagaatggcacgtgacatagccaaagataagcacaccggcacaacagattcaccacccaatgcggccgagacaagagagactcttgctgcactcacagactggacacccatcgtggcacggcacgtcaaacccacgggtggagcccaacaaggaaaccaagcatgccacgcaacgagaccccgtgagttggaaggtcagaaggcaacagacaatacatcacggagaaacaaacaagggcacaaacccacatcggaccaccacgaaaagggcaacacagtagagaaagccacaaggggagccaaaacaataacacatggacaggacaaaagagagctacggcagacatagccacaacgcccaccacgaaccggatgcagcgagagacaacgaccaagaggagaagggagagcacaggggaaggaaagacaacgaaggagcaacgcatatgaaacgcgaggagacaggcaggcagcacgcagacgacaagcacgagaggcacagaggacaagagggagacaaagagcggcagcgaggcaacgggagacggacacaaagaacacagcggcgcggccagagcggcgcgacgcgaaggcaccagcagcgaaggccaggagcgacaagcagaacagcgggaggaaggcgcggagacaccgacacctgagcggccgagagcagacagacaccacagcacaaaggagcgagccgccggaggcagcgaggaagaaacgcgcacaggcctcccgaaaagaacacacagaaggcgctggcacggcaagagcgggagggagaggcacacgcaacacggaggaagcgaatagcgaagagcgagaggaacaaagggagcacggggagacgaagaaaagcagaaaaaggaggccacgact

SEQ ID NO: 709049 - DNA, 168 bp, Homo sapiens
  misc_feature (149)..(149): n is a, c, g, or t
cgcccgcacgagcccgacctttccgccgcgctcaaggacacccgcgcgcagtacgagaagctggccgccatgaacatgcaaaacgctgaaggattttttgaagaacccggattcaccgtgctgaccgagagcgccgccaagaacccgangccgtgcgcgccgccaacg

SEQ ID NO: 709050 - DNA, 334 bp, Homo sapiens
atttcccagtatgatttttctttctaaaaaagtaccatctggccaggcgcggtggcttacgcctgtaatcatagcactttgagaggcagaggtggtcggatcgcctcaggtcaggagttcgcaaccagcctgaccaacatggaaaggctccgtctctactaaaaaaacaaaattagctgggcgtggtggctcatgcctgtaatctcagttactcgggaggctgaggccagagaattgcttgaacccagaaggcagaggttgcggtgaaccaacatcattgcaccaatgcactccagcttcggcagcaaaagcgaaactccgtctcaaaaaaaaa

SEQ ID NO: 709051 - DNA, 965 bp, Homo sapiens
  misc_feature (554)..(554): n is a, c, g, or t
  misc_feature (626)..(626): n is a, c, g, or t
  misc_feature (717)..(717): n is a, c, g, or t
  misc_feature (770)..(770): n is a, c, g, or t
  misc_feature (775)..(775): n is a, c, g, or t
  misc_feature (781)..(782): n is a, c, g, or t
  misc_feature (789)..(789): n is a, c, g, or t
  misc_feature (955)..(955): n is a, c, g, or t
  misc_feature (958)..(958): n is a, c, g, or t
tctgattttgagcacaccatccatgttggctttgatgctgttactggagaattcactggcatgccagaacagtgggctcgattactacagacctccaatatcaccaaactagagcaaaagaagaatcctcaggctgtgctggatgtcctaaagttctacgactccaacacagtgaagcagaaatatctgagctttactcctcctgagaaagatggctttccttctggaacaccagcactgaatgccaagggaacagaagcacccgcagtagtgacagaggaggaggatgatgatgaagagactgctcctcccgttattgccccgcgaccggatcatacgaaatcaatttacacacggtctgtaattgaccctgttcctgcaccagttggtgattcacatgttgatggtgctgccaagtctttagacaaacagaaaaagaagactaagatgacagatgaagagattatggagaaattaagaactatcgtgagcataggtgaccctaagaaaaaatatacaagatatgaaaaaattggacaggggcttctggtacngttttcactgctactgacgttgcactgggacaggaggttgctatcaaacaaattaatttacagaaacagccnaagaaggaactgatcattaacgagattctggtgatgaaagaattgaaaaatcccaacatcgttaactttttggacagttacctggtagganatgaattgtttgtggtcatggaataccttgctggggggtcctcactgatgtgntaacngaaacnngcatggntgaagcacagattgctgctgtatgcagagagtgtttacaggcactggagtttttacatgctaatcaagtgatccacagagacatcaaaagtgacaatgtacttttgggaatggaaggatctgttaagctcactgactttggtttctgtgcccatatcccccctgancanaacaaac

SEQ ID NO: 709052 - DNA, 606 bp, Homo sapiens
tctgattttgagcacaccatccatgttggctttgatgctgttactggagaattcactggcatgccagaacagtgggctcgattactacagacctccaatatcaccaaactagagcaaaagaagaatcctcaggctgtgctggatgtcctaaagttctacgactccaacacagtgaagcagaaatatctgagctttactcctcctgagaaagatggctttccttctggaacaccagcactgaatgccaagggaacagaagcacccgcagtagtgacagaggaggaggatgatgatgaagagactgctcctcccgttattgccccgcgaccggatcatacgaaatcaatttacacacggtctgtaattgaccctgttcctgcaccagttggtgattcacatgttgatggtgctgccaagtctttagacaaacagaaaaagaagactaagatgacagatgaagagattatggagaaattaagtatgtatctacatttacatcattgttaaattgttcacggctcgttaaacattggcccagatggattgtgacttacactgtacattgtgacttacaagtatacagaatcactggtatccttatagcaa

SEQ ID NO: 709053 - DNA, 1317 bp, Homo sapiens
  misc_feature (554)..(554): n is a, c, g, or t
  misc_feature (626)..(626): n is a, c, g, or t
  misc_feature (1095)..(1095): n is a, c, g, or t
  misc_feature (1224)..(1224): n is a, c, g, or t
tctgattttgagcacaccatccatgttggctttgatgctgttactggagaattcactggcatgccagaacagtgggctcgattactacagacctccaatatcaccaaactagagcaaaagaagaatcctcaggctgtgctggatgtcctaaagttctacgactccaacacagtgaagcagaaatatctgagctttactcctcctgagaaagatggctttccttctggaacaccagcactgaatgccaagggaacagaagcacccgcagtagtgacagaggaggaggatgatgatgaagagactgctcctcccgttattgccccgcgaccggatcatacgaaatcaatttacacacggtctgtaattgaccctgttcctgcaccagttggtgattcacatgttgatggtgctgccaagtctttagacaaacagaaaaagaagactaagatgacagatgaagagattatggagaaattaagaactatcgtgagcataggtgaccctaagaaaaaatatacaagatatgaaaaaattggacaggggcttctggtacngttttcactgctactgacgttgcactgggacaggaggttgctatcaaacaaattaatttacagaaacagccnaagaaggaactgatcattaacgagattctggtgatgaaagaattgaaaaatcccaacatcgttaactttttggacaggtaagtatgactattccttaaacaccgggagaaaatgtagaaattttaagtctcatggtttcgggggtggggctggccactttggaataaactgtcagtgccgagaaataagatggaagaaagaagaggagaggtaaaaatagcacagtgcagttttagaaggtccttctctgcaaggacatcacttggcaggtgagagaaggcagttaattgaaggccatagctggtggtgtttatactcatcgcaaacgacctgaagcgaacacatgaatggttggctgtgattcgtgtcttgactgacagaggggactggttacatggtttttaaacttgtggatcaatttttatttcaaatgctatccttcatggacaaatttatatgtctatcaaancctcatttagttgaggaattaatgttaaataacagaccaaaaagcagaatagaaaatgatgcatattggctgggtgcagtggctcacacctgtaatcccagctactcaggaggctgaggcaggagaatngcttgaacccaggaggtggaggttgcagtgagccgagatcgcaccactgcactccagcctgggcaatggaatgagactccatctcaaaaaaaa

SEQ ID NO: 709054 - DNA, 768 bp, Homo sapiens
tacgagacgaggcgagacaagaggtcgtgtcgaagcatgtgatgccaggccgagcgggagctgaccaggcttgactcgtggtacagaactgaggcaccagtccccttgcgaaccgaaggtgcctcgcagtgtgatggatggaggcccagccctgagtgtcaacgccaaccagtgctagcctggcactggggcctacagggtgtgtgtagtgctggtgctgtgccgcagcctgtccaggggccttctctcagtgtccctgtgtgctgattggtgtgcctactgctgctggccctggcaacaatggccctgactctggcccctcgggaccagagccccacccgatctggaagctggatcctttaccatgggccataggccagtgactaggccgggcctgggcctcccatcggggccggactaggacgaggccccggggaggcccctggcctaccagaccacttttactcaggcctgacagccgccaggaagatgcaacgtgcccatgccaggcgcccgccagcacttgggggccattctggccagcgccagcgtggtggttgaaggctctgtgtgctggcggtactattcctctactgctctccttcgccgtggacactggctgcctggcggtcacccggggctacctctttcctcccaaacttctggatcctggacctgtgcaccatgggctgctggagcagcatctgtgggacgtggcatcaggctgacaatgtggtgtggcaggcgttgaggagccctcttggggca

SEQ ID NO: 709055 - DNA, 542 bp, Homo sapiens
  misc_feature (14)..(14): n is a, c, g, or t
  misc_feature (34)..(34): n is a, c, g, or t
  misc_feature (42)..(42): n is a, c, g, or t
  misc_feature (89)..(89): n is a, c, g, or t
  misc_feature (101)..(101): n is a, c, g, or t
  misc_feature (111)..(111): n is a, c, g, or t
  misc_feature (133)..(133): n is a, c, g, or t
  misc_feature (162)..(162): n is a, c, g, or t
  misc_feature (184)..(184): n is a, c, g, or t
  misc_feature (346)..(346): n is a, c, g, or t
  misc_feature (351)..(351): n is a, c, g, or t
  misc_feature (492)..(492): n is a, c, g, or t
  misc_feature (495)..(495): n is a, c, g, or t
gaaaaaagattggnaggggaatttttgggggggnagcccttntttgggttccagcatgaaaacagggtagcttggggttatagagaaanagtgtttcccanaccttttccnggggaagaccccaggattggcntttagtcagcaaatggagataacagagtntggctttccaatcccaatttcnttgccccccccttgccccccccccgaaaaaaattgagcacttaaacccttcccttttggagggggccccctgaagcgtcaggctgggggcagtttggtacggaacatatttattgcctccatgcatgtgtgtgtgtgtctgtgaggactggtgtgcgtgganacgtntgaagcaggcgtgtgggttttttcagggaccacagaggagggagcagtttgcagtgcccagccaccctgaaatccccaataatggtgcctcagtgggccccagagttccagtgggagagtacgttccctcctgtctccttnttnttttccgcacctccatttttgtggataataaataaatatgcacaggt

SEQ ID NO: 709056 - DNA, 225 bp, Homo sapiens
tttgaatgtttgtctgtgacaagtaccctatttgtcgtgtgacattttaagttgtaataagaagtattaccaatttaaagagtgcctcctgtgttccaaggtgctttggttggccaattaattaatttttccttccttggaattccttaaaccaaccttaagcgcaaggtattattagtattctcattttataataaagagtgcttgagtagcttgtctgatgtt

SEQ ID NO: 709057 - DNA, 375 bp, Homo sapiens
ctgttgttgttgctgttgttgttttttgagatgaagtctcgctctgtcacccaggctggagtgcaatggcacgatctcggctcactgcaacctccacctccagggttcaagcgattctcctacgtcagcctcctgagtagctgaattacaggcgggcaccaccatgcctggctaatttttgtatttttagtagagacgggtttcaccatgttggccaggctaggcttgaactcctgacctcgtggtctgtccactttggcctcccaaagtgctggaattacaggcgtgagctactgtgcccggccacatctaatatattaatagagggataaaatgaagtcctaaaaaataattagccagcaaaataaagtcaag

SEQ ID NO: 709058 - DNA, 305 bp, Homo sapiens
aaacagctaacagccaaactaaaatggctaaattccagaggccacaagggaatatcttgtaaatatatgtacatattcaggcagatatggtctcccaagctgagtttctagaaattgatgttttctagacattttctaagtgggttttgttagtgtctcacttgggctcactctttctaggtttaagttagcccagagattgtattttactcatggaccactctatttatttcacattttactcagtaatgatcccttggggttctataagggtcataagggcccatttcgccatagtctctcca

SEQ ID NO: 709059 - DNA, 402 bp, Homo sapiens
gttgccaaacactactgccatgcactaattcttgatatgttaaaagtctacatataaataagatcataccactgcgctttaaagctaagtgattcttacatttacattcattgcaagacagtgtaatgcaacagttaagaacacagtgctatctaacgcgggagagcacaacaaaggcagtcaaagacagctcccattttccctctgtcaaattaaaatgacacgccccttcctctcggggaaaaagcccaggtcagctgctgtgatcacacgtgattcttcagggctggagaccattcagtgccaggaaccaagtaaagggatagtgcagaatacagatcaaggcctggcactgctggtcagcttgccacgctatataaaaattagcatcaagcttccaag

SEQ ID NO: 709060 - DNA, 300 bp, Homo sapiens
gggggagcgcgcaggcatggcaagccggtcttcctgctcaacaagcttgcgtgccaaaatgcccatcctgggagttgggtacctggaactgtcccctcaagagggacgtgaatgaggccgattagaggctgggcaattgaacgtccagagataccgaccatcatcgcagctgttgctcgcaatgtggtaccagatatgatcaatgtaggtggcgggtggaccagtctcatcgcatcatagtctcacgggatgcaagagttggcttcgtacacgtcggctgatggagcctcgtttcatccg

SEQ ID NO: 709061 - DNA, 371 bp, Homo sapiens
tctggagtactatgtgcagcaatttctaatctactgtctactccctacgcttctcgtagtcagagtcatccacccgcataagcgttccagagtagctataaacctagaggcatgctccaacacatccagtgaacttttgtatcttttgtaaagattggtcaagccatgttgcccacgctcacaaattaacttagctagtggccccctgaattagcagttaagtccgcgattcagcgcccgtttcataggctgaatctctccgtattcacgctgtctaatcagactgccttagctgtcaaaccagcagattcgattctggatgaatgacaggccctctgagtgagttggctctacgatttgacaagatgcta

SEQ ID NO: 709062 - DNA, 223 bp, Homo sapiens
  misc_feature (180)..(180): n is a, c, g, or t
ggatgctgcggtcactctagatcctatcgtgtgccggtgtgatgtgcgattctaatacacacacttaagtgtcagtgagataagctaatgtaaccatatcaaacaaatagttctcttgtagcccctttagtctctaagagatccgaatccagaaatattcatagggtactatcatgactnattattaagtctcagtagctgaatctgtacgtatttttcttca

SEQ ID NO: 709063 - DNA, 226 bp, Homo sapiens
catcctctccagtatgcattcttttatgttagtaagggtcgaggaccaattaaagcctttgccacattcttcacatttgtagggtttctctctagtatgaattctcttatgtttcagtcaagggttgcaggcacagcatcaaatgctttgcccacattcttccaccacttgtcaaggttactcctcccagtcatgcacattcatcttcatgtgtagtcaagcattt

SEQ ID NO: 709064 - DNA, 226 bp, Homo sapiens
  misc_feature (3)..(3): n is a, c, g, or t
  misc_feature (175)..(175): n is a, c, g, or t
ctnatgatggaagactgcttactatatccaatctgaagctgagcctgtggcctacagggaggagagacgctgaaggtccccccaggctggggatgggcggaggggggagcctaggctcactggtgtgacctcatgcaatgcccagtgcgagggtgtgtcctacagatgagttggncgagaagggctcccaaggactttgcggactgtcatctcatgcccctcccca

SEQ ID NO: 709065 - DNA, 130 bp, Homo sapiens
tgttctaagcatgctgggagaatcactgggagaaagccctgaaaagaaaaactattgctcctgaatttatctgtatgagcaagtatgtgtgagagagacagagagagggagagagacaaggtaggccgag

SEQ ID NO: 709066 - DNA, 289 bp, Homo sapiens
tcaggttagcatattacgtggggtgttctaatatactaaaccttcacatgtttagctaattctgaagtccgtggatgtaagctagaagcttatgatccgattcaccaactttcaacaatctactggtccatgaatgataagttactgtcttccgctaacaatagaaagagcggattcctttaccactccccaaatctaaactgggtttccacttaagagttactcagttgagaacacttaatatcaagtacaatcattaagtggcactgatactaccattatatcagag

SEQ ID NO: 709067 - DNA, 345 bp, Homo sapiens
ggccgttcacctgtcagacgagtaacgcatgtatcctacaggcgagctcagtggaggaacagaaccctcccgtgagcagaagggctcacagctcgcttgatcttgatatacagtacgaatacagaccgtgaaatgcggggcctcacgatccttctgaccttttgggtttataccatggaggtgtcagaaaggttacacagtgtataactggcttgttggcggccaagcgttcatcgcgacgtcgcttccttgatcctacgatgtctggctcttccgtatcattgtgaagcagaattcaccaagcagtggattgttcaccctactaagtagggaacgtgagctggg

SEQ ID NO: 709068 - DNA, 144 bp, Homo sapiens
tgtcctctcactcgcccgtctcacttctgagagccaccgataccacgttcgtctccatacacagacatgttaaagcatgggacgtaagtttaagggagacgtgagaaaagatcagtggttttcacaaagcttcaatgaagcagc

SEQ ID NO: 709069 - DNA, 231 bp, Homo sapiens
actccatctaaacgatatttggagggcagcatggtgctcacgtgtcgacggaacttgtacagggaggcatgcacctgcagtggtgaatacacgtcgaccagcatccatgtatgcgtgattgggtcgtcatcgcggatctcctgtatctacggagcatgtatggggagttatgcatggcagtggtgaatacacgtcgatgatggaggcatgcatgcatgctcgggtcctgga

SEQ ID NO: 709070 - DNA, 384 bp, Homo sapiens
  misc_feature (9)..(9): n is a, c, g, or t
  misc_feature (31)..(31): n is a, c, g, or t
caaaaaacngcaaacaaccaaaaaaaaaaanccaaaacactctgttatgtgagaacagactggaggaagaaagatggaagtttttttttttaaaaaaggtcttgcccgggcgcagtggctcacgcctgtatcccaacactttgggaggctgaggtgggtggatcatgaggtcaggagatcaagaccatcccggctaacatggtgaaaccctgtctctactaaaaatacaaaaaaattagccgggcacggtggcgggcacctgtagtcccagctacttggaaggctgaggcaggagaatggcgtgaacccgggagttggagcttgcagtgagctgagatcgtgccactgcactccagcctgggcaacagagcgagactccgtcac

SEQ ID NO: 709071 - DNA, 330 bp, Homo sapiens
  misc_feature (4)..(4): n is a, c, g, or t
  misc_feature (70)..(70): n is a, c, g, or t
  misc_feature (145)..(145): n is a, c, g, or t
  misc_feature (220)..(220): n is a, c, g, or t
cganttgggacaatggcgtctcttggcacatcttggttttctgtgtgggtctctcaccatggccaagganaaagtccaaaggaacacgacccgttcacttacgactaccagtccctgcagatcggaggcctcgtcatcgccgggntcctcttcatcctgggcatcctcatcgtgctgagcagaagatgccggtgcaagttcaaccagcagcagaggactngggaacccgatgaagaggagggaactttccgcagctccatccgccgtctgtccacccgcagcggtagaaacacctggggcgatggaatccggccagggggttccctgggg

SEQ ID NO: 709072 - DNA, 123 bp, Homo sapiens
gtcgactcttgatctcctgacctcatgatccgcctgctttggcctcccaaagtgctgggattacaggcgtgagtcaccgcgcctggctcattttgaaatttttgtagatcagtgtactgttgt

SEQ ID NO: 709073 - DNA, 256 bp, Homo sapiens
ttcgatgtgggctgaggtgtcaggtgcgtccgcaatccactcgaggttcttgacagccgccttgagggggagaggcagcgatacgttcgtcgtccagctggatgcctcaaaggtgccctcgtggctgtactgcaccacgcccacacgcgtccctgtctcggacttggggtccttagcgatggcacccagcctgttgaccacgttgatgacgggggacttctccagtgtgaagttggtgtacccaatgctctcggag

SEQ ID NO: 709074 - DNA, 287 bp, Homo sapiens
aatctcagctcatgcatctccactcccgcgtcaggcgattgtctggctcagcctcctgagtagctgggattacaggtgcctgccacgagtggccagctgattttctgtatttttagtagagacggggtttcactgtgttggccaggctggtcttggaactcctgacatcaagtgatctgcccgcctccgcctcccaaagtgctgggattacaggtgtgagccaccatgcctggcctgtataattttcttaatttttaaaaactttttgaaatagattgcggtgtctg

SEQ ID NO: 709075 - DNA, 685 bp, Homo sapiens
  misc_feature (222)..(222): n is a, c, g, or t
ggcgcggtggctcacgcctgttatcccagcgctttgggaggccaaggtggtcggatcacgaggtcaggagttccagaccagcagcctggccaacatagtgaaacctggtaacatagtgaaacctcgtctctactaatgcaattagccaggcgtggtggcaggcgcctgcagtcctagctacttgggaggctgaggcaagagaatcgcttcccttggaggccngaggaggctctccctccctccccccccctctctctctctcctcccctttcctctcccccttcttccctctctcccccctccctctcccgcttcccgttccctttcgtcccttcctcctctccctcctcccctccccgctttccctctctccccccctcctctcctccccccctgccctccccctcctctccctcctccccttcccctgctctctgtccttctcccccctcttcccctcccctctctcccccctccctcccccttcctttcccccctcccccctcctttctctcgctccccgtcccccttccccctccgtccccgctgtcctccctcccccccccttcctcctctctctccccctcctcgtccccctccctctcccccctctctctctctcctcctctctctctccttctcccctcctcctccctcctcccctttcctcttccctcgctctccg

SEQ ID NO: 709076 - DNA, 423 bp, Homo sapiens
ggtctgtgctgaggaggattagtataagaggaaggcatgcctcttgcagttgagacaagagcaaggcaactgtctcctgtccgtccctgggcaatggaatgtctcggtataaaacccgattgtacgttccatctactgagatggggaaaaaccgcctatctcacctatcaccgcctatcaccactccccaatctcaagtacccagggacacaaacgctgcggaaggccgcagggtcctctgcctaggaaaaccagagacctttgttcacttgtttatctgctgaccttccctccactattgtcctatgaccctgccaaatccccctctgtgagaaacacccaagaatgatcaataaaataaataaataaataaataaataattgtttttcatgtaaaatacaatttttttcccttaacaaaaa

SEQ ID NO: 709077 - DNA, 377 bp, Homo sapiens
caaaggcaggagtccttttagtgttttgtttatttttggaagaatatcaatagtggagttttgtggtagcctgaagaaatactgaaagaagagccaaacccctggcatgttacaattctccattacaaaataatcaccagcttcctcaaaaccatccattaaaatcattttccgaccgggcgcggtggctcacgcctgtaatcccagcactttgggaggccaaggcgggtggatcacaaggtcaggagatcgagaccagcctgggcaacgtggcgaaactctgtctctacagaaaatacaaaaatttgcccggcgcggtgatgcacacctgtggtcccagctactttataggctgaggtgggagaatctctcgaacc

SEQ ID NO: 709078 - DNA, 583 bp, Homo sapiens
atgttctattacactacacatcgattggagtggatatatatcttaaagtaatctatttctacagaaagtgtgtacttctcacatttcacaggatcagaagttgatcttttaatactggaaaacaccaacgattagggtctgtcgtgactggataaacgctttcgtgcatttttgtcttaagtcagtgggacaaaaacattcctggtctggagactttctttctctctctctttccttctctctttccttccctcttctatgttgctgagcgggtagggcagagggataggaagggaaatagggcaaagctatactctagtggtggaatgtccgtggggtaaatttgtactgttttgtcctccactgaaggtgttaaaagtgtgcaaaggctgcatccccgtcagtgtgtttggaatcatggtgatggtgtttgggcgtcataagtgggatgtcatctggcgaccggcgcagcgtgagggtgtaatctggcgggcaaggtgagcctcagtgtgtcgtgtgcctgcagcgactcacactcgtgatcgtgttcagctggttcatctgcaaagacatgatctcttcc

SEQ ID NO: 709079 - DNA, 240 bp, Homo sapiens
ggagctggacagcacagagcgggcctgtgacactctgttgatgtgcatcgtcactgtcatgaaccatgggctacgcaacggtggtcgcgttggccacattcttcgcaagcccttcaaagatgagtctctctttccagcccgagttgtctattaccttctgttcttcttcatcggcatcatcattgtcctaaacctaatcttttgggtaatcatcgacaccttcgcttaccttcgtagtga

SEQ ID NO: 709080 - DNA, 113 bp, Homo sapiens
  misc_feature (78)..(78): n is a, c, g, or t
ctgtgacgtagaatatgtgctgtctgtgagaccgtgttcccaggagcactgactgatggggacgcttcccatgttgtngggagctctgcggctgtcatggctgtagttttcgt

SEQ ID NO: 709081 - DNA, 683 bp, Homo sapiens
gagaggctgtagccccagaatcgcttgtaccccgggaggttgaggttggagttgacccgagatcatgcgtacatggcacatttcccaacctgggcttaccagaagtgagacttttcctcaagagaagattgataataataattaaggaggaaattagacccaggtcttcccaggctggtccaacatcctggccctccgaatgatccctccccaccttcgagccgtctcccaagccagcccgggacttaccaggccaaacaatccacccatgtcccagctgtcccccagcgctttcttaatcttggtcctttcttctttgcccccagagaccctcctagaaggccatgtaagcccagccccctgccagagtgccgtccaccccgcccctcttgggcctgcccgttggctctgtttgccctcctcttgtggcggcacgggccctttgtggggcttctgtgccctgctcttggggcccacaggcggggctggtccaccacattcccacggcccccacagccttcaaagatgggtaaaggagcttgccctccctgggccccccacccttggtgaactcgccccacccaccccccacgccctgttccctgccaccccctcctagtggggaactagtgaatgacttgacctgtgacctccaataccataaatgtgatccccccccccca

SEQ ID NO: 709082 - DNA, 133 bp, Homo sapiens
ttagatgtagtaggatagtatgtatctggtccttaaagagaatctggaaaagcaggagggagggtggcttgtgttgttgggacatggcatctagaccggacagcgtcgttgaagcttgcgaggaaaacctgag

SEQ ID NO: 709083 - DNA, 116 bp, Homo sapiens
aagggaaaagggcgttaaagtaatacatttttataccaaatgtgtttatttttttgtacaagtaatccttaaaattgcaattgtaataggtgttaaaataaagtttttaaaaaatt

SEQ ID NO: 709084 - DNA, 564 bp, Homo sapiens
cgaccgcagctgaagcacatccctgcagccctggcgctggactccgatcgccgcaagttgccctctggcgccatgtcagcagaactggagctgccctggtgcatgccaggaggcagagccatgccagtggactcactgtgcgtcagcaacttgcacttcagcaataatgggaacgggggcagcgttccagcctcggtttctatttataatggagacatggaaaacatactgctggacgcacagcatgagtctggacggagtagctccaagagctctcactgtgacagcccacctcgctcgcagacaccacaagataccaacagagcttctgaaacagatacccatagcactggagagaaaaacagctcacagtctgaggacgctgatcttgacagacggaccgacgttgaccgcatctcgaagacacccctcccgcatggctatgggcatcggtcacgctcggccggccacatatcccccccaaggagctcctctcaccccccccgccccgcacggcccaccctcagcatgaggacacatgaccgtcctgcaccaccgggggcc

SEQ ID NO: 709085 - DNA, 438 bp, Homo sapiens
ctgtcattcaagtatgacacccctgatgccacctgtgctgtcccccatctgacagaaatggactgaggcagctgccagaggggatatgaaaaagcaattaacattttcagaaggggtggccttctatggtgtaaccttgttgtactgagattgcagggaagagacacaaagtttccagtcatgatcacaagaatagtatttcctgctggagtgattttttggtttgtttttatgaacatcctggattagtttgcaaaacattttacatttgaagaaatccaaaactcattttgcctgaagagttatattctttcatcgttaaatctgtaaaattacaaatataagtgtgtgtctgctttacttactcttcacaaaatagtatgtgtctagatctgattgtcataggcttgttctctcagaattagaagccaaaagaaa

SEQ ID NO: 709086 - DNA, 189 bp, Homo sapiens
actgtagatagatcatttgtgtgtgatctagtatagtcatctctttttgtgtgcatggaccaggcgcgagagtcataacatctaggtgctgggcccagagataggtcacaagctctactattggcaaacgcccaggtaagaaagtagagtcacatcaaatcagttgatgggccaacgagatatgtcaca

SEQ ID NO: 709087 - DNA, 739 bp, Homo sapiens
gtaggaactgcagtaagtagtggctggttgttcaaaatcatgggatgtagagactgaacagaattgcttctgagtgaactgaggcatagagagcggctgatatagtcaagcttgcctcttcttgaggagcaccaacatctgttatctgcaggatgctgcatagatttcttgtaaactggcattctagcctaagtgatgttcaatctaggctaagcatgggagagtgaagattaaaaaaaatcccgtgggtccggtaaatgacaaggtcatattaagaagttcggtgtaatactttgtaagagggggaagatagttgtaatgtgtattctatatgtagtgtgagagatttccctgagttaagtgtggaaaatcattgggaagaaacatgttacttgagggtgttaggagtgtacgatgattaggaagagtttggttacaggattcgtagaagtaagtgagagataagtatggtgggagttgtgtcagggccattcacaattgggttaggggtagaagtcgacagtgtacactttaacggtttgtaacagttgggatcctctgggaccgtggttaatttgcgtggacaatgctttgtacttggacttctaaggatgggtagctgaaaaggagcaccatgtcaagcatttgagcaattcttaaagtgtggagaatttgttcagaattgggggatggtgacctgatacggaggctgtaagtccttggtcaggggactgggacg

SEQ ID NO: 709088 - DNA, 1095 bp, Homo sapiens
  misc_feature (415)..(415): n is a, c, g, or t
gctcatgatgtacgcgcagtccaaaggcagtctactacgctgcacgctggaggatgacatcagtggccaagcccaacatacctcgagcaccatagaagaactttgcactgacagcagccttcacgaggcactggtatgcatccatgagagattctccgcacgctgggcattcaattggctacagatgttccaagtcagctgagaccctgcagcctgatatgtagcagttcattcgtcatgttactaccaggtgccaagacacgatcgactggactcctgggaccactattcatgtgggttgaacagtctggcaaacccgcgagcaaggcatgcagaacgcacgtgtgaaccgagcagcagaagcacaaccttgcgtgataccggctttcaaaagccggtcaccatcgttcacagncagccgtcgggcgacgtcgacttccttcagctgcgcattgcgcacagactccgagacacactgcaacgcgaccacacagcacttctgagaacagccacggtcgcctgccgcgacacggacgcattgtgacaccacgcacagacaagagagtgacgcaacgacgccctcgaagactatacacagccacgttcaccactggcagacacagccgtacactgcagcgagtgactttcattctagggccattcaccacatgacgacgggcggcacttcatcacgcattccagcattacttcacaaccgtactacagcactggaagacgtgttcttacttcacgccagatgaggacacatcgtagcaaccacgagaggcacaacgactcgttacaacgaacgtcatcgtgcgagggtgactgacccttgtcgacgagagcccttcagatacagaccagagagagcgcaccctgaccagcgagggcgccgcaagaaggcaacaccccatccgggtaaccacttcaggaggcacccgaacgggctaacctaccaagaattcgagatcagtatcacaccaaaggcgaggtcggtcagcacgagcacgagggtagcgaccgacgcactatcggacacgatataaaaacgacactaggcagcattcatcgaaaccaaaacgcgcaagcaca

SEQ ID NO: 709089 - DNA, 357 bp, Homo sapiens
gcgtgcgtctgggctggcttgtctctttgtgcctcagttctcgggctggctggtaatgccctgcgaatattggtcggtcggccttgatctctttctgggtcagctgtggctctgccatgtgcgtgctttactgtgacgttcgccgggcagtcccactttgcggatgtctgtctgtgtgcgtgctcgctatgtgcctgtcagcggaccgtgccggtggacgtgtacctgcctgtgtgcacgtccacgtacgttagtgtgcatgtctgtgtgcacatactatgcatgtcttacatgttagtgtgtctgcacgcatttgcacattgtgactgcatgcctgtttgtacatgatagtgtatg

SEQ ID NO: 709090 - DNA, 134 bp, Homo sapiens
acgacggcagagaaagatcgattggccttgtgtcagtatgctgaattcctaagatgagcatgaacactagtgagctgagagtcagtcactactgcatcggggtgaactaatccaggtttccagagaactgaatt

SEQ ID NO: 709091 - DNA, 130 bp, Homo sapiens
ctagaaatacacaaagcaaggagagccaaagctacagaccccacaaaaccagacgagctacctaagcaacagctaaaacagccacccgtctatgtcgcaacaatagtgggcaagcatttatcaggtcgca

SEQ ID NO: 709092 - DNA, 117 bp, Homo sapiens
atacctccgagacgtcgactttctgcagagaaggaccacaccaacctgcctcagtgaggtgatgacgccaaggattgaactggtggtggctccagcaggtgtgacgttgaaagaggt

SEQ ID NO: 709093 - DNA, 913 bp, Homo sapiens
gtgtgggctgtgagaggtctcgtcgctctaggaatagcgggtttggcagcaattgttgcatatggattatataaactgaagagcaggggaaatacctaaaatgtccattcatctgatccacatgcgtgtgtgccagcccaaggctttgttgtaggagcaatgacgtgtaggtatgggctatccatgttatcgggaattctggggcaaaacctaagccttagaagaagagatgctgtcttggtcttgtctggaggagcttggtttagttagatgtcttattattagagttacctattattgttggaaataaaactaatttgtatgggtaagatggttaacatggcatttcgaatattggcttcctttcttgcaggcttgattttgctgtggtgaccgaattactagtgactagtttactaactaggtcattcacggcaagtcacatgttaccgttacacatgtcacctaaatgcacttgatggtgttgaaatgtccaccttcttaaatttgaagatgaacttagtctcaagaagatagaggccaatctgagggttctcccggtttgctgcagaatgcagatattcgattgttcgcataggaagtcctattttgccccagtaaattcaactttggtctggctgttggggagggctgcccgcttaaaaaatcgtgtcacaaaggtccgggaatatacctggtaaccgtccccactggacatcttttcgcgtgtttcacccaaccgcagcgctaaacaagcgggtacagtttatagaacacgggcacgcaaactcggcccatgtggcgcaaattgggcataaaaaaatctgcacaaattttcccccgagaagcagtggctgccaacagacaaaggtggggcgctacacattcattctttctactactgccaaagggt

SEQ ID NO: 709094 - DNA, 549 bp, Homo sapiens
  misc_feature (359)..(359): n is a, c, g, or t
  misc_feature (395)..(395): n is a, c, g, or t
  misc_feature (455)..(456): n is a, c, g, or t
tcggggggggcaatggtgaggctgaagcttaaggaccaagtgtgggtgcaggtgggtgtgggtgactacattggcatctatgccagcatcagacaagacagcaccttctcgggatttttggtgtactcggactggcacagctccccagtctttgcttagtgcccactgcaaagtgagctcatgctctcactcctaaaaggagggtgtgaggctgacaaccaggtcatccaggagggctggcccccctggaatattgtgaatgactagggaggtggggtagagcactctccgtcctgctgctggcaaggaatgggaacagtggctgtctgcgatcaggtctggcagcatggggcagtggntggatttttgcccaagaccaaaggagtgtgctgtgntggcaagtgtaagtcccccagttgctttggtccaggagcccacggtggggtgcttttttnntggtcctttgtttttttggatcctccccaccccctcctggtcctggggcgggcccttttttcagagatcactcaataaacctaagaaccctca

SEQ ID NO: 709095 - DNA, 147 bp, Homo sapiens
gagagctgagcagtcaagatgtgtgacttcaccgaggaccagaccgcgagtcttcctccatccctttccactctggatctgatcccaagcactggagttcagggaggccttccactgttttgaccgacaggtgatggcaggatcttt

SEQ ID NO: 709096 - DNA, 953 bp, Homo sapiens
gcttgctggcttactctgagtagaggatgaacttgaaggtctcctttgatcatgttcgtctgtgtgagcttccgtgagtaaaccttgtgtcccatgattcttctccttgctcactcactcgcacgtatgcttgtctttcttgatgtcctggaagataccaagaatgctgccttatgtagatcctttgaagatcagcttcttatggccaggatcactttttaactgcgtatcgtgcccaggttcacgacgttatgtgcttaggctcttgagacctttattcacatcactcaatgtggtcttaatggacatgcttaagcaagagtcccaaacatctccatttactgcattgattcctgttgcatttgtataattcaatcctgtttaataacttttatttgagaatcatggggtacatgtgcagaattatttaaaaaagacatattgcagtaatggtgaggtcaaagtatgactaaatccatcgttccaatcaggtcagtttgttctaacttgtgtgcctccattacatctctcctcttcgtcttaatattcctcagggtcataactgttcgcaatctttaatcctccaatttatagcgtaatatttatatccccattatacgttgagaaccatgtgagcattaggagattgccgtgttgcctgcattcagtgagtaaggataagggttgccaggttgcattccatattggctcgcaagaacacaggtttcaattcgttaataatgggatggagtagaaagttgccaaaggaatggtaatggtgggaaccggcattgttattgtatttcaaccaaaggaaatgagatgggccatctggagaattgaatgccgaaatcatgtggatattggttgaaataggtgcacatatttgctgtggtatggacaatgtgaattggcgattatgggatgagggattacgggcgacgggttaaatt

SEQ ID NO: 709097 - DNA, 444 bp, Homo sapiens
ataaggataagaaaagtttctgtaatagatgatcctccaaattaaaatagaatgtgtagtttcttcaatgtgcgaaaatgtaaacttacctcaagcatttctaaatcaagttttctagttctagactgacagaaatgatgggacctggtggtttattcttcttggctttcagaactgtgccgatatatacaaaattactatctatgacaaagaacagagcagagctgatatttcagagttcaaaacagcatttgaaattttctacctgaccgtggaatccgatgatcctgttatgatcactctctcatcatactggagacagaggactgaacctgtatggcctgtgagaattcgcttgcattccaatgtgtttttatcccagatctaggatggccaataagatccttttgatcaatgtgatgatggggtgctgtggagacttgt

SEQ ID NO: 709098 - DNA, 232 bp, Homo sapiens
gatcccccgtgctccatgggttcggaatttctcgtttgaggaggttataaattctggagattgagggtgattattgctgcatccatgtgaatacacctactgccacagatctacacactttaaaatattttaaatagcacattctatgtatttttttacagtataactaagtaattacaaccattgtctcccactagcattctaaaatattgttgctatgacatgattcaag

SEQ ID NO: 709099 - DNA, 653 bp, Homo sapiens
gctctgtgtccacagagagagagtacctgtgtggatgctccatccgttgggggattccctagcctctgtgtacacttactgagagtacctatgtggacttaaatgatagctactgtctggcgtggcgcttactgtctggctgtgtgcatctactgtctggtgtggcagcctacgtgtctggcggtggccctactgtctgtcgtggcggctagtgtctgcgtgttggggctacccgtctgtgtgtgggcctactgtcggctgtgagcctactctctgtgcgtgggtcttgtctctgtcgtgggtctgctgtctggctgctgggcctactgtccgtggtgtgggcacaactgtctggcagtgggctggccagtcgatagggctggcacgtgcaatgagccggtgttcgtgcagccgtgagcgcattttgatgcaaatagaaggaatcagctgtgggtatataactctccgtatcataccaatatttaggactacactttgagaagcactgtattaatgtattccttgatctggacttaagtacactacccgggatatctaaacggagacgggatcggggaaccagcgattgggtccgggatggataacacatggtaggtgtggtcacccggagacttgacaaataaaaatacccg

SEQ ID NO: 709100 - DNA, 187 bp, Homo sapiens
  misc_feature (7)..(7): n is a, c, g, or t
agggggnccaggcccagggcaggggtcaaaggcccaggccctgatttcggcttcccaaagatctttccgccttagttaaaagcatgtgtcgggaaattcctcaaagggctcaaagtccctgtattttaaaacctttttacaatgtaaactgttcaaaactgttttttgtaacaaaaccttgttttta

SEQ ID NO: 709101 - DNA, 161 bp, Homo sapiens
tcacaagtataccttgctgtgtagtatacaacctagtccacagacccaacacaagagtacacaatgtaaaataactacaggatatgtgtacgaggtatatatgaaatgtagatcaattctgtctttagattcaggttacattcacaagataacttactagt

SEQ ID NO: 709102 - DNA, 332 bp, Homo sapiens
  misc_feature (300)..(300): n is a, c, g, or t
  misc_feature (304)..(304): n is a, c, g, or t
ctggccttcatttggtttagtattctggcaatgttttaccaaacagcagcttttcttctgggtttagctccagctctccctcacatattgacttttaccaaaccctttatttttactcacttaacctgggtcaggtgctcccaatagtcaagctctcaccataagcatctggcaccgagaacctgacaaccatgactacagagtgtttcctgcctttaaattatccagtttcttatggaggatagtgcttattctcaaaataggaaagtcataaatcagcaaaaatgttattaatctagnctanttaagcaatatactttaaaaatatatga

SEQ ID NO: 709103 - DNA, 168 bp, Homo sapiens
  misc_feature (13)..(13): n is a, c, g, or t
ccccccccccggnttttttattggggggggggggggggaacatttttcccccgggaaccccttttccccttgggccctttttgggggccccttaaacccggtttggcccaaaaaccgggggggggccgggcggggtttcccggggttttttcccccccccgggcccca

SEQ ID NO: 709104 - DNA, 384 bp, Homo sapiens
tgggaggctgaggcagagaattgcttgaacccaagaggcagaggttgcaatgagctgagaccgcaccactgcacccagcttgggcaacgagtgaaactctgtctcaaaaaaaaaaaaaaaaaaaaaaaggtttttaaaaaggccaaaacccctgtgtgggaaaaaggcattttttataggggccgggcacccctttaaaaccccccaaaggttttttccgggattgcaaaaaaagggggttctttcttgccttttaagctttttttttttttaaaaaaaaaaaatttaaagggcctaggggaattcttttttttggggggttgggggaatttttcgggggggggaaatttgaaattttaccaaggccccttaaaggggttaaaa

SEQ ID NO: 709105 - DNA, 1096 bp, Homo sapiens
cccacggcgtccggctgcgccgagcgctctgagggttcgtggcccaccgctccttcgcggtccctgccgccaccgtgtccacgctcagcgtcggtagcagaagatggtgggttcggaacagcgccatcgccgtccggtggtagtgcggggccctgtttcatggggtactgctgtctacttcgagccgcaaaagtacgaagtgagcccaacttcaagaacaggtcttcgaggaaccgaggacacagaaagcaggaagcgtcggccaggggagagagctgggcgtttccaaggtgtacctgaccttaaagatgctgaagctgttcagaagttcttccttgagaggaactacagcttggctgaagagttgactagactcagagggtggaatatgagagaggggcgtaggaccatcgtgacaaatgcaattgctgtgtgtggagcgccagcagcagttactgcaggtcgtgtacagcaaactcttccagcaccagtgttccagatgcttctgagctaagctcgccaggaagttagtcagagaatggtaagtgctcagagcgttggctgaagatgatgtggaatgagaaacaaatgtcaacactactacatatctcagttaaacaatattttaaaaattcttggtagtcgagcagctctgggggaataagggcaattatgcttgttatgaactacactgaaatctaccaaagttaacgtatactttggtggatccatttgtctatgatttatttttcccagggaaacggggattgggcagaagaaatttcattctataaataccgtatgtgagttactacagcttccgggacatgggaaatcctggaaactagttccacgctaaacggtccattgcaccgggggcagtgtctaaaaatccccgggggtccgtcttggaaaccacggccgaaaaagagtctgtggagcaacgagcaaaggtgccaatatacgagcagcaatgtcgcatgtggcactggtacaacgtcgtgtgttcaacagcataacatttgctaacatctcattatatagacgacaatagagacgtgatgacagatacactgtgcgatgacacggcacggca

SEQ ID NO: 709106 - DNA, 431 bp, Homo sapiens
ctgcttgcactggctggaaaggccaagaccaaggggctgcagagtggtgtggacattggagttaagtatgcggagaaacaggagaggaactttgacgacgccaccatgaaggccggccagtgcgtcatcgggctgcagatgggcaccaagacaagtgtgccagccagtctggcatgacagcctatggtaccaggagacatctctatgaccccaagaaccatatcctgcctcccatggtaccactgcaccatcgagcctcccagatgggcaccaacaagtgtgccagccaggtgggcatgacagctccagggacccggaggcgaatctatgacaaccaagctgggcaccgtgacaagtgcgactaactcttccatgtccctgcagatgggctacacgcagggcgccaacagagcggtcaggtcttcggactg

SEQ ID NO: 709107 - DNA, 353 bp, Homo sapiens
  misc_feature (179)..(179): n is a, c, g, or t
  misc_feature (345)..(345): n is a, c, g, or t
gtccgagatccggcgaggataggagtatcggatcaaaggacagctcagcacgcagcatgcagtcaaaagcttagactagcacaccccacgggaaacagcagtgattaatctttaggcataaacgaaagtttaactaagctatactaaacccagggttggtccatttcgtggccagccancggggtcacacgattaacccaagtcaatagaagccggcgtaaagagtgttttagatcaccccctccccaataaagctaaaactcaactgagttgtaaaaaactccagttgacacaaaatagactacgaaagtggctttaacatatctgaacacacaatagctaagnaccaaact

SEQ ID NO: 709108 - DNA, 634 bp, Homo sapiens
  misc_feature (255)..(255): n is a, c, g, or t
tcgtatacaagcgtacaaaggctttaaactcaatacgaacatctacgggatgtacttagatgccttaaaaaagggggcagatctaatttatatttgaaccctacactttccaaagttcaccaatgaccgcagtactagaagattagaggcacttcacaagcattgaagaaaaatctactggatacttactttcttagcacaggtagttcttagcttaaccaccaatggcgactgggttcattctggaatcctggnaggagcttcctcgtgccacccagtgtttctgggccctctgtgtgagcagccaggtgtgagctgttttagaagcagcgtgttgccttcatctctcccgtttcccaaaagaacaaaggataaaggtgacagtcacactcctgggttaaaaaaagcattccagaaccacttctctttatgggcacaacaaagaaaacgaagactgaagttcgcctacccaaaatgaaaagtaggctttacagtcaaaagtacttctgtggatagctaaataacttcattttcttgaaatagagcaactttgagtgaaatctgcaacatggattccatgtatgtaagatactgctgtacagaagagtaaggcttccggtgccaatgaggcgtc

SEQ ID NO: 709109 - DNA, 166 bp, Homo sapiens
tatttaactcgtaagtcaggactacggctggctgggatatggcagctctagcttgggctgtgtgatttggagcaagtaccttccttctctgtgccctagtttcgtcatatacattgcaataagctgtaacagacaatccgaaggttccctccagatacaaattctc

SEQ ID NO: 709110 - DNA, 298 bp, Homo sapiens
ggtccggttggggacgagcccggagtcgagaccaatattgtaagcaaatcgttgtatggaccacttatttcatactgctgtcataaacatcctgtgtgtaatattattctctaaaacgtagcacccttcagcaggaccctataaaactttcctccagcccttgcctctttgcaggtagccccttctctgctgagctgcccactgcaacatattttcacaatttctctaataaatctgcccttctttacctacaactatcttggtaaatggctttaccacctgcaaaactgaccctagg

SEQ ID NO: 709111 - DNA, 340 bp, Homo sapiens
gagctacgctatactcgcacgaaacggggtcaaacaggcgcgcataggaatcacgcatcacgcatgccgatagaaatcaccttccacccttactagcacaatccaggacgccctcggcttagttctcttccttctctccttgatgacataagcacatacttgtgcacgagaattccctaagcgacccagagaatgtatatgcctagtcggccccttacgtcgccctccccagattcaaggcccggagatgatactttgcctgttcgcctacgcaattctccgatccgtccctaacaaactaggaggcgtccttgccctattactatccatcctcatccta

SEQ ID NO: 709112 - DNA, 1184 bp, Homo sapiens
  misc_feature (133)..(133): n is a, c, g, or t
  misc_feature (617)..(617): n is a, c, g, or t
ctctcttgtttttttcgagctgagatcagactgaattcgtgaagcgatgaagagggagagagcagagcgagcagcaagagagggttgctatttgcgcttacctgtcttctgttcattggttgatattctttcngccgaggtgtgtgtacgaccacgtggggggcccctgttccgctgctgttgcccgggtgattttcggcgacacctccaagtctttgtggtactcttcttccgggcacacattggcgttcttatcccaaggtaggtcgccgccggagatgttcgtcctggcccacgcttgtcgtggggcaccccgacgagtgcgccccccgttgtgaggccaacctgggctttcactgcttcagggtggttttcccttggaccctctccccgtccccttttttgctcgcccgcgctttggccccctcgtagttggtgattccccccaccaggggtcccaaccttgcaaagcaaagttttgcttgacctgtaaggaaaagagtttgattcccccggtcttgggtataaaagctgggaagattggcccctagaagttccttgaaggtctgggtgagtgcctgccacattggttgagataatggtttcctcggcacagncccacatgtgtgtgttctgagacgctttctcacgacgtaatacccaccttttgggtctgcattttgcctgttctcgtgtattatgagcaccagaccagttgtcggtggcgtgtccatccaaagccagtggcacccagaaggctgcctgggagcctggccctaggtccacaccagatctgccccagaataaggctccaggaaggcgtcattatgtgaattattatccctgttattacactgcccacccccacatcgttaaatccagtggtggaagacaccggtctccagagactgtgttgtgttccaattggcccatatttacagttttagttagtcaaaagactggtttaatgatacaccaatagccatcgttcaaaccttccagaaggcaaaggagaatagttttcgtggacccctttggttttcttttttgcgtgtggcagttttaagttattagtttttaaaatccagtactttttaatggagaaccaccttgacccaaaatttgtccccagaagttttgagacccctttaaaaagttcaatgagaaacaaaaaaaaaaaataa

SEQ ID NO: 709113 - DNA, 1229 bp, Homo sapiens
gcacggagctcactggtacgcgcgagtgagatgcatactgacgccaaaatccgtgctgaaaatggaacagggtccagctccacggggtcctggctgcagactaccaggcactattgcctagcgtaactagaacctagcatgtacgcaggccagataggcatctagatatcctatcctgcaaggtgacacctactgtcctggcgggtgtgtacgaggccggccgaggatgaaggtcagcacagagatcttacaacaaggccacactcgaagtgatcctgaggccgaagattgaggctgcctaggtgtcgcagagcacagagccgggcagacggctgatcaggaacacgtagcgaggcggaagagcagactagggcacgtagcacaccccgaacaccacatacaaacacacgagacagcaagcaacgtaagaacagcagatagaccaggaactacataactcctaggaccatagtaacgaactaagacatagaccgaacacatagaccatgacactaagagatagaaatagccacggtagtagacacaatcgccaaaatacaacataactagcagaaggtacagacctggcagccacacatggaacaacctcgacacggagacccctacagtcgccagagcatcgctaacccatgcccaaggacacaagcacaaacgcgaagagccacgaagagccaaaacctagaactcatatgaccacaatacgaaaacacatccaaatacaaaacctaagaaacaacataactagcacacacatcacaacacaccacaaccaatacaatactaaccatcaaacaaccccatgaatacctaaaaatcaaagatagccatacacatacactaacattaacacacccacgaataacaacaaaaacaaacacataaaactacacaagaatacaaacataacccaggtctaaaaaattgaactatgccaacaatgacatcttaaaacaatcccacaacaaaaccccaacacagcaccaacccatagaagagcacacagaaacaacgaaaacccaaatagcaaaacagaaaagcaagataaagcccccaataacaaccaaggaaaacaaaaaccaaaaaaacgaacagacatggaacaccaaatcgaaccaagggaaacaaatgaagcaatgtcaagcagtagatacaacaaacagacaacagatagaaaaagacatcgaacacgaaaaagaacccaaaggcag

SEQ ID NO: 709114 - DNA, 1098 bp, Homo sapiens
aggtccaccactactggccatctgatctataaatgcggtggcatcgccaacagaaccattgaaaaattcagagaacggaggctgctgacgatggcaaagggctccttcaagctatgcctgggctctatggataacacctgataagcctgacgcggtgaacgctggctagtcacccattgactatcgtcgcttgctggcaaatctccgcagcactcgagcatacgtacttatcgtcgactgatccattcgatagccacctgtgcacaaccagcacgcactatatatacaacaaaccatgcactctacagcggcaccacttcctcacgcgccctgcacctgctgccatgcctccctgcactcccgctagcacctgccctggcctgctcacgacatccacactcctcgacacgcccccgcgctcactcctcacacaagcacaactgcgacacccacggcaccacacagaaacagcacgacacacttgccccaccttatatcctagcgcgcatcctcaccccatcatcagtagcgcgcccggattggataccacccacacccctcaacattctggctccagagatctgataccaactcacaacacaacaccctgcgccacattagtccccaagcattgacacgcccccctcatccgctcctctaaaagcgagtccagaccacacctacgcccgccagcgcatgtcatttgacaacgccgcaccactccctcgcggcacactaacaacggacgcaaccaagcacttccaacagccctcctcctttcctaaccccaacctcatgcagccgcgacacacccacccacttgcagccgcccattacccgacgacgatcctccaccgtcaaaccaaatcaaggcatcaacacaccaactactttcagcatgccacccgacacctacacataccctggcgtgcatacaacgccgccacaaattcgtcactgggaaccaaacacatcacattgtgccctagctcaagcacccaccacacgttgccctcctaagcctcaattagcccccctattgagccatactccccaacactgacagcacacttcacccccacacacgtgttcatcaac

SEQ ID NO: 709115 - DNA, 234 bp, Homo sapiens
cagcgtcagggctgatgggccctgactcttccccataataactgaccacccttgacactccccttgtagactctcccagcatgtaccccaggcagccactcttagccttgggctttgacatgagaagagccctccttatatcccatatgggccagatcctttacttacacatgggaccagtgaggtcttggggtaaaaagaccctccaaagagatacaaagggcctgcctcctg

SEQ ID NO: 709116 - DNA, 708 bp, Homo sapiens
  misc_feature (513)..(513): n is a, c, g, or t
  misc_feature (570)..(570): n is a, c, g, or t
  misc_feature (590)..(590): n is a, c, g, or t
  misc_feature (620)..(620): n is a, c, g, or t
  misc_feature (669)..(669): n is a, c, g, or t
  misc_feature (678)..(678): n is a, c, g, or t
  misc_feature (708)..(708): n is a, c, g, or t
atcccccgggctgcaggattcggcacgaggccgcccatacacaatttccatcccctgcataagtgcctcaagtagaagatggagatgggcagctgataatcacctgtcattaaaggaaagctgtcatctcaaaggcagatatgaaacaagcagaactaaatagtccgggcagaaaccaagacaatttggggaacagaagggaatttccaaaggagatactgtacctaatatcctcagtgcagtaagagaatataatagcatctgtgaaacagggagcatttgagaaactcttgaagatcaataatgattgcaaatggcatagcagtaatgttggagatgaacacaaggaggcggaagagagccctggaatcaggtagaattggaggagtcatcttgtaggttcagcatctgaataatgagggagaaataaacaaagagatcatccaagacaaagccactgagcagatggatgtgattcccagttgaaagggccctggtgtgagaagacacccncaggcaggatggaggtcctaaaagctcagaactcagggaatagaaacagaaacgcantcttaaaagtttcaagagangaaaatcaagttgcgcatagaggatctggngtctgacctctcagcagccatatggggcgcagtgggatcctttccagtngtctagcanatcagtgagacggtcccagaggtgttcagn

SEQ ID NO: 709117 - DNA, 228 bp, Homo sapiens
gtggagagcagaggcacattctagcagaggttctgtctgggcctgtcctgagcagcagaggcggcaccgtggagaggcagcgatgtctacagcgtctgtggggagctgtggacacttccgaccagccatgacaggcctaagcctgctcagctctgcacgtatgaggatcctcttattcatgactctccgcgctgctgcacctgcaagagacctgcctctctgctgtga

SEQ ID NO: 709118 - DNA, 408 bp, Homo sapiens
caagaatatgagaaaggaaccctgttgttttccaagggaaatcattcctctctgtccccactgttgattaactaaagtcctggacaccttccttcctccactggccaagacccaccttgacccaccttgaacctcttttcagagccgagtggcatgaatatgtgtactgtttctgcttctgttgatggagtggctgtccgcgaatttaaggcaatgctatgttgagcttcattcatccgggatcctactatatgttgcctccctgctggttggatattatcttcatctctgccctgcattgtttagtaaaatgttatcgcgcttccatttctgcgaactttattgtgcggctctgggcctaacctttctgtggttttaaaacacatccctaccttgtattgattctca

SEQ ID NO: 709119 - DNA, 138 bp, Homo sapiens
ggataatctgctgcgcccatgctgagcctgtcacagtcaacaactgggaaacgcgttgcctctactgaagccagtggacaagtagccgaagcacttaaacagcttgatactatgtacttttggtacatttgtttattt

SEQ ID NO: 709120 - DNA, 449 bp, Homo sapiens
taacgcagagaggatcggatcaagttactactgaacttcataggtccacaaggacacgttccacaccagaatggtatggcaaccctgtcctgaaaatcatattgttagacaacggtgaaccttcgagctatgaagaagcgatggcgggcccagattccaacaaatggctagaagccatgcaatccgagataggatccatgtatgaaaacaaagtatggactttgacagactttcccgatgatctgcaagcgataggaaacaaatggatctttaagaagaagacggacgcggatggtaatgttaccatctataaatctcgacttgtcgctaagggttaacgacaagttcaaggggttgactacaatgagaccttctcacccgtagcgaagatgaagtccgtctgaatcatgtcgaacaagagtggtgatagcgcctcctctctgcgtttg

SEQ ID NO: 709121 - DNA, 104 bp, Homo sapiens
caattacagactgccattgcacactagatcagtcaaagtcacagatctggcttcagaatgcaggccactccacatacaggtctactatagtgcattacatacca

SEQ ID NO: 709122 - DNA, 159 bp, Homo sapiens
tgaaacgtatgtgtatacacgcacagatattattcctttcgctttaagatggtagtaatttctgtagcagccaagtactgaggctccctggggctgagatctccctttgtgggactccgagagccgccctgacagtcccagccgccacccaaggagccc

SEQ ID NO: 709123 - DNA, 159 bp, Homo sapiens
gtctgtccattgagggcaccgagcaaggtggacatcaacacagaggacctggaggacgggacgagcagggtcacctactgacccacagagccaggcagctacatcatcaacatcaagtgaggcgaccagcacgtgcctggcagacgcttatctgagaag

SEQ ID NO: 709124 - DNA, 178 bp, Homo sapiens
tcataaggagagagaatcagccaagcctccgaactgcacacaaacgtttaagaagggcgcttcgttatgggagatagtgggctcccagccacaagcaacgcgcaaggcccagctgtgacacacctacggaattactaccgggggggggagccgcccgggggctgtccattacgaagcc

SEQ ID NO: 709125 - DNA, 166 bp, Homo sapiens
aatcctcagaagctactaccatgtgacattctcatgactgcataatcctgcccggtgaaagaggcaggaatgacgcaggacagataagaggggtgggagcgttatcatgatggggagtcttgttctcgacatctattggaaaaacctgctccacatgtgtgaacgt

SEQ ID NO: 709126 - DNA, 109 bp, Homo sapiens
tatgggcattataggcaaagggcgcaacagggggtaggcattaagcaaccatagcacaggtctcagcgttgcacacaaaaacgagcgacgatactacctaccttgcacg

SEQ ID NO: 709127 - DNA, 510 bp, Homo sapiens
  misc_feature (410)..(410): n is a, c, g, or t
  misc_feature (432)..(432): n is a, c, g, or t
  misc_feature (449)..(449): n is a, c, g, or t
  misc_feature (489)..(489): n is a, c, g, or t
  misc_feature (503)..(503): n is a, c, g, or t
ttttgacttaattctgaaataagttaagactttggaagactgttgggaaggcataataggttttagaatgtgaggacatgagatctgggaggtgccagaggtggaatgatgtggtttggctgtgtctccacccaaatctcaccttgaattcccatgtgttgtgggagggactcagtgggagataattgaatcacggtcgcagttttccccatattgtcttcgtggtagtgagtaagtctcacaagatctgatggctttaaaaggggaaacctctttcacctggctctcattctctctctggcctgccacaaatataaaggatgtggccttttcacctttttgccatggatttttgagggcctcccccaggcaatgtgggaactgtggaaatttattggaacccatttttnctttataggattaccccagttntcaggtacatctttttncatcagtgtggaaaacgggactaattacagtagggttgtncattgtaaccaggngcacttt

SEQ ID NO: 709128 - DNA, 949 bp, Homo sapiens
gaaggaaaccagctctgccccccctaatccgcactactgctcctgcacggacgagctgaaccacttgcgcatccagacggcaaagatggtggcagctgatgcatcttcgccttcataaacgccagattctttatctccaggaagtttcaaggtgtctcgtcctcccgttacctgtgtggtggtagtcctcattccactctacgagagtttccttgcgtcagtgatgtgcacactcaccgtaggaggacaagacgggtggagttgtcgcctgaatgctgccagtcgagtccccctgacttttgttctgccaggcccgtgaatgttgcaaaacagcaacacgataaggtgcctgaagcttcggtcggaagagggatgaggtgcagtcatcgtttggtccaaggagtggcaagacattctgggagaccactgagtgggtatcctgaaggagcatttcactcgacaggggaaacccccagttcgacgtatctgacacggtgatgtacttgaggagagggaagacccttgctgtgcgtaatctcatgaggtcgctaactcggagtgacacgttgctcttgaggacgaaagatatcagtcgaaacggggaaattgagaaaccctcagctctgaaaaagctcaggctcatgctccccgagaataccttcaatacgctgtcttcctcaccgagagatagtgatcttgcctctgagcggatgatcctctgcagcagtctttgctgatatgccagaggttgaactgaagaggagtcttgccttttgtcttccagattgcaaccctaggagaccaaggctgagatgggctgagaccttgccaggagcggtacggggctctgaggccgggcgacttcaactaaatttgcggagagccgaataaacaatttgggccccagaaaaccttgccacgcacgcaaggggtcccaaccggggcccac

SEQ ID NO: 709129 - DNA, 392 bp, Homo sapiens
  misc_feature (30)..(30): n is a, c, g, or t
  misc_feature (129)..(129): n is a, c, g, or t
  misc_feature (273)..(273): n is a, c, g, or t
  misc_feature (341)..(341): n is a, c, g, or t
  misc_feature (344)..(344): n is a, c, g, or t
  misc_feature (348)..(348): n is a, c, g, or t
  misc_feature (392)..(392): n is a, c, g, or t
aattttaattaggcaaaatgttaaaatgantttcccattccctgaaagctaatatctactgatgtaaggtagaaaccatacttgaaagcaccttggatagaaagggaaattagggctggtcatggtggntcactcctgtaattccaacactttgggaggccaaggcaggtggattgcttgagtccaggagtttgaagccagcctgggcaacatggccaaaccctatctctataaaaaaatagctgggcgtggtggcatgtgcctgtggtcccngcaactttggaggctgaggtgggaagatctcttgggcccaggaggtggagattgcagtgagccgagantcngccnatgcactgcagcctgggggacagagagagaccccgtctcaaaan

SEQ ID NO: 709130 - DNA, 466 bp, Homo sapiens
  misc_feature (78)..(78): n is a, c, g, or t
tccccctacagactgacccagtttgtccatcccgggtgtatggtttcctttcctgagggtacccatagataacccccnccccccgagtttagtaaccatataattaaaagtacctcccagaatgttccatggaaataaaatattcctaacccaaaagtgtgtttaaggccccaggcacagtggctcaccccctgtaatccctagtgctttgggagataaggcgggaggatcacttaaggccagaagtttgagaccagcctgtgcaatatagcgagaccctgtctctacaaaaaattctaaaaattagctgggcatggtgacacacggctgtagtcccagatactcatgagggtgaaatggaagatcacttgagtccaggagtttcaggctgcagtgagctgtgatcacaccagtgcattccagcttggatgaggcagcaagaccctgtctcaaaaaacaaaaacaa

SEQ ID NO: 709131 - DNA, 133 bp, Homo sapiens
agtcggataaaagcccagcacatacagtatacccagggaagccaaaacattggatacccctggactatactataatttttattgttattttagagcatattccttctgcttatatattaaaaagttacctgta

SEQ ID NO: 709132 - DNA, 797 bp, Homo sapiens
  misc_feature (718)..(718): n is a, c, g, or t
agcgggtggttggtgtgcgggttacggtgggaggactcgtaggggaggtgggctgcgcttgtccagactgcatccccgaacaggatggcggagggagataatcgcagtgccagacctgctggtgtgcgctagactggaagtctcggaagtaacacgccatgcgaggcatggggacgaagtgatgcgtgagtggcgttgagtaagagtccctccggaatgggaacacgacgccgtgtgtttgcagcgtgccatcagtggggtgtggtgtgtcgtgtcggtgtactcgtgatgtgatctactagtctaaatgccgatctgtgctgtacgcggcgttttccgtgtttggtatgtcgtggtgctgtgggtgactaacttgttccctttctagcgcgctagaatcttatgaggctcctaagtaacattgggacacactgaacgaaagcagcgagataggattccgattgaatagtgctggcaggcaaatctaagttagaaacgtcgaggcatgaagctcgttggagttggcgttgagataacgcctccttgagcaactaaatggaagagaaagcgtacgactggtaccttcactgaccatgaagtcgcgattccctgtggcgtgcgggttgcatgtgggatggggacaatccaatgtaccgcaatcgtgcattcgtaaatcgtaccatgaatagtgacgttgccgttacctagttggcttccntgggagctaaatatcaaggaatgggaactccactctttgaatgtacaattgcgaatgggccaagagcggatagataaaa

SEQ ID NO: 709133 - DNA, 428 bp, Homo sapiens
gcggttgctgggtcagatggtagatatatatatatgcctctctgtctctctctctctttctatgtatatatgtatgtttgtgtgtgtgtatatatatatatacacctatatagatatatgtgtgtgtatatgtatacacctatatagatgtatgtgtgtgtatatatacatatatatattatatatatactttttttttttttaaagaaactgtctaattgtttttcagagtggctgggccattttgcatccctacggtgatgcagattttccgcatcctcaccagcatttggtggagttgctgtttttcattttagccgcgtcctggtagggatgtgctggcagggtgctgtggtcctcattcgcgtttccctggtggccagtgacgtggagcatctttctttgtgcttatttgccatctgtgggtt

SEQ ID NO: 709134 - DNA, 564 bp, Homo sapiens
  misc_feature (49)..(49): n is a, c, g, or t
  misc_feature (161)..(161): n is a, c, g, or t
  misc_feature (243)..(243): n is a, c, g, or t
  misc_feature (245)..(245): n is a, c, g, or t
  misc_feature (247)..(247): n is a, c, g, or t
  misc_feature (314)..(314): n is a, c, g, or t
  misc_feature (437)..(437): n is a, c, g, or t
  misc_feature (465)..(465): n is a, c, g, or t
  misc_feature (555)..(555): n is a, c, g, or t
taaaccacactggttaaaaagaggtggaaaattcaaaggaaaaaaagcngaaaatgtttctcattaagtaagggttacacaaaggtaatatttataaaatatatatttgtatatttataatttagagacgaaaaaaacggaatggcaaagtgatgcctgcngtggttagacctcagaaacttgaccgtttcccacaaacagtttttcttgacaaagggggttaacaaggaccaccccagtttntntntagtggccattggctggggagcggggctctaagaccgggtcctcagaggtttcaagggactggatcnccctgggcagccccacagcatgcctttggaagtggtccatggggagggtgtggtcccagtggcccaggttgtcctccgggtgggcggtcttctcctccctctccaggcagcacaccgtcagcnggacaaaccaggaggagaggggcacgcngagggccaggatcacccaggcgaaacccatctggctcaggcagaggggggctctttccggcggttggtccccctcggccacaagggaaangtcccctgc

SEQ ID NO: 709135 - DNA, 107 bp, Homo sapiens
ccggcacatgtgctgcatctgtggagcggaccactccctcacattcacaggccatggactcacgtctgttacagactcctacaacactgaccaataaaaaaaaaatg

SEQ ID NO: 709136 - DNA, 153 bp, Homo sapiens
cgaagtatacgtttggcaggggtgaagtccaaacgaaaagatacctgtccttcgagtcagtgagttaacacctgtacaccaccttggtgggagaacaagaaagctcagctggtgtgtgattgcacacgacgtggatcctgtcgctctgccaaa

SEQ ID NO: 709137 - DNA, 150 bp, Homo sapiens
gctcggtaccgtgctgcgagggtatgtgaagggtgtttaaagccaatattttgtacattgctttgaaagatgctgctgatgcttcctcagcgccgatggagggtggccgaggagagtagcctgtttctggggtaggcggggtcactgcgt

SEQ ID NO: 709138 - DNA, 218 bp, Homo sapiens
cagcacatgcgcccatggccacccatttttccaacatttcacatcaagcatcactgtcacatcacaatgcaaacacacatcaaattcaggtcaatttcaccaagcaacatgttttcccagcattcacacatcagagctcatacacttcagctttcattcatgcacatcaaacatttcatcggccaccatccatcaccattatattaccatccaccagc

SEQ ID NO: 709139 - DNA, 361 bp, Homo sapiens
ctggagaggctgcaggcacagcacatacctatagtgctatatatgttagatttatacctaagtgtttcattttttagagggattttaaattggtattgtatttaaaatgtcagtgcccatgtgtctgtaagctagcatgtagaaatagaattgacttttgatcgtttcatcttatgtcttgacgacctagttaaactcacttattagttctagtgagggctttatagaggttagattccttgtaattttctatgcagagacaatcatgttatctgtaaatgagggcagttttgtttcttcctttcctgtctgtgtgcctcttattgccttttcttgccttattgcactgatagcctcccag

SEQ ID NO: 709140 - DNA, 367 bp, Homo sapiens
atcgcttgtccaccaataccttgcataagcaggaagcaggctttggagggcagaagcaggaagcggcagaagcaggagtgcagaagcaggaagctcctgcttctgccgcttcctgcttctgcttcctgcttctgcccttcctgcttctgccactactattacgtttctgatcattatactcctgtttttttgctttgggaaattagggggattttgcgctctccctcatctttgtccaaaatttgtcaatatatccggcactataaaaatagaaatcacatgtgtatctctcagcgtgcttagcacatgtgacagcttaacatgaaactcttcctgacacagttttgatctctaatagctcaggggt

SEQ ID NO: 709141 - DNA, 797 bp, Homo sapiens
tggtcttaggtacaaaattttattaacaggtcttaagaagagcaacatccagaccccagaaataaagttgccaaggaaaccctgttatcctgtgggactgctggggcttgcaggcggtctggatccccacccttctgtctctgaaatgggggtgggggcggcagtatctcatcttaggggtcccacaatgctcacgtggtcaggcagggcgctactaagggccaatcttaccagtggggtcccaggcagcatgatcttcaccttgatgcccagaacaccttgtgtctgagcaacacgtggcgcacagcagtgtcaaccgtagtagtaaccaggtctccgctggggatcaatcaggccatccacaaatttcagggattgagccctctgtcctcggagtttcccagaaaccaaaactcgaagcctttgggccccattctcatgatgaaccgagacaccatagcaggccctccgaaagaaagccctcctaggagttggtaccgcagagactctgcctgggcaatgccaacaaaagaccctctagtggcaacccttttcaagcataaacgctctaaagtggcccttgtggaaaagacaaaaccttttttgaactctacagcaagctagttcccggaatccggcggcctttttacaccaagaacattctgtggtccgggggcaaccataatgatttccggccctggtggggtaaaccgcccctaaactccgagtagcccttttagccagattccgagaaaaaatcattcaggtcagttgaagatgccccacgcgacatctct

SEQ ID NO: 709142 - DNA, 898 bp, Homo sapiens
  misc_feature (20)..(20): n is a, c, g, or t
  misc_feature (78)..(78): n is a, c, g, or t
  misc_feature (136)..(136): n is a, c, g, or t
  misc_feature (164)..(164): n is a, c, g, or t
  misc_feature (299)..(299): n is a, c, g, or t
  misc_feature (301)..(301): n is a, c, g, or t
  misc_feature (303)..(304): n is a, c, g, or t
  misc_feature (306)..(306): n is a, c, g, or t
  misc_feature (318)..(319): n is a, c, g, or t
  misc_feature (364)..(364): n is a, c, g, or t
  misc_feature (399)..(399): n is a, c, g, or t
  misc_feature (415)..(416): n is a, c, g, or t
  misc_feature (418)..(420): n is a, c, g, or t
  misc_feature (422)..(422): n is a, c, g, or t
  misc_feature (424)..(424): n is a, c, g, or t
  misc_feature (430)..(430): n is a, c, g, or t
  misc_feature (456)..(456): n is a, c, g, or t
  misc_feature (463)..(465): n is a, c, g, or t
  misc_feature (467)..(467): n is a, c, g, or t
  misc_feature (473)..(473): n is a, c, g, or t
  misc_feature (477)..(477): n is a, c, g, or t
  misc_feature (487)..(487): n is a, c, g, or t
  misc_feature (494)..(495): n is a, c, g, or t
  misc_feature (500)..(500): n is a, c, g, or t
  misc_feature (543)..(543): n is a, c, g, or t
  misc_feature (665)..(665): n is a, c, g, or t
  misc_feature (674)..(674): n is a, c, g, or t
  misc_feature (698)..(698): n is a, c, g, or t
  misc_feature (710)..(710): n is a, c, g, or t
  misc_feature (712)..(713): n is a, c, g, or t
  misc_feature (727)..(727): n is a, c, g, or t
  misc_feature (829)..(829): n is a, c, g, or t
  misc_feature (850)..(850): n is a, c, g, or t
gggaacatcctttgtgaggnactgtagcctttttttatttgaaactacttaaactccaagaaaagctcactaactctntttcaagtgcaacaacaaatgtaatagctgaaaatagctaatttaatgattatttgtnacacagacacgattatgtgagccaaganagcctccccacctctgtctcccctgtggaggaggaggtctttgtgtgcttttgtgtgatggttccactgaattcattacaatagaaatggacatttgatattcataacgatccaacatctgagcaatcttctttngngnnanaccatgtttatnnctcttttctaattcttcaggatcaaatttccaccaagtttcaggntcatgaaactctactctgtatccttttcctatggncacttccacatatggnntnnntngncaagcntgtatattagtgttatctattataantggggannntncctgancganagcgtgtgtngggctgnnctggntccagtgatgggcatgagcaagttgattaacattatacctgtncccatcttgatggtgaaaatagtgatcagtgctgaacacaatgccatcacgattctgaccaagcagaattcgagacaatgttgttttcccagaaccaggcagacctcttaaaagaataagtnacttctgcnatttatttaacttttcctcttganactgctggttcncnnacctgtctgttccnttatgcttgtccatacaatgatctttccagcatctttctctgacttcacagaaaccattactcacatatcgatcttgcatactgcagccatttccagagggntgaacactactcctattctcnctacagtcagtatatttcattgttctgatcaaaagtcatgcaattcag

SEQ ID NO: 709143 - DNA, 903 bp, Homo sapiens
  misc_feature (1)..(1): n is a, c, g, or t
  misc_feature (9)..(9): n is a, c, g, or t
  misc_feature (94)..(94): n is a, c, g, or t
  misc_feature (264)..(264): n is a, c, g, or t
  misc_feature (274)..(274): n is a, c, g, or t
  misc_feature (298)..(299): n is a, c, g, or t
ncttagcgnggaacaagaaagtggtttacattatgaaccggatcatgcctatcccagaaacattcaaatcaagcccatgagtacccacgtggcnggggggggtgaaccaatataaatccacaagccagcttgattccaccaatcagagaagttgaagatgaatgttgactcccaggagaccagaactatttttttaaagcctgacaaacttcataaatggggatgggacttttcttcttacatgctgagggggggggggaaacnttagggtgancaaaaatagccaaaaaataaagtnnacggatctttctctttgtctggcttgaatattgcttccatgtattttggaaaagaaaatgatttcatttataaatgaacatactaaaatagtcatgtatagcctctagcatttgagattatttttatttattagaaagagaaaatgttttttcttttcattggcaaatatcttccctatatctaaacatgggaaatctaaatgaggtaggggtcagactccttatgggggggtgtctggtggtgctttttccttgggggagaggagtggcctcaccccaattatggggagtaagggggagggatgtgtgagaacgtttggaagatggcctaaaaaaaagatatgggcttgttggccaacggtgggaggtgggggggcgtcgcttaaggggggggattcaggaactgggtgatggatcgttggcgagggagttggtaggggagaggtgtttctttttaaggcctggtggggatcgacaagactgggatagccacgagaacgtgggggaaaggcgcaatggccggacggtggagggcgtgtggggtttgtattagcgggcgcgtgggggtgaacacgggttgggtgattgcgaagcgcgaggtggg

SEQ ID NO: 709144 - DNA, 899 bp, Homo sapiens
  misc_feature (300)..(300): n is a, c, g, or t
  misc_feature (302)..(302): n is a, c, g, or t
  misc_feature (304)..(305): n is a, c, g, or t
  misc_feature (307)..(307): n is a, c, g, or t
  misc_feature (319)..(320): n is a, c, g, or t
  misc_feature (365)..(365): n is a, c, g, or t
  misc_feature (400)..(400): n is a, c, g, or t
  misc_feature (416)..(417): n is a, c, g, or t
  misc_feature (419)..(421): n is a, c, g, or t
  misc_feature (423)..(423): n is a, c, g, or t
  misc_feature (425)..(425): n is a, c, g, or t
  misc_feature (431)..(431): n is a, c, g, or t
  misc_feature (457)..(457): n is a, c, g, or t
  misc_feature (464)..(466): n is a, c, g, or t
  misc_feature (468)..(468): n is a, c, g, or t
  misc_feature (474)..(474): n is a, c, g, or t
  misc_feature (478)..(478): n is a, c, g, or t
  misc_feature (488)..(488): n is a, c, g, or t
  misc_feature (495)..(496): n is a, c, g, or t
  misc_feature (501)..(501): n is a, c, g, or t
  misc_feature (544)..(544): n is a, c, g, or t
  misc_feature (666)..(666): n is a, c, g, or t
  misc_feature (675)..(675): n is a, c, g, or t
  misc_feature (699)..(699): n is a, c, g, or t
  misc_feature (711)..(711): n is a, c, g, or t
  misc_feature (713)..(714): n is a, c, g, or t
  misc_feature (728)..(728): n is a, c, g, or t
  misc_feature (830)..(830): n is a, c, g, or t
  misc_feature (851)..(851): n is a, c, g, or t
tcgaatcgagctcggtaccggtatgtcctcgatcgtgagctggtggcgtctgttctgggttccggtcgtggtgcatcaccagatgttgattaggattatacctgtacccatcttgatggtgaaaatagtcatcagtgctgaacacaatgccatcacgattctgaccaagcagaattctctgtctcccctgtggaggaggaggtctttgtgtgcttttgtgtgatggttccactgaattcattacaatagaaatggacatttgatattcataacgatccaacatctgagcaatcttctttngngnnanaccatgtttatnnctcttttctaattcttcaggatcaaatttccaccaagtttcaggntcatgaaactctactctgtatccttttcctatggncacttccacatatggnntnnntngncaagcntgtatattagtgttatctattataantggggannntncctgancganagcgtgtgtngggctgnnctggntccagtgatgggcatgagcaagttgattaacattatacctgtncccatcttgatggtgaaaatagtgatcagtgctgaacacaatgccatcacgattctgaccaagcagaattcgagacaatgttgttttcccagaaccaggcagacctcttaaaagaataagtnacttctgcnatttatttaacttttcctcttganactgctggttcncnnacctgtctgttccnttatgcttgtccatacaatgatctttccagcatctttctctgacttcacagaaaccattactcacatatcgatcttgcatactgcagccatttccagagggntgaacactactcctattctcnctacagtcagtatatttcattgttctgatcaaaagtcatgcaattcag

SEQ ID NO: 709145 - DNA, 144 bp, Homo sapiens
agagtgagtagtagattgtgtagtgggaccagcgtgtcgatactggcaaagttgtgagtcgaatcctggaagccctgcacgaacaagacctgggtcctgcgttggaatgggccgtctcccacaggcagcgcctgctggaactca

SEQ ID NO: 709146 - DNA, 301 bp, Homo sapiens
cggcttcgaggccctggagacgcccttcgtcgagtatacggaaagcctcggcaagttcctgcccgacctcgaccggccgaacgcgggcgtgttctcgttctaggacgacgacgaatcctggctctcgctccgctacgacctcaccgcgccgctcgctcggttcgtggccgagcactacgacaccctgcccaagccctaccggagttttagagccggctacgttttccgcaacgagaagccgggaccgggccgcttccggcagttcatgcagttcgacgccgacatcgtgggtgcctcctcg

SEQ ID NO: 709147 - DNA, 118 bp, Homo sapiens
gaatgagctgcaccagtagcggacatagtagcgtcagtacgcggtagcatcgagtacccctatgacgtcccgactatgcaaccaacacaacatacccccagcaggcgtgaccgctccg

SEQ ID NO: 709148 - DNA, 1743 bp, Homo sapiens
tccagtcgccatggtgccctctagagacgttcttcagatcgggggaaactgggaagatgaactggagcgtgagagctaataatgtctgggtggaagcatcaatcggcacttcgtgaaccggtggtcaaggatgctcaggcacgtccaactgaggctgggttggtgcttccccgcgtaactgcctattatcagaggtgctgcctcggccaggagggtctatgagtcgcgcacacgtagttgcgtagttgggggtcgccgcgacgcacacctagcttgaacattgagtgaccattacagtggaggccgtattgtgaactgaggagcagtagtccacgatctccttgggcaactgtagtcaatgatggagctagcggtgcatgtgctagaggtgggcgtagcggtccatggggggcgagatactaggaggaggcaagcgagcaaatgtcatgtgtggcgtggacgtcgacgagttgaggcgattgagattgtgtgcgagagatacacgtaggggcctagtagcctcttggcgatgaagggtgaacatccgagaagataaattcgtgggcgttagacgggtggagggggaccgagacgcgtgattaattgacgaaagcggcgaaaaagccctggggccaatgccacctggaaacgaagagggatccgtaggttgccaggacgtctacgcatcccaagaggagtcccaatacggggcaggacattagaccgcggcaagggcgaagcgagggacggcaacccgggtcgtgcaccctggcgcgctactgtaggacgctttgaatgaatgtcgggccccactgtgggaagcaccttggggtagaatggaacgtcgacatagagaaggaccttgaaaacaacgggacactcgagcgggaaaagattacctcgggggaggaacaaaaggccctacccggacgggcagtaggggtcctggaaaagcttgccagaaaacggttcatacatgccacttggccgggcatggggccttccacagaaaggcggcacacccggggtacacttcacgaccttagtgggggaaaggccgcccgttgggacacactgtgtgcgtagcagcccatatgatcccacgaggggacgtactaggcggtggcaccattcggggcgtgggccagcaacactgtagtctaagcgggaaaagcatgtggggcccaacgcgcacaggatcgctcgacattgtctggagaatggcgcttgaccggcatgcagaggagtgcgggtggcaacggcgttccaaagggccaggactgtcagagggggcacatcctttgcgaatcgcctcgggacacacaggaggagggcgcccgaggtacgacgagagtcccctgacaaccggatataccatgaccacaacggcccatgggcagcctactgaccgcgcccaagaaggcccacgagtacaagagtggcacgctacaccagtgccaaataggcacaagaacagacgggtgcacaacctgcgaaacaaacacagcggaggaccgacccgaaaggggcaagatggccaccaggatagatgcgctaccagcacggagcggcgtgcagcgcacgacagcgcacgccacaacaaaagacgcgcacacaacccacacgaggcacacagacgacaacgcagcaggacatacgacacaccaccagcagtagcaacaagacctcgaggaaaacaaagagaagaccgaagcaggcagcagacaccacggagcctagacg

SEQ ID NO: 709149 - DNA, 413 bp, Homo sapiens
  misc_feature (413)..(413): n is a, c, g, or t
agagaactagatattagtcagtctgttcttgttagattcgtctccatgtgatattaattgaagcacagagaaaggaggcacattgctgaaggaaacctatgtcctttagacagggagatggctttacaccagccagagacaaactcagatgactaagctgttgatcttcatctgctctgtcttaatcttatggtaggctgctatgctgttaaatgtgatgctgtcagcctgcagattgactcgcctcatcctgttatataccctccttggctaagcaggcttgcttatgagcagccttgcagcactatgctacagaagctgctgaatcaggcctaccagcgttcagttgctcttttgttggcttgggctggagtatcacgctgagcttgagcactgtggctctagatatgttn

SEQ ID NO: 709150 - DNA, 334 bp, Homo sapiens
catagatagtcaccgctccagcctgggctgacagagccagactcactcaaaaaaaaaaaaaaataagccggggcgtgatggcggggcaccttgtagtcccagctactcaggaggctgaggcaagagtatcacttgaccccaggaggcagaggtggcagtgagctgagatcacgccatggcactacagccggggcaacaagagcgaaatttggtctaaaaaaaaaaaatatcagagggctcctcctatgctctggatcaacttctctcggtaaaaacgtaaagctctctccgggggtcaggggtagggccggtgccgggggaaatacggggtgtg

SEQ ID NO: 709151 - DNA, 356 bp, Homo sapiens
tgggtgcaggagagtttgcatctcctgccaccgagcatacatcgttctgtttccctgcattcgttcctggctgtgtttcctgttggcactacacggcatatgataatgtcgtggctacgtacacccctgcgactctgaagaacattgccaacaagtttaagtgcaggttaaaactggcctgtctacactgttggtactcaactttgtgctgcccttctgcaggtttgatggtgatgagctcaccacagatgaaaggatacggtccctggctcagcggtggcagcccagtaagagtctgaggctggaagaacagagcgccaaagctgtggatacagacatgattatcctgccatgct

SEQ ID NO: 709152 - DNA, 161 bp, Homo sapiens
  misc_feature (119)..(119): n is a, c, g, or t
atacactctgctctggtcagcagttctgctcagcactagtagctgggatacaggcgccacatcagccagtacttgtgtattttagtaagacggattcatcatgttggcaggctggtcgnaactcctgactcggtgatcacctgctcggactcccgaagtgc

SEQ ID NO: 709153 - DNA, 134 bp, Homo sapiens
ataaaaatggctgaccctaacaatatgtacaaaaatatacaatgtaaataaaaactacaaacaaataacctttttaaagtacttacaacaaaaaaagcagggccttggaagtcttggtacttttttactcccct

SEQ ID NO: 709154 - DNA, 579 bp, Homo sapiens
  misc_feature (186)..(187): n is a, c, g, or t
agaataaaagggcccccccgcggcggggggggggcgccataaaaaggggtttttttttttaggggggggggggcccccctccttttttggggggggcccccccgggggtgggttttttttttttccccccccctttttttttttttaaaaaaaaaatctttttttttttccccaattttaaaaaannaaaattttttgtgcccccaaaaataaaaaaaaaaatttttttttttgcccccccccccccccccccccccggggggggtgttttcccccccccaccaaaaaatttctccccccccttttttttaataaaaaaggggggggggtctctcaagatttttttattaaaacccctcttttttttgggggggttttatatttttttccctcccccccaaaaatttttttttggggggtccccccccccccaaaaaaaaaaggggggttcccccccccaaaaaaaaggccgggggaaaaaatttttttttttcccccggggggatttattttattggccccgggtctaatttctttcccctaacctttattgggtaaatggttggctaggtttctgta

SEQ ID NO: 709155 - DNA, 216 bp, Homo sapiens
aattggaaatctgaaaaaagtctgaattttagttaatataccaatttcagtctcttggttttgacagatgtaccatggtgatgtaagatgttgaccttggggtaggctgggtgaagggtatacaggaactctttgtactatctctgcaacttctctgtaaatctagtctcatcccaaaataaaagtttatttaatttaaataaacattttataaga

SEQ ID NO: 709156 - DNA, 672 bp, Homo sapiens
  misc_feature (554)..(554): n is a, c, g, or t
  misc_feature (658)..(658): n is a, c, g, or t
gaactttcattctgctttgaaaataaggcttccccacagaatttacagctatctataacaggacagtgcaatatttatattaaagagtaccaattatgtcacttttcaatttacatcttactgagaatataccgaaatatattgaaatatatactgaaatatattgaaatatcactaaaaggaccatctctaatgtctcacaatgactgttgcaaaggaattcttaatcgtgggtgtgtgcccatgtgtgcatatatgtgtttgtcatttgaagtcctgaaacacgaaataccttaaaatctacatggtaaatttgtactccatcttaaataatatataattgagattgcaatcactcttaagaaagatataaactcaccaactatgtaaaccttcataatagtacacaaaagcttatttctgttgctacagttacatgatatcaaatgttggcctaatcatctcttggcatagcatgatgatacatagtgggaggctaccatcacctaagtatgaaggtgtctccatatacagtggtacccatatggaactanactagatcagtggtttataaacctatttgtatttgcatcttttaaattataactcatggcactcattactgacaaatagatcacatgtaccctattcaataggnttgtttttattctt

SEQ ID NO: 709157 - DNA, 970 bp, Homo sapiens
tctctgtagcaaacgccgtgatacgcggcagcggttacttcaatgagcatgggcaatatctgtgctcctagggtagcatcctgctatatgattagtcgtatggatgattaaaactagtaatattggcccggggtcattagaacgtgctgagcgaactcaaatggtgttgctggccgatcatttgaccttgttagcctagtgcagcagcgatattgcaaaagccgagtcgtctgctggatccaaaattagcgcgcttcgggacgtagataggggcactgctcttgtacaccggtgagcgaatagtagaaggggtttccttgccagccattgaaaaccagattgggcactgtgttgcacaccccgtgcttgggacatttgatccaccggattctatgggggctcctgatgtccatccaggaataatgggtcggcaaatggggaaccaatggcaacggcctttgatattaacttgacccttgaaagcatatagtaatccccaagggggtgtcggattttgaccatcacacttgtgggtgtccggttgctaaagaaaccaatttacgatgaacggtgatgtccagcctgtaacgggaggccaacttgcccaagctatgttcgaccaccattcgtgtgggggtggggtcacaaggtgtctcccaattgaattgccaaagattggagccaggctttgaacatgggtgtggccttggccttttaagaacagggtatgctgggtgaacacaaggagccctgaagagtacgacagcattctgagtaggaccccaatcaagtcgtgagggaacgaaaagagctcctcattggggcctggagttgaccatttgcgacccgtggaggaataatggtgtgtacaatggacccaaagcagtgtggtccatagttgcctgccaatggtagaaccagcattaacgggtcatccatgatgagtcagacacacgacacagatagtacg

SEQ ID NO: 709158 - DNA, 117 bp, Homo sapiens
gtgttaactgatcaatagctcagaatcagtgacactagcgacatctgctctgccttgttccctaggtgacacttccctctgtttctctttccttggctcccattcactcttccagaa

SEQ ID NO: 709159 - DNA, 190 bp, Homo sapiens
atgtggactcctttaacctctccaccctgatcacaagcacaagaacacatcttgattactcctgccagcatgacccatggaccataactatgattgatcgtccacactaatcgagagaccaaccggagaaccccctatacgatcttgaccgcaacggggaggtccgatagctaggtctgcaggacttcac

SEQ ID NO: 709160 - DNA, 579 bp, Homo sapiens
tccagctaaaaaccaggcgacgtgccgcgaggatgataaaaatacggtctcccccacaactaaaaagcctgcggggaacttgttctgcttcagcccaagagggatcaaaagatcaaaagcagtttgggaaggccaaaaccgtcaagggatggtgggagaaggaaaatccagggggtgtggggtctgtttggcaactggggtgaagggattgccctccccctgctgggatccccccagcccctccggtctggcaggaagggtgcagcctgcaacccccaagggcaggtgtggggctgccagatgctccaggcagggggccagaaggggctcacaaaggcttgccctccagggagatgacggcactgccccccagcttctctgccagggtgcaggcgtccttgacctcctcgtagcagattgcttgcaattcatgcttgatccctgtcagcttcttcttgatggcgaccttggagctggcataaatcattttgctcttaaggggcgcagactcggttgcccagaagataaacaccagatcctccttcttgctctccttgggctcataggttgcatcataga

SEQ ID NO: 709161 - DNA, 371 bp, Homo sapiens
tttttgagaaagagtctcaacctgtcacccaggctggagtgcagtggtgcaatcccggctcactgcaacctctgcctccagggttcaagcgaccttcccgccttagcctcccgagcagctggtattacaggtgtgtgccaccacgcccagctaatttctgtattttcagtagagacagggtttcaccatgttggtcaggccggtatcaaattcctgacctcaagggatccacctacctcagcctcccaaagtgctgggattacaggcatgagcaccacgcctggccaagcattgtaaacttttacactgttcatatatgaaagtgactccaactccttgaaaattttgtcttctggacatttgcgtcgacg

SEQ ID NO: 709162 - DNA, 170 bp, Homo sapiens
cgttagagttgcgccgaacgatgattcgagataggcgacgtccgcgcgatctggatggtcggggcgttgatgcgatgccgcctgccgtgggccacgatggcggctttgattctggtttgggctcggttcaatgccatgcgcgtgctcctgcgtggtggcgcggcccgcgg

SEQ ID NO: 709163 - DNA, 148 bp, Homo sapiens
gctatagtaccatctcccccgccaataaaaaagagaagaaaaaagagaaacccgctggcacctattctaaataaagctaagcatccgtttgcctgcctagctaaatagcattagcgatcccttgggaaatcctccccttgcaataaat

SEQ ID NO: 709164 - DNA, 288 bp, Homo sapiens
tactggtgtattcactcgccattgtctgcctcagtctcccgagtagctgggagtacaggcacccgccccacgcccggctaattttgtagtttttttttagtagaggtgggatttcaccatattggccaggctggtctcgaactcctggcctcaagtgatccgcccacctcggcctccaaaagtgctgggattacagacatgagccaccgcacctggcctccattttgtttttctttaacattgattgctttggctatgtgggatctttggcgagtgaaattacggcca

SEQ ID NO: 709165 - DNA, 262 bp, Homo sapiens
ccctttgcattgcctactctctgcctgctccttgtactagctcggccatcttgcgctcgtcctccacctgcagcacgatttccttcagcttctatgtattactagcttcagcgacttggtggccgcctgtttctctctggcctcctagactacgacctgctacctctagctatgcaatctagacctccagcgcagcgatggtaggattagaacttggacttgacggccccctccatctcgtggagacctgctccggaagcta

SEQ ID NO: 709166 - DNA, 405 bp, Homo sapiens
cacagcgttcgtctttctctttgccattaagaaaaaatttcccagttggaaacagaaatgagacagagcaaaaactaaatacaaaagaaaagataaaacaataaaaccgaaccaaataacaacctctccccactaaataaacccaaacaaaataaaacaaaacagagctctataattccactcttaacagtctcttcctttctggcactggtcaaccccctaaccccacaaagaggagattccctccttcgggggctcaccaagttgccctatcgtcagaatgggcagttccttttaccctatgatagatccagccccgttcgctggggccttgctcaggcttctatggtgagaccccctaatcctctcctcctagttgggcatctgcctgtgggacgagggaca

SEQ ID NO: 709167 - DNA, 165 bp, Homo sapiens
agtaggagcacacgttctcatccctctcccccaaggaggggattatccaagtattgtttgagctaggaccaagtaattttcctgagtctcccacacacaccagatgtctagaagctttagtacgccctttcactaggagaaagctaagatgccaaatgagcacta

SEQ ID NO: 709168 - DNA, 1463 bp, Homo sapiens
  misc_feature (1279)..(1279): n is a, c, g, or t
gctccagtcaaccgttacacaccggaccgtacacactctgtcgaaatgcaccactgacagctttgacgtgacacgctcttcctggggaccaactgtgggcttcaactgtcaacgacactgtgtcatgtcacacggactgtctcgctcgtgggcaaccgttgctggtgaccacgcacacacaactgaccccacccacactggaacgcagctgcgccattcccatggcttcacgggtgacttactccctgacacccactccagggccaacactacatgcggccgtgcttactcgcccccctgagaccttcggacttagggcccaccacccgtgccttcaccaactttggcctcggcaaaagatatatggcttgaccgactggaccgggacaacacgacttcggactccgccggatcccttgagatacacaatacatggcctcgggcaaacgcaattggggcacccccatacaccactctccactatggaaacatggtccatggagatcggaactgcattggcaccacataaggattaggacatccattggtgctcccccatagcggaacaagcccagcaagtggattgtcggcttatgaatgacaggcactgacatcccacccaccctcaacgccacacctaacgggcagctccaggcaccccagggcatggctcacccggtcgcattcctggcagaaaccacgaacacgggacctgccgcagacggcccacctggtcccactcaacagcaggcaacaactgcagaccacacccgcacagcggacaacggacatggcgaaccgccactggggccacgcgcggcgccaaccccgaaaacgagacaccatgaaccccaacgcaacgaccacggccactcccgcgcacaagcgcgccccaccaccgcgtgcaacgactactgtatcattaccacccatcaaccacatcccagcgcggacccaacaacaacaacaccatgccaacacaaccatccaccgaccggagcgcggggaaccccgacacacacgggcgccagctacccagaaaaaacatggggcaccggggcacacacaccaccaccggcggcaccccccatccagacacacagcctaccaccagcgaccgacgcacacacgagcggaccacggggagcatcacacgtggacgaccacaccactagggacgcactccgcagcacccacaacacccgcccctcaccgcacaaccacgcgcccccaccggcaacgacaaacccggcttcacacaggcagcacgcacccaccnacacgtcacgacacacacacacacctacaaacacacgccccagatccagccacgacacgacagacacaacgcgacacaccaccgaccccccccaccctcccaccccacccggtcagcaccgcgggccacacacaccagtgacccgcccatcgtagcactcggccacgcaccacaagatgagaac

SEQ ID NO: 709169 - DNA, 786 bp, Homo sapiens
cccgtttccccggattcgtcgcccccccgccggtatttttaaaacgatttgaaaaaataggagtccttgtcgtgggacaacccacgttgcacaccccgaaggatctacacttgagagagggacctttgcataagaccgtttcaccctcgcacgacaagtgtgcccacacctgcgttcacagcccgtaactggaagaggagcacagcagtgtgctccaaaggggaggattccccggcaccgaggatcttgatgcgaggagcttcttctgaggagctcttggccccatgtttgtcgaccagtctgctgctggagaaagaagaggaccagaggtttgaagatccagcttccagccatggttgtctgaagactccggagccatttaccggatttaacttcccctcccctcctatcgttcctccagactctagtgtctctttctcacccctattgacccgtgatgaaaacatctgtaactactagccccccgagtgacctgatgagggagccactgcagctgtcagaggcgaccaggaacgtgtctaggcgcacgactataagcacctggaaaggctgatcccgagttcacagggaagaggaagttgcctctgagctccctctctctgcgctgctagacctggtggacatttgagccgcctgacctgtggggagggggtctctcccgaagagtttctgtttttactccaaataatgttatttctcagatgcttgatgccctgttggaaaagtgattaatttaatcatgccgattaaccctttaaatgtcca

SEQ ID NO: 709170 - DNA, 929 bp, Homo sapiens
gccgcccttttttttcttttttcgtggtgattggcgaacataggttcagcaaaaatatttgggagaataaaaatcgagaaactcgggtaaagaaaagccacagtgaacaaacagtatacaaagttatcccccaaatgtggataagaacctagcgagttcaaaagataggcccaggtgagaagtaggcccaacccggccaggcctcgaaagtgctccgcgttaaactacacgtagaaaggtggacgtgtaatgggcattcacattcaaatccatgaggagaaaaaactacgggaggaaatcttagcaacaccatggctgccaccacctgcagggccagtttctcactaggatggaacaagaagcgtctctgaggaacaattcacattagtacaaaaaacagtgatacagccattcccaagagagcagagtaaggatcacaagggcagtcccgaggaatccagggtacagcctcacaggggccctcacccagcctctcccgagagggcgacggcgctgagagccagaacagggggcaacagctgaagacgagtatatagcgaccctggggacaaagcctagcgcaacacattcaacaggagcattaaacaacttcccatatgccactaacactttaccctataacactaccacgtgggctgcggaacccctggaaacatccggaagaaaatccaacgcgatgcgcaggaacccgctcgagcgagacgagcgcatcgcgagacccaggaacggctggaacctggggacccccaaaaaggggccaaccaggatgcaaaacgccagcgagcacgcagctacggactggcctcagggaatgtagacacagccgacattcaccaagaaggccagaacaaaaaggtacccagggagcacaaaacgggccccccgaggccaagcagacacacactacc

SEQ ID NO: 709171 - DNA, 681 bp, Homo sapiens
ggacggagcagaaggcggcgcgcggaggtgaagttgctgctgatgggtgctggggagtcagggaagagcaccatcgtcaagcagatgacgatcatccacgaggatggctactccgaggaggaatgccggcagataccggagaggtggtctacagcaagaaccatccagtccatcatggggcatggtcgaaagcccatgggcaaaccctgcagatcgacttggccgagcccctacacagagcggacaggacgcacagggccagctatcaggacacatggtcactgcaaccgaccagaaggaagcaaaggcacgtgcaacacactggatgcaccctgtcacgggcggtcacaatccaggagaggcctcataggggacctgacccaaatgggtggtggcaacgagcacatggcactaaagggacccgattcacacaggggcagtacacccaagctcaaccgacgtcaagcggactaaaatacctggaaaggacgcagggaggcagtactagggcaccaagcagcgtgcaaaaacgtcccacccaaaacagggaacagaactggagcaaaagggaaaaccgcccgtagagagacccacagaggacaatcgaggacgaaccacgtcacacccatatcaagagaaccctaacagtaacaacggcaaggctggcaatggtgactggac

SEQ ID NO: 709172 - DNA, 140 bp, Homo sapiens
tgaacaacagacattagagttgagaatgatatggacatagctcagaaatgccagaatgctggcacatggcaattgactgtgaatcctcactatgagactccccaatgataacatgtccctgctgatgccttgacttttag

SEQ ID NO: 709173 - DNA, 286 bp, Homo sapiens
  misc_feature (1)..(1): n is a, c, g, or t
ntaataatccacattaaaaaaaagttctttctatacctatgtgtttatttgctgctttatgttttcgttatagttgtgatgtgttattttttttaatgggatgccaaccattataaattttatctttttttttttaagtttttttaatactttaagttctgggatacatgtgcagaacatgctggttggttacataggtatacaaatgccatgttggttggctgcacccatcacctcgtcatttacattaagtatttctcctaatgctatccccgcagcccctcac

SEQ ID NO: 709174 - DNA, 703 bp, Homo sapiens
cctcagcctcctgagtagctgggattacaggtgtgcaccaccacacccagctaattttttgtatttttagtggagagggggtgtcaccatgttggccagggtgatcttgaacttctgaccttgtgatccacccaccttggtctcccaaagtgctgggattacaggtgtgagccactgcgcccagcctgtccattttttaatcaggttatgggtttttgctatgaatgttgagttccttatatattctggttatgaatcccttgttagatggtgtgttaggccattcttgtgttgctataaagaaaatcctgagtccgggtaatttataaagaaaaaaggtgtaaatggctcatagttctgcagactgtacaggaagcatggaccaggcattgcttggcttctggggaggcctcaaggaactttcactcatagcagaaagcaaagcaggagcaggcacatcacatggcaagagagcaagagaagagaggtggaggagatgcacacactgttttaaaccaagccagatctctcaggaactcatggtgttagaaaaggaattacaaagaaatcaacagaggtgtgtaagcagaaatcagttggtacgtaagaaaacccaattccctgagaaagagaagagtggagtccttaaaattaaatggcggttctggtggtaagagtggtagtatcctccttccaggttgta

SEQ ID NO: 709175 - DNA, 972 bp, Homo sapiens
agcgggagagcgtcatcgtccccgactgtggagaagtgtccggggtagccccgttacaggaatgtgtttctgatcatctgaatcttaatcatgtccaagctgcctgcaaagattgtgcctgaagagattgacaagcactgcgtcttctatgttcaaggattgagtgccaacagttaacgaagtaacataggacagttatttcgggaactgtggccaatgatccaagattgcataaggccgaagttgtcatatacaggacattggcttaagtgactcctctatggatgtatggaatctcacctggctttcgggatcagtcttattcggatggagcagagtggagacttgtttcatcgtagggtctggtgaaggcagtatagagagtgatccctgtggcaggtgtctgcgtagcttcactgtgccataggcaggtagcttgatgcaagcgtcagttctactggagacgaaaatctctggctgtcgcaaattcagagtatcaacgtccgatggtctatctcccaaccagtgcatggagcgcataggcgagctgacaggtacacttaaggccatgtacaggagtatcatggccatgggaccatacgctcgagaatcaagcaaggcgtgaagtacaaaggctgcgagctagcttagagctgggtcgtggccacacatttcggcggaccacttgagcagtaaaaattggcaagtttttcgcaataccctattgggcacaagggatcatcgaggctatcattccagttcgtaagacacgccgtggggccgtttctgccggaaacactttatgcgttttccatacatgtgaacctcacaacaagccacacggggctttgtcaatctctgacacttcaacaaataggtgtttcagaggggccccccgaattcattgttccctggaagggttcacccccctttttataaacagaacactgtctccggatagggcgttttcaa

SEQ ID NO: 709176 - DNA, 470 bp, Homo sapiens
  misc_feature (431)..(431): n is a, c, g, or t
cttgtcggccgcccgggcaggtactatgagattggtttgctagagaactatgctattgtatttatctgtggttttcaaacaaggctcctaaatagaaacaatctaatagaattatcaacattttctaattccatcttcctagttaggggaaaaagaagagcttgaggagggataaaaggtaggaaaaaggttttttaagccacctcttagtaaccatgttatggaaacagagcccaaactagtatagttctataatctagatttcttggtctgtaaatcccaggatttgttctattaaaaagagcaaattcttagcaattgtcattatccattgcattggtcactagctgaggactaccactcaaagaaattcacaaaataattttctaacaaatagaaaaaaaaaatttagaaccctagtaagaagattnttttttttggagacagagtctcactgcatcacccaggct

SEQ ID NO: 709177 - DNA, 1040 bp, Homo sapiens
aggaggtccgtggtagcgttctcctcactaagctgcctgcgcacacagtgggggatgtgaaatgtgacatggaggtgagctgcccagatggctatacctgctgccgtctgcccagatggctatacctgctgccagaggagaggtatagcatctaagcgggggctggggctggcaaccaggctgtgtgctgagaggaccacatacactgctgtcccgcggggtctacgtgtgacacagcagaagggtacctgtgaacaggggcccaccaaccaggtgaccaggatggagaaggacaaccaacgacatcacacatcagacatgaacagacccacaagccatcgaagagagatgtccacgtgatgataatgtacagacagacatgaagcactcatcgcgaatacatgctggacacaatcacgatctgggaaacgaggaggatgatgataccaaaacaaaccaggacgctgtcccgacaagctccggaacaccgagcacagcgtgaccccgcaggggcaaaacgtgatgtacgaatgagcgggaacgagtcagacagaaggaaagcgaagatccgagcgcgggagctggacacaacgagtcccccggccgcacggccctcacacatcaacaaaccgagaacacaacgagagagagccagcaacacaaaacgcacaccgcaggggacacaaatgagaccccaacactgagaagggaagaagcgcaagggcacgagagaacaacgaagaggagagagcacagaccagagaagacgaagcgaccaaagaaacaaaaaggcaaaagcaaggcgaaggacagaaggagggagagagaaacaacaaggagacaaaaaggagagaaaagcgagcaagaggagaagacgacgagcaagaaaaaggcagcacagaaaggagaagaagaaccaacaggaagagagaaacagagagaaggagaacacagaacaacgagagaaacacgacgcaagaaacaacggagacagcacgaccgagcgccgagagaggacgcgcacacagaacgaacaacaa

SEQ ID NO: 709178 - DNA, 326 bp, Homo sapiens
  misc_feature (156)..(156): n is a, c, g, or t
cgggggcgctcgaccaatcctcctagggaccaaataaggtgggtagaattcaagggaaaattcctcataaggtggtcccaaggatgatggaattgttgaggtggttaataatattaatgtttgtgtaatccggctaatgaggattaagggcgaaanggggcctgcggggtaatttccgatgtttgaaagccctgaagactaagttcggactcccccttcggcaaaggtcgaaagggggttcgggttggtctctgctagtgtgggagataaatcatattatggccaagggtcatgatggcaggagtaatcagaggtgttcgtcgacg

SEQ ID NO: 709179 - DNA, 236 bp, Homo sapiens
  misc_feature (90)..(90): n is a, c, g, or t
  misc_feature (189)..(189): n is a, c, g, or t
cctacaaaaaccttattcaagaccacatttctgacctcgttttctactactctctccctctctcacagcactgcacctacgctgatcttngcgttgttcttcaaatacaacaaacacatcctctagatcgagagtctacacttgctgttcacatggcacagaattatctacccccccaaccccacattngtcctggctgatgtcctcaagtctctgatcagatgtaatcgaccgat

SEQ ID NO: 709180 - DNA, 435 bp, Homo sapiens
  misc_feature (351)..(351): n is a, c, g, or t
  misc_feature (429)..(429): n is a, c, g, or t
aattcggcacaaggcagggtcaggcaaaaaaagccatatttttcttcttgcagagagcctataaaaggacatgcaagtagggaggatatcgctaaattcttttcctagcaagcaatattaatattaataccctgggaaaggaatgcattcctggggagaggtctataaacagctgctctgggaatgtctgtcttacgtggttgagataaggactgagatacgccctgatctcctgcagtaccctcaggcttactacggtggggaaaaactccaccctgggtgaatttgtggtcagacgtttccctatttttttgtttcaagatgtttattcaagataatacgtggcaccgntgaacatgggacccttattcagttagtttctgtgtttggccttttctcctgtttcccttcaggaaggcaagtggatcntttgtt

SEQ ID NO: 709181 - DNA, 1115 bp, Homo sapiens
ggacgaccggggctttgagtcagcaccccagggccgccccccgctgcatcctcgcagatccgtgctttatcccctttgcttctctcccgtactgggtcgagtcctgtcctgcgctcgtctgcctgtctggtttgcatgttgtgcggccgagcgcggcatggggccattataccctttggcgtgggccggttggagccccgcgtgagctgccgcggggtcgagacgcgatggcctgggtaagccgagcgacttggggtgctgggttcggggatgcggtgtgcgcagtaccgtacatggtagaaatgtttaccaagccctagagaagtcgcagagatagcagaatgtaccacataacctagattgcaatgataccgcctggataccgcacggccctgcaaccgcccatcaactcacatacacggacggaatctatcccacaggcaggcgtcgcttagcaagagcgagtctccgacgaccgggaagtacgcacctcgatgtattcaccttattgtctttcaaagatccgtaattgtgagataccaggaggatattcccggggggattggattgcaaaggcgaaaagtcacgacattgtccaggaattggaacacacatcagctcgcgtgcattcgcactgtgacagtgttccaagcaccgggatgagggcacttgtgtattacccgtggtgcctctggcatggtgtcaccgttcacagcgacttgaaagtgccacccaaaacagccacggtcagataagtgtgagatgccgcccattccacaagttacccactgtaaaaggcccccatcgtggtgtcccaagtcaggagcgtgggtattgctggccactttcccccaagtgccacaccaagaccgttgttataaaatcctaccccctattaggcacccgatgtcacacttgaaagcaaagtgatatccccaacacaggaggcgacacttgagggagagaggaaccttccaaaagtggttcccttcgacaattatccgtttttcctcaaaccccattaatactgggcgtggattcgccacatggctagcaacccagagtgcgaatgcacaattttcttggggaacgacccactggaatgacatcacaaa

SEQ ID NO: 709182 - DNA, 470 bp, Homo sapiens
cggacaagctgaggtccgcgactcgtcgctaagattccgcaaaactgagatttcaattgaaagattcaccctttccgctttctttggcgcccttcaaccgtgaaggaaatgaaggttgagaacctggaacccgcttccaaagaccaagccctttctctgtgcctcacaacgtctgcgctgtagctgtttatacccttttctctgggaggagattgaggtctgaagtgagtgacttgctgacgtccttacaagaatggcgacctggattaaggcatgcctctctccagcgtggactgctcctcctggggtgactgatgcccgcaggacgcgacgtctctggccgcaatcggctcctcccgcgactggcaaggggactgcggcagaggatcgcgcggcgcggtggacggggcgagcgactggtcgcccccggcgcgctgtgattggcggcgtcggggcgtccgattggcgtc

SEQ ID NO: 709183 - DNA, 131 bp, Homo sapiens
aggaacagatgtagggtgaaaaatggatgttgcattagctctgggtatgtaggccgttcttcaccctacatgaatccaaaggaacagatgtggcatcttttgtaaaacctgattcttggagactaaaaaag

SEQ ID NO: 709184 - DNA, 354 bp, Homo sapiens
gaaggcgtaacgttatttcacattgcatacctgtatcacaacatctcatgcactccataaatatatacacctaggtgtacccacaattttaaaactgtaaaaatagtaattttagcttatactaaagcataacattgaaagagcaaagcaaactggaaagctcatttgtatttattataacatgtatcaattcactaaaatctctatggaccagtaaaacataagaatgccacatagcagatgggttaccacttctctttaaaagagaaataaattgcagcttctcactaaggaatagctaatctaaaaacaacatcttcacgtgccaggcacggtgggctcatgccctgttaa

SEQ ID NO: 709185 - DNA, 451 bp, Homo sapiens
acagaaccttaaaccaaaaactctaacacatactggttaagttagaaaaattataggctgggcgtggtggctcacgccatgtaatctcagcactttgggaggccgaggagggtggattgcctgaggtcaggagtgtgagaccagcctggccaacatggcgaaacgctatctctactaaagatacaaaaattagctgggtgtggtggcccacgcctgtagtcccagctactcaggaggctgaggcacgagaatcacttaagcctgggaggcagagattgtagtgagctgagatcgcgccactgcactctagcctgggcaacagagcaagactccatctcaaaaaaaaaacaagaaaattaaaatttggagactaaaatatctatgtcaatctagatccaaatggtaaaatacctctccaatacgatcacctgaaacaccaggaaagccttta

SEQ ID NO: 709186 - DNA, 1314 bp, Homo sapiens
tgggggtttggggaaagaaatttaaacctctttttttaaaaaaaaaaaaatttttgcaaagaaaaaaaaattattgtgtgttgtgtgagaaaaatagagaaatattcggaggggggtaaaaaaaaatttcataaagcccccaaatttggtgctaaaaacgagagggtacgcttgtgtgtagaaaaatgctgtgggagacaaagaatatattcgctggtcacttcgcggggtgtttctcacagatattctctcaaaggacgtgtgaaggagtagaaccaccacaagaggttttaacaaaatctctaaaaataaaaaataagaaggaggaccacccgagaaaagaagtgcaggggggtgtgggcgcggcgcgcccggggagggagagacaccccccaaaacaagggggcgcccccacgggggggggtggtgagagccccccccccgcccctcctcgcagaaaaacccacaggggggtatcaaaaaacgtgttctctcacgtgtgtggaccccggtgacccatagtgagtgggaggaagagtgtggatctgtctatgataaaagtgacgccataaaagagtctccacagaaaaattctttggttttctccccacctctcacaaattaccagggggggagggctattatgtggtgctcccccccgcggggggggccgagcaagacacaaaaagtgggggggggaaagacacccctcagacagcattatatagggggggacccacgtgtggagaacgccccccagtgtgaagcgaggggggagcgccccaacctttgtggagagaacaaaacggacgccgcctcaattaggggccccctctgtaagaccttcggtggcccagagaagtatatgtacacaaaagggggcagcaacaataaggggtgcataagaagggccgcccacacctattgggtggcgaaaaaaacacccgaagaaagacgcacccctcccagtggggggggggcccaacacaaaggggggacaaccagagggtttcttaccaccccgcaaaaagacaaatagaaaaggagcccccaggtagaaactagcggcagacacacgtgggcacaaaaattaagaaacagggcgaacccgaatcccccttggtgggaaaacggggaaaacacccgcgggggggggggcgaaacagcaaccccctgggcacacggcggggaagagaaattctcccacccccccgacaaagagggggggggagaaacatcacccccccactgtgtagagaacacacgataacccccagaaaaaagacattctcccagagaaaaggatgtcgacac

SEQ ID NO: 709187 - DNA, 333 bp, Homo sapiens
ctgggatgtggctaggacagcgatgggcgttcccaggtctatcaaaccaggatatgctcctgcatttacgtgctctcggatctcagagccagatgtgaccaccccaaccccaacttaccctgtctactgtagagtcttgagagttcctaggatgggcagctagaagtgggccccacaagagaaaccactatcctcccctccgaaacctaggatgggcgattgctccagggaatttaacaagattgagcactccggctgattatcgagtttacccagggcgtgcttcatgctgggagaaactgcaagaaccgaggttcgtacaagagtggcatc

SEQ ID NO: 709188 - DNA, 280 bp, Homo sapiens
cacgagggatattattaattgtctttcattcatcgtattattcatttgttcttccagaaagaaaatgattggggattttccaattttatggcctggagtgaactgaccgatcctgataaaggatttatatatgatgacaaagttacctttgaagtctttgtccaggcggatgctccccatggagttgcgtgggattcaaagaaccacacaggctacgtctgcttaaagaatcacggagcgacttgttacatgaacagcctgctacatacgttatttttca

SEQ ID NO: 709189 - DNA, 1102 bp, Homo sapiens
  misc_feature (296)..(297): n is a, c, g, or t
  misc_feature (300)..(302): n is a, c, g, or t
  misc_feature (308)..(308): n is a, c, g, or t
  misc_feature (313)..(313): n is a, c, g, or t
  misc_feature (316)..(316): n is a, c, g, or t
  misc_feature (342)..(342): n is a, c, g, or t
  misc_feature (352)..(352): n is a, c, g, or t
  misc_feature (374)..(374): n is a, c, g, or t
  misc_feature (383)..(383): n is a, c, g, or t
  misc_feature (386)..(386): n is a, c, g, or t
  misc_feature (389)..(390): n is a, c, g, or t
  misc_feature (393)..(393): n is a, c, g, or t
tgacaccccagcaccctcaggctagtggaggctctggtgttaatcggcactgaggcaacatggctggctcagcaaaaaagaatgaataagaacggggaagactatctccctaacagactttctggctgaggatgggggtactggtggaggaagcacctatgtttccaaaccagtcagctgggctgatgaaacggatgacctggaaggagatgtttcgaccacttggcacagtaacgatgacgatgtgtatagggcgcctccaattgaccgttccatccttcccactgctccacggnntgnnngtggancccantancgaccggagccgtcttcccaaatcgncaccctacantgcttttctaggaaacctaccnatgatgtanagnagnntcnattcacggaattctttcgaggattaaatatcagtgcagtgcgtttaccacgtgaacccagcaatccagcagaggttgaacggtacacggttcatgctgaataagaggacctggattccctgctcagtgccctgagtctcaatgaagagtctctaggtaacacggagaattcgagtggacgttgctgatcaagcacaggatacagacagggatgctcgtccttatggccgtgatagaaatcgcggacttctgacaaccagatacagactggcgggctcgtcctgctacagacagcttgatgactacccacctagaagaggtgatgcatcgctatggagacacgttctccagatcgctatgcatccgcaccggtatcggcgatgctcacgggatgggatcgggactgcccccgccgggcaactggatcgacaagggagaccgagaacgcaaggaagaccgagggcacaaaaaacatgaaacagcgaaggcaacccggcaaaggacgagcacaagaagggacacttaggcacagcgggaactcgggggaagcgcacgacagacgcggacgcagagacacgccatagacgcccgccatacacacgcacacatcgcatctggtaaccacaacacaatccgccagacaacaaaaaggacagaagatacccaccaaaaccaaccgagaggaaagacagatgacaaagagcaggccc

SEQ ID NO: 709190 - DNA, 246 bp, Homo sapiens
gattatgcgccgccacatgccggctaatcttgtacttttagctagtgacagcctggccaacatggtgaagccccatctctactatgaatacaaacattagctgggtgtggtggctcatgcctctagtcccagtgtactcaggagtgcgaggacagagaattgcttaaacccaggaggcgggggtcgcagagatcgtgcccactgcacttcagccctgggctgcacaacagtgatactccatctcaa

SEQ ID NO: 709191 - DNA, 255 bp, Homo sapiens
aagtgatgccctgtaacattccacagatcatattatttgtatcagttgtcaaagttatatgtgatatcaatgaagaaatctctgtcgcatgtaatcggttatttctgtctcttaaaaagtatcgttagtgggctattaaacttggatctacctttttatcaatgcagtatgttctttctattcaagtatgaacttgtagagaaactatagtaatatgatcatcacgagatttatgtgctacttaaaatgtgaata

SEQ ID NO: 709192 - DNA, 324 bp, Homo sapiens
cacaatttaccctctctcttgttgatgaagatgaaggctggtttctacttttcttagttacttttaatgatgctacaatgtatgttcttgaacccatccccttgtgctcatcggagagtgctgagtgttgcccaagagaaaggcaacgggaaccacataggtaacgtccaggttaccagaagccactttaaaaagtgtgaaaaggctgggctcatggtggctcatgcctgtaatcccagtgctttaggaggccaaggtgggaggatcacttgaggccaggagttagagaccagcctgggcaacatagtgagagcccatctctac

SEQ ID NO: 709193 - DNA, 221 bp, Homo sapiens
gggccccccccccaaaggtttaggttaagaggcccccgggtttttttggggggttccctttccccccccaaggcccaaaggggttttgggttgccccccccccctggggttaggttttttttttttaggccccccccttttttcccttttttttttccccccccctgggggttttttgcccccccgggggtttttttttttttcccccatttggaagggga

SEQ ID NO: 709194 - DNA, 1088 bp, Homo sapiens
cggcggcctgagcccctgcccgagcctgggcggagctggagcgcctgcggatcctagaccctgctgcctggtgcccggtggctgggccggagcgggctggcgcctggatgcctggcccggggctgtggccggagactggcgccctgccccgaagcgactttcggtcccctgatccgctccgcctgacccctatgatgaagagggcagtccacgtggagaaggccccctggtaaggccagccagccggaggaccaccccgcagaccacaacgcccaaggcctggcaaccgagagggaggccccgatcagcagtgtgaaagcgacaccctgatgacactggctagttcaccttcactctggtcatcgtatacttgtacccctagggcagctcccgccttgagcccatatgacgcccaacctgcgaagcctctggctgcctcactggcccatcattaactacgtcgatggtgagcgcactggtgtacagccgagggggctccacttccgagcccctggagaggcccgtcctggtggagtacaccctgcctgcgagatggcagaacgcgagaccaagacctgtctgtgtgtacatggaaccattccactgcgcgtaactgtgatgccggacagatctgcatcttcatgtcgacggcatattgccaaaacacagagaaccccgcagggccgctaggggctccagacgagcaagagtagataaccaagagggaacaaatcatacaaagaaggacaagaagtactacacccatacaggcacgcatcatgaagaaagataagcacatacatggagacaagcataactgagagactacaatcacgaacagacacagccgcaagaatttggcaaaaaagaacagaccaaaaacagaacgcaaaaaagcaagtttagcacgatttaaaactacgacgaacacatgcagcaaacacgagacgagagacacagatcaaacggaacacgaccgcaaacgagagaagagtatgacacggatgtaagaacaaagctagggaccagagcgcacgagacacacagactcgcacgagccaccagagcaacacaagaaggattagaac

SEQ ID NO: 709195 - DNA, 108 bp, Homo sapiens
cgaagggaaacagggactatgggattgaaggggactactaatgaccagatatgaaacagaagacaaaattgtaagccagaggtcaaccaaattaactaaattaccccc

SEQ ID NO: 709196 - DNA, 592 bp, Homo sapiens
  misc_feature (14)..(14): n is a, c, g, or t
  misc_feature (68)..(68): n is a, c, g, or t
  misc_feature (90)..(90): n is a, c, g, or t
  misc_feature (122)..(122): n is a, c, g, or t
  misc_feature (124)..(124): n is a, c, g, or t
  misc_feature (163)..(163): n is a, c, g, or t
  misc_feature (202)..(202): n is a, c, g, or t
  misc_feature (256)..(256): n is a, c, g, or t
  misc_feature (290)..(290): n is a, c, g, or t
  misc_feature (424)..(424): n is a, c, g, or t
  misc_feature (426)..(426): n is a, c, g, or t
ttattccttgattnacccaacaaataccggatggtgagcacctgctggtggcactgttgttttagtgntgaccatagacagcataaatgnaaaagacaggaatttcccacctttgggggaantntccattttcctaaatgttaggttggtgcaaaaactaatngtggtttttgccatttttaatttttaatggcaaagccantattacttttgcaccaaccttaataggccgattcagaaacttgagtgcaatgtnttggatatgcaaaaaagaaaatcaaaacgcattnttcattctctataagagttctaggcggggcgtggtggctcacacttgtaatcccagcactttgggaggccaaggtgggcggatcatgaggtcaggagatcgagaccatcctgaccaacgtggtgaaaccccatntntactaaaaatagaaaaatcagctgggtgtggtgccgcgtgcctgtaatcccagctacttgggaggctgaggcataagaattgtttgagcctgggaggcagaggttgcagtgagccaagattgcgccactgtactccagcttgggcaacagagcaagactccatctc

SEQ ID NO: 709197 - DNA, 673 bp, Homo sapiens
gtgtagaaggtgcgatgtacacccgtcgcagtcggccacattatgtcagcatagggatcaactgaaagacgccgatgcctatcacatgctgattcaaataggccgccatcagacactcgccgggtgcatcaaagcggtttgccccggagtgccattcgttaatcagacgagtgaggaacctgaaaccctcgccaacggcttccttttccagcgccagtatctggcgcggaaggtgggtgatccgttgaacctcatatcgtttcattcatccctgcctccaatatgaaactcgttcaatgctaacaatttcgtttgaggtgacgaacactgcaaggtcactcctgtaggagcgagcttgctcgcgaaaaccccaaacgatcacgcagcgcctgaaggcaaaatccgattcccctgctgcaccttgctccattgcctacgcctgcgtcagaatccgccggcttgtgcgctgaggtggccgtctctaaggtggctcggtcgctgaatagttcagtgatcgggtttagtagcccaccttagacctaacaagtgcacacgcttcatccatcagacgctcccgtctgtgcttgatggtggctgtgcgtagggcgtcctcggacgcgccggttttgttaggtccaccggtctactaacctgcgtacagtaccgccttatt

SEQ ID NO: 709198 - DNA, 792 bp, Homo sapiens
ttgagatgaccggtcgggctgggcgacctgctgctgacaatgtatgccgggtaaaactccgtagtgagcgctggtttggaatcagacaccgactaattgagtaaaaggggagacactgcgaaaggacaacacctgaggtagacatagatgaaaaaagagaagccaataatctgatacagagctgaagagatagcagaagaggaagaaactgtttatccccatacagctaagacgaatgttaaacatagagaaagcagagcgcttctgaagttgagcatgaattctcctaaaatgccgagaaataggcaacaaaagaaagaggagccagtctcaagaatgacgattctctcctaaagaccaaaaagtttgagaaagaaaaaggatgccctaagttgaccatggaagacgtggtttcttctaaaaccaagaaaagtgacaaaattaatgatggtagccttctgaggaagaaatagatgctcctaagcccaagaagatgaagaaggagaaggaagatgagatggagaaactagagagaaaagccccaaaagctgagagaatggatttcctcatcctgaagccggactgtaaccccaggtgagatgctggcagtgaagagagtaacagtgagatagagcaggatgatacctgtggaacaaaaagaaggcgctttctctaattgcccatatgtgaagaaatattaacttctcaaagggcggggagtgagcttctatttcctatacaggcaagagattcctgtgttacaggggaggctattgcgcagggcggggacgg

SEQ ID NO: 709199 - DNA, 996 bp, Homo sapiens
ggctccttggagagacatagcctcttaagttggagcgggactgccggagcccagatgggacccctgggtctgctgccagccccgtaactgctcacttgcttgcctgtgtcactgtcaggatttgtctagctgagtgcacttccctagacagggggtgtgttggggggcagctcctcttttcgcaatcgtgtcgaaattggtctatcaaagtgttctgtatgcttgcatcttctgtgcgatccataggcgatatatgagaagaaacaggaccaagaagtagctggcgcttttttggaagcgaatacaaatcgacttttataggagattgagatattgctggagagtgatagacaacaaggaggtgggtctgagacgatgagatgtgcctggaggagaactcatcctcagcatgggtattccttttggcctccccagatcttgcaatgaggacgtcagctagctgtggggatcatgactctattcttctctgtccacaagaaagagaatattatttattccttccttgtgtttggctcctcctccatgactcaatagggatctggacgaaggctgacgcaaggtggagaagagctgaggcgcaaataagaggggcagtgaagatgtgggcaccgccctgaagccgacgagaagaatgaaagaagaagtgagagtcatccgcagaagagtcggctgcagattagcatgcaggctgccgcaggggaaggccgcggtaggaaggcaagaaactgcggaaaggagaagagcctgtgagaagacggaggatcccaggccctattaagcctcaatcctccacttgcccgaagtgggagtctgacgcatcttcaagttctccagcccatcaagagtcttgcttaaccggccccgggccgcgactgcgccgcggggacgcacgggccccgaacccacgggcactcacccagcacaggcaaccctggcacgccacaacacggcggcaatgctccgacataaagggtc

SEQ ID NO: 709200 - DNA, 364 bp, Homo sapiens
tgcaggaattggcacgaggaaaacgattaggatattccttagcgaactaaaagtaaatctaccattccatccagcaatctcactactaggtatccacccaaaggaaaagtgattatatgaaaaagacacatgcacatgcatgcttatagtagcacaattcacaattgtaaaggtacggaaccaacctaactgcccattgaccaatgagtggataaagaaaatgtggcatatatacacaatggaatactactcagtcataggaatgaaataatgtcttttgccgcaacttggatggagctggaggccattattctaagtgaagtaactcaagaatagctacatacagagtgatattgagctttgg

SEQ ID NO: 709201 - DNA, 438 bp, Homo sapiens
  misc_feature (4)..(4): n is a, c, g, or t
  misc_feature (51)..(51): n is a, c, g, or t
  misc_feature (67)..(68): n is a, c, g, or t
  misc_feature (271)..(271): n is a, c, g, or t
ccanaggggtttccattttgggggaacattagccaccacaggaacaacagngttttcagaagaattnntgggtgaacggagcaaatcaaggtgcatcagtattataggataccaaacagatcctttttattaggaaataagaaatcagttaagtgttggctgggcgcggtggcttatgcctgtaatcccagcattttgggatgccaaggtgggcagaccatttgaggccaggagttctaaaccagtttggccaacatggcaaaaccccatntttactaaaaatataaaaattagctgggcatggtggtgcacacctgtaatcccagctacctgggaggcacgagaatcacttgaacccaggaggcggaggttgcagtgagccaaggttgtgccactgcactccagcctgggtgacaaagcgagactgtctcaaaaaac

SEQ ID NO: 709202 - DNA, 884 bp, Homo sapiens
agcggagaaccccgcggggtctgagcagaccagcgtgcccattccagcgcccgcgtacccgcagcatgccgcgacccccgcctgcttggaccgacagctgtgcggagacagctgtctgcagacccccagacactacctcgtacgaccatggatatctgttccaaaaaaccccatgccacaactggtggtttatgcgacggagataacccaaagaagtgcgagggagatgtctaacacccatacgtacacaacatagcacgtagacttaaggtgctacgcagagcaaacaactgtagaaacgaaaaagatggtacgacgccaactgagacgcatggacagacatggcgcaaccaaatgcacaagcaacaccaagaaatcagaccagcacatccaacatagagcaagtagtgaaaccataccaagagagaaaaagcaagaaatagagatccacagggacgcttgggaacagaacaagaaaccgacagacagagcaaatggacaaaaacccatggaacaccccaaagcagcaaaatagaacgagtaaaccacccgggaaaacccagagtggaaacaaagcataagaagagaaaaagataaaaaacaaggagagaacgaccgcaagaaatagaacacccagaaatgaacaaagcaaatcaataaccattgaagcgcataacaagagagaaacataaaagccaaaaaaaagaacacaaaaaacaatacaaaaaaacatacaaaaagaaaaaaaaaaaaaaacacacaaacacagaaaagaagaaacaaactggaaaacaaaaaaacaagagaacacaagacacaacaaagaaagagaacaccaaagatgagaaacaacaaaaaaaaagagaaaagaaaaacccaaagaa

SEQ ID NO: 709203 - DNA, 481 bp, Homo sapiens
cacacatacttcgccttcctgtatatgctgctcaccgtctacagcatgcgtagacacacctgcacgatgcgctacatggaggatgatccggtgaaccggaccctcttcatcaagggaatctccaaatatgcggagtcatataagaccatgatgcattttgaggaagcctaccccaactgcacagttctcgaagcccgcccgtgttacaacgcggctcgcctaatgttcctcgatgcagagaggaagaaggccgatcggtgaaagctgtactttacaaacctccagagcaaggagaacgtgcctaccatgatcaaccccaagccctgtggccacctctgctgctgtgtggagcgaggctgtgagcaggtggaggccattgagtactacacaaagctggagcagaagctgaaggaagactacaagcgggagaaggagaaggtgaatgagaagcctcttggcatggcctttgtcaccttccaca

SEQ ID NO: 709204 - DNA, 1450 bp, Homo sapiens
  misc_feature (299)..(299): n is a, c, g, or t
  misc_feature (308)..(308): n is a, c, g, or t
  misc_feature (322)..(323): n is a, c, g, or t
  misc_feature (332)..(333): n is a, c, g, or t
  misc_feature (336)..(336): n is a, c, g, or t
  misc_feature (357)..(357): n is a, c, g, or t
  misc_feature (363)..(363): n is a, c, g, or t
  misc_feature (368)..(368): n is a, c, g, or t
  misc_feature (487)..(487): n is a, c, g, or t
  misc_feature (500)..(500): n is a, c, g, or t
  misc_feature (749)..(752): n is a, c, g, or t
  misc_feature (754)..(754): n is a, c, g, or t
  misc_feature (756)..(756): n is a, c, g, or t
  misc_feature (759)..(759): n is a, c, g, or t
  misc_feature (765)..(765): n is a, c, g, or t
  misc_feature (778)..(779): n is a, c, g, or t
  misc_feature (781)..(781): n is a, c, g, or t
aacgagcagcaaacgcagcctcgtctcagtggccaaatgaagtagagatgatgaccactaggtctctgatcacaattgcacatgtacgtaaactgaggaacatcggcagtgggcaaagacgtcatagcagaccaagacaaagctgcggtcgagaagcaatcgtgatcagtcgagatgcgcaggctcgaccgccatgtggcatcaggtacctcagcgctatgacaccggacctccagacacactacagtgcaaacaggtggccacatggcagcagctggaactcaagaaggcctgtcctncagggctcnacgagatcgagtcnncgcgaggcnncancgcttcacctcagcgcactgncgatgntgcangagtccacggagcttggggcaagcagtgattgaatcaaaacacccaagacctcccgcatgccaatcatcaatgtggcccccttggacgtgggtgccccagaccaggaattgggcttagnagttggccctgtntgcttcctgtaaacttccctccatcccaacctggctccctcccacccaaccaactttccccccaacccggaaacagacaagcaacccaaactgaaccccctcaaaagccaaaaaatgggagacaatttcacatggactttggaaaatatttttttcctttgcattcatctctcaaacttagtttttatctttgaccaaccgaacatgaccaaaaaccaaaagtgcattcacccttaccaaaaaaaaaannnnananaangattanttaattttttttnnanaaggaagctgggccccctggcttgaaaacccatgcgggggtaggtcccttttggcccgtggggtttttgaaaccccaatggcgtgccctttcgagctccttttctcaaaacccccctgggggccttcccctccactccttcccaaattctggtctccccagaagacacagggaaacattgtttggtctgcccagcaaatcaagggcaatgctcaaacacccatgggggccccaacccttcagcccgtccgtgcccgccaaagaaccccaaggccctgggggacatggggctcgcttcagagttgccaaaaaaagccttgtgccaaatcagggggcctcccaaggggctctgttgaaaacattgtcccctacggtgatatggaggggggtcaatgccggggggaagccaccaaggccccatcaacggggattccagaaggagcagccagcaaggggcccacggctacgaaataaccgccgagaaaccaccggttgggcggaaccgcgtgtcaaatacccttggttgcccgcaagggacggggaccggcgcagagcatggtgctgtacttggtgttactggtgtgcgcggaaaaaataccccggcctggtcctggaggtgccccgcgacaaattgactgcggcgggaatgaagacagatgaaggaccccat

SEQ ID NO: 709205 - DNA, 178 bp, Homo sapiens
gactgcaatctgtgcctgactgcaatctgtgcctcgactgcagcctcccaagtagctgggactacaggcatgagccactgcacctggcctcccctccaccctaccctttttttttttctttttgtttgataaattaaataccgagtctggcaatgtggccagggcgtgtcttgatata

SEQ ID NO: 709206 - DNA, 1504 bp, Homo sapiens
  misc_feature (299)..(299): n is a, c, g, or t
  misc_feature (308)..(308): n is a, c, g, or t
  misc_feature (322)..(323): n is a, c, g, or t
  misc_feature (332)..(333): n is a, c, g, or t
  misc_feature (336)..(336): n is a, c, g, or t
  misc_feature (357)..(357): n is a, c, g, or t
  misc_feature (363)..(363): n is a, c, g, or t
  misc_feature (368)..(368): n is a, c, g, or t
  misc_feature (487)..(487): n is a, c, g, or t
  misc_feature (500)..(500): n is a, c, g, or t
  misc_feature (803)..(806): n is a, c, g, or t
  misc_feature (808)..(808): n is a, c, g, or t
  misc_feature (810)..(810): n is a, c, g, or t
  misc_feature (813)..(813): n is a, c, g, or t
  misc_feature (819)..(819): n is a, c, g, or t
  misc_feature (832)..(833): n is a, c, g, or t
  misc_feature (835)..(835): n is a, c, g, or t
aacgagcagcaaacgcagcctcgtctcagtggccaaatgaagtagagatgatgaccactaggtctctgatcacaattgcacatgtacgtaaactgaggaacatcggcagtgggcaaagacgtcatagcagaccaagacaaagctgcggtcgagaagcaatcgtgatcagtcgagatgcgcaggctcgaccgccatgtggcatcaggtacctcagcgctatgacaccggacctccagacacactacagtgcaaacaggtggccacatggcagcagctggaactcaagaaggcctgtcctncagggctcnacgagatcgagtcnncgcgaggcnncancgcttcacctcagcgcactgncgatgntgcangagtccacggagcttggggcaagcagtgattgaatcaaaacacccaagacctcccgcatgccaatcatcaatgtggcccccttggacgtgggtgccccagaccaggaattgggcttagnagttggccctgtntgcttcctgtaaacttccctccatcccaacctggctccctcccacccaaccaactttccccccaacccggaaacagacaagcaacccaaactgaaccccctcaaaagccaaaaaatgggagacaatttcacatggactttggaaaatatttttttcctttgcattcatctctcaaacttagtttttggtcatgttcggttggtcaaagataaaaactaagtttgagagatgaatgcaaagatctttgaccaaccgaacatgaccaaaaaccaaaagtgcattcacccttaccaaaaaaaaaannnnananaangattanttaattttttttnnanaaggaagctgggccccctggcttgaaaacccatgcgggggtaggtcccttttggcccgtggggtttttgaaaccccaatggcgtgccctttcgagctccttttctcaaaacccccctgggggccttcccctccactccttcccaaattctggtctccccagaagacacagggaaacattgtttggtctgcccagcaaatcaagggcaatgctcaaacacccatgggggccccaacccttcagcccgtccgtgcccgccaaagaaccccaaggccctgggggacatggggctcgcttcagagttgccaaaaaaagccttgtgccaaatcagggggcctcccaaggggctctgttgaaaacattgtcccctacggtgatatggaggggggtcaatgccggggggaagccaccaaggccccatcaacggggattccagaaggagcagccagcaaggggcccacggctacgaaataaccgccgagaaaccaccggttgggcggaaccgcgtgtcaaatacccttggttgcccgcaagggacggggaccggcgcagagcatggtgctgtacttggtgttactggtgtgcgcggaaaaaataccccggcctggtcctggaggtgccccgcgacaaattgactgcggcgggaatgaagacagatgaaggaccccat

SEQ ID NO: 709207 - DNA, 403 bp, Homo sapiens
  misc_feature (393)..(393): n is a, c, g, or t
tgtcttctatgccccccaaccttactccaaattaatgaggcattattttatttatttatttttttgagacagagtcttgctctgtcgtccaggctggagtgcagtggcaaatcttggctcactgctacctccgcctccagggttcaagcaattattccgcctcagcctctcgagtagctgagactgcaggcgcgtgctaccacacccagctagtttttttttattttcaatagagaccgggtttcaccatattggccagggctggactcaaactcctgacttcgtaatccacctgcctcagcctcccaaagtgctagggattacaggcgtgcaaccttggcacccggccttaattgagggcatttatttgctttaaaaatttcacatccaagntggggcatgg

SEQ ID NO: 709208 - DNA, 422 bp, Homo sapiens
tctctgcggtcatacaagagctacgggacaacagaacaagagagatatcaataatgacgaggggcgtaagagcaaggaagacatagaacgtatggttccatgaagctgagaagtacaaagctgacgatgagaagcagtagggacgaggtgtcatccaagaagtcacttcagtcctagtgccttcaacatgaaagcaactgttgaagatgagaaacttcaaggcaagattaacgataaggacaaacagaagattctggacaagtgtaatgaaattatcaactggcttgataagaatcagactgcagagaaggaagaatttgaacatcaacagaaggagctggagaaagtttgccagcccatcatcaccaagctgtaccagagtgcaggaggcatgccaggaggaatgcccgggggtaggaggt

SEQ ID NO: 709209 - DNA, 152 bp, Homo sapiens
aaaaactctaatccagactacagttgtcgagattcaagtcgtgagtgcaggagcgtacacagtgccgtgctggcacatgcactgcacacgctctagagacgctgacctggctctcggaaacgcaggagtctttctgagccagctcagaaacc

SEQ ID NO: 709210 - DNA, 288 bp, Homo sapiens
aaacgaaagccgtattatttaatatggacaccaagctctcgtccataaaagcactgcaagacagcagcgccatgacagacatactatttaattaattggcacggatcattagtaattagaacatttatcgtatgccaatgctgctgctaactctgaaaagttactcttaagcagggtacacatatcacctgaaccccgttgtgctactaatatagttacagagctcccttttttcatgggtgcacacgggtcagttctccttccaacttagcccgaaattatttagaa

SEQ ID NO: 709211 - DNA, 567 bp, Homo sapiens
  misc_feature (99)..(99): n is a, c, g, or t
  misc_feature (125)..(125): n is a, c, g, or t
  misc_feature (172)..(172): n is a, c, g, or t
ctaggaggaccccgagtacacttaaggagctatttcagaagagctgtaataaagttagaagtaacagcaaggaaaggtcctctgtattagaggctctgncaggtgttttctgtattatttagtcncctctaacagccactgtgtgagagagtgctgttattgcagcattttncagcagtccaaaaggcttggagaggtcaagttattgcctgtagtcacacagtaattggcagaactagaactcaccaaaatctgagttcacactccctgttctagactccattataatgcacatttctcctgcttctaagtctgaagggagaaccggggacagctgggaaccgagctctcatctcaccagactgcccagtgcctgtcacctgggggcctcagaagggtttataatcatcattttacttataaagggccctcatcagcataaagccaggccttcttgacatgaagatgtcctggctccaagcagcttccagtttaggtaggggttgggggccaagaagatacttaacgggtcattaagccggtaagatttgagaaagttctcccgga

SEQ ID NO: 709212 - DNA, 172 bp, Homo sapiens
aactgcgaccggggttcagcgctctggtgaggagctcgtcgcgtcgacaggttcgaggcgattcgagctccagctaggatgatcgaggttggttgcacgacgtcttgggaagaaggtcgcgttaaatgcaacacgatgataccatcgggaccgtaagaagctgagtcagccc

SEQ ID NO: 709213 - DNA, 249 bp, Homo sapiens
gattccaggatcttaccagctactcaggaggctaacgtgggatatagctagaggctaaagtgggagacaatctcttgagccaaggagctcgaggctacagtaaagcatgatcacgccacttcaatcttaccttgtgtgaacttgaacaagaccttgtctcgagaaaaaaattaaaaattctttttttaaaaaaaggtacacctatattatggcactttaccatgaaatagagcttgcagcgatgagaag

SEQ ID NO: 709214 - DNA, 105 bp, Homo sapiens
  misc_feature (8)..(8): n is a, c, g, or t
tatatttnctgctggatgagattctagactttggctacccacagaattccgagacaggtgcgctgaaaaccttgcatcgaagcggtgggtgatgcagtagtcggt

SEQ ID NO: 709215 - DNA, 445 bp, Homo sapiens
ggcgagtctgaatgaaaggatactaattatacactcaacccagattccttggactgggccttatatgaccacctaatggatttccttgccgaccgaggggtggacaacacttttgcagatgagctggtggagctcagcacagccctggagccccaggagtacattacttttcttgaagccctcaagagttttgtcaagagccagtagagcagacagatgctgaaagccatagtttcatggcaggctttggccagtgaacaaatcctactctgaagctaaacatgtgctttgaaatgattatcatcctaatatcatgggggaaaaaataccaaatttaaattaaatgttttgggttctcatttattatcatttttttctggacaaatttattatttttagatttttgtaaaacatgatagacataaaattggtttatttcccccca

SEQ ID NO: 709216 - DNA, 152 bp, Homo sapiens
tggtcctctgctagttaggaacattctcccatatcttggaaactcacttctccttctgggaccacacaagagacatgggagaatgttcctaaattagtgcagagcacagccacacccgttcccacgtcagaggagggcaaggctgggtactc

SEQ ID NO: 709217 - DNA, 462 bp, Homo sapiens
acagcagaaaagatatatctttacttcaagaataaagagtggcagataaggaggatagcaccaggagatatcagctgtgatggcttggaaaaacagtgtacaccggcagtgtaaacaagagcagggcatgtatcagtagttgagaacagtgaatacgagtgtgactagacggaagatagtagggatgacaagttttttggggcacagatctaagattggtctggtgtctggaatgagactggggccaataaaaaggagcgtctttacaggagctcaaatgggctgctattttgtagcattctgaggacagctctgacttctgagaagggaaagtggtaaaagtgttagtacagacctttacaaagttggaggctgagcttggtgaggtgtgtctttcaaagaccatcagtctgttctacttttcctgaagactgaagacagtaaaggatataaacatccccc

SEQ ID NO: 709218 - DNA, 297 bp, Homo sapiens
ggagagggagagggagagggaagtccaggattttcttttgtggtgatgaaaatgttttggaactagatacaggtgggtataacattatgaattaactaaataccccgaattgtaaactttaaaataattaattttatatttggtgaatttcccctcaattaaaaaaaaaattagaaaaaagccaggcatggtggctcatgcctgtaattgcagcgctttggaaagccaaggtaggaggatcgctttgtgcccaggggtttgagaccagcctgggcaacatagcaaaaccctgtctca

SEQ ID NO: 709219 - DNA, 675 bp, Homo sapiens
  misc_feature (600)..(600): n is a, c, g, or t
gctataaaggctgtaccagtgagcttgtacctttagattatttctcatagctcattaacaaccctttctttctgactgaagtactccctttagcatttcttgtaagatagaactggtgtgatgaaatctctcagcttctgtttgtctaggaaagtttacttcttcatgtttgaagactatttttgccacaaacactattccagtgtaaaagttattttccttcagcactttaaatatgttatgccactgacatgtcatatctctcctggactgtaagatttccactgaaaagtctgctgccagatgtattggagcttcattgtatgttatttgtttcttttctctgctgctttcaggatcctttctttatccttgaccttggggagtttgattactaattgccttgaggtagtcttctttgggttaaatctgcttggtgttctgtaaccttcttgtgcttggatattgatatatttctctaggtttgggaagttctctgttattatctctttgaataagctttctacccctatttttctacttctccttatggccaataactcttagaatttgccttttgaggctattttctagatcttnagggtgtgcatcattggtttttattctttttttcttctgtgtctctgatattttttcaatagctgtttccaggcc

SEQ ID NO: 709220 - DNA, 216 bp, Homo sapiens
cgggtgatgcggttgtgggggcagcatgtctcagcaccagctccgcgtgccgcagcccgagggcctgggccgaaagagaaccagctcggaggacaacctgtacctggctgtgctcagggcctctgagggcaagaaagatgagcgggatcgtgtgcagaagaaaaccttcaccaagtgggtcaacaagcacctcatcaaggttggtggcgcatgctg

SEQ ID NO: 709221 - DNA, 1614 bp, Homo sapiens
  misc_feature (97)..(97): n is a, c, g, or t
  misc_feature (187)..(187): n is a, c, g, or t
  misc_feature (298)..(298): n is a, c, g, or t
  misc_feature (591)..(591): n is a, c, g, or t
  misc_feature (749)..(749): n is a, c, g, or t
taacaaagatagaacaaaggctgcattccccaagctcacaggtctgtaagagatgggtctcttagtctctcccgaattcttggtctccaggcgttcntctcctgatgcccatgaacgctaacataagagccgccaccatggcgacgcgtctcgatctcccgcgatcgcgagtctgcaggtcaaccgnatcataacagtggctggatcacacaagctggtaaccggttcaaaagaggccaacaaagcccacacactctgaagccctaatcgactcggctcacagcaacactatccagantcctagggacacggtaggctgtgacaagaagacatagaagggagaagaatggaaaggaccaacgaaacgactagaaaatggattaacgatatgcaaccaaggaaaagccacgagaatagacacattggtagatcgcgaagacaggcgttgctggcctgccatgcgtgccttggcacgcatagcatgctgaccctcctgctaaggcactatgctaagcatgcacgactagactcgacattatgcgagcacggtagaagaagtccctggtcggtcgaggctgccaagtatgcccnggacctggacatgtgtagaacgtggaactaggtagcaaatgccttggaaagcatgagactctttgggattgcattttcatgcaatacagctacccttgggcttttgcattgggggcccccgttgcagggaatacatatgtgggaagcggtaacagggncccgcaaaggttgtttcccccccagccagggtctattacaggggggaggcagaaactgggtcccgctcccattgactggttgaacattgttcaaagttaaagggtttttgcttaaacgcctagtttcccacagttcttcccagaagttgggcttagaaacattgtttggtttctcgcagggcttcttcaggaactgtataaggcatgtgttgttgtggtcacattaagtttgggcgtacggggttttggaaaacgtttcaaatccttttgtgtcaaccaagaacacggcggggggggccattggggaatatttcaaccactttgtggcctccaacaagcagggcgtggttcccacacaggaggtttatccacgtgctggcacacacttccgtttcgagttggcagacacggtttggtagcgattaaattcacaactttggagagttagtaagggtaattttttttgtggggcccagacaaaaaataaaaaatttccccgtgtgtgttataagacaaacagaggggggcgttgtacaacaaaccagtgggtgcgggggcattaccatactaaggggggctcccccttaaagaaaatgcgcccctacagataattttctccgcacaggagcggaggtagtctaaagcaacaggaggtaaccagacaagacttaggatcataccacacatgagagaaagatcatcaaacaacatacataactaatatatattacaggcagagagctctatatgaacccccacgtaagaaatagagtacttacacccaaattagtacttataatgtaagtcacgcacaaaacacacatcgttgatgagttcattacacacacaatagttaatatttagc

SEQ ID NO: 709222 - DNA, 427 bp, Homo sapiens
  misc_feature (168)..(168): n is a, c, g, or t
  misc_feature (217)..(217): n is a, c, g, or t
  misc_feature (219)..(219): n is a, c, g, or t
  misc_feature (246)..(246): n is a, c, g, or t
  misc_feature (263)..(263): n is a, c, g, or t
  misc_feature (297)..(297): n is a, c, g, or t
  misc_feature (310)..(310): n is a, c, g, or t
  misc_feature (321)..(321): n is a, c, g, or t
  misc_feature (339)..(339): n is a, c, g, or t
  misc_feature (345)..(345): n is a, c, g, or t
  misc_feature (368)..(368): n is a, c, g, or t
aaggagcttcaatgatttgtaactgaaatatcaggttctagaagaaactggcgcttaaaccaaatcgcatggattttttttcagtgacgttcaagtgtttctcacggatggaattctagtcagctgcaggcgggaagccaggcggtggagcccatgggagcaagggcnagtggcccggtccccgctgtgccaggtgggcaggcaggaacaaggcctncnagggaggaaccggccccttcccgcagncgcttcccagcagccgnagggggggcaggcactcacaaagcccgagggatnaactagcctgatnctgcgtgtccnaagacttacgtttaaggngatgtnagtaactgtgtgggtctaatgcngttctaattcatttacttgagatgttgtggcttatctatctccttggtctactccatat

SEQ ID NO: 709223 - DNA, 116 bp, Homo sapiens
cacatatgtatgagttgtatacatgactaccatgaccccacaactaggtgaaaatcacatggtgttttccaatgtgattccattgaaggtcccgagtcactctatgtaaagatgta

SEQ ID NO: 709224 - DNA, 967 bp, Homo sapiens
aacgtgggtaccgtcttctgtgtagaccttctaacacggacgagggcctccttcgaggcctctcttgggtggtttcgtagaagaacgcttgttggatttgggtgcgacccactttccacgactgtcgcttgtgttgtatttgatggaggaccacagccgcttgtggtgcccccccgtggtgaacaccccgttggctgtttttgtccccccccctccttggaggggggggtgcctcctccaccgactcatgcgcgtcgctcacctctgcgttgtgttgtcgccgagtgggtgaccgccgtcgtacgccccctgcttgctcctgcgctactgtgttgtgtgcgggtagtttttcttcccccctggttggtggagcccaccgccgccccgttgttttcccaacaggacccacccggcgggcgggcgcccctgcgtttttgtatggcacacccctccgcgtgcagtagtttggttggtcagggtcctctcccggtgggagaaggcacatcatcagcactccacccctcgcgggactcgtgttatcatcaccaccaccactatattccccccccgcggggggtgagagtctactatctagatattctcaacaacaatcgattaggggggcctgctgctggagggtgtcgttttttcttcgcccccccccgcccatgattgggtgatgttttttttggtgggtcgccgacaaactcccccccgccccgcgagggaagacactcctccccgacggggttttctttttttgtgggcgccttctttgcccctgctccgcgggggttaataacctggtcctgtggggtgctcccctctgctgccgggacccctctgggcctgcccgccagttttttttcccccctttgttttgggagagagaggcccccccctctcccccgcgggggggggcaaaaaaaaacggggggggtggtttttttcccccccccccccccca

SEQ ID NO: 709225 - DNA, 458 bp, Homo sapiens
  misc_feature (197)..(197): n is a, c, g, or t
  misc_feature (343)..(343): n is a, c, g, or t
  misc_feature (392)..(392): n is a, c, g, or t
  misc_feature (429)..(429): n is a, c, g, or t
  misc_feature (435)..(435): n is a, c, g, or t
aggggcacacatatgctaaacagaacagtgtgcaggagtacacatttcttcccagaaaccacatccagtgttttatgactggagggaaggggtgtagaggtacagaaagagatgaaggtggcatgagagaaaaaggcagaagcagaatgcgctgtaccaaaataaaagattaaagaagagcattaaagggtatgtcngtcaagtcctctgagatttatccagtactggatgggttgtaaagggaagtactttccatgaatgtgatctacaggtgacaaatgctttccccgctccttgctgcagtagttaccaagtcccttaagctcagtcagactattcacanggatagagggggcatttttaaggagaatcttttctgggcagcactgttngagggacaactatcagttcaatgtgaaaatgaagccncgatcnagggcctgggaagattgggcata

SEQ ID NO: 709226 - DNA, 876 bp, Homo sapiens
  misc_feature (566)..(566): n is a, c, g, or t
gtgcgccccggggtcgaggagggcggggtggggcggggcggggtccgcgggctccagttcgggcccacctgatgctgcccggctcccggctttgggctgagctgcgtggctgatggtggtgggccgccgccttgtcctccccagttgtggtgggtggcccaaggccctctccaccttggggtttggacccttaaggctggagccagagcttctctgtgcgcgacacctctcgggaagtttggggccccttcgtgccttggggggccccaaggtgttgtgggcggccccttgccgcacctttattttcacagccaatccccgggggaagtccacagcgtgggtctttgggccctgtgtgatcgcaggcaagccggcctgtggtgagaaacagaacaccatgcgtatgggctgtggaacaacaagctttaacgaagtgccatgcaacagggcggcctatactccgcgtggaaatagttacaccatttccccgccacaccggttttactggggcagcaaaatatacattttcaggcgcccaagctgcttgaatctgctctggaccgggngaaaacaccacccgctcccaacgttggggcgggccgtgtggcgaacacaaatagcgcgtggcctcccagcggactgtacctatcagcacacgcgcactgcaggacacaagacttctctctataacccccagcacaatcgcgtggacggcttcgttagccagggaacacaggggcaataccatccgtgcgttggagtgagagccccccggggaatcctccctttcgggagagacaacgtggttcgctggctccccaagagttgttgaatacccctgtgaagtgcttgggcggtcaccaccctgcgtggccc

SEQ ID NO: 709227 - DNA, 203 bp, Homo sapiens
tatatgaggaaagtagtgaaggaagatcagcacgttacatttaatgaaacttggctactatcccgacacagtagcatttgtgccaatttctggattggaatggtgacaacatgctggagccaagtgctatcatgccttggttcaaggtgatggaacgtcacccgtaaggatggcaatgtccagtcatatcccacgttttgctg

SEQ ID NO: 709228 - DNA, 293 bp, Homo sapiens
  misc_feature (6)..(6): n is a, c, g, or t
  misc_feature (43)..(43): n is a, c, g, or t
  misc_feature (48)..(48): n is a, c, g, or t
  misc_feature (101)..(101): n is a, c, g, or t
  misc_feature (103)..(103): n is a, c, g, or t
  misc_feature (138)..(138): n is a, c, g, or t
  misc_feature (160)..(160): n is a, c, g, or t
  misc_feature (205)..(205): n is a, c, g, or t
aggcanctgggggagggttcagggcagcaatgctgagttcaanaaaantacttcaggctgggcacagtggctcatgcctgaaatcctagcactttgggaananaatgtgggagaatggcttgagcccaggagttcaanaccggcctgagcaacatagtgnggatcccatctctacgcccaccctccccccggcaaaaaaaaaaanctgggtatggtgcttatgcctgtagtcgcagctactcagaaggctgaggtgggaggattgcttgttccccggaggttgaagctacagt

SEQ ID NO: 709229 - DNA, 448 bp, Homo sapiens
cagccgggtatggtggtacatacctggctatacgggaggctgaggcaagaggaccgcctgagcccaggaaattgaggctgcagtgagtcatgatcgcacctctgcactccatccggggcgacagcaagaccctgtctcaaaaaaaaaagttttggcagggcacagtggctctcgccactttgggagaaccaatcccagcactttgggaggccaaggcaggtggatcacttgaggtcaggagttcaggaccagcctggccaacatggtgaaaccccgtctgtacgaaaagtacaaaaattagccgggcatagtggggtgcgcctgtagtcccagctactcaggaggctaaggcaggagaatcacttgaacctgggaagtggaggttgcagtgaaccgagatcacgccactgcactccagcctaggtgacagcgagacttcgtctcaaaa

SEQ ID NO: 709230 - DNA, 1496 bp, Homo sapiens
  misc_feature (1460)..(1460): n is a, c, g, or t
tatatacgagcaagtttggtttattagggaccaaagtgggtaaaaaagagtggtcactaattatctccatgagaattaaggtccgttaagttcagtggtagaagaagaacgtggttatataaaagagtttgggcgtggtatattgcacatagtgtggaactcagagccactatagccatcaccagttgtacgaggtgcctttcatataaaccacaccgagtgtatgaggcatgtagggtcttttatctcacatataaacccaacatatacaataacaatatgaggagctcccagagatgggttgtgggctccacattcatagaagtgtggtctcgagggtgatctcgaggaacacctcgtataaattgtgtggtggtggtcttatagcacacttatagagactttacgtgggggtatatatatctctctccacaatatagcgcaacaagaggcgtgggagagcgtctcgcgtggtgtgtgccgcccccacaaagaggacacattctacaccgacgccacagaagagaagctctcacaaaatatattgtgtggggggaaataataacattttccaaccaccgagggtgtaaagtataaatcttcgaggagagaaacgccacaccaatatacacaacccgcgttggaataagccacaaaaactacacaaaacaagaagccgaagaacacagggaaagcccggtgggtggcccacaacaggaattaacaacaccagatgcgcgaggagacttccgggggggcccccaaataaatgagaagggacacaagacatacgccgaaggaagacacacaacagacacacacgaaaaccccccccacgaataatattaaaccacacataaccaagtggcggcgcgcgcgcgccccaaagaaataaaacaaacaaacaacacgctggggcgtactcctgtggagaggaaccacagtatggaggtggtgggtgcaaatggcggtttgtgggtgacacacaacaacgggccgtgcgcccatacaacaagatatcactccgacggagcggcagaacgaacattacaagaacggtcacccacaacacatataataaacagtaccagacagagggaaacgatcgcgcgatgagtggagacataaaggagtaagtaggccaccccgacaaagatagaccccgatctaggtacgacaacccctacgggaagcgggctactgagcaaaacatgcggactgcgaccgcgaaagagagtgagaaatctatgaatagtaatagacacaacccaggcgatggttatggtaaataaacatgttaggagcaatagatagataacaacgagcaaccccctgaggtgtgacggtaggtaaaaacacaataaggcggatgagtactactacgagacaacatagtaatacgcctatagcgcaacacgaaacgatacctcgagcgtgctatgcaagaactccaaccgagngagagaacccctactccgcgagaggtaatatcctat

SEQ ID NO: 709231 - DNA, 348 bp, Homo sapiens
  misc_feature (116)..(116): n is a, c, g, or t
  misc_feature (138)..(138): n is a, c, g, or t
  misc_feature (190)..(191): n is a, c, g, or t
  misc_feature (230)..(231): n is a, c, g, or t
agcggagcgtcacgttctcccgcaaaacgagccctgtgggtgccagtgccagtgggcggctcccagtgtgtggacgggggcaaggtacggtgcgtctgccagtcgctaagtgcccnccttccacttaatggcacaccnttcgcctcctgattcctgaaccgcgccgtggtgacatgaggactctgccacnncctccctcatgtgatgcctgaggtgcccctgagcgtgcnnacctgtgccatgccagtttagtgacatgaagtgcctgcagtgtgctgctgtgtgttctggctggcttgcgctgcgagaaaagtcctcttgtcatgcctgctaaccctgaaagtgtgc

SEQ ID NO: 709232 - DNA, 545 bp, Homo sapiens
  misc_feature (177)..(177): n is a, c, g, or t
  misc_feature (279)..(279): n is a, c, g, or t
ctcctttcctttaaaagaaaagatgggttgggtgcgaggcacagattcccttttcgggatttaggattcccaacccaggaagcttgggagagctttttgttaaggttatataattgttccggccctctttcaacggcttcaaacctttttcgcggggtttttgttgtggttaaaganaaagttgtggcccttgttccttcaattcaggccctttttaaacagtttccaagtttttttttgttttttttaaaagttttttttttcttttttcagtttttnggagccccccgggggggcaaggaggagttttcccccccaaaattgtttttacccccattctttaaattaaaattttttcaccccctttttcctttccgtttccggggaccccccctttccccttccttaattttttttttgcccgccctttttcgcccaattagttcccctttttggggttttttccccaattttttctttgttttttttccctgggtttttttttaaaccttttttttttttccttggaggggggattcctttta

SEQ ID NO: 709233 - DNA, 288 bp, Homo sapiens
  misc_feature (5)..(5): n is a, c, g, or t
  misc_feature (7)..(7): n is a, c, g, or t
  misc_feature (12)..(12): n is a, c, g, or t
  misc_feature (14)..(14): n is a, c, g, or t
  misc_feature (19)..(19): n is a, c, g, or t
  misc_feature (22)..(22): n is a, c, g, or t
  misc_feature (25)..(26): n is a, c, g, or t
  misc_feature (31)..(33): n is a, c, g, or t
  misc_feature (35)..(35): n is a, c, g, or t
  misc_feature (39)..(39): n is a, c, g, or t
  misc_feature (42)..(42): n is a, c, g, or t
  misc_feature (47)..(47): n is a, c, g, or t
  misc_feature (50)..(50): n is a, c, g, or t
  misc_feature (80)..(80): n is a, c, g, or t
  misc_feature (87)..(87): n is a, c, g, or t
  misc_feature (117)..(119): n is a, c, g, or t
  misc_feature (122)..(123): n is a, c, g, or t
  misc_feature (125)..(125): n is a, c, g, or t
  misc_feature (130)..(130): n is a, c, g, or t
  misc_feature (145)..(145): n is a, c, g, or t
  misc_feature (158)..(158): n is a, c, g, or t
  misc_feature (168)..(168): n is a, c, g, or t
  misc_feature (193)..(193): n is a, c, g, or t
  misc_feature (204)..(204): n is a, c, g, or t
  misc_feature (211)..(211): n is a, c, g, or t
  misc_feature (227)..(227): n is a, c, g, or t
  misc_feature (245)..(245): n is a, c, g, or t
  misc_feature (257)..(257): n is a, c, g, or t
  misc_feature (272)..(273): n is a, c, g, or t
  misc_feature (283)..(283): n is a, c, g, or t
tcttnantttanantgcanatnttnntgaannntnttantgntaagntcntcaccctctatttttagcccatttacaccntctaganttttaagtcaaatttccaatataagtaagnnntcnntncttancatcttatttttttnttttctggaaaanagctgttatnttttctctcccttttttatttctanatccatatatntttcacncttcacttttttctcnttttcattttttttattntaattttctttnttacacttactttcnntttcattttnctttt

SEQ ID NO: 709234 - DNA, 458 bp, Homo sapiens
cagagacccccttcaagaactgatgaaattagaaaaaacacctacagtttttattggttagcctggagcagaccattaaacaggtcgttattacaatcagtgaaatgagtcccaaagccctagttgatacctcatgttcttccaacagagattctgttgcaagttcatcccacatagcccaagaggcctctccccgacccttgctagttccggatgaaggtcccactgccctagagccccctacgtcgataccttcagcttcacgtaagggctccagcggggccccacagacgagcaggatgcctgtccccatgagtgccaagaacagacccggaaccctggacaaacccggtaagcagtccaaactgcaggatccccgccaatatcgtcaggctaatggaagtgctaagaaatctggtggggactttaagcctactttcccctccttacctgctttt

SEQ ID NO: 709235 - DNA, 591 bp, Homo sapiens
ggtgtcggcgtgtgcgcccggtccccgtctgccgcaccatggagagctaccacaagcctgatcagcagaagctgcaggccttgatacggagctacgggcagaccgtcctacgtatcagcctctcatcctatggtgcaccactgcaggcgggctctgtgcacatccctacgtcatgcttgcatgcgcgcgcagagatcatggctgtcctctttttccacaccatgcgctacaagtcccaggacccccggaatccgcacaatgaccgcgttgtgctctccaagggtccattgcagacgtcccgatcctctacgcgggtctgggctgaagctggtttcctggccgatggtcggagctgctgaaccgtgacggaagatcacgcctccgcactttggactgggcacccggtcccgaaacaaggctttcaccgacggtggccacgtggctccctgggccacgggcctcggggccagcttgtagggataggcctacaccggcaaatacttcgacaaggccagctaccgagtctattgcttgctgggagatggggagctgtcagagggctctgtatgggagggcatggtgcttcgccag

SEQ ID NO: 709236 - DNA, 413 bp, Homo sapiens
  misc_feature (26)..(26): n is a, c, g, or t
  misc_feature (186)..(186): n is a, c, g, or t
  misc_feature (225)..(225): n is a, c, g, or t
  misc_feature (250)..(250): n is a, c, g, or t
  misc_feature (261)..(261): n is a, c, g, or t
  misc_feature (284)..(284): n is a, c, g, or t
  misc_feature (349)..(349): n is a, c, g, or t
  misc_feature (370)..(370): n is a, c, g, or t
  misc_feature (397)..(397): n is a, c, g, or t
  misc_feature (404)..(404): n is a, c, g, or t
atcacccacccgggtgatgaccgtantccgagctgcgggcgccgcttcgagtacgacggaaatctgtctctgtccccaccgctgcttgccttgggaacgcggcccgaaacccaggatctgggtgatgggcacaggcgggcggtcggcggtgtcctcgccgtgggtcaccagcgcctcgcgcacggncgccaacccattgagcacgaccaccggcgtccaggccanctgcaggctgaacacgtccccgaancggcgccgcanctgcagagggagggtcagggccncttgtcaagccaggatcaccccagactacaggtatgaccttgcaagagtcaccaaaattgccganaggccccagttagcaacccantcccagatgatggtccatgccggtgancagtgangcccgagga

SEQ ID NO: 709237 - DNA, 449 bp, Homo sapiens
tggatgctggagaaaatgctcacgcctcatgctcagatggacacgactgagggtacacaggaggagtcaggacatgcccagactcgtgaaacacatcgtgtcaccagaggaacttgtgtaaaggaactaccccagcatcacaagtggctgatcgtatggagtctggaaacactctgtccttcctgtaattgggcccccgcaagcccccatgcaattagcactatccaggctgctggctgtagaaaaacttctctcttcctgagctaaagtgcttcatctcagactcccaactgaccagagatgcagcactgcacctcaggctggaagaccgggcgctgcgctgctccggttctggtggcctgtggcgggactccaccctggccaggagaaggggtgttaagagggtgacctgggctccagctctccagctctgaccgggaggctgttgt

SEQ ID NO: 709238 - DNA, 1808 bp, Homo sapiens
gctgcacgcgtacactggcgtatcctacagatgatgcaactatttccatggcagacatgtgcgctctcgacagtagagtccacactgcaatgtcctgacaagatgagaaggtatggcggcaaggcatgcagagcggtaggtaaccatggtccttgcgtatcaggacagctgtcgctgagatacactgggatggtctgagcagatgctcagcgtcggcaagcttgccacggtggaggcttgccgcatagggaaagatcataccagcgcatagataccgcgtcacaaactcctagcacaggaggcaattgtgggcagtcgaagacgtggataccataagattggggttcacagacttgagaccctattataaggacatatgacctcacaatgagcaataaaagattgatgatttctatggaacaaagacccaagcgagacgcagtagcaagacatgaactcggaacggggatgcgcacatagtgatgtaacgcctgtagtcctcgacggtcatcttcagggaattcgatgcacggagttaccaaagcgggaaggcagtagccgaagcaacgagagaggggtacccaaaaatcattttgccagcagacgaagaaccattcccagtatggtagtccatcaaaaaggaaacggaagaccgagacgataaccataaacatgaaatctgcaagaggatgaataacaccgcgtcaaatgaatcattaggttacacgatggacatagaacacgtttacccccgtagggacaccaagtagtagccaatgggacgaccccagcaaagggcgtaccgaagtacacggaactgacacaatcaccgcaagcacaagacaggaggaacaaccaccaaagggagagcacaaggaaaaccaaaattacagaaaagacacaggaaaagaaagagcggataacacagtagagaaagaaaaccgagcagcaagggaatgcaaacgaggagcgatgcatagatagaaaagaacagaatgacacaacaaccaaagcaggtaaaaacaacacaagatagcgagacacccaagaaagtgcagaacacgacacagggggattcgcacacccaattaaggataggagcgagccgaaacactaggagagagccccgcaagagacacaaccataacacatcgagaggacaatgtggacccccatatggcagcaaggtcgaaccgcaaagaacgcacacgacacgaatagcaagcacgcgcgacaacaagccagatgagcccaggacatcgagagacgaaacgcaccgcgatttgtacaagaacatatcaacgaccaaggtagcaaaacgagacggacacacaatgaaaaaacaaattgcatagataacaccatatccaatattttaggaacacgaaaatacaagggaacaatgaagacaacaccaaacgcgaggagaacccaacatcacgagagagacgacacggaacgacagagaggattaacacagtgggagaaaacacgaaacaaagatctaatacgaatgagcgacaaacgaacataaactggaaagggaagaaaaagtaacgtaccaaggacaagcaagtaccaccaaagtaggtcgccgacacagataccacaacgtctgaagacgaccacataagtggataacacacaaaaaatatcaatagcgacaaaaccaagagcgagagaccgcagaacagcaaaagaaatgcaccacataaaaagcacagaccaatcaaaaacgagagagacaccatagagtacgccatgtgaagccaaagacacccaacaatggaggaaaccacacaaaacca

SEQ ID NO: 709239 - DNA, 322 bp, Homo sapiens
gacttccgtgccagagcggaatccatcgatgtgtgcgctgtggctgagacacgtaggtcggcattgcctccgagcccactttagaccctcatctctgtgtcagaaagtgctgattcctttgaggaaccagcggaccaaagaaagagactggacgcggttctgagacactacggaatatacgcgttctaaacgcgtcctctgtctcccacaacttaactatctacggttgcgtctctatcccatgagtcgatgatctcgatctgcctgatgcggtggtcactgtatattcgctttgagctgcagggagtctctctctttttgg

SEQ ID NO: 709240 - DNA, 776 bp, Homo sapiens
  misc_feature (673)..(674): n is a, c, g, or t
gaacactccttactccagaagcctgaggtgacggatgaggagactctgctcctagcacttcgtgtcccgagggagagactacggctgaagcattcctgggcggcagacccaacatggtccatcttgcagtagggttcgccatattatgtcctcttgttcgctatttaccgagcccggaggattagagagcctatctctgggattcgctgtagacacgcccgcccacatgcatgcatttatatatatatatattatatatactatataatgggtgtctatataatatatatatagactatatgtatgatctttgtaaagaaacagagctaatgttgataggcggccatactgaactgttgtgactgctgtggactggaggacgtacgggaatgtttgcactcagatgctgacatggaagacgaggcgactagagactctgccatgatctgtttcatgttccacttgatgtggacagggcgctctcacatgcctcagcatgtgcattgacaagacatggcggcgcattcatccatgtgtgagcacacagacatactcagcgctggtgctgatgacatatacccccatcatactgacagaatgacaaagcacaggtacactgatgaagacactggctctcaccacagttagggagatacagagcttgtgtgctacnnggatgcccccaatgctgaatctcgtatcgccccatggggcttctgggtattcagactggggggctccctactctctagcgtatcgcataggggatgtggcat

SEQ ID NO: 709241 - DNA, 82 bp, Homo sapiens
aaaaccctcgacccgaaaccctcaccagataaactacagttttgtttaggaggccctgaccttcatggtgtctttgaagccc

SEQ ID NO: 709242 - DNA, 290 bp, Homo sapiens
aacaaaagttgaaaattttaaatggtctttttatggtttgcgtgacctaaaaagacaaagtttatccttgccttactgtatagaaatgcgtcgtatccacaatagcgtacagatttttccgcattaatccgtgtttatattaacagattcgttaagtatcgtttaaaaagggagagaggggataccctctctctagataaatgggtcatcatttaatcccaagaatgatgtcgataagtacttttctaaacgataacaagaaccccagtaggtagtatagcagtctttaa

SEQ ID NO: 709243 - DNA, 1120 bp, Homo sapiens
ggagagagagagagatctaggtctcgaggttctgtttctctatttttaacaaaacacagagctttataattctcaacaccaatggcaggggtcttcataggacaaaggagtgagtctctgtcaacagacaaggcggccccatatgttgccggcaatgagcgggtttccgcaaggaccacgaatgactgaggtccccgggcaggacacagtcgttggaaatgatagcggtctatggtggactggctgtggacttcgtgtctgtgcccgttgccactcttgtggggtcacctcagcgtccaacttcctcctgttcagcgttctctctccaggcaccccagtgttgtgcgcagtgtgccctattgcgcaaggggcccttctacagcgccgtgccgcagaaggagtttgctcgtaatagtgtgcgtgcgcacggcacgtgtggcactgaagcccgcgtgggcgactactgagggtcagcctgtgcacccgttgacctgtgtgtgtgtgaacgccccaacggcacgcacaggtgaggcccgcgggtgtgtatctacaaagagtctccctgtcctcttactctcagtgcgccctctctttggcgacgccctccccctctgtgagcagcgctccaagtcctctccaagcgtccttgtgagagcccatctgcgtcagacgagaagcgggctctcactcgtgagtgaggacaccaagccactaaacagcgcgctacactcggcggagctgatacaacaccactttatacagagacgggaagataacgaccaagaatggacacaaatggaaacctgttggcgacaaggatgagaagacgaagcttcagcattgacggacgaccagcacgtaattgcttggaactgaccaacagcgccacccgaccacaatacattccgcaggcggtagaatcttggcgtagcgacaagagacgagcccccaggcagccccccacagagtcaaagacaagtgattggcgcaaccaggcagctacgttgctaccgcccacaactggggaggcagcgacaccaaaacgcagttgaagaaacaacgagaccccgcccgcatctcatccacagcctgaacaaccaacacgtgtgcgccgccaaat

SEQ ID NO: 709244 - DNA, 890 bp, Homo sapiens
acaatgaacggatgagttgagatagactgtctaggtggcaagaacccatccacaccctctcaaactacttatgggatgtcctgttcactgaagacagcccatggtaaagatcatgcagcatacatgactctggcgggtaatgcacacaagaagtagtccatccatatctggaataggtggcaataaatccactcaactacatggagtggtcatcctcaccgaagtgacaggacaagggcagagacatcaatgaccaggacagtacgacaaaataatacaggcgagaagacggacaaagaggagcaagtgtaggaatcgcagtgagtaaaacccatgaaccacgaggatcacaccctacctagatcaaggcgacgaggcaacatcatggcagagagagaagaactactattcgcaaaccttacgcacccttcataacgtggcgaaagggcaagatgaactgacagacgcaacaacgaagcgaatagtacacacaggcacatacaagtcaaacggacatgagaatgatatcaacacactataacaggcaagcagctgagtgtaccactgacaacggagggagaagccaacgaactcaatcatatagagactggagagcgacatacgcaagtgatgcatgaaagaaagaggtacatgtgacacgcaagatgagcaaccatgtagggaaaagaaactgctatacctcaattgacacagtgctcactaactgagatcaggacccaccacagctatgactgaacagcgcacagcggaagaaaggaagaaagcaaaggccatgaagtataacataatcggaagaaggaaaacggcatacacagcagactaagaggacgatgagcaacaaggccaagtggcaagacacacaaacctaa

SEQ ID NO: 709245 - DNA, 290 bp, Homo sapiens
ctctagaggaccccgactgcatctgtgcctcatgctgttcatgtagtgagtgatttcttgctctcgcttttaagagatgggattcattctatcagtaatgaattgttcccatgagagtgagtgttaggaaaccagacccccctcagatttctccctcttggcctgggttcacttctcccttgagcttctctgccatgctatgatgcagcacaaaaggcctggccagaagctagggccatgccctagaacttctcagcctctagaaccatgagctaaataaacctcttctc

SEQ ID NO: 709246 - DNA, 727 bp, Homo sapiens
cattgagcccactcgcaaaccagagaattaaaagaaagtgccgaagtccttaagcgctacattgtcccttttcagtaattcaccagccgacataattttaaaattctgcgaaaattgggcgcaagaatccgtaaaccggctttgtctcattaccatgaaactgtggggatcaatagtcttctgtcctgtgaaatacacttggtatgagtcacatctgcaaagcgaataagaacgctatatgtccatgtgtcgctgcaatgtgcacagcacattgccatgtcgtatactctatgtgaacacaccgtgtcagatcatctcaaacagagtagtgtgtagtgcatatatcgggttgcttgtttgtgtaagtgttgtaacgagcgttacactgctgtgatataggcgttgccggcgtgcgaatgttctagtgtggctaggatgtagagtcagtcatatcggtctagcatgccacatgcagctaacagccgtacccgtctccgcatgtcactggcagagttatgttcgtaacatatacctccagttcactgcagtgaacggctccgctctccggagcttctcataccgccgccctctacaagcatcggtcatcagttgggttcagacttcacacagtcagttcacactcgcagccacatctcactctgactctggtccagtcagagggcacaggtcacagcaatgctgagcaatgtggcctggtcggcacaag

SEQ ID NO: 709247 - DNA, 427 bp, Homo sapiens
ttttttttttttggaaaaaaaggatcttgttttgttgcccaggtggccttgaaccctggtgtcaacgccacccctgggcaacattaacaaggactcgtgtctcccgaaaaaaaaaaaacacgaaaaaacacaaaaaacctttgtgggcgggcggctagggaccctagaaaaaggcttctaaagcacacatgtcgtggtggggccgggcggcccaagaatgggatctgcgagacgagcggcgctactgggggttcacaagaggaaccccgtggcagaagaagacgggcgcggatcctcacacaaaaaaaacaccgcgggggagacaccgagcggtcgtgtcaaaacacccagagacggaggttcaggaggcacagaggggactaaacaccgaggggcccaagcagcgcgtaaaacaaaattgcgccgg

SEQ ID NO: 709248 - DNA, 117 bp, Homo sapiens
tgccactttccaccatttattaaataaattcttccccaggccggtctgagtcgcacccagactttacatcatggctttgttccaggtgggtagggggtgccaaagggaatactgcgg

SEQ ID NO: 709249 - DNA, 369 bp, Homo sapiens
ctttacactatattaaaaaaaacaactcaagttggattaaagacttaaatgtggaacccaaaagtatgaaaaccctggaatataacctaggaaaaatcattctggatataggaactggcaaagatttcaaagatgccaaaagcaattccaacaaaagcaaaaattgacaaatgagacctaattaaaccaaagagttctgacagcaaaagaaactaccaacagagtaaacagacaacctacagaaaaggagaacgtatttgcaaactatgcttctgacaaagacctaatattcagaatctataaggaacttacattacaagcaaaatacatgcagccaacacacatatgaatgatcaacatcatttcatt

SEQ ID NO: 709250 - DNA, 356 bp, Homo sapiens
taagactggagctgtggtctgagctttgaggtaatgaattcccactcatgtgatcatttttaccataaccaaagtttctaaccatcaaaatcaagtgacaattaaaacaggcattaatggataaatccgtctttaaatattaatggggttaattttgttaacagctatgtgttggttgcaagtggaatgttctctgttcatttgacttttgaatataacttgttccagaatattgtaaaattaagtatgtgaatgtttctttgtattcagaattaaacatttggtgttaaaatcccaggattaggagacaactccatgtaaatttaatgtgtaataataagataataactttttaa

SEQ ID NO: 709251 - DNA, 150 bp, Homo sapiens
cagtagtgagtcaacagtgcgtgcaacaagtgagatgcttcagtacctccaccaaaccaggattctttcctcccttcctggagaccatgctccggaccacctcagctgtagagacaactccaaagatgttagccttgtgagacaaattga

SEQ ID NO: 709252 - DNA, 374 bp, Homo sapiens
cgtggtggctcacacctgtatattccagcactttgggaggccgaggtgggcagatcggttcaggtcaggagatcgagaccagcctggccaacatggtgaaaccccatctctactaaaaatacaaaaaattagccaggtgtggtggcacatgcctgtaatcccagctactcaggaggctgaggcaggagaatcacttgcctgggaggcggaggttgcagtgagcagagatcgtgccattacactccagcctgggctacagagtgagactctgtgtcacagcagctagctgtactgcatgatcacttcccattccccagctgacagtggcttgctctggaactcctaccacagtctttttggtaggccgccctgct

SEQ ID NO: 709253 - DNA, 453 bp, Homo sapiens
  misc_feature (44)..(44): n is a, c, g, or t
  misc_feature (55)..(55): n is a, c, g, or t
  misc_feature (69)..(69): n is a, c, g, or t
  misc_feature (73)..(73): n is a, c, g, or t
  misc_feature (107)..(107): n is a, c, g, or t
  misc_feature (266)..(266): n is a, c, g, or t
  misc_feature (273)..(273): n is a, c, g, or t
  misc_feature (300)..(300): n is a, c, g, or t
  misc_feature (308)..(308): n is a, c, g, or t
  misc_feature (392)..(392): n is a, c, g, or t
gaaagggaagaacaattttttctcctcattttgggaaggtttgngtcatagtagntgccatgtgccccntggncagattggagagaagagggacgactggagaatcngtccgagaaccagcaggagaaaagaaaaagcaacagtttaattctagaaggcctcctgtccctgcctgctctgggtgctcatcggaatcagctgctgccctgcacttctccccggccaagcctcccctcctcctcctccctccttcaagccttgttgtngcaactngggttcttcaggccccaggttttattngttccgtngggggggccccaacttggattccccaatcttttgggcccaacggggtttgggaagaaaaaacaactaaccggtttaaccggctnggcccaattcttggttcaacccccgaaggaaaaaaaaattggcttggaaggggaaccattg

SEQ ID NO: 709254 - DNA, 146 bp, Homo sapiens
tgggtagatgtgccaggaggttgttaaaacacacagattctgtgcataaccctaatccaggctcacaggatcagtctctcagtgcaggacctcagctcagattctgtacttttttttactagagactgggtctcagaccagcaaaa

SEQ ID NO: 709255 - DNA, 650 bp, Homo sapiens
  misc_feature (83)..(83): n is a, c, g, or t
  misc_feature (93)..(93): n is a, c, g, or t
cgggtcgctaatgtacattcctgactgatagagaccagataatgtgctccaagcaatatttttaacctgtaggagatatggangcttaaaagngttaagcttttctgctacttttggtgacactaggtgttaaattccctgctgacgtgaatagtattggatcctgggcattatcaacaaacaaacaacaacacaccaccttcccacttggaagtctctcttcttcttccattctttccttcccttgcatgtttctttttacttctctccctaattctattgctgtccccctatactatgccttgatcttcttccctctccctacttctccaaagtaaaatcttggtgagagatgggagaaaggaaaatccacaaatacaggaaagctgtcaaaagaggcaagccccacccacccacttcttctcagtcaagtctccgctgaggaatgtggaacttctgattccccaatgtaaagttggctggtaagtaagggctgtcagtggaagtaaaagagggtagttaggatggagagctagggcctatctgcgggggtaggtgagccagaagctgcggggcccctctgctgatacctgagctctgtgtgtgcgggcataaaggattccccatttctccacctccacagccacctg

SEQ ID NO: 709256 - DNA, 127 bp, Homo sapiens
tatacttctcagcttctacttctaacgcttatacttctcaacgcttatacttctcgacgctttatacttcacgcttatacttcgtgcgtcgcgaagtataaagcgttgagaagtataaagcgtagag

SEQ ID NO: 709257 - DNA, 149 bp, Homo sapiens
gaggatgatgcggaaattaaccccaaggtgtaatttttgtctgttaatcattcatacgtttctagaaggaacccagccagccggcggaatgcaagcagcagtaggaagcggaggcgggtgcctggcagaccggctgtcgggaccgaggc

SEQ ID NO: 709258 - DNA, 248 bp, Homo sapiens
atctagaggatcccgggattacaggcatcaccaccacgtctggctaatttttttagtatttttagtagagacgatgtttcaccatgttggccaggctggtctcaaattcctgaccttgagtgatctgcctgcctcggcctcccaaagtactgggattacaggcgtgagccaccacgcccagctcatttttagctacattttttatactgctggacaggaacaagattccaagggtaccgacgctcgaa

SEQ ID NO: 709259 - DNA, 391 bp, Homo sapiens
  misc_feature (355)..(355): n is a, c, g, or t
  misc_feature (375)..(375): n is a, c, g, or t
gagctcctacccccaccgcagttgtactgtgtagcattatacacacaagtcccttttaaacagaaagtctgttttaactttttgccctacctcagtctgaggaaggtcagttgaagtccttactgtacaagtccaaaattttaggaaaatgagtcccatgatgagtttcctcatgcttcagccatgcacggaccagtcagcttccaggtgtgactggagcagggcttgtcatcttcttcaaagtcatcttgcatgggttgtccaagcttggtctcacctcccaggtctcagatgctttaggttttacatggctgtggagaatccaggctgggattccttctacctttatggctgngggagtggacaagacgatgngtctgggtcctctcca

SEQ ID NO: 709260 - DNA, 267 bp, Homo sapiens
ggcggacattgaccttgatgtgatgaaatggctcccatatacccagtctaaccatgagaacatcagacaaatcccaactgagggacatcttacaaagcagtcggcacttattctcaaaactgtcacattgcaaactgtcaccgtcaagaggagcctagggaggcatgtcacctcgaatgtcacgtggggtcctgagtggaatcgtggaacaggaagaggacattagggaaaaactaagggaatgtgaataaggggtggacttaaggt

SEQ ID NO: 709261 - DNA, 109 bp, Homo sapiens
gcgtcgacggacaaggcttctctgtccgcccttcactcctccagcctcaggttcacttaggcacatcacacacacactggcacacgcaggcatccatccatccgtcatt

SEQ ID NO: 709262 - DNA, 144 bp, Homo sapiens
gactagaggatcccctgggttagctagctgcgttagctatggtctgctggagcaactggtctgtcttctggtccacacttgctgtggcctcatcgatacacaggatcttggcatctgtgaggagagccctggctagacccaggt

SEQ ID NO: 709263 - DNA, 217 bp, Homo sapiens
gtcaaggtgtagctcatgaggtggcaagaaatgggctacattttctacccaagaaaattacgccaccgccctgatgtttatacttagtgctttgcattatcagcactacaacatattgtttgaggtacatctgaggtgctcgctaacatccaagactcaattctgcgaccaacctgaatcaaatcaatagaactcaatcctgagtcaagaatcacac

SEQ ID NO: 709264 - DNA, 1140 bp, Homo sapiens
ccttttttttcttggtgcaagcgacgaagacgacgagagtacgacgacacgagagcagagagtatgaagcgctcacgtggtggtgggtgcactcacatacccaactggctcgtgacagccaatgccggtgtatgtcccctttgccgagtctttttctccagagctcgtttttagtttccgttctgccattcagctcctttgcccggcaggatgtgcgccacccaggccagatattggtgataagcggcgagcccacggggttgtgtccgcgcccggtcgccccccgggggatgactcttgtgttccaagcccgggtttctgtttctaagagatttcccgtctaccatgtgtgccgtgtgtaaaaccggcgtctctttgctcttttgaggacccccgtctgcctcgcccttccccttggaatattccctcccgccgtggaaattttggggtgggattaaccaggtccacatggatcttcctgcccaggaaggttccagctgtttcccatatccagctctaacccacgcccgcccagtcccatatttttaaggagactgcccgagcttaggactcgatagagagccatattatagcgtttggagcttttttgggggttattttacaccacaccaaaccacgtgcccattgggaaaagaaacaccagtgcccctgggagatttgccaccagataccagaatagtgtccaccacatcgcgttgaaatcattgttttgtggcaccacatagagccataggaaaggtgtacgccagaaaaactgcgtgtgtgtatccccagaataggtgtctttcttaacacccaacatgatttttcctagctgtctgcaccaagcgaggccgagaggttgcaacatggacaccaaaggcttgaggctatggcccatcttagccatatcccatcaccaaaaattgttgtctcctataagccattcccttttattccttcttattttatccctgggtcatgcctcccacccgtgagaataggagcagagatttctggtactagactgctgtagccgtgccccttcatcccgggccagttaatggagattctggaccccttttttttctgggaaccctgccccaccccccttcctatagagatgaccttttaaaggga

SEQ ID NO: 709265 - DNA, 277 bp, Homo sapiens
  misc_feature (99)..(99): n is a, c, g, or t
aggatccttacagcttctctctatgggcacagtgtgttacccgtaacggagtcatcacgatgcatgtgtacggccagaggcgtacagtgatagcacagnctagatagcaacgtacatggctgggtgttgaatggtctcaaaacatgatcttgtgtcattcttctcgcgggttgcgcttgggggttcagggggggcctcggtcagcagcacgggggttgctcctcggggagccaacacgccagctcattggaagaagggtgtggtgcccaggattttc

SEQ ID NO: 709266 - DNA, 1071 bp, Homo sapiens
gcctctcggaggctggaaatgcagctattgaggtcttcgaatgctgtggagcttggagtgcggaggcagcttgggtgaggctcccgagcgcatgctgaccaggccgcacatcgtctacgctctcttcctctctctctgcgcggctccttgtctcgaatacgtaactttttgagctctaactgaacgaaccgacaaagaggtagatctgtaccgtccacgtacacggtcactcctctatacttcttcaggcctgtgccggcgccggggcagcgccccagaaagagcctgtcccggcaatgtgcatccccccataatagccatgccgggtgagccgtacctaactcgagttgatacgagggcgaaaattcggggcagaaccgttccggagttacacatttgccaattaccttccaagagtgcttatgttcgtacacgtaacaagtacgggtagggcagagtctatccgacgagaaagtgctgcatgctcagagaaccaagaggctttatggcaatggaatcctttgttgcaaggcccccaaggtaaagttcaccttggacaattgtgacaccacacttggagcattgggactagatgcactcagcctcagtgctatcttcaacagctcagccaacccctttggtgtaattctgtggcaacgtacacacacaagaggcaactgggccgccaagtggcgtacttacagtgggagttgagccccggagttagttgaattgaccggagcaattacgacaaaacagccatagttagagaattcttggtgttgaacttccacttacttttggacaattgttggagtcaatcgacgcagtaacaggagatcaggacaaagcttgcagtaacatatggtgggatgctaagcgaagacgtcagggaacgcgagagcgaaacagcgaaagattgaagaatatgtaacagtatcatgtcgcttccaccactatatgcctggaggagaaatacttcacggttatgctctactgtgaaaggttttttgagcgattactcgggtgaagataggaagcaggttggttaacttttggatgtgagtgaaa

SEQ ID NO: 709267 - DNA, 571 bp, Homo sapiens
tcacacacgtggtttttccatgcttattaaaatgatccctcatacagccggaagaaggaagcccccccaccaaccaaacaagtaaggaagaactaccttctttgccccccccccacaggaatattgttcgtgagagaggagaaaaaaataatagaattatattagtgtgggtgagcagcaagagcctgtttataaaggccgcgagcaagtatatgtcctctcacactcaccgaatttattttatatacacattcttggggaagaataccactccacacagtgtcttattccccacacacacgcactgccgccacacacacctccctcactcttctctttatatataaatacaccactggcgcgccccacctctgtgtctacagaactttgtatgtttatagaacacacactagtcgctaataatttatcgttatatagggccctcactggatacatttttttcccgttgccaccacctatgtcacgctttttttacttcacaccaaacctcctatttccaatattttcaaataaaaaacgacacaccacactacaaatagtacaaacaaac

SEQ ID NO: 709268 - DNA, 560 bp, Homo sapiens
  misc_feature (42)..(42): n is a, c, g, or t
agggaaggggcggccccccatcggggtaagttttagatcccntacttcaccgttctgggatccaggtccgatacatgaagatcattgagaaaagtggttcccaggccctgccttgggttcgttacatcacccagaggggcgattaccaattttgtaccagctagaagggagaagagatgggggcttgaacacggggcttccttacagccccggatgcaaattttaaagggagggcaggtgcgggctgtgtgtgtttgtgtaagggcaggtcctggacttggcagttttttgttcccagcacccgccccttcctcaccttttccttattccatagggtgggagagaaactttttttgcttcccttggcccttgaagctttccccatccccctgattttatatgaagaaatagaagaggggcttgaagtccccctcgggagtgcctttttgcaattacctgccttagggggtgttgggggtccctccttcacagccgttgagcccaaaggtcccgctggcccctcctttgaattttaggatgtcattaaaaagatgaattta

SEQ ID NO: 709269 - DNA, 829 bp, Homo sapiens
gactatcttttctcttctgtcagccccacacgcctttggcacaactgaacgatgggtaaccttctattatcccttctttgtctctttaactcggcttattccagggtgctgtgtttcgtcgtagatgcatcacaacgagtgcaggttgcatcatcggtgttaaagattggggagaacgtaaaattgtcaaagccttggtgttgattgccttatgctcagctatcttacaggcaggtgtccacttctgaacgatcatgtacaaaacttagctgaactgcaagtagactgagatttcgcacacagaacatgctgttgcctgatgagtcacgcctgaaaaattgtgacaatactcactttcagtaccccttattcggaggacagaattacttgcacacgtttgcaatctcgttcgtgaacaccatactggtgaccactggctgcactgcgtgctgacaagcacgaagaacctgacagaacatgagatgcttcttgctgacacaagaggatgacaaagcgccagaaccgtcccccgaattgcggcagaccagaggttgatgtgatgtgctactgcttttcatgacaatgaacgagaccgtttttgacatcattacttatattgaaattgccagcaagaaactccgttactttttattgccccggaacttccttttctttgctaaaaaggtatcacagctggctttttacagaaatgtttgccaagccttgcttgattagagcttgcctgccctgttgccaaaagctcgatgaactttcggggattgaaccgggaaagggctcggctgccaaaacagagacctccaagtgttgc

SEQ ID NO: 709270 - DNA, 866 bp, Homo sapiens
cacaaagcaaacaaagagcaaagataatgacgggtgagtcggacgaggggcagggattatgacgtgagagaccagcggatggatcgaactctacgtactgtgtcagaggggaacattccttatgacgctactgaagagcagttgaaggacatcttttctgaggatggacctgttgttagatttcagatcggtatacgatagagagacaggaaagccaaagggtatggcttctgtgaataccaagaccaagagacagcacttagtgccaatgcggaacctgaatgggcgcgaatatcagagggagagcacttacgagtggacaagctgccagtgaaaagaacaaagaagagctgaagagcctggcacaggtgacacccatgtcaatatgagtcaccttatggagagaccatcagattcctgaggatgcccctgagatccaatatagacaaagcagtagcacagcacatacacaccagagcagaatgtatagagctgatgaaacaaaatgaagctctgtgtacagaactagtccccaggaggcacggaacatgttacttcagaacacctcaccaggcttatgcttgcatgcaagcacaggtagtgatgagaactgaggaatccggaaatagcctgcaaaattcagcatcgcccagaacaaaatatccacaacgcagatgcaaggaaaccctcagacagaaccatggagcgtgagcctggctcaggatcaaaagtgtcactgaaaacaacaaaacaacaaggaacacaagccaaaaagggtgaagtccaaacgagaaagcaagagaaaagacgagcagggctaaccagaagagatgagacagtgaagagaagacagctgacgggaacaa

SEQ ID NO: 709271 - DNA, 748 bp, Homo sapiens
gttgaacagaactgctctccatggagagagtaacctctgtaccttattatcggaccccgaggatcaggaaaaacctatgttaataaactcacctgcattgaaagaactctgatggtaattagaatgtaagtgaagtgtaagggaatgtcattaacgaagttcacttcaagatgggacgtgctgtcagagtcaagtgaccatacatatcgtcctcttaaaaggtaaaatctacaagtgcagttcaaatcttggtaaatatggtagtggggagataaaggttttggggcaagcttgtgcatggtaacaaaccctttgcaatatctcatttctgggtacacgcttttcataagacaatagtgcttgaccagacacgtaagcaagtgtgccccaagggtgaatctctgccatcatatacagcatggacatctttgaatctctgtatgagcctcatcacatcataatgatacacggaaataccacttttcctctattcatactcatgttgttcgcgacaaattttgtcattccataagtctcctggccacaacccaaaggcaaccacccaaatataaagtccaaagatttccaattgcgggtcctttcaccaatggttccaggcatcgtggcgcatcaatattgaaagggaaaaccttcttttcaagcaaaaggaagacacgaaggttggcaaatgttccaaaggaatttattccttccaccggggcggaagaattgacatttttcatagtga

SEQ ID NO: 709272 - DNA, 136 bp, Homo sapiens
ctgagggcgtgttacaaagcgaaaaagagaagacaaaaaaagatcacaaaacaaaacagacactccataaaaagaaaacaaaaaaacaacgctaacgcgatggccacaccacaagtcgccaaaaacaaaaaacctg

SEQ ID NO: 709273 - DNA, 801 bp, Homo sapiens
ctttggttacagggccagaattctgattttaaaaaaaattgtacccttttttaaaggctgggggagtaccacttcaagaggccgtaataagttgggaacccaaagaaaggctgcccaggggcacccccaacttggtgaagagtccttaaaagccccagaaaagtggaaaccatgtgtgtcttctgcataacccaaacaattgcccttgagcaaaggcgaatcacccgtggcccttccgcataaaggggcaaagatcaacaaattgtcagtaggtatcaaagagtcgaaaggctgcctagaatccatggtgacaaagagcctatgggttcaggaggtggaggaccaggaaactgtggttagcatcaagctacattttgagacactagccttcgacgcatatatatgcacactttgtcacatggagtagccagtcaggacacgattcgcacatgttgagcaggtgtacaactagccagagccattgtaacagctcctagtatttgtcatgtatggtttggcaccatacgcatacaactctgtcaaggcagacgatagcgatctgtccttgaccgaggaggggactgttcttgttggagctagacaggctgccttgtggcaacaaagtacgctgttagtagcctctcagctcctcatagtaataatatgttggcaatcaggatctcaagctgatggaccggtttcacatcagcgatggtgtgaagccttcccgctgtctgaacaggatacatgtcgtccatcatcctgcctccagttcgtgcgattccatcaatatgctctgca

SEQ ID NO: 709274 - DNA, 336 bp, Homo sapiens
tgatgtgcagctgtctgcctgttagtctgttgggccttggagacaggagaccaggtaagtggctcagcaccggccggtttcagctgtcttccagtgttctgtcgctcagcaagggtctgtcttcatccaaggtcgtcacaggggatcagagagctccagcctcagtgcagaggcaatagctcatactcaattggtgataaattgctcatgcgctgtcacggcctcattcagagtcatagatccatacctgtggaaagacttgggattgaaaccccggtcctgaggtaacaatgcacccaacaagcctacccgtgctcctgtgtctgccctctgtgt

SEQ ID NO: 709275 - DNA, 1955 bp, Homo sapiens
taaatacctgtgtatattaccgcactacaaatcagtccagatactctccaccccaatccaacatggtccagaaattacaatgagaagttgcggacatggattgcccttgggcagcccttgtcatgcattccgtcgcaatacataatcgtcgcatgcgtagtatgacgcttgagtcatagcgactagtacatcgaagaccgccgtcaaacactgctcttcttccatacggatgcagcccccacaatacgactacggcatgaacgcgtcaatattcactagtgctatggaatcacatacgcttgcttgcactcgtatccactgccggagatgggccgcgcatgctccacatcatttgtttgtcatcttgtgccaatgctatcccttgacaacacatcacgtgagcgtgcatgtgtagtaccaatatgtatactacgagcagtgcaccgtatgtcatgcatactcttttcacggacatattctcgtggacgaatacattacggaggcgatataactactcctacacatgaccatttgttctacacccgtgacgtagaactaaaaggacgcccatgtgtatacttacgttgcgcatacgttgtttccccatcgtcgcgatggtggaaagttcgaccccgataggaatgaactgtcggaattttatccttaggacagacagctgcatgtcaccgcaaccacaaggtgtacacagacgtcatgagaccataacacaccaccttttataacgttgaaatcaccaccggaacacccatttggcgcgcagaaggtacaccccaatgtgtttgaagagcaatcactacagacaacacgcctccaatggtttttccccacacttagggaagattatcattccgttaaagccgcccacggcgacgatacatccggacccatagtattacaaaaggtacactccaggtgtgtacccaccacaatctgcacaattatggaagacaaaccaggaaggtctacgttgtgtccaaggccgatgtgctccccaccacggggttatccccaacttacctttgttgaaaccagcgggtcaataacgacagtcttagaattatggacacccagcccgtgaccaattgacacagtgtagaaaacgcaaaggataacactcacatcatcatttacaccattaaaattatcccattattgctacacaatgtgttaacacacacctcagttgtggtcagttgtcaacagacacaacaataggcctcaacgcctgtaaggggagaataggtatcatcattgaccgtcacacacaagagtaatccgcgggtaggtacacaaaactcagttccatagacggcggtattaaggccagacgtgcacccggtcattaccacgtaacgtataaccgacataccaaaacacaggaacctgaaccaccctatcggatggtcgtataagcaatttacctttggtatcaccagggtactagatttcatttctgctatgtataagtgggacggacccgttttaaatacgacgattagatacatcatccacgcgcacaaggatcgcatacacctataggagcggagtggccgcaacaaccactcttgaaaaccccccgatcagggacgacaagcaccgacttagaaaacagaccccctgattacgcacaaaaagtgtacagtgcccccgcaaactgactaacctttcgccactattacgaagtgtgtaccatcaaaattaacaccggcaatctgaggacgcgttagtaacaacctaaaggacgaggagctcagggcgcacccagctaattagacgatgacagcatagccgatcagacgtagacgaaagcaaaacacccagttaaccggcacgaagaataatctagaacagaaggagcggaatagaatacgaaccacattatagagaccaactgagctcactctctgcccatcacaggaggatcacgtcgatgc

SEQ ID NO: 709276 - DNA, 244 bp, Homo sapiens
aattacaaaaaaaattttttttgagtccgcatcttactctgtcacctaggctggagtgcagtggcgtgggcccagctcactgcaacctccacctcccgggttcgagcgattctcatgcctgcgccctccgtgagtagctagggattagcgggtgcctcatcatcacgcccagcgtgatgtttgtagtttgtatgtagacgacagggatctcaccatgtctcctgggaacctcctgcctcccggg

SEQ ID NO: 709277 - DNA, 238 bp, Homo sapiens
ccaagaaaccacctttaaccatatttccgatttcctggccggtggtttaaaacaaggaaaaactttttacctttattccggtttccgggccggggcctttaaggggggaaaaactttttaccattaaaccgtgttcgaggccgggacctgacccctttgaaaataacttgtttaaataactttttgtaattcccggtccttcacccccggaaagcgccctgccccaaatccgtttttt

SEQ ID NO: 709278 - DNA, 751 bp, Homo sapiens
  misc_feature (102)..(102): n is a, c, g, or t
  misc_feature (709)..(709): n is a, c, g, or t
  misc_feature (735)..(735): n is a, c, g, or t
aatctgtgcctggccggagtccagggtaaattagtagcatggtgttagatgttagaaacagaactgttatttgcagtgttaggtctaggatcccagttctantaggacagccctgcaagacaatcaaccagagcctccaggagcttctacctatggcttattcacaactgggcaagaaaacatcattggtaagaactgctgagtgtgcccttagaaagccctagtagctccagctgtgactatatcaactgtgtgccaagtgtgactttgtacagttttatgtttccactctcctgtatgtgtagccactcgatgcctaacctaccttccacaagccagccccgcatccctgctcccgcagtgtaagtgcagagcctgcctcactggtaagggaaaaccttggcttgggaggccagccctggcccttgaaggggttggctgtgcccagcccacctggctgcagtgggcagctcatgtctgtatctccaaagtgatgtttgtttgcaaaacaccggctgaactgagctggtgttgccaactcttggcagcactgggccaaaccgaccacataccatgagctcccaaatggcgtgtgctcactgtgagacgtcctgccacaccccacaggagacggaggcagtgggcatttggaaccaattctattcagacttcgtcaaagccaaagtcagtctggtgttgtcagttgacncatctccagagttcatgacagctcancctcgccccttgagaa

SEQ ID NO: 709279 - DNA, 690 bp, Homo sapiens
  misc_feature (648)..(648): n is a, c, g, or t
  misc_feature (674)..(674): n is a, c, g, or t
ccaggtagacctaacactgcaaataacagttctgtttctaacatctaacaccatgctactaatttaccctggactccaggagcttctacctatggcttattcacaactgggcaagaaaacatcattggtaagaactgctgagtgtgcccttagaaagccctagtagctccagctgtgactatatcaactgtgtgccaagtgtgactttgtacagttttatgtttccactctcctgtatgtgtagccactcgatgcctaacctaccttccacaagccagccccgcatccctgctcccgcagtgtaagtgcagagcctgcctcactggtaagggaaaaccttggcttgggaggccagccctggcccttgaaggggttggctgtgcccagcccacctggctgcagtgggcagctcatgtctgtatctccaaagtgatgtttgtttgcaaaacaccggctgaactgagctggtgttgccaactcttggcagcactgggccaaaccgaccacataccatgagctcccaaatggcgtgtgctcactgtgagacgtcctgccacaccccacaggagacggaggcagtgggcatttggaaccaattctattcagacttcgtcaaagccaaagtcagtctggtgttgtcagttgacncatctccagagttcatgacagctcancctcgccccttgagaa

SEQ ID NO: 709280 - DNA, 325 bp, Homo sapiens
ttcgattagggcacttagtgagactcatctctacaaaaatcaccaaaattagcagggatggtggtgcacacgtttagtcccagctacttgagtggggctgaggtaggtaggtcactggtgcccgggagatcaaggctgcagtgagctgtgattgtgccactcctcttaagcctggatgacagagtgagaccctgtctaacagaaaagaaggagaaggagaaggagaaggagaaggagaaggagaagaagaagaagaagaagaagaagaagaagaagaagcagaagagagaagcagtaaggtttaagttgccccgcaaatcgaagg

SEQ ID NO: 709281 - DNA, 343 bp, Homo sapiens
aatgggcagaaattcatggagtatgtggcagaacactgggagatgcatagattgtagaaagagagagccacgcaggaaagacaactgaagaacaccagacagagacagagatgctgtatggcagagcttctcgaacacactagcaagcggcgaggactggcttccaatacaccgggcgcacgtaagctgaacactatcaccatgtgcaatgctacgggcaatagtagcattcgggctatctttggagggacagtctaccacttccccgtgtctcgacttcctccttctggcagcaagccagtcgctggtttcacctgttcaggggggcagcatactgagtgcg

SEQ ID NO: 709282 - DNA, 383 bp, Homo sapiens
ttgaggttatgcacgatcgagcctatagagatccctccaacattgcaggacatgttagttataagaagtagttacagcccaattcactaaagttgaccaactgtttctcttttctacaaagatagcaagaagtttagaaattcctttcaattagcgcctggtgtgtcaggtgggagtgcagaggagggctgttagagcagtgtctagaggaccctagtgcgccagaggggttggacatcgttaataatcatagttggcttctaaatactggtagcaagatgacttctgatttgtaatcttaggtaaattatagataaatgaaaaaggccagtaatcatacactaagattaataaacagcacttcaaaattaaccgcataaggg

SEQ ID NO: 709283 - DNA, 90 bp, Homo sapiens
ctagaagattcagcaaagtacttttgtgctcttggggatgcgttattaccgtgggggatacttcctgggtcggatagcgataaactcact

SEQ ID NO: 709284 - DNA, 200 bp, Homo sapiens
  misc_feature (130)..(130): n is a, c, g, or t
gccaccgccgagctcacccctgcggtgcacgccttccttggacaagtttttggcttctgcgagccttttactgacctccaaacgctgttaagccggagcctcggtagccgttcctcctgcccactggacntcccaacgggccctcctcccctccttgaaccagcccttcctggcctttgaataaagtttaagcgagtagc

SEQ ID NO: 709285 - DNA, 1520 bp, Homo sapiens
gtatctagaatcgcgagcggcgccctttattttatatttttttattttatatatatttatatatttattttttattatttaatatattatttttatattatatatattatatatatatatttatatattatattatatatttttattttttttttttttttttttatctatcataatcacacaaaacagcaagacagaagaaaaaaacaaacaaaaacaaacaaacaaaaaacaaggagcgggcgcacccacaacatactcacacctcgacgggcgcccccccccactcacatcacaccacccccatcctaactctgctccagcagttgcgatagacgcgaagcggcgcgcccgcaacccagcacgcgaggaaaccactaatcacaaatcgaacagaccaacagacagcgagcgacagcacaatctaacacaacggagacggaggagcgaggtgacactcaccaaacaactctacacatcgcgtgtagacaacgagcaaacaggaaaccaaaagcatagttcctcacgagccgcgtgcgtgcgaaccacccacatccaacatcaacctcaccaccactcatcacacacacaaccacacaacgtcacaccacgacatcaaagacaacgagaagaatgacaaaaaaccactcgacacactctacacaccaacatccggcccacgagcaacacaaacaacaacccaaccccaaccatctcatcacgctggacgaaacagaaccgaatgtcaaaatacagcgcaagagcgagcgcccgtgcgaagcacaatcagccacgcgcgcccaaagtaatcacaataaagcacaagcgacgaggcaaccacacaacatataccaatccccgcggcaccacgacaacaacaggccccaccgatccgcacccgaacgcaccccacccgacaactacgaaccaggaggccgacgaacgacaccacacacacgagcacgaccacagatcacaagaagcaacacaaacagaaaccaacacgagaaagagaaacacagaacgatgacgcgaaagagagaagctcaacaccgaaactacccacaccgaacgacactcaacccacacaccgaacagaaccaacgacaaaaaaagcacaagggagcaaaagaacagaaccgcacgaaaagaaccacaagcaacaacccacacacactgcaagaacaaagaacgaacccaaccagcaacgcaaacacaacaggcacactcaaggcgagcaaggcgagagacaggaacacgaaaaccaaaagacacaagacacaccaaacaacagacaacctaccactcctacctacacccacccacccaatacaacacctcacgactcaacaccgactgctattaacaatctaatccacaaccacacacaaaactcacccaaaatcaaaccacacaacagaatctctgtcaaaccacaccctaacaaaacagacacccaacacaccgtaatactaccgacacgcactctaacctcacgtctacaaaaatagatatgaaca

SEQ ID NO: 709286 - DNA, 132 bp, Homo sapiens
acgccggtcgagggtgtccgggactcttgtatgccagagctcagtgacccagggagcacttcttgctgtcccttcccttgagttctccaaagcaggccatggccagtatcacaggctgaggagccaggccgc

SEQ ID NO: 709287 - DNA, 104 bp, Homo sapiens
caggagggcacttgaggccgggagttttgaaaccagccaggccaacatagcaaggctccatctctacataatgatcatcattatcttcaccaacaaaacattag

SEQ ID NO: 709288 - DNA, 385 bp, Homo sapiens
  misc_feature (60)..(60): n is a, c, g, or t
  misc_feature (63)..(63): n is a, c, g, or t
  misc_feature (74)..(74): n is a, c, g, or t
  misc_feature (81)..(81): n is a, c, g, or t
  misc_feature (121)..(121): n is a, c, g, or t
  misc_feature (124)..(124): n is a, c, g, or t
  misc_feature (133)..(133): n is a, c, g, or t
taggcggtcagcaccacgccgcccgagtcctccacctccatcgtcagccgcgcatgtttnggngccggccccanaacaaanaccgggaccagcatggaccggcgcgccgggaggctgtcancanctgggcggngcggcccgagccctcttccaactggaggcttatcctgtggctgggaacatttcctgcctggctgcgaggagtgagactaagaaaccatacctcaggctgaggagagaggccgggtttgatatgtgtgctctggggaagaaaaggagaaaatgtgatactctctcatttaaagcatccacatcaaaaattgaagaactggattacattgctgtttacttagtcaagttacaataaacttgatttccttttggg

SEQ ID NO: 709289 - DNA, 329 bp, Homo sapiens
  misc_feature (260)..(260): n is a, c, g, or t
  misc_feature (262)..(262): n is a, c, g, or t
gtctcgctcttgttgcccaggctggagtgcagtggcatgatctcagctcactgcaaccttcgcctcccaggctcaagcgattctcctgccccagcctcctgagtagctgggaccacaggtgcacaccaccacacccagccaatttttgtatttttagtagagatggggtttcaccatgttggccaggctggtcttgaactcctgacctcaggtgatccacccaccttggcctcccaaagtgctggaattacaggcgtgananccgcgcccggccaacatctatctttttaaaccaacagaattgccttgcttaatttaaggaaacagaa

SEQ ID NO: 709290 - DNA, 417 bp, Homo sapiens
  misc_feature (60)..(60): n is a, c, g, or t
  misc_feature (63)..(63): n is a, c, g, or t
  misc_feature (74)..(74): n is a, c, g, or t
  misc_feature (81)..(81): n is a, c, g, or t
  misc_feature (121)..(121): n is a, c, g, or t
  misc_feature (124)..(124): n is a, c, g, or t
  misc_feature (133)..(133): n is a, c, g, or t
taggcggtcagcaccacgccgcccgagtcctccacctccatcgtcagccgcgcatgtttnggngccggccccanaacaaanaccgggaccagcatggaccggcgcgccgggaggctgtcancanctgggcggngcggcccgagccctcttccaactggaggcttatcctgtggctgggaacatttcctgcctggctgcgaggagtgagactaagaaaccatacctcaggctgaggagagaggccgggtttgatatgtgtgctctggggaagaaaaggagaaaatgtgatactctctcatttaaagcatccacatcaaaaattgaagaactggattacattgctgtttacttagtcaagttacaataaacttgatttccttttgggaaaaaaaaaaaataatggcctggttggcctca

SEQ ID NO: 709291 - DNA, 357 bp, Homo sapiens
  misc_feature (95)..(96): n is a, c, g, or t
ttttgcattttacaagtcatattcaaaaaacacacacaaattagcattttgtacacgaatgtttatttctcaattaaacattccctttaaacacnnagggaatgaattctaaatcttcataaagatgaataaaaaatgatatccctccagtatagtgtgtataagcactgtccttggtcactactgccatttactgtttaacatcaaaaaaaacaaaagttatttaaaaatcatgctactggatttctatccctccactatgaccagctctacactgatcggcaatgttttacaagtttatatcatcagattgaagcaggtttaaggtgtgaaacagctgtattagacacaaagtta

SEQ ID NO: 709292 - DNA, 430 bp, Homo sapiens
tggtgaaaaggatcatgaccaacaggtgtgagacgtttatggaatgctgctggtgtggctctctgttactacagcagaagttgtagtcacagaaattcctaaagcaaacggagacaggaccctggaatgggtgcagggtggaatgggaggtgtatgggaaggctgcggcatgttctaactcctagactagtgctttactttattaatgaatctggtggtacaagcgtataagccccaaggcagatgttcctcaccaataacttcagaagaacgtccaaggtttttgggggaggacaaaatttgaaacgacaaaatgggctggccttgtgaaaaaaaatcaactatttaaccgatcagtctactgggtgttcagcttgacgaacaattattatttcactggttgttaactgctggttccatttggtcccaa

SEQ ID NO: 709293 - DNA, 221 bp, Homo sapiens
  misc_feature (3)..(3): n is a, c, g, or t
gcnccaatcagcaggatcccaaaagtagcccatcgcagggaggattgaaaaaagggccctttgataggacagaaacagaacatgggaggggccaaataagggaataaaagctggcccggtcttcagcccttagccagccagcagcagcaacctgtagggttcttttttatactttggaagcttatttttttgctcttcccaataaatcttttttctggtca

SEQ ID NO: 709294 - DNA, 423 bp, Homo sapiens
  misc_feature (17)..(17): n is a, c, g, or t
  misc_feature (24)..(24): n is a, c, g, or t
  misc_feature (61)..(61): n is a, c, g, or t
  misc_feature (260)..(260): n is a, c, g, or t
  misc_feature (276)..(276): n is a, c, g, or t
  misc_feature (309)..(309): n is a, c, g, or t
  misc_feature (336)..(336): n is a, c, g, or t
  misc_feature (346)..(346): n is a, c, g, or t
  misc_feature (368)..(368): n is a, c, g, or t
  misc_feature (373)..(373): n is a, c, g, or t
  misc_feature (413)..(413): n is a, c, g, or t
  misc_feature (420)..(420): n is a, c, g, or t
tttattcttggccaggnacactgngtcatgctgtaatcccagcactttggaggccaaggtnggtggatcacagggtcaggagttcgagaacagcctggtcaacatggtgaaatcccatctctactgaaaatataaaaattagccaggcatcgtggcaggtgccgtaatcccagctactcaggaggctgagacgggagaatcgcttgaacctggggaggcgggggcttgcagtgagccgagatcgcaccacttgcactttngcctgggggtgacttnaacaagacttccattttaaaaaaaaaaaaaaanaaaaaaacccaaaaattttccccatantaactggggnccatttttttaaacaccccccncttgntttttttttcagggggtttttggcattttttccagttttnaagtttntgg

SEQ ID NO: 709295 - DNA, 221 bp, Homo sapiens
tacccccaccggcagttgtactaggaggctatgttccaatccgtgatccatacccgatcacctggggagaaagggtgaactggggagaataagctgacagagcacctctcatttacccaggctgaaattgtttgtgtaattttgcctaaagcctgtagctgttgctgtaagtcaatttcacctagctctcgaggagtgcctggagtacaacctgccggtgg

SEQ ID NO: 709296 - DNA, 391 bp, Homo sapiens
acagttctggggattaggacatggacatcttcccactatgggggcagccaggagggaccacaggctgaccgctatctttctgcctgctttcactcatctccacacaattccttccttcctctcgctctcttctttcttttcttcttttcttttgtctctttctcttttctttttttctttctctttttctttctttctttctctttcttttctttcctttcttttcttctttccctcatcttcacacaatgctttctccctttctttctttccttctttctttctctttctttctttctctctctctctctctttctttctttctttctttctttttctctctctctctctatctttctttttcattttcttgagagactcttgtctcgga

SEQ ID NO: 709297 - DNA, 195 bp, Homo sapiens
ggctgatctagaggatcccgaaacctaataacgcagctcaactctgataagacctctagaacttccatatgccacaggtacgtctataacaaataaaacaaatctgtttggatgtataatttggaaaagtttcacttatgcttgtctatggtagtgttttaagtggctttatagactctatatagttaataggag

SEQ ID NO: 709298 - DNA, 168 bp, Homo sapiens
tacaaaaattaactggatgcggtggcacatgtctgtggtcccggctattaaggaggctgaggtaggtggatcgcttgagcccaagagggtgaggctgcagtgagctatgatcatgccactgcactcttcagcctgggcaacagagtgagggcctgtctctgaggaagg

SEQ ID NO: 709299 - DNA, 715 bp, Homo sapiens
gtttgttgtttcctgttctggtctggcttgaccgccgtgtccgttcgtatggtccctcggcggttgagtaccactctcgcttagttctgggcaatcgggttcttcgcgggcaaggcaggcaaacctctcttcgtctttccgtgtcccgcggctgtgcctgtggccgctcgcctgtcgtactcccgcgcgtctgttttctgtgcgcttgggtatgcccttggttacctccgcgtcttctatggttcgcctcctgtctggtctctcaatcccgcgggttcggggcctcgtggcgccaagccagggccccgggcctgtccttgggtacccgttcgtgccggattttcatcgctaaaagtgcccgcgtattctcggtccgcggcactgggtcccctgcgtggccccccgggtgtgatcccgcgtgtgagcccccctgtgtatatattacctccccaaactcgtgaactacagagacgtccccccccttaggtgttcaacacaattctatttcccgagcgtcttaaccccaccccctttcccccctacacccacgcggggttaaatcccggccacaactttcttaaatcttgcggaccaaaccacactcgtttaatgcccatctgttctcagaagtttattgtcccccctacatattattttaaaaggggcccctttttctcccctaccccccccttacccccctttaagcccacaaaaa

SEQ ID NO: 709300 - DNA, 213 bp, Homo sapiens
  misc_feature (189)..(189): n is a, c, g, or t
acaggatcttggacaatagcgacgcgacaccagcaatgcaccagtgcacagggagcaggaggcagcccagaacctccttgttcctatggcaagcaatgggctaggggagaaaccagaaagtgctgctttcctgagcaaagacgcattggggctgagcttggtttcccgaggagagtttcactctcgcanactgaagctgccagaacctagttt

SEQ ID NO: 709301 - DNA, 183 bp, Homo sapiens
ggtcgacctccttgcttccctaacaggaaggtgtcgagttcaagagaacccacccagagactgggagtggtggctcacgcctataatccctgcgctttggcagtccgaggcaggggaattgcttgaactcaggagttggagaccagcctgggcaacatggaggaggcaggcccactgcaggcc

SEQ ID NO: 709302 - DNA, 288 bp, Homo sapiens
  misc_feature (4)..(4): n is a, c, g, or t
  misc_feature (12)..(12): n is a, c, g, or t
  misc_feature (78)..(78): n is a, c, g, or t
  misc_feature (83)..(83): n is a, c, g, or t
cttnccccctgnaaaaatgccaccacaaaatatatgaggtgtttttttttggggggggggggtccttgcctctgtttnccccngcgaagtgcattggtaggatcttaagctcactgcagccctcccaccctcccgggttcaagcaattctcttgcctcagctatttgggaggccgaggcaggagaatcgcttgaacccgggagacggaggttgcagtgagccgagatcgctccactgcactccagcctgggcgacagagcgagactccatttcaaaaaataataaata

SEQ ID NO: 709303 - DNA, 790 bp, Homo sapiens
gtgcagcgtgttgctggtgtgatgtccagttctaaagtaaccacaggtcctgaggccgacctcagaggtgccaaatgcatggatactgtgtcagtgcagcagtagaggacatcattcaccaaccaatccaggtctcggccaactgtgaccaactccaatgaccatccctcctggctgtggatagcgaactgtcgtcagaccaccagagctcagtgctccagatcagtcacatacgatcagtgggcgcatgctactgtattctatgcacattagtaggccaactcttgtctatccaggatcctccatctgcagcgaatcagtattcagcgtcctgcccaggtcacgagatgtgcacaacaagaatcgagactagcatctcaccctgcattagggagcgccgaaaacagcagtttcagtacaatggctcagaaaacagatcgttcagtactgggcacgccagtggtctgcagcgcacagtagcgaccgtattttggcaaccaaaaccagttccttcaggcgaccacagctggatctgtgtcacaacacgacaagcgtccgcacaagtaccattgttaccatgacagtaccctcccattcctcccatgctactgcttgtgaccacctcaaatatcccagtcgatgcgatcttcagtggtcagatgggcattcctgttatcacctgcgaaagacttctccagctgcctcgcaaggagctggctggggcatcaaagtggccaaggtggtgcccagcagatcacgcacacttcttctcggatccagcagagtaccg

SEQ ID NO: 709304 - DNA, 652 bp, Homo sapiens
  misc_feature (39)..(39): n is a, c, g, or t
  misc_feature (84)..(84): n is a, c, g, or t
  misc_feature (92)..(92): n is a, c, g, or t
  misc_feature (103)..(103): n is a, c, g, or t
  misc_feature (109)..(111): n is a, c, g, or t
  misc_feature (123)..(124): n is a, c, g, or t
  misc_feature (151)..(151): n is a, c, g, or t
  misc_feature (153)..(154): n is a, c, g, or t
  misc_feature (156)..(157): n is a, c, g, or t
  misc_feature (160)..(160): n is a, c, g, or t
  misc_feature (172)..(172): n is a, c, g, or t
  misc_feature (176)..(176): n is a, c, g, or t
  misc_feature (189)..(189): n is a, c, g, or t
  misc_feature (193)..(193): n is a, c, g, or t
  misc_feature (203)..(203): n is a, c, g, or t
  misc_feature (206)..(206): n is a, c, g, or t
  misc_feature (236)..(236): n is a, c, g, or t
  misc_feature (276)..(276): n is a, c, g, or t
  misc_feature (331)..(332): n is a, c, g, or t
  misc_feature (334)..(334): n is a, c, g, or t
  misc_feature (340)..(340): n is a, c, g, or t
  misc_feature (361)..(361): n is a, c, g, or t
  misc_feature (373)..(373): n is a, c, g, or t
  misc_feature (405)..(405): n is a, c, g, or t
  misc_feature (421)..(422): n is a, c, g, or t
  misc_feature (437)..(437): n is a, c, g, or t
  misc_feature (532)..(532): n is a, c, g, or t
  misc_feature (558)..(558): n is a, c, g, or t
  misc_feature (561)..(561): n is a, c, g, or t
  misc_feature (619)..(619): n is a, c, g, or t
tactaacatacagaacaagatttaaggtaaattttttanacattatccagaaaaataacaagatttatagtatctacttctggnactaatanacacaaaaggncaaagnnntgcctatgcggnnggggtagcttcggggccctcctgtgcngnngnnggntcactgcccgcntctnttccttctttgcntctnttagatttcnccnctatgtctctcctgtcactatctccttctncactttcatggcgacgtctacaattacttcgagaagactnatgtctggctccccctttctccctgtgtcgtctttctctatgtcgtcctcctctnncncgactngctctgtgacgctcataaccnctttctgcatancccctgtatctgtatcgttcttcatcgctgtngaaaacacttggcgtnngactgtcatcacgcnccccctctctctctctggtgcgtcctctttctctgtcccgatcacggtctcgctctctgtttctgtttctctctctatctcggtctttctctctnctggcataatagtcccactgcttgcnggngtccacaagactaggccacgaaggagcagaaccaggaagagggggaaaggcaacaatnccataaggaaatgcacgttcagaacgactatta

SEQ ID NO: 709305 - DNA, 1640 bp, Homo sapiens
gtatacttagaaatagttacaactttaaaatagttacaaaacattcattaaagctacatatttaaagtagagcatctcagtttgcagcaacatcagcaacatccaattcattaacaatgatgtcttttatctcacccatttcaactcagttcaacacacccatgcacatgtcaaatgtcagcacagtagcaataatccatcagacattcccttcaccacatcattatctgttttactacacatatacttgacccaagtacactcaacgcaggacgagatcttcctatacatatctgtatactagtccaacatacattctaactttatgctcagtctgttatataagacgcatcattcctacaaccactacactttctttgtcttcccaaatacacatgtcttccatatataagtatagcaagatgcacatcacacaccatcaaccacaagttcatcaagcttagccatcacaagcaccaaacagcttcgacattgtatccaacacactccacattatcactcgagtgatacaggttatctcctcatatcaccaaggatcaattgtatcagccatatcatcatttggtagcgtggcatcacagacattcacgtgtttcttcctaaacacatttcgttcacttttgttcctggtcagactttcacaaacaagcaattaatggcaggtccatcagaacatgtgccacaggtggttactcccgcgcctctacgccccttaacctacttttgggcacactttgcgtctactctcgcatattccactacacgcacacagggtacttgaaacttaagccacgatcctttcaccaggcccttacacactacactctccgtacttggaaccttggggctcccattggggcacagctcacagattcccccttcattccaggaccctcagaactaaacactcattgcacactctgcccggtcataggacatggtgacacaaggatcacaacgacacccgcactacacccgttgttacaccccaacacaggccagcaagacgggttcagtattaaatcatctatcatggtcgaacatatataccaccccctatatcagaatgcatatatctcccgactgcacttacccactatgtcttacactaagctatctatggttggctctcaattacgcgtattgatactgtactaccatcacccaatcaccacgtgcgtcataacatgaaaaaggttacaacggtagtctcgtgcccactgaggaagaacgtacatactcgaatttgaaccaaacctaaatcacctaattcatatctacagtgtgcactactcactcacataaacaataatcagggacacacactgatagattcatcacccacgcacgcctcacctgttccccccacgctgccgtctcctctttctcacctcacacctccgctcaccaccagatcacgcttgataccaccctccacacccaccctacggctacgtctccttcacaccccacagcccctaccactactgcacgccacacaccagtcacctacgagacgtccacttttctccctctctcgcatccaccactactacccgccctccgtatccactcatcccattcacatatattcttagctgttcgctctgcttctcatg

SEQ ID NO: 709306 - DNA, 395 bp, Homo sapiens
ctcaaaaaacttacaatcaccacagaaggtgcaggggtagccggcacatcacatgacaaaagcaggagcaaatgagagagagtgggggtggaggtgccacacacttttaaatgaccagatctcatgtgaacttggcaagatctcacttaccacaaaggggatgtcccaagccatacatgaaggatcagtctatatcatccaaacacctttcaccaggccctagctccaacatgggggattatatttcagcatgagatttgggcagggacaaatatccagactatatcactcttcttcccaggacttctggttttattcttctctgttctgcagcctccgctgctgatacccaggcaaacagggtctggagttgacctccagcaaactccaacaga

SEQ ID NO: 709307 - DNA, 140 bp, Homo sapiens
aggtaggcggggatgaaggcgacagcgattgctaggatggtgcgtagaatgagaagtcgtgaagatgataagtgttgagcgaaggtgtatggttgatattgcgcgggtggcgcgccgaatgaggtgcatgagtgtctgga

SEQ ID NO: 709308 - DNA, 418 bp, Homo sapiens
aatcggaggtgtgagttgaagtccgtcccagtgagtgttgatggaccgtgaggacagtaagtccagcttgaatttacagttgtccataagccccatgttctcgctggtgtgactgctgacacttgtccttcagtgcccgacacctcctgtgctgtacttctcgttgtgcgctgctggagcttgtccacctcctgcctggtatgccttcagggccttctcgtatttatcccgcatgcaccccactctccctctggtgtaccttgctggcctgagagcagcctgctcccgtagcctgcaggatctcggcggcgtcttgggttggtcctggaggtgggggaacctgagtgcaacatggcactgctggagctcctcgatttcacctcggggcagggtgagctcctcctccagcttgagacac

SEQ ID NO: 709309 - DNA, 661 bp, Homo sapiens
  misc_feature (223)..(223): n is a, c, g, or t
  misc_feature (226)..(226): n is a, c, g, or t
  misc_feature (298)..(298): n is a, c, g, or t
  misc_feature (342)..(342): n is a, c, g, or t
  misc_feature (506)..(506): n is a, c, g, or t
  misc_feature (548)..(548): n is a, c, g, or t
  misc_feature (565)..(565): n is a, c, g, or t
  misc_feature (569)..(569): n is a, c, g, or t
  misc_feature (592)..(592): n is a, c, g, or t
gacatgcaccatcacgcccagctaatttttgtatgtttttcagtagaggtggggtttcaccaagttggccgggctggtctcaaactccccacctcaagtgctctgcccgcctcggcctcccaaagtgctgggattacaggcatgagccatggtgtctggccctaatgtgagtgatctttaacactgagcacttgaaaaagaaaaccctgaagaaacctaattnttngatgtctggacgacaaggaagaagatagaaatggcatcagataataaacagtgtaaatgtttatcagaaagnggctggtggtcgggacaagtaggaggatcgcttgagtccaggantgcatctctacaaaaaagttaaaggattttttaacattggccaggcgtggtggcacacatctgtgatcccagctacttgggaggctggggcaggaggattgcttgaagcccaggaggttgaggctgcagtgagctgtgatcgagccactgcactccagcctggntgacacagcaaaatccagtctcaaaaaaaaataataataatnttttacataaccaaccncttntaaagattaaaaaaaaacccctntgattaaaaacctcaggtccctcaggcaatcataccagatttcgaaacaaagaataaataaataattta

SEQ ID NO: 709310 - DNA, 283 bp, Homo sapiens
atctacaggatcttgatatgtgttcaatgagcacgatggtagctctgagagcacctcctggcagggactagggagacacatgcttggagacaggctgagagacagtggcattgcctctccggaggtcatctgcaatagctaccaaattaaaaccagcatccctcctacccaaggattctacttctaaggatccagtcacaagcaccctgatgtaccagcatcccaaaataagctcatgtcccacctacagggccttggtgaaatcagttatggaatctcgggc

SEQ ID NO: 709311 - DNA, 237 bp, Homo sapiens
cacgagtgctgtatagaaagggactacttgtttctcagtacggagatcatcacatttaaaggataaatgaaaagaccttaaatgtgagttaagtcatggcaaaataacaatcagaaaagaagttgcagttccagtggcatgtgcctgtagtcctagctactcaaaagtttaaggcagagggatcagttgagcctgggagttcaagtccagcctgggcaacagagcaagactgtctca

SEQ ID NO: 709312 - DNA, 1232 bp, Homo sapiens
cggctgttgccggtactggacccggcgggatgagcgaggtggagtgcggcagcgggggctacagcggtccccgcggcgacggtgcccgcgacggcggcagagtgtggtagcggtggtggtaccggtgcccgcaggggagccggcaagaaagtgcggctgtgtggcgtggctggctggtggtgtgctggagcctgcctcgtgtgccccgcatgctgggaccccctcggctgcctggtgctccctgcacccgctggcaatcctggcggactggcggtctcgtggaaccccccgccctcccccggccccgggagtcagtgcggacaagccggtgctgacaatccaagtcctggggcacgtgtcaaattggttcaaccgtccggacatggttacggattcatcaacaggaattgacaccaaggaagatgtctttgttcaccaggacagctattaaaagaaacaaccccaggaaggtatctgcgcaggcgtagggagattgggggagaactgttggaaaatttgatgttcggtggaagcggagagcaatgtggctgcagaaaggccaacataaaatgtaaactggggacctggaggagagcttacccgatgaaagggggcatgtccgtgatatgcaccacaaaacggaacggtaagatccgcggcgagaatttacaaattcatccaaggaagatcaatcaacgtcaaagaagattagcgcacaaaagcagagcaacaattaggggcagcggcaaagaagagagtcacagcaatacgaggagcaggagagacacaaagaggagcactatgagacaaaggataaatagaggggagaagcacagaggacgaaagaaaacagacatcataagagacaataggagtcaccacagatactacaattagggatagccagcactagagtacccagtattacgttataataaccatggacgatagagtcggcatttaatagattgcggacaggaggcgcccagaggagctagttcactagagggacagagacagtagcagagcacagactatagagaagaggagcaagagagcagcagacgggataagaaaggccacaaagaaagatagagtcatgagacacgagatatggaatcagaaaggtcctaaatactaactaatagaaataatataaagccaaagagatcagcacagaagagcacaaaataatacagaggacgaagaagattcggaggaagagtcgtttg

SEQ ID NO: 709313 - DNA, 439 bp, Homo sapiens
acccagatatgcagagaaccctagtatcttctttaacctgtttctctttactgttactttgcctgcatctttctgtaaatgccctgcggcagtgcttccaggtagcagtgctcagcaggtgtctgctgcctcctgccttgctttgcttgctgagcctcctggctgtctataaacctatgtctctgtcttaatgctcctaagcttagtgcgtcctcaccacttccttcttgttcttgtgtaatgcattttgccccttcttcctgaaactgtgcctgagatggtataccctgggggggagggctgtggaccacagagccttaagatccaccttccttttgtgtagaaaaaggaataatatccttataactggggcaccgacgttcactcttgtggcccacgctgtattgcgaatggtgcgatctgaactaattgcaacctt

SEQ ID NO: 709314 - DNA, 414 bp, Homo sapiens
agcgccctgtatgagaaggcgtgcagaccctacatgaggcttcggaaatgactcagatcatgtggcctgcaggtatgttgacctgctcggaagacactctgaccgtgggcactgctgaccattgcgacggattcacatttgcaggatacaccccgcgcgtcatctctatcggaggactggcccccatgctgagtgacacagacaagaagtccttcactgacatcctgtatggcactgggcctggctacaaggtggtggacagcgaacgagagaatgtctgcatggtggactatgctcacaccaactaccaggcgcagtctgctgagcccctgcgccacgagacccacggcgctgaggacgtgagacgctgctccggccccatggcgcacctgctgcacggcatgcacgagcgct

SEQ ID NO: 709315 - DNA, 467 bp, Homo sapiens
gccttaaagcctgaggagaaggttgaggattgtgggaggttcaaatcagcccggagttattggctcatgggcgccaaaaaaaactggatctgttgaacgaaggctcagcccgagatctcccaagttttcagcgcattggcccaaaaaaggcccaactaattgtgggctggggggagctccccggccccttcaaccaggtaacagccccctggattgggggagggcgggggcgggggaaaccgggtacccccaaaaccctgtcccctatcgatcctgtccccccaggtggaggacctggaacgcgtggagggcataacggggaaacaaatggagtccttcctgaaggcaaacattctgggttttccccccggccagcgctgtggggcctcctgaccgtggtttcccccctccgccttttcaaatttttgtataaccccgtgttgggtaaaaacagtttttgctccgga

SEQ ID NO: 709316 - DNA, 143 bp, Homo sapiens
gtcgacgactccaaccagcagcatgccgagactatgccaagtcgccacaaaggcgaggctgtcttcctggcacccaagtgcgtagaccgcggcggtggccgcacgtgccgtcaagcctgcgctcagtccagcgagccttagcc

SEQ ID NO: 709317 - DNA, 464 bp, Homo sapiens
  misc_feature (4)..(4): n is a, c, g, or t
  misc_feature (341)..(341): n is a, c, g, or t
  misc_feature (364)..(364): n is a, c, g, or t
  misc_feature (381)..(381): n is a, c, g, or t
  misc_feature (402)..(402): n is a, c, g, or t
  misc_feature (462)..(462): n is a, c, g, or t
gatntggacgaggctgattcttgtatattagcaattataatgtttgtatatggcaaaactgctagcttgatttaaaaaaaaaacaaatctttaaaatctgctgcaaatttaaataattcccaaaatgaggaattctgtagttctgtgaaaaatttttttcttcagaatactaatattttgatgcatgtgtatcaccttattttgattaaatcttttccaattttgcaaacactacagtatactgcaacacaaaagattttatctgtaaacacaaagcccttcatctaatatttgttgctattgccaatttttcaatgaaatgacctaaaaacaacaaaaanaaataacctatacggtagttggntttagggggtggggggntgctatctgttagtgcttaanagggggtaaatgcttgccgctttagaggtgggtggtgctcataaaggccccgtcggggtntt

SEQ ID NO: 709318 - DNA, 342 bp, Homo sapiens
tgatctagacgatgcttatgcggtgcctttccaccattttcagcccttccaggctggaggaccggtggcaactcttggagcctcggctgaagtggctgggcatgacgccgtttctctgacgtcccccaatagatctgggtcatggagccaaccccagcgccaccccggagggtacaggtgccgcgctgtggaagcaggctcgcgtgtagaaccagttctcatcgtaagggagcaagctctttgtgcttggccatgcttgacgggtatccaccccattcggggcactttcagccttcccgggaccttttggacggaacggctgccacgacgctcttgaccgaa

SEQ ID NO: 709319 - DNA, 958 bp, Homo sapiens
tgtctcgtccatcatcatgtttttccgttactggcatcacaacctaatcaatcgggatgatatctttgggcgaagaatattcgtaagatcgtcgtcaacgaggaagtaggtgacaccgggcgttataacttcggtcagaaatgcgttttctgggcggcgattattttcctggttctgctgctggtgagcggcgtgattatctggcgtccttattttgcgcctgctttctcaatcccggtgatccgattcgcgttaatgctgcattcatttgccgcagtggcgttaattgtggttatcatggtgcatatctacgccgccctttgggtgaaaggcacgattaccgccatggtggaaggatgggttaccagcgcctgggcgaagaaacatcacccgcgctggtaccgtgaggtccgcaagacaacggaaaagaaagctgaatgagtattcgcataatcccgcaagatgagctgggttcaagcgagaaacgtacggcggatatgattccgccgttatttgttccctcggctcaagaatttatacaacggcggccgaggcgtctgcgcgagctggagaaaataatcctctgggtgattacctgggcttgggtgggcttatcggccagcccaggaagtggtgctgtacgaaccatcccggtggagatggttctgggcttgcgcgcatgtagagaaggcagggaaaggaaggcccggtggattttaacgtctgcggtgataagactgggaaagtgtgattggcgcgttgtgagtgaaacttgaatgagggcccgggtggagtgattggaatggggagggttgccccggggggggaattgcagcggggtggccagatattcgcggggaaaaaagcggattggggcggggctcgggggaggaattccgccacggtttggagaattcgggggtttggtggagagacggctcccttgttagttattgag

SEQ ID NO: 709320 - DNA, 111 bp, Homo sapiens
taagctatggagtaatgagcaggctgctaaaaatcagctaggaatgatcgtttaaaagttacggttggggggcggggcgcggtggtcacataatggggtatcgggtaccga

SEQ ID NO: 709321 - DNA, 987 bp, Homo sapiens
ggacggacaggccccggccaccggcatcgggcctccgccagatcaatgcagggggaaaccgggggccccgttcccacacctggcccggagcggaacagcaaatgcccaggcagacggaggcaggacgcgacagggagcgggcaattcgcgcggactaacggctccagggagcttcctcccagccgggagctggagggagaccaccctctgggcactgcagggcccgccagacacgcaaggctcgcctggaggaggtctgcccggcaccctcctactctccagctttagtctcataaatgccagtgataggattccttgtttgcgtggtccccaatagccttgatactcgcttgcattggcatgttaacttgggttcagcagacgcctctctctgcccccctgcaggcaggccctagtaggactgctggagtctgtgctttgacagttgtaagacattctccgaaccaaaggcacgcttgggtttgcatgcttttacagactcccctggggcgagggtcagagctggctctaggggagctgggctaggaagaggaggatgcagcccagactcttcctagcctttctaaaccgaagttctttgccattcctacaagcccagccttgctgctggtgatgtttcctgttcctttgggtatttgcactattttgggagcaagttttctatgtgggagccactttttttgcctagcaggggctaagttgggggttttcagggagcctgcttaggcgcctccgtctctcttctttcctcaatctatgctaatcggctctggccgccatcatctcactgggatgcacagagggctcgcctctccagcggcttgggtccggggaggggacactccagttctctagcatggcccgagatatggggtatgtgcatgtggaggccagggtaaggtgaatggggaggctgggaggactggtgttgccctttggagcttggtgaaattgctggcctaggct

SEQ ID NO: 709322 - DNA, 786 bp, Homo sapiens
ctcacagatgacagactagtaataagagctatcccatgcgacttatgtggggctcgacatctacatgctctcggatataatgttcttgccatgcatcaggttattacttgcaagtccagccactttcagagcgtcggtgaaaatggaaagagtgcgtctgaacatgctgtagaggaatcagttaatggaatcagtaatgcctcatgagtcatttatcttcatatcaagaatttaaaactgccaagattgtcctcccaacctctctcacaaacattcatgagagtagtctctagaggggtgaaacagaatggtgtagatagacagatcagtgtagaccttgagcaaggcctctgaaaaacatccccagactaaaaggatctgtgatggcatttgtgtgtgtgtggccaaaacagagaacacattacttttcactatacttacagatcttacaaaatatatgtctcattaaataaaaatattgccaagtcatgatagcaattcaagaaatttcctttaagatagagttgccaaaagaacatgcatgttgacaattgcacctactaggcttcctgctacaacaaaaaaatccagtataacactacattctttttctgggtatttcgtgtcgggtgggaacaatatgtagggacaactatttagacagctcaaaataggaagacactgtgaagatagcaatcacttcaatgctgacgtacttttcatatcaacgacactagaacacggaacagctaaaactttatacagggagaaatatacacctggata

SEQ ID NO: 709323 - DNA, 298 bp, Homo sapiens
ggatccgaatatgctgtctcaaaaaaaaaaaaatcagaatgggagagaaaacgttacttctgaccttaaagaaataaaaggtattataagggaaataataaaaaccattgtatgccaaaaaattagataacctacttgaaatggcccccttctactgattctgcctcaggaaataaaaaatgggaatagtcctaaaacaagaaattaaggcccggcacagttggtttatgccaacaaaaattagccgagcgtggtggcccaggcctgtatcccagctaatggggaggctgaaacagca

SEQ ID NO: 709324 - DNA, 977 bp, Homo sapiens
ggagacacgcggaggtggtgacggagctgaactgctgcgggagaggcgggcgccagcctgcaggtggtgtcgctgctgcccagtctctagactgcccagcttggggggtaccgcggacccgtcctgctgggccccaggggggcttctaaggagccagagggagcatggttgcaatgatcccgggcatccactgtgggccagtccccggccctctcctcaactggagccgagaaggctccagcagggcaaggactggaggctgccccagtcctgtgccccagtagaatgccagctcctgcccgtcatccttgaagcacgccaggatggcgtgatgggccatggatcccgtgctacgcctcagccctggtctccagcgtggcagcaaagcagcgagcatgccctccccacccagatggacctccgggcgaaatgcctgtcccggcctcatgctgtatgtgctgcctcggtgcacctggccttgcccattataacgactgggtcagacgctgataattttagacatagaaatacaggggggagcgtcgcaacaaagaaagttatcaccttaggatgtggcgcccgaaaattgttttatggctttgcaaccaagtttttattggattccataggtttgttgccacctaagttaagggagctcgtgttattatgaagagttgaggctcagtgtgacccgtcattttaaaacagatgcggtcggtggactgtgtgggaaaagtgtctgactttgggacagatctctggtatgaacagcggaacccgtttgactattcgtgggggggggcgcacaaaattattgtggaaaaattacccgtcacagaaagaaataggaggttcccagtggttacattttcaaattcaaggtgctataaggtgtgtgtacacacacgatgaataatgacatcgatgtgactaaaagttagccaaaggacatttgcaatatgaaaacttgtacacgc

SEQ ID NO: 709325 - DNA, 600 bp, Homo sapiens
  misc_feature (41)..(41): n is a, c, g, or t
  misc_feature (61)..(61): n is a, c, g, or t
  misc_feature (78)..(79): n is a, c, g, or t
  misc_feature (81)..(82): n is a, c, g, or t
  misc_feature (86)..(87): n is a, c, g, or t
  misc_feature (90)..(90): n is a, c, g, or t
  misc_feature (92)..(92): n is a, c, g, or t
  misc_feature (94)..(95): n is a, c, g, or t
  misc_feature (97)..(97): n is a, c, g, or t
  misc_feature (99)..(99): n is a, c, g, or t
  misc_feature (103)..(103): n is a, c, g, or t
  misc_feature (106)..(107): n is a, c, g, or t
  misc_feature (144)..(144): n is a, c, g, or t
  misc_feature (156)..(156): n is a, c, g, or t
  misc_feature (278)..(278): n is a, c, g, or t
  misc_feature (311)..(311): n is a, c, g, or t
  misc_feature (316)..(316): n is a, c, g, or t
  misc_feature (370)..(371): n is a, c, g, or t
  misc_feature (380)..(380): n is a, c, g, or t
  misc_feature (405)..(405): n is a, c, g, or t
  misc_feature (461)..(461): n is a, c, g, or t
  misc_feature (481)..(481): n is a, c, g, or t
  misc_feature (489)..(489): n is a, c, g, or t
  misc_feature (497)..(497): n is a, c, g, or t
  misc_feature (512)..(512): n is a, c, g, or t
  misc_feature (567)..(567): n is a, c, g, or t
ccgcccacccctcagccccaaatccaagatttcagagcccnaacacccacccaagcagcgncccgcacacaggcccgnngnnttcnnccncncnncnangggnccnnagggaaaggagccgtctttagggaggaaaagcgaacnacagcccaggcnggccgccagcagcccaggggcagcgcagccgccacgggaggcgagggaggagggcaaagggcaggggagagggagggcggcccgccaggagccttccccttccctaggagccaggcaggagnggggaggaaggcagagggggccgagggagcggncacanagaggaaaaggggcggggaggggggaggacaagaaggacaaagaaagagaaagnntggggaganggataacaagctcagctgtgtcagngatgtggaggggaggtatggtgggggaccagccatggccctatccaaccccaggcnccacaggccccaaattggcnttgcaaanccaaacantttaaggaagggggngagggagggaagagaaacacgggagagggctgtgctgtggattttcatctagggnggtgggaacaccagagatgtctcctctgccatt

SEQ ID NO: 709326 - DNA, 399 bp, Homo sapiens
gactatagaggatcgccaaacaccgcaatcttgtgtggctagccaatacaaggcttgtagtgggctaacgcagtggctcatgcctgtaatcccagcactttcggaggctaagtgcaagcggatcacctgaggtcaggagttcgagaccagcctgaccaacatggagaaaacccacgtctactaaaaatacaaaattagctgggtgtgggggcgcatgcctgtaatcccagctaatttatgtatttatagtaaagacggggtttctccatgatggtctcggaagtacctgacctcaggtgatcaaagaaccgcaaactcaagcacttgataagtccggagagcactttgtagctgtcttagaagtacagctctttgtagcctacagaaatggaagaagtg

SEQ ID NO: 709327 - DNA, 798 bp, Homo sapiens
ctgtagaatatctcatttatttttttcatatgactacatgctgaaataatatttggatatatgagttaaataaaatatataattaacattaattttatctgtttctttttcttttttaaaaaaagatatgactattagaaatttagaattacatatgtgtttgcattgtggctcatgtattatttctgtgggacagtcctgaattagagatgtgatcagatttaggttctatatttttggcaaaaacaattcataggtagttcttagattttctgtagcaatacattaggagatagagaatgtctagtgtctctcttgtgattttaagatgaaaagagattcaagtgtgtcagcctaatttctctattataaagtttcctttcagcctttattttttattttattttatttatttttacttttctttccccttagtctctgttaaggacatgccattcagccgtttttaacctaagaattttatcagccatttgaagaatctcatctatatctattattttattaagagttccagaatggtgatattctaattctaatattccttctgtatgtattagtggaaagaataattttcctcaactatctgattttcctgacatacagttggaggtggagcagatgattcttaatttattcacactttccgatgggtggggttcatgtccttaacatatatgggttggttatgggggtgacttttcactattataacgggaccctttttgcgggaacctttgccaggcgtaaaggcggttttggcacaacgttgaacgggta

SEQ ID NO: 709328 - DNA, 115 bp, Homo sapiens
cttggctaagccttttggaagttttccatcctccttccttccttatccttatgccttcgcattcccatcgatcaaactcttctaaaaatttacgaattatttgtggtcctccata

SEQ ID NO: 709329 - DNA, 193 bp, Homo sapiens
  misc_feature (94)..(94): n is a, c, g, or t
  misc_feature (181)..(181): n is a, c, g, or t
tgtgtgtggaagctatacaaggaaagctgaatccatatgtagacttcatgtttactagtactgctccaaatgtgcacaagccatgtgatatggnttgcctctgtgtccccacccaaatctcatgttgaaatgtaatccccaatgctggaggtgggacctggtgggaagattggatcatggnggagttttctca

SEQ ID NO: 709330 - DNA, 992 bp, Homo sapiens
  misc_feature (269)..(269): n is a, c, g, or t
agcggacgctctacatcctgtaacggaaacatggtcgcggcttgtgtggctgccgggcagcgcgtgccggagaatgaagccgcctaggcagcccccagcgtaccacaagcgggccgtcgcgtctactgtggggcggacactccaaccctcgacgctagaggtgacgcgccgatgctcgtacagaggaacgttcagacccggtgagggcaccaatcctcctaccataccgcgaatctagtggatgggacttggagtccatcgcatgcagngttctctcacgaaacttatcgtcggttaatgctggaatctatccagtgaataccgcaagtggaacgccgcgaagacattgctctgcgtgagcacctcactggaacttcttcgaatgattcactaatacgtgggcaaagagccaagatacgacatcactgtggtgtctcagaacggtgagtccattcgacttcgaccactagagttggcacggttgggctaatcaatagttcgttgatagacatatctggagatacacgtccatgtagactaatgaaatgccaactgtaagtagactatcaagtttatctgggcattataagggtagagcatccttgtacgatggtaacagtgggtttgtgatggataagataggtatcgcaaaggtgttgatgcgcattgtggtaccacttctcgatgatctacatcgataggtcagcttgaacatgaagctcattcagagaacaatgcatacggatactgactcctagaatgagtcgcaaagctatgtgttgtgaccaattttagaccgctcgttcgtaaacgaaagcgaagcaaggcttgaaacttgggatgacctatgggtcctagaaggaagttcccccaaatgtttctacattgcccgaaaattattgtgagagacgacagtggttcttggatgcagccggcctataggggagtcttcctttgggcgagcttcgggggtccggtctgtaggtgttgca

SEQ ID NO: 709331 - DNA, 600 bp, Homo sapiens
ggggaggcgcgtggggcttgaggccgagaacggccttgctgacatcatacatggagactttgtaccgtgtcccgttcttagtcgctcgaatgtcccaacctgtaagctcgaagaagccgtcctggttgcactatgccgtcggcaatgactgtggtagtgcttctggtaggtggtgtcttacttcctcatcaccaggaggaatagtttatggatggttattgtggaacctccaaagtgtcggttctatgactggatgaacatgggcatcagaggccagtagctttcttggcctacagagtatcatggacgtatatatgtctggaaggacttgcatccagcattcctattcaccagatgggaggtctaggtctcataattcctgaagcgatcgattgcaccaaatatcccatgaattcaatagattccttcttctggttcattgggattcgtctgtgttcctatggagttctgatcaatggctagagtattctatgagcaatgtaaatctgccgggctgatctgatgggttagagtgccttctgagaagaagtccaggggctacgtggattggctcctgtcaatgaagttccaaaggctgtc

SEQ ID NO: 709332 - DNA, 291 bp, Homo sapiens
actgtggtgtactgtgccatgtagttttagtgggttcagaatcagtagtgatctgcattatgccatagcctccgagttttagcagtaacggctgcagtactattgaacctgcactgggggcttctacattggcttttggaagtcaaagatggaggtcgtacagaggtatttttactatgaaggctataatgcatgctaatcatataaaacttgtttgatcaagagttggataaatgggtgggatcagtactggctacttcagcaagttagtgagcctgtggtgttttggct

SEQ ID NO: 709333 - DNA, 429 bp, Homo sapiens
  misc_feature (375)..(375): n is a, c, g, or t
gcaaggagatgtgcagtttctggagactgtgcattgaactaagtgttgctctgtcacagtgaaaagcaaaaccaggtggaactcagtcaatgccaccacagaaggagaatttagaccagccctagctagaagggaattccccatcctagtggttggaacttaagttcctgcaaatgctctggagacgatgaacatggggggcacgtgacctagtgagacaccaggtgggacagttaaaggagtgattgcaccacccttcattcaaccccagtctgggcagctcacataaacgaaagtgactccttccttctgcttgaggaaaaaagagggaagagtaaagaggactttgtcttgcatcctggatatcagctcagncacaacaggacagggcagagtcatgaggtctccgttcctgaccctagctccctg

SEQ ID NO: 709334 - DNA, 222 bp, Homo sapiens
agaatagtcttcaaatcattgaagtacttcttcgatcaccctctacgacgatgaagcaggtagaaaatcataggatgcagattgattatgtgttcatcactctgacgatgtaattcgtaggtcgtggctaacacttcccgttggccagcgtgaactcgccgggctggcaacctggaacaaaagtcctgatccagtagtcacacttctttttcctaaacagga

SEQ ID NO: 709335 - DNA, 152 bp, Homo sapiens
aagacgtctacctgcggaccagtaacctccaagaggcagatgtgattttccttgacacatgctctatcagggagaaggctgagcagaccatctggaaccgtttacatcagcttaaagccttgacaaattgaaggaggtgaaggagaaatctt

SEQ ID NO: 709336 - DNA, 403 bp, Homo sapiens
gccccgggatatgatgctgaggttctgatgcctgcacctttgcatccttttcccaaacagttcaattcatctcattacactgatctgagctggtttaacgtatctcttttctctaagaaaggctgttacaaagcgatagaggcaccttaatttagagtggtctatgttcaaaagccactacgtttccgtgtgtccacatttaagctcactgagctagagaaggcagctctccgtgtcagataaacataagaacgaggcattggggacagtctgggtgacttacatctaactgggccagaatcggggagaagattggagaactcgctgtcctctgcgggtgaggaggtcaaaggcggggtcttctttcatttctgtccctatgctgtaactccgtgttggggac

SEQ ID NO: 709337 - DNA, 258 bp, Homo sapiens
ccattgtctggtaccctctctatacaccaacccattacgtttacatcaatatgtttctttttatgtctacagaggtctggactcctgaaaaattatcccgtcaacaacacaaccaccgtgtaacctataaagattgtacatgtttcgatacataaaataaatgaaagtaaagaacgatacatatacatgaaaagaattttacggttcttgaaagagaacgatagtaacgaggaaaactttgttaagttaaaagtacag

SEQ ID NO: 709338 - DNA, 1234 bp, Homo sapiens
actatagcatggggatgttatatcagaagctgtaacaccaactggaaacacaccgggcaagggtctcccctgagggggcgacacatttcttgtacaaaagataataagcgggttacctcacctgtggggagaaagtggttgtgcccagagtgtgaccccccgggcgatgatggggtaaccgtttccccatggtgtcgcaaaagtgtgggggggcaacggcggggccctgaagttggtttacccgggcacgacgggggagttggtggtcccaccttcggggtgcgcccggggtggtgtggccaacccactcgcctccgcggatgtttccgcgagtagacatccccgtcacgcttttttgtaggaagatcccgggtggggcctctcttgaataggggctccttatgtggccccctcggggggagttaaaaccccggggcaaaccccgatcagcgccaaagggggtcccgcctcgtgggcaggataccaagtttggacaccacatgtcacagagctgttcccatatgggataccccaagttttcattacggcgatatgtgttgggaggcattttatagaataggggcccccggccaaatttcccctcaacggggctttggaaagagcgtgggccacacacaagaccccgtgcctcgaatatgaaggggattttctcgaaagttccctgggctcgcgagagtggaggggaaaagagctcttcacagcggtggtcccctcttcggtgggggaaaccctctgtttgcggggtttctttcacgaacacaggtggggaaaagggtaccaggagagtaatcacccaagtggcgcaaagcgcaccccttgggaggacccaacgtgtctcccggagttgaggccactctgagcccagtgtctctgcgccacttctcgaccttgtcaacagtgttgcggtcagaagaccagaggtcttgacattctaaggccacaggacatctactgagagttctcccatacacgtggacgagcccagttacccagcccagtggtccagtttccagagtccctcccccccacgatggcccccagtccgttgccagttgtggccccccttccccggtccctgtattttgttggcgtcttgatgaccccagttagtcctgccccgaagtccctgtagcacagcccccagacacccccccaagttcccccgtttgtgcaggccccaatatttccctgaaaaaaaagttttggccataga

SEQ ID NO: 709339 - DNA, 134 bp, Homo sapiens
gatcttggttctggagtcagcacctggccctggactgcagcaccatgaacagtggctggtgggcggcccttgtttgatgtcactgcagagccagaggaggctgtcgccggaaatccacctcccccacttcatct

SEQ ID NO: 709340 - DNA, 156 bp, Homo sapiens
  misc_feature (54)..(54): n is a, c, g, or t
ctctcggcttggactcgatcttccctggccccagcgttactgggactggattanttccctagttcggggtgaccttggcacctcaatggtttccgccgaacccatcggcccgcagattgcttctcgtcttgcggtgaccggctggttggttgggtt

SEQ ID NO: 709341 - DNA, 122 bp, Homo sapiens
cagtatgaaaagataaataggccaggcatggtggctcacgcctgtgatcccagcactttggcgaggccgaggtgggtggaccaccttgagatcatcgtgttcaatgaccacgcctgtaccaa

SEQ ID NO: 709342 - DNA, 112 bp, Homo sapiens
gctcggtaccctatgcattggtatcaaaacactggggcatgccagccacagtgctcattgcaaacatctaatgtgctggggactctctatgagtctgacctgcagtgcatgc

SEQ ID NO: 709343 - DNA, 608 bp, Homo sapiens
tggatcatgaggtcaggagttcgaggcgagcctggccaacatggtgaaaccctgtctctactaaaagtacaaaaaattagccagtcatggtggcacacgcctgtaatctcagctactcaggaggctgaggcaggagaattgcttgaacctgtgaggaagaggttgcagtgagctgagatcgtgccattacactccagcctgggcgaaagggtgagactccatctcaaaaaaaaaaaaaaaggattggctttggaggtctaagggggagggttgtccctccaggaattttcttttcaaaccggagatcatggtgcccacttacccggggcgggagagtgggttccaggtccctacaggagatagctttctttcccttactccctattctaacattttggctcgggggacggcctggccaattctctaagctgggtttaaaaggcacgggaatgtcctgtagagagagacctagatgaggtcatgcagtgtgaagaagactctgcggaaactgggaccgacctaggcagacaggaggagcccaaagacaggctgggtcagaccataaacactccaaagctgtcattcatggccctgcactgtggctatcg

SEQ ID NO: 709344 - DNA, 801 bp, Homo sapiens
ggtgtctgtgttcttcggctggtctctccatcgaggaaggaatggaggaagatgtctgaaggaagagactgtgcccagtgtcgtggctgggagatcccgggaccggatcctgtgtgctcgtgcggactgtaggagcttcaatccgtaaagaatgtgaagcagttgtagcgtggacgagtgatgcagcaatcactgcactggcaacgcgcagctggaacattgcctggcagggcagtgtgacatggcaaaatacttcacgcctggaacacccaacagcgtagtgaatgtcggtgacgagtgacatgctttcaagggcgagcgcaaccactgcgagtgcaatggaagcactcgcgggccgtgatgtggcagagtaaggtacagtgccatggagtgcccattggaagagatggtagtgtcggagccggatgtagaacgcagaagcgtcacgcctgctacgggcgctggcccgtcagtgtacctcagcgtctctcaatgcatgcgagagagcacgaggtgcagaagacaacccgactaaagtcgtcttctctgactcctctgtgtggaatgctgcttggcaggcttgtaacctgagggtgtcctaaatctatcgctcaagtcagctgcatgcgcttgctattggtcccctggcgccaaggctccgtcggtggagacagaacttcccggatcatcgccatccaccggggcatggcccaggaggagcgcctgtcaacgctatcagcagttcaaggatttccagcggcggatccgtggtggcaccaatctgtttgtgccgggggatgg

SEQ ID NO: 709345 - DNA, 877 bp, Homo sapiens
gggtggcctggggcacccagcgcaatgtgcttagaatttggtcaccactccgtcatcctgaagcttccctctactggtgtcttgttgacaagagtctctagccagatccaccagaactctctcgtccttcctttcccacacatgtgagcttcgtcatgcattctggcagtatgatatggaaccatttctgttgtaaccacccgaactagtttaattctccaggagataggacgtcgcgattatcgttgggtgtatatccacagagccggattgctttcagattgaatcttacgtacgatcttcccatagtggcatgagcattataggatgaatgacacaattgcgattcttaaaacgtggctaggtggcaaattctcatgtttgaactttctatgaagattgtaataggaactggtaatttctcatagagcactggaatcagcatttcaggttatattgatcagacaaagtgaaatctgatggagtatggatatattcgtggaatggatcttttatgactaaaagaataccttacgctaatatccatataccttcttctgtatcaatttgagaattccgatctgtgttgtcctaatctggacgttgggctccattgaacatagcaggtattcaattggcagaattgaggacttgccgggctactctgattggggttacgacgctgccgtttcgcaagcaagacaactccagtgggaataactcggggcttttgctcccctgtcgactgaacgttttaaccacggcttgtacccaatcctcttagtatgcacaatgttcttacagcagaccttgaccgagcaagggagttaacagaggacgcctatctagctggaacaccacacccaggggaaagcgg

SEQ ID NO: 709346 - DNA, 494 bp, Homo sapiens
  misc_feature (116)..(116): n is a, c, g, or t
  misc_feature (148)..(148): n is a, c, g, or t
aggaaatggggcgcccgcattccccccgggcccttttttttttccccccttgggccccccaggggcaaggggggggttttccttaacccgccgggaggggggtttttatttggggngggcccttgggtccccaatggggttcctttangaagaacccccccgaattttgtttttgccccttccccccaaatgggattcggcaggggtaaaatccccaaccttttttttggtggttttttccaaaaagaaaaaggtgggggggcccccccccccggggggggggttttttccccccaaaaaaaagaaattttggttttgggggcggggccagtttgttccgaaaggggggggctcccaatttttccccaaaatcaaaggttttcctcgggtccgggggcccccggggttggggtttgttttgggggaggggttttttcccccccaatgggggtttttaatttttttaggccccttttttaaaaggggggccccca

SEQ ID NO: 709347 - DNA, 161 bp, Homo sapiens
gcaccagttccgtgccgacaagaggaaaagggccgctgccatggcattagtgacctagcaactggagaacgctggaggtgcagacaatgggcaggagaacgtggtatcagcggaaggctgaggacaggacctgggactcaaaggccaggttcacagtgtgg

SEQ ID NO: 709348 - DNA, 1430 bp, Homo sapiens
cccgctccaagcgccgaatctagggcaccgcgcacaccagcatggcacgctcgccgcgtgccgcagaaagcatctccagcagtaacagcaagcaacttcaacagcaacattccagcatcatgtgcacagtagcatttcccatggcacacaccgtcggtcatccctctgcatgaccacgttgtgcacagcattggccttctagcatacatattattgcacacacaccaccgcaggctagccagtaccagttccgtggcaagcgctagtcaggcaccccgccagccacgtcgccaggccacctcttgcggcaccctctaccagggctgtgctgcatcgcacagttctcccagcagccggcagctcaacccagggcgcagcccaaccagaaccagacaacacagccagcagtacccgcacagcccctcacagcagcacatatctacgtggcacctgcatatcccacacctcccgcatatccagcacagcatgcacacagtcggcacatcgcacatctctcgtcttgggccacgcacactatgtgggctttctacacacatcccatcacacaggccacaccacaccagacaagccccaatgcgtatggcccagaaaaaataccatggtcctcgcacattctcagcacacacgctataccccttggcctacaggtatacccgctgcgcacaagcaacatcccccacgtcaccccaaggggccttcctgaacgtcacacgacagtgcaacgcgaaggaaccctcgcagcgaacagcggccgtgtcaccatcacccccgggaatcggcacggcgtacccaagcggcacgcacacacgcccctacgcacaccggcgccagctcagcctccggtacgctcactataccccacggtcccaacggggctcccaccgggaactacaccctccgcgacgtatccccattcggcaacaggccttccgtaacccccactcagagcaacgcgcacgcgacagcgaacggaggaacagcacgcggcactacagggataccccatcgctacgcccgacgacagggaacgaccggccgcggaaaggaccagcgcaggcaaatcgccaccacacaccgccacccggcaacgcactggcaccctggccaccgccacacgcaccgcaccacactcacaagaaacagcaactccccgacggaaccacttcaccgcgacgaaatatacaaatacgggcaccacgcgacgcacagcccaacaatcaccgcacgcggcagggcgagcgcacccaacgcgacctgaagcacacaaacgacggaaaaaagaacacacaaacaggatccgtccagcaaacacaaccagcacacccactaccccccgacaaaatatatggacaaccagaacacaccggcacaaaccaccacacccgcgcggaggcacgaaggcaagaact

SEQ ID NO: 709349 - DNA, 291 bp, Homo sapiens
ccgagtagctgggattacagatgtctaccacacgccggctaatttttctatttttagtagagacaggtttcgccatgtggccagactggtcttgaactcctgacctcaggtgatccacccgcctcggcttcctaaagtgctgggattacaggcatgagccactgtgcctggccaaagggaaggtttgcactagtgtagtatggggtattctaaccaaaatggtagagtggccaaatagggaatttcatatccaaatgtgacatgactgcacatgggtggtcttgcactctg

SEQ ID NO: 709350 - DNA, 1006 bp, Homo sapiens
acgaggattcaggggttaactggaatcacagaaatgatattctgcaagaatttcttttaaataaaaagtttgggggtgcaatataagaagtttatataatatgcagtacattatccaaaagagacaggtagttaatgcagtagaaagtagtggtaataattcctttttaaaaaaatttcggtagtcatatagtaacattttgctatatgaaaactttggtatattctgtggttacaactaagattgtgtctggcagctcttttttggggatgtgtgtgtgtgatatcctaacagaggtattaaaggctagcctaccagttgtctgaacaagatagaatcagtaatgtaatggcactgggcactttaacacgtcttagcatttccagtcgtccatgtggcattaaacgatacaaaagaccctggcaatttatttcacatacttgaatccctaaatgcacctgtctttcactttttgagacagactgaatatatctaaacatttccagcaataacaaaaaaagcatttaactttgcaccaagcaagaaactatacatacagttaactgcattcagatactcacgttaaacatggttactatgcagcacagaacttcatcgctatagtatactggggtcacccttttgaatccatatcaaccactgattcacatacactgcactcacagaccctctgcaaggccattcccgctcgcgctcgaacggctctacacctcacctaccacctggccaaccgtgacacgccaacatccaccccgcactcgacgcaaggcagtggaacaccacacgcggcaccacctcataatttccaccaacactcaaacacgacaaaacaccccccccccctacacctccacacccgtcagctacaaacaacgtactgaaacgaggaagcaaaagaccaccaccacgacatgacaaacccacgcacccaaggctacagacacaagcactcccacgcacaccacaaaccacacacgcccactcc

SEQ ID NO: 709351 - DNA, 311 bp, Homo sapiens
gatagtatacgtctttctgtagtttcagcatcagcatcctgaaatcactttatgtgaagttagggagcttggaatactgtaagtgattccatgagtaaatgtgatgagcttgtcactaaaattattagtggtaattccatgtcattgattatgggtcattaggtttaaggttgattaaattcagttctgagcctactccagatgctggctcaagtcaaattcttcccctgtttgaaagttgatctaacccacctgattaagcaagatggtatatacccttttaattatattctattaagcattctttagct

SEQ ID NO: 709352 - DNA, 286 bp, Homo sapiens
gcggagtacccaccactcctatagatcagtttcactttatttctttattattgagacggagtttcgctcttattgcccaggctggagcgcaatggcatgatctcagctcaccgcaacctctgccttccgggttcaagtaattctcccgactcagcctcccgagtagctgggattacaggtgtgcaaccaccccctggctaattttttttttttttatcgtagcacatggagtctcacacctgcatccactgatctcataggcagtggttgggggcatccgtctacc

SEQ ID NO: 709353 - DNA, 170 bp, Homo sapiens
ttcggcgtttgtgatggagctgtcgcatcattcctgcccccactgtgagatgagcattagcagaaggagctcgatttgctggaaccacaggtggtggaggccctggctgggggctgggtgcttagtaggcggcatgtgttcttggcgctggagtctgaaggcagtctgga

SEQ ID NO: 709354 - DNA, 1102 bp, Homo sapiens
cgcagcgaaaatggcggcttccaggtgggcgcgcaaggaccagtggtcctgctttgtgcctctgacctgctgctagctgctgctactgctaccaccagcctgggtccatgcgcaggccagaaggactcgcccggcgacgcccgcacgagtcataccaccacactccaccggaagcaagaacgaaggatattcagcgcacttacaagtgatgcacgacatggccgacagtccttcactggcacgcaaagtagggcacgacaagaatgactgacccacttgacaccacacggacgaatcgtctcacagcgacgcacacaagcacgacccatctcaggacaccacatgcatcgaagccttgtcaatcgacaacagcacctagcagcccccacaagaccacaggccccgctgccacaacgcccctacgttgcgcagaacaacctgcacctgcagacgaacacacgagcgcacacgccccatccatccgcctggcaacatggtctacacgatccgaaccacatggcgtcagttccacccgcggcacactgcctccccgatacagcagatgcaccgcaaccaggcggccagcagcaaagcaaggcggacacaaccaccgcaccccgcgaacggacccagtccactgggccaccacggcggggacgacagtccccgatcagcgccctccctcgacacgattgccagccccacaaacagctaagtttggcaataccagggttcatcccacatcgcacacggacgccctcgtccacaactctgtgggccctggaccagcgaaacacttccacacgtccactcccctggcgctaggccccgtatagcgtccgcagcctccaaggctgcgcgcctcacctgtccaggctcgatgaacagcatgtgcacgcgaaacgcacgattagacaccgagacccgtccccaggggagacaccctagcaactccccggactatgggcaacacgacctctcatgctgagcacaccggcgggactaccgagcggatctccccccacaatggcaaccctccccgtcgatccatcggtctaggcccccaaggaacacattcgactttccacgctcctcctccttg

SEQ ID NO: 709355 - DNA, 156 bp, Homo sapiens
  misc_feature (11)..(11): n is a, c, g, or t
  misc_feature (54)..(54): n is a, c, g, or t
  misc_feature (63)..(63): n is a, c, g, or t
  misc_feature (105)..(105): n is a, c, g, or t
gggaaacagancccaaaaaagagaatacaggtggggaggagggtgtggcaaatntgtcaaaantaggaagcaatagaaaaggagctcagtgggtagaaggctaanagatacaggtggcaagcagtctgtttcagactactttagcacacattaggc

SEQ ID NO: 709356 - DNA, 115 bp, Homo sapiens
acagagcatgccgatgtagcggtgcgctcgacaccttgtaatccccgcaactttgggatgccaacgacggcgtcagattatctgacgctcgggatattcgaggacctagcctgca

SEQ ID NO: 709357 - DNA, 226 bp, Homo sapiens
gaccggttgacgtggcttccaaggggctagccaatccctcaatgggaccagtccagaagtggaatattatgatggcttcccctaccaagttgtgccacatgtctctgatttcaaagccaatctgtctcctcatatctccgtacttagtttaaggatatttgggctactacttgcgctacttgaaaaattctccagttgcagggactcttgagtaaggaaagcaaca

SEQ ID NO: 709358 - DNA, 595 bp, Homo sapiens
  misc_feature (30)..(30): n is a, c, g, or t
  misc_feature (98)..(98): n is a, c, g, or t
  misc_feature (145)..(145): n is a, c, g, or t
  misc_feature (178)..(178): n is a, c, g, or t
  misc_feature (201)..(201): n is a, c, g, or t
  misc_feature (207)..(207): n is a, c, g, or t
  misc_feature (229)..(229): n is a, c, g, or t
  misc_feature (267)..(267): n is a, c, g, or t
  misc_feature (298)..(298): n is a, c, g, or t
  misc_feature (303)..(303): n is a, c, g, or t
  misc_feature (312)..(312): n is a, c, g, or t
  misc_feature (315)..(315): n is a, c, g, or t
  misc_feature (328)..(328): n is a, c, g, or t
  misc_feature (339)..(339): n is a, c, g, or t
  misc_feature (341)..(341): n is a, c, g, or t
  misc_feature (352)..(352): n is a, c, g, or t
  misc_feature (360)..(360): n is a, c, g, or t
  misc_feature (379)..(379): n is a, c, g, or t
  misc_feature (387)..(387): n is a, c, g, or t
  misc_feature (391)..(392): n is a, c, g, or t
  misc_feature (405)..(405): n is a, c, g, or t
  misc_feature (407)..(408): n is a, c, g, or t
  misc_feature (420)..(422): n is a, c, g, or t
  misc_feature (432)..(433): n is a, c, g, or t
  misc_feature (466)..(466): n is a, c, g, or t
  misc_feature (522)..(522): n is a, c, g, or t
  misc_feature (525)..(525): n is a, c, g, or t
  misc_feature (534)..(535): n is a, c, g, or t
  misc_feature (590)..(590): n is a, c, g, or t
tttcctgcatcccagtccaaaacattgtanaagtttccttttttctccttggggttgacctaatacttttttgtttttttcagaatctgtttcccccngcgctggtcaatgtactagtagctttccccagggtttttttttactnttcctagggggttttatcatgaataaaaaagcncccaactcttttcagccattgcngattcncatttttcttaatattcctgtncaagatgctctggggaactgttaagaactacaaaatcnccttgggcggggttttgaatgggttattttntttcncgttggccnagntctcccttttgtnggccttgccangnccctgcccttntctggggntggaaaaaatgtggtcttngtggcccncttnntgggtggcggggngnntttccctttccnnnaatgtcccgnntatcatagtggttagtttttcgttaagcggtgngtgttggaactccccttttgggggggaatagcgacagggggcgcactaggtgctanatntaccaaagnnaaacaagtttacaaattttccacctgtctgttttctctccctctcaaatggtttnacccc

SEQ ID NO: 709359 - DNA, 5144 bp, Homo sapiens
ttttttttcagagttcccgggtcccttccgcctgggttcacgttcacgtttattcaaacaacagagccgactcgggcgaggtctgggagcggcgggcgggcggtgtcgcctcctgggctctgctgacccctggtggtggggtcggcccaggctgggacctagcccggcccccctcggccgctgctgaccgccatcccccacaccgccttctggagcccgcagagggaggcaggggcgtccccggggacagctcaggcggccacagttgggggcggggagcatcagcctgtgcggagctgggagcctgggaagcaggaggccagagggtggccccttcggttaagtgtctggggagcggcccgggagcccagaggggtcgtcgggggaagcgcggggcacgtgctcgcaggtgatgaggtgggtgggcagcgcctgggtgtcgtggaagatgacgaagatgctgggctggcagatgcagtccacggcgctgtcgtagcgcaggagcacgtggccaggaccccgcagagggggcgcccgcagaccgcggcggccctgcccgtagtcgccagtcagcacccgtgccacgaacaccgccttatggccatcggcgttggggggcgagtagcggtcctgcaccgacagggaggcgcgcctggcgaaatacacgcccttcccgtagaccgtggcgttgcggccgcagaagctgcggttgaagccgtgggcgcagatgtcaggcactgccggtgccgtcgtgccgtggtacagcacctgctccaccgggcgccgctcgcatcgctgcagcaggcgctcccggtacagctcatactgctgctgcagcagcgggtgcgacacgcgctccacacgaacgacgcggatgctgctgcgggcagcgtccagggtgtcgtagaaggcccgcaccacctcctggaactccccggtgttctctgccagacgctccaggttgttccagggccccttcagcgtctgccccgccaaggtagggcctgaagctgccaagggaaaggccaaactctgatcccaggggccagccagaagtgccaccaagtggcgggcagcacgggcagggtgggccccgaagccacggaggatggtgcagtcaccacgcagggcaacactcacaccatggcaccgctccaggcgagcacgcagctctgcaggcagtgtgcggcgccagggccccaccgtctcctcctggacgtggacctccaaggcagccctgagcgcccggtccagctcctccacatcctgctcaaaggccgagtgcaccaccagctgggccttgccatcagtccccccatctgggggctcttctgcctccaacgggggctgctccagcagggagagggttagggcttgccgcagggcagcagcctcctcctgctcagccacctgaccttgaggctccagtgaccggtggagggccagctgcagagcggcctcctcctccagccacctgggtgccacagtgctgggggccacaggctcctcctcctcatgccctggggtcgcctcctcctctggctgctcctgaggcccttcctcctccagctcccgaggcagccagtcctccccgtctaggtctaggccctccagggtggccagcagttctcggacctcctccaggctcacgtcctcctggtcaccacctgtactgtctggggtccacagggtgtgggcgttgccagggagcactgggagggcctcggtagggtccacctcttcaaggcctgtgtccaacgtggctgtggccaggcgctctgtcccaaagacacactggaactgagcctccagcccctggagaaggtgctgcccttctgggcccaggagaaacctggcgctgcccgggtgctccaggcacaacacatggcagctaatgctgcccagcaggctccgcagaaactcctcagccgcctggcaggaagcctgggctccacagagccgaaagccagtcatatccggtccttcaagtggcaagagagcgacgtctcccaggcccgcaagaaggtcctcatggtagagctgcaggaagcgcatcgcccctggctccatcaatagcaccatctccaccaggccctcctgccctgccagcttcacacatcctgggctcacaggccctgccttctccagagaccccatggtgatctccatgggacccaccagcccctcttgctctggtgagtccatggcaatttccaccaggccctcctgccccggcaaccccttagaggtctccactgggcctgcagaccccacaggccccaggctcatgggcccctcctgttcctgcaaccccacaggcctcaggcttaccagcccctcatgttccagagaccccatgggcatcgagctgacttgctctgcctgtcccagagaccccatgggacctgtcctcagagaggtccctgactgccctggttcctggccagagcctgttgtcataatccctctaccctgcaccatgggacctgtcctcagagaggcccctgactgccctggttcctcgccagagcccattgtcacagtccctgcaccctgcagagccgtcaccaaccctccggtcctcaggagagcatgcttggtagccctaggcccctgggtggacgggtggtcccctccactggtgttctcagccagctcctcgggctccaggatgtcgtagtgggggacaaggctcagctctgagccctgcaaccggtgctcctgctgcaacactcgttctgccacttgccactgctggaaggaggcaacagtgcccaggggcccgggtaggcgttgcaggtcctccaggggccccccaccactgcggcgctcattctccaggtacaactccagcaacagcaggtccacagaggcaccatcccccaccacacgcaccgctcgggcctggggaacccgggccagggacaccaaggtcccctccaggcccagattctgggcctgctcctccaggacacggacatctgcctcagaaaggggcttgggcaactggaccagagcccggtctggccgggggctggccaaggcacagcaaggctgtactgggagccccgaggcccgcagcaaggcctggacatgctgctccaagcgctggggcgtggtgccagggggcagtccttggagcagcaggcgtgcaggggctcgtggtggagctggccgcaggctcagctgggcaccatgtagttcgtgatctgcctgggccaagaccctctcggcgtctgcaggctctctgaaggtgaggacgcccccacagcccagtctctgccagctcaacacaggtccccctccagagcgtcggcggttttcaaagtagagagtgagcagctcgtcgggcacggcagggggcagtccacggacctccactgccacccctgcctctgcctccgccattgcaaccattccccgtggccgctaggcagcctcaggccatgagctcagccaggactcctgtgcctgcccctcagcaagcctaaccccggcctgcggcgcccggccaccggtgagtccccggcccgagcccaggagcgcctctgacccgctgcgccgcgcggcctgccgcccccgcccccgcccccacgcggatcttgcgcatccgagcgtggccgcctcgggggcggaccgcggaacccgaggccatgtcccatgaaaagagttttttggtgtctggggacaactatcctccccccaaccctggatatccgggggggccccagccacccatgcccccctatgctcagcctccctaccctggggccccttacccacagccccctttccagccctccccctacggtcagccagggtacccccatggccccagcccctacccccaagggggctacccacagggtccctacccccaagggggctacccacagggcccctacccacaagagggctacccacagggcccctacccccaagggggctacccccaggggccatatccccagagccccttcccccccaacccctatggacagccacaggtcttcccaggacaagaccctgactcaccccagcatggaaactaccaggaggagggtcccccatcctactatgacaaccaggacttccctgccaccaactgggatgacaagagcatccgacaggccttcatccgcaaggtcggtcctgaccgccagcctgtcgtacatggtggggatgatcgccagcttctacaacaccgaggcagtcatcatggccgtgggcatcaccacagccgtctgcttcaccgtcgtcatcttctccatgcagacccgctacgacttcacctcatgcatgggcgtgctcctggtgagcatggtggtgctcttcatcttcgccattctctgcatcttcatccggaaccgcatcctggagatcgtgtacgcctcactgggcgctctgctcttcacctgcttcctcgcagtggacacccagctgctgctggggaacaagcagctgtccctgagcccagaagagtatgtgtttgctgcgctgaacctgtacacagacatcatcaacatcttcctgtacatcctcaccatcattggccgcgccaaggagtagccgagctccagctcgctgtgcccgctcaggtggcacggctggcctggaccctgcccctggcacggcagtgccagctgtacttcccctctctcttgtccccaggcacagcctagggaaaaggatgcctctctccaaccctcctgtatgtacactgcagatacttccatttggacccgctgtggccacagcatggcccctttagtcctcccgcccccgccaaggggcaccaaggccacgtttccgtgccacctcctgtctactcattgttgcatgagccctgtctgccagcccaccccagggactgggggcagcaccaggtcccggggagagggattgagccaagaggtgagggtgcacgtcttccctcctgtcccagctccccagcctggcgtagagcacccctcccctcccccccacccccctggagtgctgccctctggggacatgcggagtgggggtcttatccctgtgctgagccctgagggcagagaggatggcatgtttcaggggagggggaagccttcctctcaatttgttgtcagtgaaattccaataaatgggatttgctctctgca

SEQ ID NO: 709360 - DNA, 5199 bp, Homo sapiens
ttttttttcagagttcccgggtcccttccgcctgggttcacgttcacgtttattcaaacaacagagccgactcgggcgaggtctgggagcggcgggcgggcggtgtcgcctcctgggctctgctgacccctggtggtggggtcggcccaggctgggacctagcccggcccccctcggccgctgctgaccgccatcccccacaccgccttctggagcccgcagagggaggcaggggcgtccccggggacagctcaggcggccacagttgggggcggggagcatcagcctgtgcggagctgggagcctgggaagcaggaggccagagggtggccccttcggttaagtgtctggggagcggcccgggagcccagaggggtcgtcgggggaagcgcggggcacgtgctcgcaggtgatgaggtgggtgggcagcgcctgggtgtcgtggaagatgacgaagatgctgggctggcagatgcagtccacggcgctgtcgtagcgcaggagcacgtggccaggaccccgcagagggggcgcccgcagaccgcggcggccctgcccgtagtcgccagtcagcacccgtgccacgaacaccgccttatggccatcggcgttggggggcgagtagcggtcctgcaccgacagggaggcgcgcctggcgaaatacacgcccttcccgtagaccgtggcgttgcggccgcagaagctgcggttgaagccgtgggcgcagatgtcaggcactgccggtgccgtcgtgccgtggtacagcacctgctccaccgggcgccgctcgcatcgctgcagcaggcgctcccggtacagctcatactgctgctgcagcagcgggtgcgacacgcgctccacacgaacgacgcggatgctgctgcgggcagcgtccagggtgtcgtagaaggcccgcaccacctcctggaactccccggtgttctctgccagacgctccaggttgttccagggccccttcagcgtctgccccgccaaccatggcaccgctccaggcgagcacgcagctctgcaggcagtgtgcggcgccagggccccaccgtctcctcctggacgtggacctccaaggcagccctgagcgcccggtccagctcctccacatcctgctcaaaggccgagtgcaccaccagctgggccttgccatcagtccccccatctgggggctcttctgcctccaacgggggctgctccagcagggagagggttagggcttgccgcagggcagcagcctcctcctgctcagccacctgaccttgaggctccagtgaccggtggagggccagctgcagagcggcctcctcctccagccacctgggtgccacagtgctgggggccacaggctcctcctcctcatgccctggggtcgcctcctcctctggctgctcctgaggcccttcctcctccagctcccgaggcagccagtcctccccgtctaggtctaggccctccagggtggccagcagttctcggacctcctccaggctcacgtcctcctggtcaccacctgtactgtctggggtccacagggtgtgggcgttgccagggagcactgggagggcctcggtagggtccacctcttcaaggcctgtgtccaacgtggctgtggccaggcgctctgtcccaaagacacactggaactgagcctccagcccctggagaaggtgctgcccttctgggcccaggagaaacctggcgctgcccgggtgctccaggcacaacacatggcagctaatgctgcccagcaggctccgcagaaactcctcagccgcctggcaggaagcctgggctccacagagccgaaagccagtcatatccggtccttcaagtggcaagagagcgacgtctcccaggcccgcaagaaggtcctcatggtagagctgcaggaagcgcatcgcccctggctccatcaatagcaccatctccaccaggccctcctgccctgccagcttcacacatcctgggctcacaggccctgccttctccagagaccccatggtgatctccatgggacccaccagcccctcttgctctggtgagtccatggcaatttccaccaggccctcctgccccggcaaccccttagaggtctccactgggcctgcagaccccacaggccccaggctcatgggcccctcctgttcctgcaaccccacaggcctcaggcttaccagcccctcatgttccagagaccccatgggcatcgagctgacttgctctgcctgtcccagagaccccatgggacctgtcctcagagaggtccctgactgccctggttcctggccagagcctgttgtcataatccctctaccctgcaccatgggacctgtcctcagagaggcccctgactgccctggttcctcgccagagcccattgtcacagtccctgcaccctgcagagccgtcaccaaccctccggtcctcaggagagcatgcttggtagccctaggcccctgggtggacgggtggtcccctccactggtgttctcagccagctcctcgggctccaggatgtcgtagtgggggacaaggctcagctctgagccctgcaaccggtgctcctgctgcaacactcgttctgccacttgccactgctggaaggaggcaacagtgcccaggggcccgggtaggcgttgcaggtcctccaggggccccccaccactgcggcgctcattctccaggtacaactccagcaacagcaggtccacagaggcaccatcccccaccacacgcaccgctcgggcctggggaacccgggccagggacaccaaggtcccctccaggcccagattctgggcctgctcctccaggacacggacatctgcctcagaaaggggcttgggcaactggaccagagcccggtctggccgggggctggccaaggcacagcaaggctgtactgggagccccgaggcccgcagcaaggcctggacatgctgctccaagcgctggggcgtggtgccagggggcagtccttggagcagcaggcgtgcaggggctcgtggtggagctggccgcaggctcagctgggcaccatgtagttcgtgatctgcctgggccaagaccctctcggcgtctgcaggctctctgaaggtgaggacgcccccacagcccagtctctgccagctcaacacaggtccccctccagagcgtcggcggttttcaaagtagagagtgagcagctcgtcgggcacggcagggggcagtccacggacctccactgccacccctgcctctgcctccgccattgcaaccattccccgtggccgctaggcagcctcaggccatgagctcagccaggactcctgtgcctgcccctcagcaagcctaaccccggcctgcggcgcccggccaccggtgagtccccggcccgagcccaggagcgcctctgacccgctgcgccgcgcggcctgccgcccccgcccccgcccccacgcggatcttgcgcatccgagcgtggccgcctcgggggcggaccgcggaacccgaggccatgtcccatgaaaagagttttttggtgtctggggacaactatcctccccccaaccctggatatccgggggggccccagccacccatgcccccctatgctcagcctccctaccctggggccccttacccacagccccctttccagccctccccctacggtcagccagggtacccccatggccccagcccctacccccaagggggctacccacagggtccctacccccaagggggctacccacagggcccctacccacaagagggctacccacagggcccctacccccaagggggctacccccaggggccatatccccagagccccttcccccccaacccctatggacagccacaggtcttcccaggacaagaccctgactcaccccagcatggaaactaccaggaggagggtcccccatcctactatgacaaccaggacttccctgccaccaactgggatgacaagagcatccgacaggccttcatccgcaaggtgttcctagtgctgaccttgcagctgtcggtgaccctgtccacggtgtctgtgttcacttttgttgcggaggtgaagggctttgtccgggagaatgtctggacctactatgtctcctatgctgtcttcttcatctctctcatcgtcctcagctgttgtggggacttccggcgaaagcacccctggaaccttgttgcactgtcggtcctgaccgccagcctgtcgtacatggtggggatgatcgccagcttctacaacaccgaggcagtcatcatggccgtgggcatcaccacagccgtctgcttcaccgtcgtcatcttctccatgcagacccgctacgacttcacctcatgcatgggcgtgctcctggtgagcatggtggtgctcttcatcttcgccattctctgcatcttcatccggaaccgcatcctggagatcgtgtacgcctcactgggcgctctgctcttcacctgcttcctcgcagtggacacccagctgctgctggggaacaagcagctgtccctgagcccagaagagtatgtgtttgctgcgctgaacctgtacacagacatcatcaacatcttcctgtacatcctcaccatcattggccgcgccaaggagtagccgagctccagctcgctgtgcccgctcaggtggcacggctggcctggaccctgcccctggcacggcagtgccagctgtacttcccctctctcttgtccccaggcacagcctagggaaaaggatgcctctctccaaccctcctgtatgtacactgcagatacttccatttggacccgctgtggccacagcatggcccctttagtcctcccgcccccgccaaggggcaccaaggccacgtttccgtgccacctcctgtctactcattgttgcatgagccctgtctgccagcccaccccagggactgggggcagcaccaggtcccggggagagggattgagccaagaggtgagggtgcacgtcttccctcctgtcccagctccccagcctggcgtagagcacccctcccctcccccccacccccctggagtgctgccctctggggacatgcggagtgggggtcttatccctgtgctgagccctgagggcagagaggatggcatgtttcaggggagggggaagccttcctctcaatttgttgtcagtgaaattccaataaatgggatttgctctctgca

SEQ ID NO: 709361 - DNA, 197 bp, Homo sapiens
  misc_feature (8)..(8): n is a, c, g, or t
  misc_feature (97)..(97): n is a, c, g, or t
  misc_feature (114)..(114): n is a, c, g, or t
  misc_feature (136)..(136): n is a, c, g, or t
  misc_feature (148)..(148): n is a, c, g, or t
  misc_feature (166)..(166): n is a, c, g, or t
ttcggcanaggttcaagctgagaaaaaaagaacatggttctatttacaatagctacaaacaaaaaaatatgtacctagtaatacattaaatcaaggnggtaaaatatctctacnatgcttgctacaaaactgctgncagaaaactagnagacaacgcaaataagtnaaaagggcactcccatggctcatgaatttta

SEQ ID NO: 709362 - DNA, 159 bp, Homo sapiens
ttaaaggggaccagatctttaaacatgcatagccgtacagttccgagaatggtgctcctcgctcttcttccaatgccgtggactagataggtgcccacgttcactaaaaaatctacatcaatgtccccggagccaggagaacgcgtctaaaatcggggc

SEQ ID NO: 709363 - DNA, 5427 bp, Homo sapiens
ttttttttcagagttcccgggtcccttccgcctgggttcacgttcacgtttattcaaacaacagagccgactcgggcgaggtctgggagcggcgggcgggcggtgtcgcctcctgggctctgctgacccctggtggtggggtcggcccaggctgggacctagcccggcccccctcggccgctgctgaccgccatcccccacaccgccttctggagcccgcagagggaggcaggggcgtccccggggacagctcaggcggccacagttgggggcggggagcatcagcctgtgcggagctgggagcctgggaagcaggaggccagagggtggccccttcggttaagtgtctggggagcggcccgggagcccagaggggtcgtcgggggaagcgcggggcacgtgctcgcaggtgatgaggtgggtgggcagcgcctgggtgtcgtggaagatgacgaagatgctgggctggcagatgcagtccacggcgctgtcgtagcgcaggagcacgtggccaggaccccgcagagggggcgcccgcagaccgcggcggccctgcccgtagtcgccagtcagcacccgtgccacgaacaccgccttatggccatcggcgttggggggcgagtagcggtcctgcaccgacagggaggcgcgcctggcgaaatacacgcccttcccgtagaccgtggcgttgcggccgcagaagctgcggttgaagccgtgggcgcagatgtcaggcactgccggtgccgtcgtgccgtggtacagcacctgctccaccgggcgccgctcgcatcgctgcagcaggcgctcccggtacagctcatactgctgctgcagcagcgggtgcgacacgcgctccacacgaacgacgcggatgctgctgcgggcagcgtccagggtgtcgtagaaggcccgcaccacctcctggaactccccggtgttctctgccagacgctccaggttgttccagggccccttcagcgtctgccccgccaaggtagggcctgaagctgccaagggaaaggccaaactctgatcccaggggccagccagaagtgccaccaagtggcgggcagcacgggcagggtgggccccgaagccacggaggatggtgcagtcaccacgcagggcaacactcacaccatggcaccgctccaggcgagcacgcagctctgcaggcagtgtgcggcgccagggccccaccgtctcctcctggacgtggacctccaaggcagccctgagcgcccggtccagctcctccacatcctgctcaaaggccgagtgcaccaccagctgggccttgccatcagtccccccatctgggggctcttctgcctccaacgggggctgctccagcagggagagggttagggcttgccgcagggcagcagcctcctcctgctcagccacctgaccttgaggctccagtgaccggtggagggccagctgcagagcggcctcctcctccagccacctgggtgccacagtgctgggggccacaggctcctcctcctcatgccctggggtcgcctcctcctctggctgctcctgaggcccttcctcctccagctcccgaggcagccagtcctccccgtctaggtctaggccctccagggtggccagcagttctcggacctcctccaggctcacgtcctcctggtcaccacctgtactgtctggggtccacagggtgtgggcgttgccagggagcactgggagggcctcggtagggtccacctcttcaaggcctgtgtccaacgtggctgtggccaggcgctctgtcccaaagacacactggaactgagcctccagcccctggagaaggtgctgcccttctgggcccaggagaaacctggcgctgcccgggtgctccaggcacaacacatggcagctaatgctgcccagcaggctccgcagaaactcctcagccgcctggcaggaagcctgggctccacagagccgaaagccagtcatatccggtccttcaagtggcaagagagcgacgtctcccaggcccgcaagaaggtcctcatggtagagctgcaggaagcgcatcgcccctggctccatcaatagcaccatctccaccaggccctcctgccctgccagcttcacacatcctgggctcacaggccctgccttctccagagaccccatggtgatctccatgggacccaccagcccctcttgctctggtgagtccatggcaatttccaccaggccctcctgccccggcaaccccttagaggtctccactgggcctgcagaccccacaggccccaggctcatgggcccctcctgttcctgcaaccccacaggcctcaggcttaccagcccctcatgttccagagaccccatgggcatcgagctgacttgctctgcctgtcccagagaccccatgggacctgtcctcagagaggtccctgactgccctggttcctggccagagcctgttgtcataatccctctaccctgcaccatgggacctgtcctcagagaggcccctgactgccctggttcctcgccagagcccattgtcacagtccctgcaccctgcagagccgtcaccaaccctccggtcctcaggagagcatgcttggtagccctaggcccctgggtggacgggtggtcccctccactggtgttctcagccagctcctcgggctccaggatgtcgtagtgggggacaaggctcagctctgagccctgcaaccggtgctcctgctgcaacactcgttctgccacttgccactgctggaaggaggcaacagtgcccaggggcccgggtaggcgttgcaggtcctccaggggccccccaccactgcggcgctcattctccaggtacaactccagcaacagcaggtccacagaggcaccatcccccaccacacgcaccgctcgggcctggggaacccgggccagggacaccaaggtcccctccaggcccagattctgggcctgctcctccaggacacggacatctgcctcagaaaggggcttgggcaactggaccagagcccggtctggccgggggctggccaaggcacagcaaggctgtactgggagccccgaggcccgcagcaaggcctggacatgctgctccaagcgctggggcgtggtgccagggggcagtccttggagcagcaggcgtgcaggggctcgtggtggagctggccgcaggctcagctgggcaccatgtagttcgtgatctgcctgggccaagaccctctcggcgtctgcaggctctctgaaggtgaggacgcccccacagcccagtctctgccagctcaacacaggtccccctccagagcgtcggcggttttcaaagtagagagtgagcagctcgtcgggcacggcagggggcagtccacggacctccactgccacccctgcctctgcctccgccattgcaaccattccccgtggccgctaggcagcctcaggccatgagctcagccaggactcctgtgcctgcccctcagcaagcctaaccccggcctgcggcgcccggccaccggtgagtccccggcccgagcccaggagcgcctctgacccgctgcgccgcgcggcctgccgcccccgcccccgcccccacgcggatcttgcgcatccgagcgtggccgcctcgggggcggaccgcggaacccgaggccatgtcccatgaaaagagttttttggtgtctggggacaactatcctccccccaaccctggatatccgggggggccccagccacccatgcccccctatgctcagcctccctaccctggggccccttacccacagccccctttccagccctccccctacggtcagccagggtacccccatggccccagcccctacccccaagggggctacccacagggtccctacccccaagggggctacccacagggcccctacccacaagagggctacccacagggcccctacccccaagggggctacccccaggggccatatccccagagccccttcccccccaacccctatggacagccacaggtcttcccaggacaagaccctgactcaccccagcatggaaactaccaggaggagggtcccccatcctactatgacaaccaggacttccctgccaccaactgggatgacaagagcatccgacaggccttcatccgcaaggtgttcctagtgctgaccttgcagctgtcggtgaccctgtccacggtgtctgtgttcacttttgttgcggaggtgaagggctttgtccgggagaatgtctggacctactatgtctcctatgctgtcttcttcatctctctcatcgtcctcagctgttgtggggacttccggcgaaagcacccctggaaccttgttgcactgtcggtcctgaccgccagcctgtcgtacatggtggggatgatcgccagcttctacaacaccgaggcagtcatcatggccgtgggcatcaccacagccgtctgcttcaccgtcgtcatcttctccatgcagacccgctacgacttcacctcatgcatgggcgtgctcctggtgagcatggtggtgctcttcatcttcgccattctctgcatcttcatccggaaccgcatcctggagatcgtgtacgcctcactgggcgctctgctcttcacctgcgtgtgtgaggggtgaccttggccggggcgggcatgctgggcaggcaggcttgtccctcaacaccactgtgctgtcatctccagttcctcgcagtggacacccagctgctgctggggaacaagcagctgtccctgagcccagaagagtatgtgtttgctgcgctgaacctgtacacagacatcatcaacatcttcctgtacatcctcaccatcattggccgcgccaaggagtagccgagctccagctcgctgtgcccgctcaggtggcacggctggcctggaccctgcccctggcacggcagtgccagctgtacttcccctctctcttgtccccaggcacagcctagggaaaaggatgcctctctccaaccctcctgtatgtacactgcagatacttccatttggacccgctgtggccacagcatggcccctttagtcctcccgcccccgccaaggggcaccaaggccacgtttccgtgccacctcctgtctactcattgttgcatgagccctgtctgccagcccaccccagggactgggggcagcaccaggtcccggggagagggattgagccaagaggtgagggtgcacgtcttccctcctgtcccagctccccagcctggcgtagagcacccctcccctcccccccacccccctggagtgctgccctctggggacatgcggagtgggggtcttatccctgtgctgagccctgagggcagagaggatggcatgtttcaggggagggggaagccttcctctcaatttgttgtcagtgaaattccaataaatgggatttgctctctgca

SEQ ID NO: 709364 - DNA, 4699 bp, Homo sapiens
ttttttttcagagttcccgggtcccttccgcctgggttcacgttcacgtttattcaaacaacagagccgactcgggcgaggtctgggagcggcgggcgggcggtgtcgcctcctgggctctgctgacccctggtggtggggtcggcccaggctgggacctagcccggcccccctcggccgctgctgaccgccatcccccacaccgccttctggagcccgcagagggaggcaggggcgtccccggggacagctcaggcggccacagttgggggcggggagcatcagcctgtgcggagctgggagcctgggaagcaggaggccagagggtggccccttcggttaagtgtctggggagcggcccgggagcccagaggggtcgtcgggggaagcgcggggcacgtgctcgcaggtgatgaggtgggtgggcagcgcctgggtgtcgtggaagatgacgaagatgctgggctggcagatgcagtccacggcgctgtcgtagcgcaggagcacgtggccaggaccccgcagagggggcgcccgcagaccgcggcggccctgcccgtagtcgccagtcagcacccgtgccacgaacaccgccttatggccatcggcgttggggggcgagtagcggtcctgcaccgacagggaggcgcgcctggcgaaatacacgcccttcccgtagaccgtggcgttgcggccgcagaagctgcggttgaagccgtgggcgcagatgtcaggcactgccggtgccgtcgtgccgtggtacagcacctgctccaccgggcgccgctcgcatcgctgcagcaggcgctcccggtacagctcatactgctgctgcagcagcgggtgcgacacgcgctccacacgaacgacgcggatgctgctgcgggcagcgtccagggtgtcgtagaaggcccgcaccacctcctggaactccccggtgttctctgccagacgctccaggttgttccagggccccttcagcgtctgccccgccaccaggctcacgtcctcctggtcaccacctgtactgtctggggtccacagggtgtgggcgttgccagggagcactgggagggcctcggtagggtccacctcttcaaggcctgtgtccaacgtggctgtggccaggcgctctgtcccaaagacacactggaactgagcctccagcccctggagaaggtgctgcccttctgggcccaggagaaacctggcgctgcccgggtgctccaggcacaacacatggcagctaatgctgcccagcaggctccgcagaaactcctcagccgcctggcaggaagcctgggctccacagagccgaaagccagtcatatccggtccttcaagtggcaagagagcgacgtctcccaggcccgcaagaaggtcctcatggtagagctgcaggaagcgcatcgcccctggctccatcaatagcaccatctccaccaggccctcctgccctgccagcttcacacatcctgggctcacaggccctgccttctccagagaccccatggtgatctccatgggacccaccagcccctcttgctctggtgagtccatggcaatttccaccaggccctcctgccccggcaaccccttagaggtctccactgggcctgcagaccccacaggccccaggctcatgggcccctcctgttcctgcaaccccacaggcctcaggcttaccagcccctcatgttccagagaccccatgggcatcgagctgacttgctctgcctgtcccagagaccccatgggacctgtcctcagagaggtccctgactgccctggttcctggccagagcctgttgtcataatccctctaccctgcaccatgggacctgtcctcagagaggcccctgactgccctggttcctcgccagagcccattgtcacagtccctgcaccctgcagagccgtcaccaaccctccggtcctcaggagagcatgcttggtagccctaggcccctgggtggacgggtggtcccctccactggtgttctcagccagctcctcgggctccaggatgtcgtagtgggggacaaggctcagctctgagccctgcaaccggtgctcctgctgcaacactcgttctgccacttgccactgctggaaggaggcaacagtgcccaggggcccgggtaggcgttgcaggtcctccaggggccccccaccactgcggcgctcattctccaggtacaactccagcaacagcaggtccacagaggcaccatcccccaccacacgcaccgctcgggcctggggaacccgggccagggacaccaaggtcccctccaggcccagattctgggcctgctcctccaggacacggacatctgcctcagaaaggggcttgggcaactggaccagagcccggtctggccgggggctggccaaggcacagcaaggctgtactgggagccccgaggcccgcagcaaggcctggacatgctgctccaagcgctggggcgtggtgccagggggcagtccttggagcagcaggcgtgcaggggctcgtggtggagctggccgcaggctcagctgggcaccatgtagttcgtgatctgcctgggccaagaccctctcggcgtctgcaggctctctgaaggtgaggacgcccccacagcccagtctctgccagctcaacacaggtccccctccagagcgtcggcggttttcaaagtagagagtgagcagctcgtcgggcacggcagggggcagtccacggacctccactgccacccctgcctctgcctccgccattgcaaccattccccgtggccgctaggcagcctcaggccatgagctcagccaggactcctgtgcctgcccctcagcaagcctaaccccggcctgcggcgcccggccaccggtgagtccccggcccgagcccaggagcgcctctgacccgctgcgccgcgcggcctgccgcccccgcccccgcccccacgcggatcttgcgcatccgagcgtggccgcctcgggggcggaccgcggaacccgaggccatgtcccatgaaaagagttttttggtgtctggggacaactatcctccccccaaccctggatatccgggggggccccagccacccatgcccccctatgctcagcctccctaccctggggccccttacccacagccccctttccagccctccccctacggtcagccagggtacccccatggccccagcccctacccccaagggggctacccacagggtccctacccccaagggggctacccacagggcccctacccacaagagggctacccacagggcccctacccccaagggggctacccccaggggccatatccccagagccccttcccccccaacccctatggacagccacaggtcttcccaggacaagaccctgactcaccccagcatggaaactaccaggaggagggtcccccatcctactatgacaaccaggacttccctgccaccaactgggatgacaagagcatccgacaggccttcatccgcaaggtgttcctagtgctgaccttgcagctgtcggtgaccctgtccacggtgtctgtgttcacttttgttgcggaggtgaagggctttgtccgggagaatgtctggacctactatgtctcctatgctgtcttcttcatctctctcatcgtcctcagctgttgtggggacttccggcgaaagcacccctggaaccttgttgcactgtcggtcctgaccgccagcctgtcgtacatggtggggatgatcgccagcttctacaacaccgaggcagtcatcatggccgtgggcatcaccacagccgtctgcttcaccgtcgtcatcttctccatgcagacccgctacgacttcacctcatgcatgggcgtgctcctggtgagcatggtggtgctcttcatcttcgccattctctgcatcttcatccggaaccgcatcctggagatcgtgtacgcctcactgggcgctctgctcttcacctgcttcctcgcagtggacacccagctgctgctggggaacaagcagctgtccctgagcccagaagagtatgtgtttgctgcgctgaacctgtacacagacatcatcaacatcttcctgtacatcctcaccatcattggccgcgccaaggagtagccgagctccagctcgctgtgcccgctcaggtggcacggctggcctggaccctgcccctggcacggcagtgccagctgtacttcccctctctcttgtccccaggcacagcctagggaaaaggatgcctctctccaaccctcctgtatgtacactgcagatacttccatttggacccgctgtggccacagcatggcccctttagtcctcccgcccccgccaaggggcaccaaggccacgtttccgtgccacctcctgtctactcattgttgcatgagccctgtctgccagcccaccccagggactgggggcagcaccaggtcccggggagagggattgagccaagaggtgagggtgcacgtcttccctcctgtcccagctccccagcctggcgtagagcacccctcccctcccccccacccccctggagtgctgccctctggggacatgcggagtgggggtcttatccctgtgctgagccctgagggcagagaggatggcatgtttcaggggagggggaagccttcctctcaatttgttgtcagtgaaattccaataaatgggatttgctctctgca

SEQ ID NO: 709365 - DNA, 5106 bp, Homo sapiens
ttttttttcagagttcccgggtcccttccgcctgggttcacgttcacgtttattcaaacaacagagccgactcgggcgaggtctgggagcggcgggcgggcggtgtcgcctcctgggctctgctgacccctggtggtggggtcggcccaggctgggacctagcccggcccccctcggccgctgctgaccgccatcccccacaccgccttctggagcccgcagagggaggcaggggcgtccccggggacagctcaggcggccacagttgggggcggggagcatcagcctgtgcggagctgggagcctgggaagcaggaggccagagggtggccccttcggttaagtgtctggggagcggcccgggagcccagaggggtcgtcgggggaagcgcggggcacgtgctcgcaggtgatgaggtgggtgggcagcgcctgggtgtcgtggaagatgacgaagatgctgggctggcagatgcagtccacggcgctgtcgtagcgcaggagcacgtggccaggaccccgcagagggggcgcccgcagaccgcggcggccctgcccgtagtcgccagtcagcacccgtgccacgaacaccgccttatggccatcggcgttggggggcgagtagcggtcctgcaccgacagggaggcgcgcctggcgaaatacacgcccttcccgtagaccgtggcgttgcggccgcagaagctgcggttgaagccgtgggcgcagatgtcaggcactgccggtgccgtcgtgccgtggtacagcacctgctccaccgggcgccgctcgcatcgctgcagcaggcgctcccggtacagctcatactgctgctgcagcagcgggtgcgacacgcgctccacacgaacgacgcggatgctgctgcgggcagcgtccagggtgtcgtagaaggcccgcaccacctcctggaactccccggtgttctctgccagacgctccaggttgttccagggccccttcagcgtctgccccgccaaggtagggcctgaagctgccaagggaaaggccaaactctgatcccaggggccagccagaagtgccaccaagtggcgggcagcacgggcagggtgggccccgaagccacggaggatggtgcagtcaccacgcagggcaacactcacaccatggcaccgctccaggcgagcacgcagctctgcaggcagtgtgcggcgccagggccccaccgtctcctcctggacgtggacctccaaggcagccctgagcgcccggtccagctcctccacatcctgctcaaaggccgagtgcaccaccagctgggccttgccatcagtccccccatctgggggctcttctgcctccaacgggggctgctccagcagggagagggttagggcttgccgcagggcagcagcctcctcctgctcagccacctgaccttgaggctccagtgaccggtggagggccagctgcagagcggcctcctcctccagccacctgggtgccacagtgctgggggccacaggctcctcctcctcatgccctggggtcgcctcctcctctggctgctcctgaggcccttcctcctccagctcccgaggcagccagtcctccccgtctaggtctaggccctccagggtggccagcagttctcggacctcctccaggctcacgtcctcctggtcaccacctgtactgtctggggtccacagggtgtgggcgttgccagggagcactgggagggcctcggtagggtccacctcttcaaggcctgtgtccaacgtggctgtggccaggcgctctgtcccaaagacacactggaactgagcctccagcccctggagaaggtgctgcccttctgggcccaggagaaacctggcgctgcccgggtgctccaggcacaacacatggcagctaatgctgcccagcaggctccgcagaaactcctcagccgcctggcaggaagcctgggctccacagagccgaaagccagtcatatccggtccttcaagtggcaagagagcgacgtctcccaggcccgcaagaaggtcctcatggtagagctgcaggaagcgcatcgcccctggctccatcaatagcaccatctccaccaggccctcctgccctgccagcttcacacatcctgggctcacaggccctgccttctccagagaccccatggtgatctccatgggacccaccagcccctcttgctctggtgagtccatggcaatttccaccaggccctcctgccccggcaaccccttagaggtctccactgggcctgcagaccccacaggccccaggctcatgggcccctcctgttcctgcaaccccacaggcctcaggcttaccagcccctcatgttccagagaccccatgggcatcgagctgacttgctctgcctgtcccagagaccccatgggacctgtcctcagagaggtccctgactgccctggttcctggccagagcctgttgtcataatccctctaccctgcaccatgggacctgtcctcagagaggcccctgactgccctggttcctcgccagagcccattgtcacagtccctgcaccctgcagagccgtcaccaaccctccggtcctcaggagagcatgcttggtagccctaggcccctgggtggacgggtggtcccctccactggtgttctcagccagctcctcgggctccaggatgtcgtagtgggggacaaggctcagctctgagccctgcaaccggtgctcctgctgcaacactcgttctgccacttgccactgctggaaggaggcaacagtgcccaggggcccgggtaggcgttgcaggtcctccaggggccccccaccactgcggcgctcattctccaggtacaactccagcaacagcaggtccacagaggcaccatcccccaccacacgcaccgctcgggcctggggaacccgggccagggacaccaaggtcccctccaggcccagattctgggcctgctcctccaggacacggacatctgcctcagaaaggggcttgggcaactggaccagagcccggtctggccgggggctggccaaggcacagcaaggctgtactgggagccccgaggcccgcagcaaggcctggacatgctgctccaagcgctggggcgtggtgccagggggcagtccttggagcagcaggcgtgcaggggctcgtggtggagctggccgcaggctcagctgggcaccatgtagttcgtgatctgcctgggccaagaccctctcggcgtctgcaggctctctgaaggtgaggacgcccccacagcccagtctctgccagctcaacacaggtccccctccagagcgtcggcggttttcaaagtagagagtgagcagctcgtcgggcacggcagggggcagtccacggacctccactgccacccctgcctctgcctccgccattgcaaccattccccgtggccgctaggcagcctcaggccatgagctcagccaggactcctgtgcctgcccctcagcaagcctaaccccggcctgcggcgcccggccaccggtgagtccccggcccgagcccaggagcgcctctgacccgctgcgccgcgcggcctgccgcccccgcccccgcccccacgcggatcttgcgcatccgagcgtggccgcctcgggggcggaccgcggaacccgaggccatgtcccatgaaaagagttttttggtgtctggggacaactatcctccccccaaccctggatatccgggggggccccagccacccatgcccccctatgctcagcctccctaccctggggccccttacccacagccccctttccagccctccccctacggtcagccagggtacccccatggccccagcccctacccccaagggggctacccacagggtccctacccccaagggggctacccacagggcccctacccacaagagggctacccacagggcccctacccccaagggggctacccccaggggccatatccccagagccccttcccccccaacccctatggacagccacaggtcttcccaggacaagaccctgactcaccccagcatggaaactaccaggaggagggtcccccatcctactatgacaaccaggacttccctgccaccaactgggatgacaagagcatccgacaggccttcatccgcaaggtgttcctagtgctgaccttgcagctgtcggtgaccctgtccacggtgtctgtgttcacttttgttgcggaggtgaagggctttgtccgggagaatgtctggacctactatgtctcctatgctgtcttcttcatctctctcatcgtcctcagctgttgtggggacttccggcgaaagcacccctggaaccttgttgcactgtcggtcctgaccgccagcctgtcgtacatggtggggatgatcgccagcttctacaacaccgaggcagtcatcatggccgtgggcatcaccacagccgtctgcttcaccgtcgtcatcttctccatgcagacccgctacgacttcacctcatgcatgggcgtgctcctggtgagcatggtggtgctcttcatcttcgccattctctgcatcttcatccggaaccgcatcctggagatcgtgtacgcctcactgggcgctctgctcttcacctgcttcctcgcagtggacacccagctgctgctggggaacaagcagctgtccctgagcccagaagagtatgtgtttgctgcgctgaacctgtacacagacatcatcaacatcttcctgtacatcctcaccatcattggccgcgccaaggagtagccgagctccagctcgctgtgcccgctcaggtggcacggctggcctggaccctgcccctggcacggcagtgccagctgtacttcccctctctcttgtccccaggcacagcctagggaaaaggatgcctctctccaaccctcctgtatgtacactgcagatacttccatttggacccgctgtggccacagcatggcccctttagtcctcccgcccccgccaaggggcaccaaggccacgtttccgtgccacctcctgtctactcattgttgcatgagccctgtccttcctctcaatttgttgtcagtgaaattccaataaatgggatttgctctctgca

SEQ ID NO: 709366 - DNA, 473 bp, Homo sapiens
tcccctttcggattcccgacgctgtggttgctgtaaggggtcctccctgcgccacacggccgtcgccatggtgaagctgagcaaagaggccaagcaaaaactacagcagctcttcaaggggagccagtttgccattcgctggggctttactcccttctgttgtgattacacctgggatttaagaggggtgcagacttcccggaaatgcctgaaccaactgttttgagcctacttgggggataaaggattattgggtcttctggatttggaggcaatcagcggacagcatgtggaagatgtgtgcctctggcctcggaataagagagtgggacactcattcagctcactagtttggattggcccaaggctcttcacagacgcattctgtagcagaggtggactcttgtactacccttatgatagaattgttctcagaattaaagtgtttattaccagctgtttacaaaaaacaa

SEQ ID NO: 709367 - DNA, 3721 bp, Homo sapiens
ttttttttcagagttcccgggtcccttccgcctgggttcacgttcacgtttattcaaacaacagagccgactcgggcgaggtctgggagcggcgggcgggcggtgtcgcctcctgggctctgctgacccctggtggtggggtcggcccaggctgggacctagcccggcccccctcggccgctgctgaccgccatcccccacaccgccttctggagcccgcagagggaggcaggggcgtccccggggacagctcaggcggccacagttgggggcggggagcatcagcctgtgcggagctgggagcctgggaagcaggaggccagagggtggccccttcggttaagtgtctggggagcggcccgggagcccagaggggtcgtcgggggaagcgcggggcacgtgctcgcaggtgatgaggtgggtgggcagcgcctgggtgtcgtggaagatgacgaagatgctgggctggcagatgcagtccacggcgctgtcgtagcgcaggagcacgtggccaggaccccgcagagggggcgcccgcagaccgcggcggccctgcccgtagtcgccagtcagcacccgtgccacgaacaccgccttatggccatcggcgttggggggcgagtagcggtcctgcaccgacagggaggcgcgcctggcgaaatacacgcccttcccgtagaccgtggcgttgcggccgcagaagctgcggttgaagccgtgggcgcagatgtcaggcactgccggtgccgtcgtgccgtggtacagcacctgctccaccgggcgccgctcgcatcgctgcagcaggcgctcccggtacagctcatactgctgctgcagcagcgggtgcgacacgcgctccacacgaacgacgcggatgctgctgcgggcagcgtccagggtgtcgtagaaggcccgcaccacctcctggaactccccggtgttctctgccagacgctccaggttgttccagggccccttcagcgtctgccccgccaaggtagggcctgaagctgccaagggaaaggccaaactctgatcccaggccaggatgtcgtagtgggggacaaggctcagctctgagccctgcaaccggtgctcctgctgcaacactcgttctgccacttgccactgctggaaggaggcaacagtgcccaggggcccgggtaggcgttgcaggtcctccaggggccccccaccactgcggcgctcattctccaggtacaactccagcaacagcaggtccacagaggcaccatcccccaccacacgcaccgctcgggcctggggaacccgggccagggacaccaaggtcccctccaggcccagattctgggcctgctcctccaggacacggacatctgcctcagaaaggggcttgggcaactggaccagagcccggtctggccgggggctggccaaggcacagcaaggctgtactgggagccccgaggcccgcagcaaggcctggacatgctgctccaagcgctggggcgtggtgccagggggcagtccttggagcagcaggcgtgcaggggctcgtggtggagctggccgcaggctcagctgggcaccatgtagttcgtgatctgcctgggccaagaccctctcggcgtctgcaggctctctgaaggtgaggacgcccccacagcccagtctctgccagctcaacacaggtccccctccagagcgtcggcggttttcaaagtagagagtgagcagctcgtcgggcacggcagggggcagtccacggacctccactgccacccctgcctctgcctccgccattgcaaccattccccgtggccgctaggcagcctcaggccatgagctcagccaggactcctgtgcctgcccctcagcaagcctaaccccggcctgcggcgcccggccaccggtgagtccccggcccgagcccaggagcgcctctgacccgctgcgccgcgcggcctgccgcccccgcccccgcccccacgcggatcttgcgcatccgagcgtggccgcctcgggggcggaccgcggaacccgaggccatgtcccatgaaaagagttttttggtgtctggggacaactatcctccccccaaccctggatatccgggggggccccagccacccatgcccccctatgctcagcctccctaccctggggccccttacccacagccccctttccagccctccccctacggtcagccagggtacccccatggccccagcccctacccccaagggggctacccacagggtccctacccccaagggggctacccacagggcccctacccacaagagggctacccacagggcccctacccccaagggggctacccccaggggccatatccccagagccccttcccccccaacccctatggacagccacaggtcttcccaggacaagaccctgactcaccccagcatggaaactaccaggaggagggtcccccatcctactatgacaaccaggacttccctgccaccaactgggatgacaagagcatccgacaggccttcatccgcaaggtgttcctagtgctgaccttgcagctgtcggtgaccctgtccacggtgtctgtgttcacttttgttgcggaggtgaagggctttgtccgggagaatgtctggacctactatgtctcctatgctgtcttcttcatctctctcatcgtcctcagctgttgtggggacttccggcgaaagcacccctggaaccttgttgcactgtcggtcctgaccgccagcctgtcgtacatggtggggatgatcgccagcttctacaacaccgaggcagtcatcatggccgtgggcatcaccacagccgtctgcttcaccgtcgtcatcttctccatgcagacccgctacgacttcacctcatgcatgggcgtgctcctggtgagcatggtggtgctcttcatcttcgccattctctgcatcttcatccggaaccgcatcctggagatcgtgtacgcctcactgggcgctctgctcttcacctgcttcctcgcagtggacacccagctgctgctggggaacaagcagctgtccctgagcccagaagagtatgtgtttgctgcgctgaacctgtacacagacatcatcaacatcttcctgtacatcctcaccatcattggccgcgccaaggagtagccgagctccagctcgctgtgcccgctcaggtggcacggctggcctggaccctgcccctggcacggcagtgccagctgtacttcccctctctcttgtccccaggcacagcctagggaaaaggatgcctctctccaaccctcctgtatgtacactgcagatacttccatttggacccgctgtggccacagcatggcccctttagtcctcccgcccccgccaaggggcaccaaggccacgtttccgtgccacctcctgtctactcattgttgcatgagccctgtctgccagcccaccccagggactgggggcagcaccaggtcccggggagagggattgagccaagaggtgagggtgcacgtcttccctcctgtcccagctccccagcctggcgtagagcacccctcccctcccccccacccccctggagtgctgccctctggggacatgcggagtgggggtcttatccctgtgctgagccctgagggcagagaggatggcatgtttcaggggagggggaagccttcctctcaatttgttgtcagtgaaattccaataaatgggatttgctctctgca

SEQ ID NO: 709368 - DNA, 1855 bp, Homo sapiens
  misc_feature (8)..(8): n is a, c, g, or t
gccccgcngcggtcttccgagccgcaggcgcaggcccagctgagcggccgccgagcgggtgcgggtgcgggcgcatcggccatcaccgcgcggccgcgcagcggacaccgtgcgtaccggcctgcggcgcccggccaccggggcggaccgcggaacccgaggccatgtcccatgaaaagagttttttggtgtctggggacaactatcctccccccaaccctggatatccgggggggccccagccacccatgcccccctatgctcagcctccctaccctggggccccttacccacagccccctttccagccctccccctacggtcagccagggtacccccatggccccagcccctacccccaagggggctacccacagggtccctacccccaagggggctacccacagggcccctacccacaagagggctacccacagggcccctacccccaagggggctacccccaggggccatatccccagagccccttcccccccaacccctatggacagccacaggtcttcccaggacaagaccctgactcaccccagcatggaaactaccaggaggagggtcccccatcctactatgacaaccaggacttccctgccaccaactgggatgacaagagcatccgacaggccttcatccgcaaggtgttcctagtgctgaccttgcagctgtcggtgaccctgtccacggtgtctgtgttcacttttgttgcggaggtgaagggctttgtccgggagaatgtctggacctactatgtctcctatgctgtcttcttcatctctctcatcgtcctcagctgttgtggggacttccggcgaaagcacccctggaaccttgttgcactgtcggtcctgaccgccagcctgtcgtacatggtggggatgatcgccagcttctacaacaccgaggcagtcatcatggccgtgggcatcaccacagccgtctgcttcaccgtcgtcatcttctccatgcagacccgctacgacttcacctcatgcatgggcgtgctcctggtgagcatggtggtgctcttcatcttcgccattctctgcatcttcatccggaaccgcatcctggagatcgtgtacgcctcactgggcgctctgctcttcacctgcttcctcgcagtggacacccagctgctgctggggaacaagcagctgtccctgagcccagaagagtatgtgtttgctgcgctgaacctgtacacagacatcatcaacatcttcctgtacatcctcaccatcattggccgcgccaaggagtagccgagctccagctcgctgtgcccgctcaggtggcacggctggcctggaccctgcccctggcacggcagtgccagctgtacttcccctctctcttgtccccaggcacagcctagggaaaaggatgcctctctccaaccctcctgtatgtacactgcagatacttccatttggacccgctgtggccacagcatggcccctttagtcctcccgcccccgccaaggggcaccaaggccacgtttccgtgccacctcctgtctactcattgttgcatgagccctgtctgccagcccaccccagggactgggggcagcaccaggtcccggggagagggattgagccaagaggtgagggtgcacgtcttccctcctgtcccagctccccagcctggcgtagagcacccctcccctcccccccacccccctggagtgctgccctctggggacatgcggagtgggggtcttatccctgtgctgagccctgagggcagagaggatggcatgtttcaggggagggggaagccttcctctcaatttgttgtcagtgaaattccaataaatgggatttgctctctgca

SEQ ID NO: 709369 - DNA, 1967 bp, Homo sapiens
  misc_feature (8)..(8): n is a, c, g, or t
gccccgcngcggtcttccgagccgcaggcgcaggcccagctgagcggccgccgagcgggtgcgggtgcgggcgcatcggccatcaccgcgcggccgcgcagcggacaccgtgcgtaccggcctgcggcgcccggccaccggtgagtccccggcccgagcccaggagcgcctctgacccgctgcgccgcgcggcctgccgcccccgcccccgcccccacgcggatcttgcgcatccgagcgtggccgcctcgggggcggaccgcggaacccgaggccatgtcccatgaaaagagttttttggtgtctggggacaactatcctccccccaaccctggatatccgggggggccccagccacccatgcccccctatgctcagcctccctaccctggggccccttacccacagccccctttccagccctccccctacggtcagccagggtacccccatggccccagcccctacccccaagggggctacccacagggtccctacccccaagggggctacccacagggcccctacccacaagagggctacccacagggcccctacccccaagggggctacccccaggggccatatccccagagccccttcccccccaacccctatggacagccacaggtcttcccaggacaagaccctgactcaccccagcatggaaactaccaggaggagggtcccccatcctactatgacaaccaggacttccctgccaccaactgggatgacaagagcatccgacaggccttcatccgcaaggtgttcctagtgctgaccttgcagctgtcggtgaccctgtccacggtgtctgtgttcacttttgttgcggaggtgaagggctttgtccgggagaatgtctggacctactatgtctcctatgctgtcttcttcatctctctcatcgtcctcagctgttgtggggacttccggcgaaagcacccctggaaccttgttgcactgtcggtcctgaccgccagcctgtcgtacatggtggggatgatcgccagcttctacaacaccgaggcagtcatcatggccgtgggcatcaccacagccgtctgcttcaccgtcgtcatcttctccatgcagacccgctacgacttcacctcatgcatgggcgtgctcctggtgagcatggtggtgctcttcatcttcgccattctctgcatcttcatccggaaccgcatcctggagatcgtgtacgcctcactgggcgctctgctcttcacctgcttcctcgcagtggacacccagctgctgctggggaacaagcagctgtccctgagcccagaagagtatgtgtttgctgcgctgaacctgtacacagacatcatcaacatcttcctgtacatcctcaccatcattggccgcgccaaggagtagccgagctccagctcgctgtgcccgctcaggtggcacggctggcctggaccctgcccctggcacggcagtgccagctgtacttcccctctctcttgtccccaggcacagcctagggaaaaggatgcctctctccaaccctcctgtatgtacactgcagatacttccatttggacccgctgtggccacagcatggcccctttagtcctcccgcccccgccaaggggcaccaaggccacgtttccgtgccacctcctgtctactcattgttgcatgagccctgtctgccagcccaccccagggactgggggcagcaccaggtcccggggagagggattgagccaagaggtgagggtgcacgtcttccctcctgtcccagctccccagcctggcgtagagcacccctcccctcccccccacccccctggagtgctgccctctggggacatgcggagtgggggtcttatccctgtgctgagccctgagggcagagaggatggcatgtttcaggggagggggaagccttcctctcaatttgttgtcagtgaaattccaataaatgggatttgctctctgca

SEQ ID NO: 709370 - DNA, 381 bp, Homo sapiens
  misc_feature (210)..(210): n is a, c, g, or t
tgctgttctatgagtgatctcctctggatgcaaaatgtcataacgacaatggctgcggggagggcagtgactcaaaggcccgctaaagggctaagccttcacccttgcaggtctatagtatagtcatggatgggctttaagtggatcatcatggacatgagctggatccgtggtggtttggatggagggacttggtagtgaggagtggancatgtggtgatgtgtgttggtgtgctccatccataagaaactctcccattcatctccttcacatccatgtggaccaatctatggttagcctggaagactgattgaagactactggcacactttgaagcattctagatagtacacgcccaatgaagacattgatgctggaaa

SEQ ID NO: 709371 - DNA, 1977 bp, Homo sapiens
ccaccccggagccaggggccgttgggccctgttgttgggctcgcgggggtgggggggctcgggcctttgttggtcacagatggcccggggatttcctgggatagaaatagccgccggctccggccccttaaagctgcttaaggggcgggatgcggaggggagggtccgggcacaccccacacgtccccggccgagaccccagcctccgcgctgagctcccacccgggagacgccggcagcggcgcaggcctccggttgcttggggcggaccgcggaacccgaggccatgtcccatgaaaagagttttttggtgtctggggacaactatcctccccccaaccctggatatccgggggggccccagccacccatgcccccctatgctcagcctccctaccctggggccccttacccacagccccctttccagccctccccctacggtcagccagggtacccccatggccccagcccctacccccaagggggctacccacagggtccctacccccaagggggctacccacagggcccctacccacaagagggctacccacagggcccctacccccaagggggctacccccaggggccatatccccagagccccttcccccccaacccctatggacagccacaggtcttcccaggacaagaccctgactcaccccagcatggaaactaccaggaggagggtcccccatcctactatgacaaccaggacttccctgccaccaactgggatgacaagagcatccgacaggccttcatccgcaaggtgttcctagtgctgaccttgcagctgtcggtgaccctgtccacggtgtctgtgttcacttttgttgcggaggtgaagggctttgtccgggagaatgtctggacctactatgtctcctatgctgtcttcttcatctctctcatcgtcctcagctgttgtggggacttccggcgaaagcacccctggaaccttgttgcactgtcggtcctgaccgccagcctgtcgtacatggtggggatgatcgccagcttctacaacaccgaggcagtcatcatggccgtgggcatcaccacagccgtctgcttcaccgtcgtcatcttctccatgcagacccgctacgacttcacctcatgcatgggcgtgctcctggtgagcatggtggtgctcttcatcttcgccattctctgcatcttcatccggaaccgcatcctggagatcgtgtacgcctcactgggcgctctgctcttcacctgcttcctcgcagtggacacccagctgctgctggggaacaagcagctgtccctgagcccagaagagtatgtgtttgctgcgctgaacctgtacacagacatcatcaacatcttcctgtacatcctcaccatcattggccgcgccaaggagtagccgagctccagctcgctgtgcccgctcaggtggcacggctggcctggaccctgcccctggcacggcagtgccagctgtacttcccctctctcttgtccccaggcacagcctagggaaaaggatgcctctctccaaccctcctgtatgtacactgcagatacttccatttggacccgctgtggccacagcatggcccctttagtcctcccgcccccgccaaggggcaccaaggccacgtttccgtgccacctcctgtctactcattgttgcatgagccctgtctgccagcccaccccagggactgggggcagcaccaggtcccggggagagggattgagccaagaggtgagggtgcacgtcttccctcctgtcccagctccccagcctggcgtagagcacccctcccctcccccccacccccctggagtgctgccctctggggacatgcggagtgggggtcttatccctgtgctgagccctgagggcagagaggatggcatgtttcaggggagggggaagccttcctctcaatttgttgtcagtgaaattccaataaatgggatttgctctctgca

SEQ ID NO: 709372 - DNA, 1653 bp, Homo sapiens
  misc_feature (8)..(8): n is a, c, g, or t
gccccgcngcggtcttccgagccgcaggcgcaggcccagctgagcggccgccgagcgggtgcgggtgcgggcgcatcggccatcaccgcgcggccgcgcagcggacaccgtgcgtaccggcctgcggcgcccggccaccggggcggaccgcggaacccgaggccatgtcccatgaaaagagttttttggtgtctggggacaactatcctccccccaaccctggatatccgggggggccccagccacccatgcccccctatgctcagcctccctaccctggggccccttcccccccaacccctatggacagccacaggtcttcccaggacaagaccctgactcaccccagcatggaaactaccaggaggagggtcccccatcctactatgacaaccaggacttccctgccaccaactgggatgacaagagcatccgacaggccttcatccgcaaggtgttcctagtgctgaccttgcagctgtcggtgaccctgtccacggtgtctgtgttcacttttgttgcggaggtgaagggctttgtccgggagaatgtctggacctactatgtctcctatgctgtcttcttcatctctctcatcgtcctcagctgttgtggggacttccggcgaaagcacccctggaaccttgttgcactgtcggtcctgaccgccagcctgtcgtacatggtggggatgatcgccagcttctacaacaccgaggcagtcatcatggccgtgggcatcaccacagccgtctgcttcaccgtcgtcatcttctccatgcagacccgctacgacttcacctcatgcatgggcgtgctcctggtgagcatggtggtgctcttcatcttcgccattctctgcatcttcatccggaaccgcatcctggagatcgtgtacgcctcactgggcgctctgctcttcacctgcttcctcgcagtggacacccagctgctgctggggaacaagcagctgtccctgagcccagaagagtatgtgtttgctgcgctgaacctgtacacagacatcatcaacatcttcctgtacatcctcaccatcattggccgcgccaaggagtagccgagctccagctcgctgtgcccgctcaggtggcacggctggcctggaccctgcccctggcacggcagtgccagctgtacttcccctctctcttgtccccaggcacagcctagggaaaaggatgcctctctccaaccctcctgtatgtacactgcagatacttccatttggacccgctgtggccacagcatggcccctttagtcctcccgcccccgccaaggggcaccaaggccacgtttccgtgccacctcctgtctactcattgttgcatgagccctgtctgccagcccaccccagggactgggggcagcaccaggtcccggggagagggattgagccaagaggtgagggtgcacgtcttccctcctgtcccagctccccagcctggcgtagagcacccctcccctcccccccacccccctggagtgctgccctctggggacatgcggagtgggggtcttatccctgtgctgagccctgagggcagagaggatggcatgtttcaggggagggggaagccttcctctcaatttgttgtcagtgaaattccaataaatgggatttgctctctgca

SEQ ID NO: 709373 - DNA, 1073 bp, Homo sapiens
gcgcccgaagccgtcgcggtcggggaccatgttgcttccgaacgatcctgctcaccggtacatccgaggggttggaaagaacgcacattaggcaaagaacttgcgtcaaaatcaggtactgaatatacacttaactgtgggtgattttagctcgagaagtctgatcagtcggatatcatggatgttctggcaagcacggcttctcccaagaagcagtgtcctgaaaggatgcagcagatgatggcacaaatcctgaaggatatggggattacagaatatgagccaatgagttatagatagtcagatgttggagtttgccgttcgcgatatgtgagcgacaattctggatgatgcggaaatagtttattcgagagctcgagtgcataagaaagctacgtggttgatgcaggatgatgtgcgattgggaatccagtgccgggctgatctagtcttttaccatctcctcccccaagagattcttgattagatattgcaaggcatagtgaaatcaaatcgcgctttgccagttgatcgaagccagtattcacggtccgtaggttggcagctgatagatactggcttaacgagctccaaacgtataggctgaaagtctttacagaaagaaggcatccaggcttctgcgggcagaattaacagtgcccggcgggttacgtgttgggttcagttactagcagaccaggtactcccacagtaggcacggccaatcccacagaccatgtctgggttgcactacaagttgggactccccatggtcctcaaagggtcaacgggttcgagttaaggatggctactgtccacctccagtgttaaaggttcattctggcactccaggattccaagggcgataaccacctatggggccagcatttttgccccatgtgtgttgacaaagtgggggaaattaaggtgtagaaaagggggtaaattaaagcaggagtgaaaaaaggtataccgagagaaattagagaaatagaaaaaaagtggaagtgataaaaggaacaacagggatgaatgaaaaaagaagagggagaggaggtggatgttgtttgatt

SEQ ID NO: 709374 - DNA, 947 bp, Homo sapiens
ccgtcctccagccccgccggcacgcccgagcccggcttatcgccaacgggcccctggccgactcgcaccgcggcgcgccgctaccggtgccctggcagggtcaagacgcaagggctctagaagacccgtggaacaagcacacgcaacggagaacaagatccggccccgagcgctacaacatcgccggtgcgctagaggccgcggacaaggccaagatgcgcaacctggagacgcagcacaaggtcctaggagctgcacgggctcgaggactgagcggcctgcagaagaaggtgggacgcatcgcgtcgcgactgagcgtcacgcaccctgcggaacagtgctcaagcagctgcccgagcccctgctcgccgtccatccggccactgctagcgcggcccccgagcgcgtcccccgtgccggccggggcagagactccggggagcgcccgcgcccgcgccctcgcgccccgcgccccaggccggcgccggcaaaacgtttggcaactggggcacttggcagcgcggggagcccgtgcggtaattgtaatatgtcttatctagacatgatacatcgacaaggtgcgtccaaaccaaccgcacatgcagatggggctcccgcccgtggtcgttattctacaagaagaaacgtctatgtgtacagatgacatgatacaactctctggctgtgctccctcagcccctctccaggcgaccggcgggcgggaccggtttacgaagttgatgcaatcacggtattaaacatggcggaacgcgtgtgtacatcgggactaacgcaacccacgtgtaactgtcagccggggccactgagtaatcgcttaaaagatgttcctacggggcttgtagctgtagatgttttgtatttagttttagttttttagtctttttctgcgtacttagataaaatgatctagtttctatgagaaaaga

SEQ ID NO: 709375 - DNA, 920 bp, Homo sapiens
gcctttctccgtgcaagggccgtccccgtcctcctccccagccatgggtcacgtcgcggcttctgctacatggtggggctgtgtcatgccgcgctcatcttcttcgccattgtggccacattatacgcattgatgagctgaagactgattacaagaatcttatagaccagtgtaatacccctgaatcccgtatatgagtagaccagtgatgagtggccaggactctagtgaccctaaaaccatcatgaatgcaggatatctaggcatgttgtcagacggaccggctggtgcaaatagcttaaatcttctagcaattttttactaacctatatgggatgactctattgtcgggaggagcctcttaagacacaacacacagaagaatgtgtccagttaattgcttgcaaaaaagccaccaaatgaggggatcttatccagcaagatctgtcaagagttagctgtgcaatctgctcagttcttacaaaatgatccttatttttacatgttccacattttggctggtgcacagacttgttcatattgttatactcagataaggtttaaagtgctataacgtataactcactatcacagtgattccctctggtgttgcacacggtttggaacgtgggcccttttaagtgaacagccaataagtcctctggaatgatgcattaataccgggcggtctagtacctggagctgtggttctagcacctgtgagcgccatcggtcgatggaaccggtcttattataaccaagcggaaatacgggcccgtgggacgcaaagtttgcctgggcacacacgggcccactagggcgagtattggtctaccacaacaggcgcccgtggatatccgatggtaggcgcctcaccacaatgtgtttctagtagcacatatggagactatgtatcgagg

SEQ ID NO: 709376 - DNA, 1302 bp, Homo sapiens
cctgccgccgccatcctgccgccgcagccagcttcctgccgccgcaggacctggcccctgccccagcctccgcagcctgcggcgcgtccacgccctgccctgctgcccatgggctgatgtctggggtctgcctgccttgcactgcttctcatgtgttcccctgctgcccctgcattgtaaccctggccattggcccccggcaacatgtgtcctcctgcagctcgcaggcacgggcatagacaacatataactacacagaatcacacgaagagacccacaacatcctccaagcacatgaaaacagtacacaaatgacttggtacttaatagacataaagaagcgaaaaaatagaaagacaatgatgaaaccactaccatgacaaaaactcaaacaagaagcgaggcacatccggataaatcactaaaaacaataaaacgagaagacaacccaacccaataggccacaaaaataacacacataaaaaactggcaagagaaaaacaaacatagacagggcaatgaagacaaaacagagagggcatacaccgaaagaaaaaccaaacgggacagaaacaacacagagagcagaccctctaaacagagcgaaaaagaaacagacacaaaaaaaacgagaccacagcaggaccaaacaaaaaaaacagaacagagcaaaaaccaccccgtgaaagagaaaaaaacaacaaaaaaaacacaaaacaataacaaacaacaaagaaaagaacaacaaaaaaaaacaaaagatgcaaaaacccacaacaaggaaagagaaaaaaaaaagagaaagaaaaacgagagaacagaaacacacaagacgaaaaaacagacaacacagaagaaacaagactacaagaaagcacataggaaggagaaatccacagaagaaaaaacaaggcgacaaagacgagacgcgatgacacagagaagaaaacaccaaataaacaaaccaaagcagcacacaaacaaaacaccagaaaccagagacaacaaaaaaagaaaacaaacataagaacacaagacaacgaaaaccaaacgacaccagagaaaagaaaaaaagcaaaccacaaagacacaagagcaagacaaaaaacaccaccaatgatagtaacacacagaaaaccaacaaaaccaaagaaacacaaaaagaaaacacaaaagagacaacacaacaaagaaacgacaaataaaacaaaaaaaaaccaaccaagaaaaacaaaaaacgaaaaaaaaagagagaacaacaacaataacaaaaggggaaaaaacaatagacaacacaagagc

SEQ ID NO: 709377 - DNA, 366 bp, Homo sapiens
cccacttggttgacaggctggtctcatgctcctgggctcagaaatctcctgctcagcctccaaagtgctgagatcacaggcatgagccactgcagccaggctcagtaaatttttatattaaatcgggcaccagaacaaattttggagtaaaatacaaaattcataccatttcctatataagataggagcctacagacatgttgatccctggacatactgtgttcttcatctaacattagaagtctggcgtcaaagtgtattaagtacaccaacctcaaggaagaaagatcgggatccttgcaaaaaatccctttgtaacagcttcagtgacactaggactaccttctctgcttacaggccactgga

SEQ ID NO: 709378 - DNA, 124 bp, Homo sapiens
  misc_feature (66)..(66): n is a, c, g, or t
ggaacacaggtgtcgtgaaaactacccctaaaagccaaatgggaaggaagactcatatcaccatgnccgtcattggccacgtagattcggccaatgcccacctctctctggccaatctatctct

SEQ ID NO: 709379 - DNA, 172 bp, Homo sapiens
catcaagcacatggaggtggatgtttaccgcgtgttatataacttgctggctccttcactgaacatgcctagtccaacatttttgccagagtattatataggtggaatcgtttactacatgagagttgggtataacttcttttcatttatcatgatgattgtgagacttatg

SEQ ID NO: 709380 - DNA, 175 bp, Homo sapiens
cccccccccccccccccccccttgggggtttcccccttggggcccacgggggggggggtttttccccctttttgccccccgggggggaagggggggggtttttttgggggggggggggccccccccccccttttttgggggggggattcccccaaaggggggtttttttttttta

SEQ ID NO: 709381 - DNA, 205 bp, Homo sapiens
  misc_feature (147)..(147): n is a, c, g, or t
agcaagcggctgctgtgaaccgctcgctgcatggtgctgcctcatctctgcggcacattcgcctgcttccttccccacgcgccggtcttctctccgtcagaagcagcctggtcactccatcgcccggggtgctaccagagctctacnttcagtaatcatccgtcactagcttgtttccctgtggtgacataacccgttcgctatc

SEQ ID NO: 709382 - DNA, 196 bp, Homo sapiens
gttgcgaatacctcctcctcctaccagtggaatcctgactgtttaattaaacaaagcatcgcgaaggccgtgtgggtgttgacgcgatgtgatttcttgcccagtgctctggaatggtcaacggtgaagaaattcaatgaagcggcgggtaaacggcgggagtaacttattgactctcttaaaggtagccaaaatt

SEQ ID NO: 709383 - DNA, 124 bp, Homo sapiens
gccccccccccccctgggcccctggggggttgggttccccctttcctttttggtccgggccaagggggggggttttttaggggggggggggttttttcctttaaaaaaccccggggcccgttga

SEQ ID NO: 709384 - DNA, 223 bp, Homo sapiens
aggcctgttctgctaagccacaaaggttggaagggaaagttctagggaccgcagcgtcactacactctggacaggtgctgatacaggcgaagcacgccgatccagacaaaaggggggaggtttccatggaacacccaggggtggcatgggctcgggaacctaggctcgacttagatgtttgtggccattgtgatcagaggttttaaatgcttagccttccgag

SEQ ID NO: 709385 - DNA, 131 bp, Homo sapiens
gggagttggaggttgcagtgagccgagatcgcgccactgcattccagcctgggcaacagagcaagactccatctcaattaaaaaaaaccaacaaaaaaacacgtttccgtgagctgtgtagacagatgagg

SEQ ID NO: 709386 - DNA, 902 bp, Homo sapiens
gcggcgccgggagcgctcttcgcttccctcgggtcttgctcgtacctcgtccagcgtctggatccccaggactcgtgcgtgcagcatgggctggcgtcggggagccgtggaccgcgtggagggacccgtgcagccgggggcaccgctgcccaccttctgctggtgagcagatccgacgcgcacgaccagcccggcgacaagtggctgtcatcgagcgccgcgtctacgacatcagccgctgggcacatgcggcacccagggggcagccgcctcatcggccaccaggggctgagggacgccacgggattgccttccgtgccttccatcaagatctcaattttgtagcgcaagttcctacagggccctgtagattggagagctggctccggaagaacccaggccaggatggagcccgtgaatgcgcaggcttggtcgaaggacttaccgagcccttgcaccaggcacaggccgaggacattgaaggctgtttgatgccagttcgcaccttctatgctttcctactggggccacgatcctggccatgggcggtgctggcctggctccttatctaggctcctgggtccttggctgggtgcccagtgccctgggcggcttcatacctggccatcgtctcagggctccagtaccttggttgtctgcaggcatgacctgggccagtggctccatcttcaagaagtccttggttgaaagcgacggtggggccagaagggttcgggtggactgggggggcagcttagaagggtggcgttaagaccggacgccagtagggatgggaaagttccaggcaagtttacagaggcaaccaggccgagggcccaaaggagtcgtaccaggcaaaggggacccaggatgataaggatgggcggccggcgttcgttctg

SEQ ID NO: 709387 - DNA, 473 bp, Homo sapiens
gacactagagggacaggaagaggctttccaagagtaggggaacagcatagtacaaaaggcagggaggcctctacaacagtaagtagtaacagtaagactagagtatggattatatatagaaaagtatactaaaatcaagatcaaaaaggaaagttgacagcagagaatgaagggcctagaatatcaggcagagaaatatggaaatggacaggccactaagggaacaacaccgtaactatctcagcagggcgccagatattcctaggagtagtatgatataccctgcagagtgtcacaagggatgaaagtaacacaacaggcctattgaggaaggcaatgagacccaggcttaagaacgaatggctttgaggcataatctaggggtcggagaggaacagagagtggagaacaagacgttactagacttccaggaatattacaagccttctaatatacctgctaccaatgtctcc

SEQ ID NO: 709388 - DNA, 109 bp, Homo sapiens
gaacattgagtgctttgctctcctggtgtcaccttcataataataattcaactttggtcaataaataaacactcttctgggtacaggtggcacattaagagtattagct

SEQ ID NO: 709389 - DNA, 956 bp, Homo sapiens
gacgagcacatgagcgcgatggttcatcagattgccactgcgtcgagtgtcgtgtacagtgctcgtggcagacgacgatggatcaatgtgaggaacgatgcatcctgccttggaaggtatgcggtgccgaagtcatgtcgcgaaggatagacccgggctatgctaactgggagaactgagcatctgctcgggactgactgttgtggcacgttgtgcatttacctgtaaccttttcccaccatccgagtcacacagacgaggttctgtcctggctgaattaccatatgaaacatagtatggccattatttgctggtgcgactcacacattgatggatcgaacaaagtacttctatggaccccttaaatgattgtttgtgcttagggaaacattgttgccctgctgagtgcttgaaggccttcggaatgagaggtggtataatcagaggtgtgatgggatgatactcgaaagggtctccaaggattgggctgtgaacaaagtcgttggtcggtaattctaacaggtatcaatacctagctatagtttctctggggaggggtctgggcctaaattcggagtttgtggcatcatttcgggtgtaaggcaggttgtggttgggggactttacttctcaacttgctgttcctgttagtgcgcaatgatttaaatgttataagttccaaaggtgtaccaagagataatggtgtaaggtagacaacatacctattaatgtttttttgccatcctggataattgagaagaagtaacttccaggtaactattaggtttttaaaacttggcggaaataaggtttaattaaaaaaaggattattgtatgtatgacccttgggctttactgaggttataggatagaggaaggacttcattttgtgaagaacccttaaagttggagaaattttgggttggttcgttggcgtggttttcggtggcccacaa

SEQ ID NO: 709390 - DNA, 370 bp, Homo sapiens
gggcctggtccggcgccccccgcagcccatggctctccgcaacgacctaggctccaacatcaacgtactgaagaccctgaacctccggtttcgctgcttcctagccaaggtgcacgagctagaaagtcgaaatcggctgctggagaaacagctgcagcaggctctagaggagggtaagcagggcaggcggggcctggcccgccgtgaccaggcggtacagaccggcttcatcagcccgatccggcccctggggctgcccctgagctcccggccggccgccgtgtgccccccatcagcgcgggtgctgggctcgccctcccgctcgccagctggacccttagcatcctctgccgcctgccacacatcatcc

SEQ ID NO: 709391 - DNA, 176 bp, Homo sapiens
  misc_feature (133)..(133): n is a, c, g, or t
agccggtaataaataagaacagcaaataatgaaaacttatgtaggcaaatgttactgaatcagaaagaaaagtggctctttagcatagaactgttatttataatgctgataggcaaggctcatgggtaaatcncatgggtaatagagaaacatggagagaagccacacaaaactct

SEQ ID NO: 709392 - DNA, 417 bp, Homo sapiens
  misc_feature (17)..(17): n is a, c, g, or t
  misc_feature (97)..(97): n is a, c, g, or t
  misc_feature (147)..(147): n is a, c, g, or t
  misc_feature (228)..(228): n is a, c, g, or t
  misc_feature (383)..(383): n is a, c, g, or t
  misc_feature (407)..(407): n is a, c, g, or t
  misc_feature (411)..(411): n is a, c, g, or t
ccctgagggtgcccccnagtgatataacatatgagggaaaagcagaaacaacctaagaaatagactcctgaatgtgggcagattcctagaactgagnaatgcaagaacagccctaataagctgtgtgactaatcactgcatgaaacnggagggagagagttgtgcagcttcccaagaaccttccttaagagattatgtcagttcaccccttgccttcttcttcttcantccttcctccatcctgctgactagaatgaagagatgttgtcatcttggaccatgaggtcaaggccatgagttgaccaacaggatgtaaatgtcatgagggcagggattttgtctgttccccattccccagctgctgtgaccccaatgcctagtcnggtgctaaataaatatttgctaanttantgaatg

SEQ ID NO: 709393 - DNA, 900 bp, Homo sapiens
  misc_feature (329)..(329): n is a, c, g, or t
  misc_feature (349)..(349): n is a, c, g, or t
ggggcgcggaggcgggcggatcacgaggtcaggagatcgagaccatctggctaacacgttgaaaccctgtctgtactaaaagtacaaaaaattagccgggcatggtggcgggcgcctatagtcccagctactctggaggctgaggcaggagtatggcgtgagcccgggaggtggagcttgcggtgagccaagatggcaccactgcactccagcctgggcaacacagcgagactccgtctcaaaaaaaaaacatgaatgatttcacagtgatgaccatgttattgatcataaatagagaaaaatacaggcaggatgagcaaggggtttgnttggagattttaaaaggaanacagagctgttcttataattgtgaacaaaatgtggtctatatctggaaaagttattctctttgactagcagtttcttttcctggtaagctaacagtctcttcaattctgtcaccatcctttccaggagtctgtagataaccttgcctctttttacaagaaatctttctaatgccatcaagcttggtttcctggattctctatcttaattgttggtaccaccatccaccaacccggaaatagaggattgaccctctaccccttgtttacatgaatccctccctgatccccagacagagtctgtcactcttgcctctgtaccactgtgcttcttcttggtgtgtgcttacagtgtttgccaattagttgtaaactaggatataaactctttgagatagaggtccatattttttctttacctaacagcacctggcagaaatgtctggttatgttatgttctcagtaagtgttgctttttaatatgtctaagcccaggccaataaatgcacagttgaaaatttgactccaataaaaaaaaatacaaaactcgagg

SEQ ID NO: 709394 - DNA, 139 bp, Homo sapiens
cttgatgggagacctctggggaaaacataatcaccattttgatagttaattttactgacagttacctccctgcttttccaatgtatttgatatctaaatttttaagtgtcttgattttaagagtaaaaatttttttata

SEQ ID NO: 709395 - DNA, 237 bp, Homo sapiens
tgactagaggatcgtcgacgagcagagatacagcaccactgtcagctcagaccaatgcatctcacttctgacatacacgcgatgacacacattagagaccctgtcgagtgtggcgtggtctttacagcctatgaacctccagggtcttgactcagcttgtcattagtacagccagaataccaagtccgtggtgcgctagatgatatttttaaaaatcagcaaaagggcttaagcacg

SEQ ID NO: 709396 - DNA, 262 bp, Homo sapiens
agcactttacagacagagagtaccatacctcttcattacaagaataaccatgagcacacctcctaactcctcattgtacccaatactaatcgcaagtggcaatcctaaatgcttaccgaacgaaaaatactaggctatatacaactacgcaaaggccccaacgttgtaagcccctacgagactacatacaaccacttcgctgacgccataaaaatctacaacaaaagagccacataaaaccgaaaaatcaaacaacaccctc

SEQ ID NO: 709397 - DNA, 957 bp, Homo sapiens
cagaactagctcagcccatctctaattataaaacatggtttagtgtgttgtttttccttttttctggattaggtctggaacagctctagaatgaacacataaaatttagcaatttaaaatcttcctttactgcaagtttaaatagtgtgtacagatagttctataagcacaatattttaagaaaacaacaagtggctggtctactaggcagccttggtgccacttcagggctcagaacagttcaaagaaacaacaaaactttaggtcgattaaataatactatttctggggaataattatcaacagtatgaccttttaaaatcaaccttatatgggatgcatctgaaccagcagaagctgctagtaatagtgcgctatcttggctagaacttcgccatgtgacaggacaatctcattcaaacgtggttacaatccataatgcagacagtttcctccaaaaacaaaaaccaaagaacgatcaccagacacaacgcgctttcccagtcacacaaccccgtgaatgtgggaaccaagtttatgggaccttcgtgtcccaaaaaccttatggcaggtacaatcttggctctcaggaaagtggtcccaatcccacgctttgcaagttcaacgtgggacactataaaggcggcgcttttcacttccgtatgtggctataccagagttatacccactacactgaacatcgcatgaggcttcacctcttagaactagatttccaagacacggggcttactaccagggttgggacccgtgtttgcaagagcttgcccccaatattgacaagcaaagattgtacgacacggggtgattggggccactaagattggggctttcccaattaggtgtaacaccggcaaaacatacccggtgacgtcaaatacattgggcatggaacgttacacgtggcctcacaggctgcaatatacccggttgcgccag

SEQ ID NO: 709398 - DNA, 212 bp, Homo sapiens
attgttgcaactcaagctcgaagttcacgcgcagatacgccggagggaacatcatcctcgacgtgtgcatcaacaaggacagccgggcgagaccacgcgtgcggattcggatcaacaccaagcacgtaaagacccaggtactgttcgagaacggcggcacggtgttaatcggcggcatcttcgagcaggtcgaccggaataaggtgtcgcaa

SEQ ID NO: 709399 - DNA, 641 bp, Homo sapiens
tgcgccgtcccccagggtgcccccttggctctcctgcacacgtaccgaggggatgtcccctcccactctggacaggttccttaaccctctctttcgtaaatataaaaatagttcctgcctcatgagacggctctaaaaattaaatagtaaagccctcagcatactgcctgcttaagagccatctctcagaaaataagtttgttcttgtaataataaacaacaacttgagtccatactgagcttcctgcttcaaacgccactggggcggaccagccccacgtctcctccctggttgcacacgggcagggctgcagcttccccatggggcctgcaccatggtgggacggcctgtgcgccccaggccccggatgccccggccttgctccagacacgtggccgtcagcctccaagggccctgtgttcacaaagtcccttccattttccaccccaagctgacaaagacgcagctgggtgaccccgaagtgaggggtgagatgtgggttaccagcccctccaccaccctctcctcccggccagcgagaggcaaagaaggaagccagggcctgtggggtgcccacgctggtgagaggcagaggcctctgggagagacgggctccgtgctcagccccgggcacgctccc

SEQ ID NO: 709400 - DNA, 800 bp, Homo sapiens
tttttcccccccccgtcccccttccccccacacacacccaaacctttctcctgcctctctgacggaacatccgtcccccagcgctctcaatcttaatgaagaattgcgagatattcctcaagctgcgaaagtaaacatgactgagctggacaaagaaataagtaccttgagaagtggcttgaaagcattagagacagagctggaatatcagaagtctcagcccccacagaccggagataagtttgcgtctgttgacagccacttcatcacactttccaccttcatccttctctgatgatgaagaccttttagcagaagctaacgacctgtttactaaagtccccgaaatactcttggggaagaggctgccctacctcaccccgtccgagatctctggcattaatgatcaatcaaccacacccgggatataaatccaccgggatgtcctctctctgagaccaaattatgacgaagaatacctttgccgctcttctggcccctatctcctcccctcctccttttcctgtcacccattcttctgtctcgttcccgtcccaccctctcctccgcgcatatgtttcttcccccacgacctttatctccccttcactcaccatgtttttcacatccacctatttcgccttccccccttcttaatcttccatccccctatattctattctctcaccatacctctccacttatacccccttgccttcccctatcccacacatcctcacctcccgctatccccacatcgaactttacctataatccgccccccaaccccctctccccat

SEQ ID NO: 709401 - DNA, 139 bp, Homo sapiens
gccacgctgcacctgccgtcacaaaggccttcgatacgggataatcctatttattacctcagaagtatttttcttcgcaggaatttttctagagccttttaccactcgagcctagcccctaccccccaactaggagggc

SEQ ID NO: 709402 - DNA, 1944 bp, Homo sapiens
  misc_feature (8)..(8): n is a, c, g, or t
gccccgcngcggtcttccgagccgcaggcgcaggcccagctgagcggccgccgagcgggtgcgggtgcgggcgcatcggccatcaccgcgcggccgcgcagcggacaccgtgcgtaccggcctgcggcgcccggccaccggggcggaccgcggaacccgaggccatgtcccatgaaaagagttttttggtgtctggggacaactatcctccccccaaccctggatatccgggggggccccagccacccatgcccccctatgctcagcctccctaccctggggccccttacccacagccccctttccagccctccccctacggtcagccagggtacccccatggccccagcccctacccccaagggggctacccacagggtccctacccccaagggggctacccacagggcccctacccacaagagggctacccacagggcccctacccccaagggggctacccccaggggccatatccccagagccccttcccccccaacccctatggacagccacaggtcttcccaggacaagaccctgactgtgagtctcaggaagggaggggtggggtggccgggagggcagggggaggtgcttgtgagtggcgctgacccagcctgtctgcttctcagcaccccagcatggaaactaccaggaggagggtcccccatcctactatgacaaccaggacttccctgccaccaactgggatgacaagagcatccgacaggccttcatccgcaaggtgttcctagtgctgaccttgcagctgtcggtgaccctgtccacggtgtctgtgttcacttttgttgcggaggtgaagggctttgtccgggagaatgtctggacctactatgtctcctatgctgtcttcttcatctctctcatcgtcctcagctgttgtggggacttccggcgaaagcacccctggaaccttgttgcactgtcggtcctgaccgccagcctgtcgtacatggtggggatgatcgccagcttctacaacaccgaggcagtcatcatggccgtgggcatcaccacagccgtctgcttcaccgtcgtcatcttctccatgcagacccgctacgacttcacctcatgcatgggcgtgctcctggtgagcatggtggtgctcttcatcttcgccattctctgcatcttcatccggaaccgcatcctggagatcgtgtacgcctcactgggcgctctgctcttcacctgcttcctcgcagtggacacccagctgctgctggggaacaagcagctgtccctgagcccagaagagtatgtgtttgctgcgctgaacctgtacacagacatcatcaacatcttcctgtacatcctcaccatcattggccgcgccaaggagtagccgagctccagctcgctgtgcccgctcaggtggcacggctggcctggaccctgcccctggcacggcagtgccagctgtacttcccctctctcttgtccccaggcacagcctagggaaaaggatgcctctctccaaccctcctgtatgtacactgcagatacttccatttggacccgctgtggccacagcatggcccctttagtcctcccgcccccgccaaggggcaccaaggccacgtttccgtgccacctcctgtctactcattgttgcatgagccctgtctgccagcccaccccagggactgggggcagcaccaggtcccggggagagggattgagccaagaggtgagggtgcacgtcttccctcctgtcccagctccccagcctggcgtagagcacccctcccctcccccccacccccctggagtgctgccctctggggacatgcggagtgggggtcttatccctgtgctgagccctgagggcagagaggatggcatgtttcaggggagggggaagccttcctctcaatttgttgtcagtgaaattccaataaatgggatttgctctctgca

SEQ ID NO: 709403 - DNA, 1393 bp, Homo sapiens
ctcggtacccccccgactagcccgacagccctccccgactagcccgacagccacaggtcttcccaggacaagaccctgactcaccccagcatggaaactaccaggaggagggtcccccatcctactatgacaaccaggacttccctgccaccaactgggatgacaagagcatccgacaggccttcatccgcaaggtgttcctagtgctgaccttgcagctgtcggtgaccctgtccacggtgtctgtgttcacttttgttgcggaggtgaagggctttgtccgggagaatgtctggacctactatgtctcctatgctgtcttcttcatctctctcatcgtcctcagctgttgtggggacttccggcgaaagcacccctggaaccttgttgcactgtcggtcctgaccgccagcctgtcgtacatggtggggatgatcgccagcttctacaacaccgaggcagtcatcatggccgtgggcatcaccacagccgtctgcttcaccgtcgtcatcttctccatgcagacccgctacgacttcacctcatgcatgggcgtgctcctggtgagcatggtggtgctcttcatcttcgccattctctgcatcttcatccggaaccgcatcctggagatcgtgtacgcctcactgggcgctctgctcttcacctgcttcctcgcagtggacacccagctgctgctggggaacaagcagctgtccctgagcccagaagagtatgtgtttgctgcgctgaacctgtacacagacatcatcaacatcttcctgtacatcctcaccatcattggccgcgccaaggagtagccgagctccagctcgctgtgcccgctcaggtggcacggctggcctggaccctgcccctggcacggcagtgccagctgtacttcccctctctcttgtccccaggcacagcctagggaaaaggatgcctctctccaaccctcctgtatgtacactgcagatacttccatttggacccgctgtggccacagcatggcccctttagtcctcccgcccccgccaaggggcaccaaggccacgtttccgtgccacctcctgtctactcattgttgcatgagccctgtctgccagcccaccccagggactgggggcagcaccaggtcccggggagagggattgagccaagaggtgagggtgcacgtcttccctcctgtcccagctccccagcctggcgtagagcacccctcccctcccccccacccccctggagtgctgccctctggggacatgcggagtgggggtcttatccctgtgctgagccctgagggcagagaggatggcatgtttcaggggagggggaagccttcctctcaatttgttgtcagtgaaattccaataaatgggatttgctctctgca

SEQ ID NO: 709404 - DNA, 625 bp, Homo sapiens
  misc_feature (398)..(399): n is a, c, g, or t
tcaagtttacccatttttattttttataaaacaagctacaaatactttttcttgctcccgcctccccaagggaaaaccacacagcacagccgtacgcccatctgtgagagagaagttggctggtcagattctaaactcctacataaaggtggcttctctgtgcacatttccttctggccaggaaatgggactggagtctgctgggagggccatccagctccagcctgctgcgtgcggtgtttctgttcaaggctccaagagaaggtgttcttcccaccttaccatgcaggacagggttactggtcatcatgggacagcatgtgtgacttccaccaggacagcgggaaccttctggagctgagacttcatcgaatcaagctccgagaaggctatgttcnncacatgtgggcagcattatgtggtccatgccttccagacccaaaatagagcagggtttaccagggtggatgcatttacaggatactgagatggaaacccagggaaggcaggttgaggagagcaagccagcaaaagaaccagtcctggcctccctcactgccatcatggctgaccatggaagagctgctaagtatcacttgctgctctgactgaaggacctctgaat

SEQ ID NO: 709405 - DNA, 2011 bp, Homo sapiens
  misc_feature (158)..(158): n is a, c, g, or t
  misc_feature (216)..(216): n is a, c, g, or t
  misc_feature (784)..(784): n is a, c, g, or t
  misc_feature (816)..(816): n is a, c, g, or t
  misc_feature (884)..(884): n is a, c, g, or t
  misc_feature (923)..(923): n is a, c, g, or t
  misc_feature (928)..(929): n is a, c, g, or t
  misc_feature (932)..(932): n is a, c, g, or t
  misc_feature (967)..(967): n is a, c, g, or t
  misc_feature (975)..(975): n is a, c, g, or t
  misc_feature (993)..(993): n is a, c, g, or t
  misc_feature (997)..(997): n is a, c, g, or t
  misc_feature (1055)..(1055): n is a, c, g, or t
  misc_feature (1224)..(1224): n is a, c, g, or t
  misc_feature (1345)..(1345): n is a, c, g, or t
  misc_feature (1352)..(1352): n is a, c, g, or t
  misc_feature (1426)..(1426): n is a, c, g, or t
  misc_feature (1444)..(1444): n is a, c, g, or t
  misc_feature (1479)..(1479): n is a, c, g, or t
  misc_feature (1504)..(1504): n is a, c, g, or t
  misc_feature (1519)..(1519): n is a, c, g, or t
  misc_feature (1628)..(1628): n is a, c, g, or t
  misc_feature (1631)..(1631): n is a, c, g, or t
  misc_feature (1677)..(1677): n is a, c, g, or t
  misc_feature (1684)..(1684): n is a, c, g, or t
  misc_feature (1691)..(1691): n is a, c, g, or t
  misc_feature (1701)..(1701): n is a, c, g, or t
  misc_feature (1753)..(1753): n is a, c, g, or t
  misc_feature (1792)..(1792): n is a, c, g, or t
  misc_feature (1847)..(1847): n is a, c, g, or t
  misc_feature (1866)..(1866): n is a, c, g, or t
  misc_feature (1877)..(1877): n is a, c, g, or t
  misc_feature (1954)..(1954): n is a, c, g, or t
  misc_feature (1972)..(1972): n is a, c, g, or t
  misc_feature (1987)..(1987): n is a, c, g, or t
aggatgcgcgtacagatagatggcgctcgaggtcgagaagctgcacggacgctacaacaggacgacgacgacgcagacacgtcatcacgccgagggacagaagactcagctgagcgacggagcacggacgcgcagcagcaggcacggacgcagagagngcgcgacggcgtagacgacacaagcgaggaaccacgcaagacacacacacatgccagngctctacgacgtcagcagcgtcgggaatgaacgggacggagaaagcgtctgaggaccgaacaagagagcaactagacacgcacagcagcgacacccagagccgacaaccacaccaacaccacaagacacagacacgcccaaccaccgctaccgcacacgtctgatacatcgcactcagcagtcgcgtacacccaccgactagccaccacagcgcacaaccacactacacgccaccgagctagcagcgagccgcagcgtcgctcgccgaccagaaccccaccgcagctaggacgattccaacaagcgcagcgccacgtgctacacactgccacacgccaaccctcgcgcctccatcacagtacagtcactacgcggacacgacaagcgcacacacaatcacacacacacgcactacgacagcactacaccataacagcacactcatcacctcacaacgacaccaccacacacgcacaaccaacaaatgcgtctgtgggggatgaaaggactcaccccctctaaaaacaccacgggggccccctgagcgcaggctcatgcgagtggggcnccacgaggtagtggcccgccgtggagcgacgnccttccatatttaagtcggacaaacaaacctagcatttaatagagcgacgttgggtgtgtcgaaacancttcttccctcctaccagccgtgggagagtggatgggtngcccnntcntggcgtcgctgaacaggggcagggctaaccacaanctatcttntctccgccgggggagggncgcngacacccgcaggtgcataatatgagtgagaaaatccacccatcccgacagagcccagnagttcctcgtccaaaaagaccccccgtcgtgttgatttaactcccgtggtaaatatcccccccaaccggggtgaaagaaccaaactaaactaccgcccctcagttttaattaaaccgaggtaggctcctcccaaatctagacaacaagtctcctccacccaccagcagngtcttcatctgccgcttaagcatctaccacgccacgcccaagacatgtgggatgaacaacacacgttttaatcaccacacgaccacgagaggtgcgtatttaaacacacatttataaatcnagccagnagggtggagccccctacgggcaacagacctcccatttaataacgtggtggaacaagcatacaggcaaacctcgntcttctccttgtggtggnagaacaccaattagttaataatcccatcccccccntcctctgtggtggctgctggtactnccactctaggaggantgcctcctaacacacacacaagcaagccttatactaaccagcgcgcacaaaccactgacttttttacactgccttcttataacactcgcgggcgagcgtgtttagatanaanaccaccaccccctcctggatggtgctgcccgtaataagacaaaccncggggcngcggggncgcgcggcgngacaaaaccacaactcatcattcctggcgtgcagacaatcctctttgtgggntgaacactcattcttacgtacagaaacgattataaaacntacgtttctgtcttctaaatcgtggactttttaatctcaataccagatagccctncgcgcacgaaagataaacnatggtgagcgnctccgcctacaatcatccttttttaattgcctcaacactcgtcttttaataatacacatttttatctcagtggggcngcgtcccgatacatccanaataacaggtgggtncggtggagctgacacacacgtcct

SEQ ID NO: 709406 - DNA, 4479 bp, Homo sapiens
  misc_feature (4473)..(4473): n is a, c, g, or t
ttttttttcagagttcccgggtcccttccgcctgggttcacgttcacgtttattcaaacaacagagccgactcgggcgaggtctgggagcggcgggcgggcggtgtcgcctcctgggctctgctgacccctggtggtggggtcggcccaggctgggacctagcccggcccccctcggccgctgctgaccgccatcccccacaccgccttctggagcccgcagagggaggcaggggcgtccccggggacagctcaggcggccacagttgggggcggggagcatcagcctgtgcggagctgggagcctgggaagcaggaggccagagggtggccccttcggttaagtgtctggggagcggcccgggagcccagaggggtcgtcgggggaagcgcggggcacgtgctcgcaggtgatgaggtgggtgggcagcgcctgggtgtcgtggaagatgacgaagatgctgggctggcagatgcagtccacggcgctgtcgtagcgcaggagcacgtggccaggaccccgcagagggggcgcccgcagaccgcggcggccctgcccgtagtcgccagtcagcacccgtgccacgaacaccgccttatggccatcggcgttggggggcgagtagcggtcctgcaccgacagggaggcgcgcctggcgaaatacacgcccttcccgtagaccgtggcgttgcggccgcagaagctgcggttgaagccgtgggcgcagatgtcaggcactgccggtgccgtcgtgccgtggtacagcacctgctccaccgggcgccgctcgcatcgctgcagcaggcgctcccggtacagctcatactgctgctgcagcagcgggtgcgacacgcgctccacacgaacgacgcggatgctgctgcgggcagcgtccagggtgtcgtagaaggcccgcaccacctcctggaactccccggtgttctctgccagacgctccaggttgttccagggccccttcagcgtctgccccgccaaggtagggcctgaagctgccaagggaaaggccaaactctgatcccaggggccagccagaagtgccaccaagtggcgggcagcacgggcagggtgggccccgaagccacggaggatggtgcagtcaccacgcagggcaacactcacaccatggcaccgctccaggcgagcacgcagctctgcaggcagtgtgcggcgccagggccccaccgtctcctcctggacgtggacctccaaggcagccctgagcgcccggtccagctcctccacatcctgctcaaaggccgagtgcaccaccagctgggccttgccatcagtccccccatctgggggctcttctgcctccaacgggggctgctccagcagggagagggttagggcttgccgcagggcagcagcctcctcctgctcagccacctgaccttgaggctccagtgaccggtggagggccagctgcagagcggcctcctcctccagccacctgggtgccacagtgctgggggccacaggctcctcctcctcatgccctggggtcgcctcctcctctggctgctcctgaggcccttcctcctccagctcccgaggcagccagtcctccccgtctaggtctaggccctccagggtggccagcagttctcggacctcctccaggctcacgtcctcctggtcaccacctgtactgtctggggtccacagggtgtgggcgttgccagggagcactgggagggcctcggtagggtccacctcttcaaggcctgtgtccaacgtggctgtggccaggcgctctgtcccaaagacacactggaactgagcctccagcccctggagaaggtgctgcccttctgggcccaggagaaacctggcgctgcccgggtgctccaggcacaacacatggcagctaatgctgcccagcaggctccgcagaaactcctcagccgcctggcaggaagcctgggctccacagagccgaaagccagtcatatccggtccttcaagtggcaagagagcgacgtctcccaggcccgcaagaaggtcctcatggtagagctgcaggaagcgcatcgcccctggctccatcaatagcaccatctccaccaggccctcctgccctgccagcttcacacatcctgggctcacaggccctgccttctccagagaccccatggtgatctccatgggacccaccagcccctcttgctctggtgagtccatggcaatttccaccaggccctcctgccccggcaaccccttagaggtctccactgggcctgcagaccccacaggccccaggctcatgggcccctcctgttcctgcaaccccacaggcctcaggcttaccagcccctcatgttccagagaccccatgggcatcgagctgacttgctctgcctgtcccagagaccccatgggacctgtcctcagagaggtccctgactgccctggttcctggccagagcctgttgtcataatccctctaccctgcaccatgggacctgtcctcagagaggcccctgactgccctggttcctcgccagagcccattgtcacagtccctgcaccctgcagagccgtcaccaaccctccggtcctcaggagagcatgcttggtagccctaggcccctgggtggacgggtggtcccctccactggtgttctcagccagctcctcgggctccaggatgtcgtagtgggggacaaggctcagctctgagccctgcaaccggtgctcctgctgcaacactcgttctgccacttgccactgctggaaggaggcaacagtgcccaggggcccgggtaggcgttgcaggtcctccaggggccccccaccactgcggcgctcattctccaggtacaactccagcaacagcaggtccacagaggcaccatcccccaccacacgcaccgctcgggcctggggaacccgggccagggacaccaaggtcccctccaggcccagattctgggcctgctcctccaggacacggacatctgcctcagaaaggggcttgggcaactggaccagagcccggtctggccgggggctggccaaggcacagcaaggctgtactgggagccccgaggcccgcagcaaggcctggacatgctgctccaagcgctggggcgtggtgccagggggcagtccttggagcagcaggcgtgcaggggctcgtggtggagctggccgcaggctcagctgggcaccatgtagttcgtgatctgcctgggccaagaccctctcggcgtctgcaggctctctgaaggtgaggacgcccccacagcccagtctctgccagctcaacacaggtccccctccagagcgtcggcggttttcaaagtagagagtgagcagctcgtcgggcacggcagggggcagtccacggacctccactgccacccctgcctctgcctccgccattgcaaccattccccgtggccgctaggcagcctcaggccatgagctcagccaggactcctgtgcctgcccctcagcaagcctaaccccggcctgcggcgcccggccaccggtgagtccccggcccgagcccaggagcgcctctgacccgctgcgccgcgcggcctgccgcccccgcccccgcccccacgcggatcttgcgcatccgagcgtggccgcctcgggggcggaccgcggaacccgaggccatgtcccatgaaaagagttttttggtgtctggggacaactatcctccccccaaccctggatatccgggggggccccagccacccatgcccccctatgctcagcctccctaccctggggccccttacccacagccccctttccagccctccccctacggtcagccagggtacccccatggccccagcccctacccccaagggggctacccacagggtccctacccccaagggggctacccacagggcccctacccacaagagggctacccacagggcccctacccccaagggggctacccccaggggccatatccccagagccccttcccccccaacccctatggacagccacaggtcttcccaggacaagaccctgactcaccccagcatggaaactaccaggaggagggtcccccatcctactatgacaaccaggacttccctgccaccaactgggatgacaagagcatccgacaggccttcatccgcaaggtgttcctagtgctgaccttgcagctgtcggtgaccctgtccacggtgtctgtgttcacttttgttgcggaggtgaagggctttgtccgggagaatgtctggacctactatgtctcctatgctgtcttcttcatctctctcatcgtcctcagctgttgtggggacttccggcgaaagcacccctggaaccttgttgcactgtcggtcctgaccgccagcctgtcgtacatggtggggatgatcgccagcttctacaacaccgaggcagtcatcatggccgtgggcatcaccacagccgtctgcttcaccaggagcacgcccatgcagncgacgc

SEQ ID NO: 709407 - DNA, 154 bp, Homo sapiens
gcgcacctatttttggctaaacctgaggcggcactgccccagaatgtgctgggcacctctgtggcccacgtccttcaccggcacctgtggtgagggcctcatagctgctgacgtgtgttgtgcataaagacctatgtgtgtggagatacttatc

SEQ ID NO: 709408 - DNA, 354 bp, Homo sapiens
ttgcttcctcctggatacgcgcagcagcgaaatgctcttcatgacgtcggctgccaggataaagtacttgacgctgatcatctggtgtatgtagagctgcgtgtcaataaaggccatgcccgtcagttcactggcccgcaggaacctgcctcatgcagggggaggaggtcacgtgccggagggcggctcttgatcatggctgtgattgaggtggtgcccgagcctggccagcccttgagcacgtaaccagttccctgtcctttacgagccggcgccgaagtgcgcccgtgaccgccttgtgccactgcaatggccacctgatgtcggccatcgaccaaaacggttctgggtacc

SEQ ID NO: 709409 - DNA, 1376 bp, Homo sapiens
cttaggctagtagaggctgggtttaatcggccgaggaaggtccttcccagttacagacctgactcaccccagcatggaaactaccaggaggagggtcccccatcctactatgacaaccaggacttccctgccaccaactgggatgacaagagcatccgacaggccttcatccgcaaggtgttcctagtgctgaccttgcagctgtcggtgaccctgtccacggtgtctgtgttcacttttgttgcggaggtgaagggctttgtccgggagaatgtctggacctactatgtctcctatgctgtcttcttcatctctctcatcgtcctcagctgttgtggggacttccggcgaaagcacccctggaaccttgttgcactgtcggtcctgaccgccagcctgtcgtacatggtggggatgatcgccagcttctacaacaccgaggcagtcatcatggccgtgggcatcaccacagccgtctgcttcaccgtcgtcatcttctccatgcagacccgctacgacttcacctcatgcatgggcgtgctcctggtgagcatggtggtgctcttcatcttcgccattctctgcatcttcatccggaaccgcatcctggagatcgtgtacgcctcactgggcgctctgctcttcacctgcttcctcgcagtggacacccagctgctgctggggaacaagcagctgtccctgagcccagaagagtatgtgtttgctgcgctgaacctgtacacagacatcatcaacatcttcctgtacatcctcaccatcattggccgcgccaaggagtagccgagctccagctcgctgtgcccgctcaggtggcacggctggcctggaccctgcccctggcacggcagtgccagctgtacttcccctctctcttgtccccaggcacagcctagggaaaaggatgcctctctccaaccctcctgtatgtacactgcagatacttccatttggacccgctgtggccacagcatggcccctttagtcctcccgcccccgccaaggggcaccaaggccacgtttccgtgccacctcctgtctactcattgttgcatgagccctgtctgccagcccaccccagggactgggggcagcaccaggtcccggggagagggattgagccaagaggtgagggtgcacgtcttccctcctgtcccagctccccagcctggcgtagagcacccctcccctcccccccacccccctggagtgctgccctctggggacatgcggagtgggggtcttatccctgtgctgagccctgagggcagagaggatggcatgtttcaggggagggggaagccttcctctcaatttgttgtcagtgaaattccaataaatgggatttgctctctgca

SEQ ID NO: 709410 - DNA, 812 bp, Homo sapiens
  misc_feature (337)..(338): n is a, c, g, or t
  misc_feature (350)..(350): n is a, c, g, or t
  misc_feature (352)..(352): n is a, c, g, or t
  misc_feature (383)..(383): n is a, c, g, or t
  misc_feature (386)..(386): n is a, c, g, or t
  misc_feature (399)..(399): n is a, c, g, or t
  misc_feature (402)..(402): n is a, c, g, or t
  misc_feature (423)..(423): n is a, c, g, or t
atttgcagtttttcattttaaaaagtccataccttatatatgcacttaatttgttggggctttacatactttatcaatgtgtctttctaagaaatcaagtaatgaatccaactgcttaaagttggtattaataaaaagacaaccacatagttcgtttaccttcaaactttaggtttttttaatgatatactgatcttcattaccaataggcaaattaatcaccctaccaactttactgtcctaacatggtttaaaagaaaaaatgacaccatcttttattctttttttttttttttttggaaagagagtctactcggccgcccaaatggggtgtgcnnggcgccaatctngngctcactggcaacctctacctccggggtccnggngatctcttgcctnagnctcccgagtggcggggatacnggcttgtgccaccatgcccagttaatttgggattttagtaaaaaccctgtctcggtgtaaaattccggaatttacggtgggcatgggggtgtaaccctgtagtcctagctactcgggaggctgaggcaggaaaatagctgaaccggggagtcggaggttgcaaccaagatcgccccatgtgcggccccagggtggagattagaccggaaaattccgcgtctcccaaaaaatacaacaaatatcacacttctatatctcctctgaactttttaaagaaccggtaagggttttatcaacaaggggtttgggggacacaagaatatctctggagatccgggggatcttcagcgccaaagttttcccgtgtagcaccaaatatgtgtggcacc

SEQ ID NO: 709411 - DNA, 397 bp, Homo sapiens
  misc_feature (26)..(26): n is a, c, g, or t
  misc_feature (57)..(57): n is a, c, g, or t
  misc_feature (148)..(148): n is a, c, g, or t
tgtggcaccgtttctccctccacagngccaaagccatagtgtccggtcccaaggacnaggctcttcctagtgctaggagaggtatgacagcctctcacctgtgatccccacagctcacaggtgagaggctgctcatacctgtgagctntggggatcacaaggctgcctgcctcagtcttggagtcctgttgggtgaatgaggcagatgggaaagagcctcaccagcagctgcttttggagcaggggtccaaggaagagagggtggcctcgacatcaaactgcctggatttttctaccaccctgttacatcataacaacttctgaaacacacaccagccctgagttctgggctcatttgaagcctggaatagcaataaatctttttaacttgcggaca

SEQ ID NO: 709412 - DNA, 129 bp, Homo sapiens
ttcgatctagaggatcccttatgttgggacggcgcagacagactggcaggagcacacaccgcagtctgtgcgctgagtcggagccagaggccgcggggacacccggtgcatgtcacgcccccaacttga

SEQ ID NO: 709413 - DNA, 123 bp, Homo sapiens
  misc_feature (60)..(60): n is a, c, g, or t
  misc_feature (103)..(103): n is a, c, g, or t
gcgaggtggctcagacatggaccgcggcgagcaaggtcatgctgaagacagagccggtgncgaggaaggagaggatgctgttaccatgctcagtgctccagangcgctgacggaagaggagca

SEQ ID NO: 709414 - DNA, 3859 bp, Homo sapiens
ttttttttcagagttcccgggtcccttccgcctgggttcacgttcacgtttattcaaacaacagagccgactcgggcgaggtctgggagcggcgggcgggcggtgtcgcctcctgggctctgctgacccctggtggtggggtcggcccaggctgggacctagcccggcccccctcggccgctgctgaccgccatcccccacaccgccttctggagcccgcagagggaggcaggggcgtccccggggacagctcaggcggccacagttgggggcggggagcatcagcctgtgcggagctgggagcctgggaagcaggaggccagagggtggccccttcggttaagtgtctggggagcggcccgggagcccagaggggtcgtcgggggaagcgcggggcacgtgctcgcaggtgatgaggtgggtgggcagcgcctgggtgtcgtggaagatgacgaagatgctgggctggcagatgcagtccacggcgctgtcgtagcgcaggagcacgtggccaggaccccgcagagggggcgcccgcagaccgcggcggccctgcccgtagtcgccagtcagcacccgtgccacgaacaccgccttatggccatcggcgttggggggcgagtagcggtcctgcaccgacagggaggcgcgcctggcgaaatacacgcccttcccgtagaccgtggcgttgcggccgcagaagctgcggttgaagccgtgggcgcagatgtcaggcactgccggtgccgtcgtgccgtggtacagcacctgctccaccgggcgccgctcgcatcgctgcagcaggcgctcccggtacagctcatactgctgctgcagcagcgggtgcgacacgcgctccacacgaacgacgcggatgctgctgcgggcagcgtccagggtgtcgtagaaggcccgcaccacctcctggaactccccggtgttctctgccagacgctccaggttgttccagggccccttcagcgtctgccccgccaaggtagggcctgaagctgccaagggaaaggccaaactctgatcccaggggccagccagaagtgccaccaagtggcgggcagcacgggcagggtgggccccgaagccacggaggatggtgcagtcaccacgcagggcaacactcacaccatggcaccgctccaggcgagcacgcagctctgcaggcagtgtgcggcgccagggccccaccgtctcctcctggacgtggacctccaaggcagccctgagcgcccggtccagctcctccacatcctgctcaaaggccgagtgcaccaccagctgggccttgccatcagtccccccatctgggggctcttctgcctccaacgggggctgctccagcagggagagggttagggcttgccgcagggcagcagcctcctcctgctcagccacctgaccttgaggctccagtgaccggtggagggccagctgcagagcggcctcctcctccagccacctgggtgccacagtgctgggggccacaggctcctcctcctcatgccctggggtcgcctcctcctctggctgctcctgaggcccttcctcctccagctcccgaggcagccagtcctccccgtctaggtctaggccctccagggtggccagcagttctcggacctcctccaggctcacgtcctcctggtcaccacctgtactgtctggggtccacagggtgtgggcgttgccagggagcactgggagggcctcggtagggtccacctcttcaaggcctgtgtccaacgtggctgtggccaggcgctctgtcccaaagacacactggaactgagcctccagcccctggagaaggtgctgcccttctgggcccaggagaaacctggcgctgcccgggtgctccaggcacaacacatggcagctaatgctgcccagcaggctccgcagaaactcctcagccgcctggcaggaagcctgggctccacagagccgaaagccagtcatatccggtccttcaagtggcaagagagcgacgtctcccaggcccgcaagaaggtcctcatggtagagctgcaggaagcgcatcgcccctggctccatcaatagcaccatctccaccaggccctcctgccctgccagcttcacacatcctgggctcacaggccctgccttctccagagaccccatggtgatctccatgggacccaccagcccctcttgctctggtgagtccatggcaatttccaccaggccctcctgccccggcaaccccttagaggtctccactgggcctgcagaccccacaggccccaggctcatgggcccctcctgttcctgcaaccccacaggcctcaggcttaccagcccctcatgttccagagaccccatgggcatcgagctgacttgctctgcctgtcccagagaccccatgggacctgtcctcagagaggtccctgactgccctggttcctggccagagcctgttgtcataatccctctaccctgcaccatgggacctgtcctcagagaggcccctgactgccctggttcctcgccagagcccattgtcacagtccctgcaccctgcagagccgtcaccaaccctccggtcctcaggagagcatgcttggtagccctaggcccctgggtggacgggtggtcccctccactggtgttctcagccagctcctcgggctccaggatgtcgtagtgggggacaaggctcagctctgagccctgcaaccggtgctcctgctgcaacactcgttctgccacttgccactgctggaaggaggcaacagtgcccaggggcccgggtaggcgttgcaggtcctccaggggccccccaccactgcggcgctcattctccaggtacaactccagcaacagcaggtccacagaggcaccatcccccaccacacgcaccgctcgggcctggggaacccgggccagggacaccaaggtcccctccaggcccagattctgggcctgctcctccaggacacggacatctgcctcagaaaggggcttgggcaactggaccagagcccggtctggccgggggctggccaaggcacagcaaggctgtactgggagccccgaggcccgcagcaaggcctggacatgctgctccaagcgctggggcgtggtgccagggggcagtccttggagcagcaggcgtgcaggggctcgtggtggagctggccgcaggctcagctgggcaccatgtagttcgtgatctgcctgggccaagaccctctcggcgtctgcaggctctctgaaggtgaggacgcccccacagcccagtctctgccagctcaacacaggtccccctccagagcgtcggcggttttcaaagtagagagtgagcagctcgtcgggcacggcagggggcagtccacggacctccactgccacccctgcctctgcctccgccattgcaaccattccccgtggccgctaggcagcctcaggccatgagctcagccaggactcctgtgcctgcccctcagcaagcctaaccccggcctgcggcgcccggccaccggggcggaccgcggaacccgaggccatgtcccatgaaaagagttttttggtgtctggggacaactatcctccccccaaccctggatatcctccccctacggtcagccagggtacccccatggcccacagacccctaaccacaccaaagggcggatacagccgaacagcggatacaccagcagcgccacaagggaggactacaccaagaggggacccccagaagcacagaagaaggagcctaacacagaaaggacgacataaacacaacaaagaaggaaatagaaaacgagaggaaaaagagaccacaagacgaacgaaaaagccaaaaagacaaacagagaca

SEQ ID NO: 709415 - DNA, 1185 bp, Homo sapiens
  misc_feature (67)..(67): n is a, c, g, or t
  misc_feature (71)..(73): n is a, c, g, or t
  misc_feature (77)..(77): n is a, c, g, or t
  misc_feature (88)..(88): n is a, c, g, or t
tcggcacgaggaagctggcgatcatccccaccatgtacgacaggctggcggtcaggaccgacagtgnaacnnngttncaggggtgctntcgccggaagtccccacaacagctgaggacgatgagagagatgaagaagacagcataggagacttccggcgaaagcacccctggaaccttgttgcactgtcggtcctgaccgccagcctgtcgtacatggtggggatgatcgccagcttctacaacaccgaggcagtcatcatggccgtgggcatcaccacagccgtctgcttcaccgtcgtcatcttctccatgcagacccgctacgacttcacctcatgcatgggcgtgctcctggtgagcatggtggtgctcttcatcttcgccattctctgcatcttcatccggaaccgcatcctggagatcgtgtacgcctcactgggcgctctgctcttcacctgcttcctcgcagtggacacccagctgctgctggggaacaagcagctgtccctgagcccagaagagtatgtgtttgctgcgctgaacctgtacacagacatcatcaacatcttcctgtacatcctcaccatcattggccgcgccaaggagtagccgagctccagctcgctgtgcccgctcaggtggcacggctggcctggaccctgcccctggcacggcagtgccagctgtacttcccctctctcttgtccccaggcacagcctagggaaaaggatgcctctctccaaccctcctgtatgtacactgcagatacttccatttggacccgctgtggccacagcatggcccctttagtcctcccgcccccgccaaggggcaccaaggccacgtttccgtgccacctcctgtctactcattgttgcatgagccctgtctgccagcccaccccagggactgggggcagcaccaggtcccggggagagggattgagccaagaggtgagggtgcacgtcttccctcctgtcccagctccccagcctggcgtagagcacccctcccctcccccccacccccctggagtgctgccctctggggacatgcggagtgggggtcttatccctgtgctgagccctgagggcagagaggatggcatgtttcaggggagggggaagccttcctctcaatttgttgtcagtgaaattccaataaatgggatttgctctctgca

SEQ ID NO: 709416 - DNA, 1062 bp, Homo sapiens
  misc_feature (67)..(67): n is a, c, g, or t
  misc_feature (71)..(73): n is a, c, g, or t
  misc_feature (77)..(77): n is a, c, g, or t
  misc_feature (88)..(88): n is a, c, g, or t
tcggcacgaggaagctggcgatcatccccaccatgtacgacaggctggcggtcaggaccgacagtgnaacnnngttncaggggtgctntcgccggaagtccccacaacagctgaggacaacaccgaggcagtcatcatggccgtgggcatcaccacagccgtctgcttcaccgtcgtcatcttctccatgcagacccgctacgacttcacctcatgcatgggcgtgctcctggtgagcatggtggtgctcttcatcttcgccattctctgcatcttcatccggaaccgcatcctggagatcgtgtacgcctcactgggcgctctgctcttcacctgcttcctcgcagtggacacccagctgctgctggggaacaagcagctgtccctgagcccagaagagtatgtgtttgctgcgctgaacctgtacacagacatcatcaacatcttcctgtacatcctcaccatcattggccgcgccaaggagtagccgagctccagctcgctgtgcccgctcaggtggcacggctggcctggaccctgcccctggcacggcagtgccagctgtacttcccctctctcttgtccccaggcacagcctagggaaaaggatgcctctctccaaccctcctgtatgtacactgcagatacttccatttggacccgctgtggccacagcatggcccctttagtcctcccgcccccgccaaggggcaccaaggccacgtttccgtgccacctcctgtctactcattgttgcatgagccctgtctgccagcccaccccagggactgggggcagcaccaggtcccggggagagggattgagccaagaggtgagggtgcacgtcttccctcctgtcccagctccccagcctggcgtagagcacccctcccctcccccccacccccctggagtgctgccctctggggacatgcggagtgggggtcttatccctgtgctgagccctgagggcagagaggatggcatgtttcaggggagggggaagccttcctctcaatttgttgtcagtgaaattccaataaatgggatttgctctctgca

SEQ ID NO: 709417 - DNA, 2189 bp, Homo sapiens
ttttttttcagagttcccgggtcccttccgcctgggttcacgttcacgtttattcaaacaacagagccgactcgggcgaggtctgggagcggcgggcgggcggtgtcgcctcctgggctctgctgacccctggtggtggggtcggcccaggctgggacctagcccggcccccctcggccgctgctgaccgccatcccccacaccgccttctggagcccgcagagggaggcaggggcgtccccggggacagctcaggcggccacagttgggggcggggagcatcagcctgtgcggagctgggagcctgggaagcaggaggccagagggtggccccttcggttaagtgtctggggagcggcccgggagcccagaggggtcgtcgggggaagcgcggggcacgtgctcgcaggtgatgaggtgggtgggcagcgcctgggtgtcgtggaagatgacgaagatgctgggctggcagatgcagtccacggcgctgtcgtagcgcaggagcacgtggccaggaccccgcagagggggcgcccgcagaccgcggcggccctgcccgtagtcgccagtcagcacccgtgccacgaacaccgccttatggccatcggcgttggggggcgagtagcggtcctgcaccgacagggaggcgcgcctggcgaaatacacgcccttcccgtagaccgtggcgttgcggccgcagaagctgcggttgaagccgtgggcgcagatgtcaggcactgccggtgccgtcgtgccgtggtacagcacctgctccaccgggcgccgctcgcatcgctgcagcaggcgctcccggtacagctcatactgctgctgcagcagcgggtgcgacacgcgctccacacgaacgacgcggatgctgctgcgggcagcgtccagggtgtcgtagaaggcccgcaccacctcctggaactccccggtgttctctgccagacgctccaggttgttccagggccccttcagcgtctgccccgccaaggtagggcctgaagctgccaagggaaaggccaaactctgatcccaggggccagccagaagtgccaccaagtggcgggcagcacgggcagggtgggccccgaagccacggaggatggtgcagtcaccacgcagggcaacactcacaccatggcaccgctccaggcgagcacgcagctctgcaggcagtgtgcggcgccagggccccaccgtctcctcctggacgtggacctccaaggcagccctgagcgcccggtccagctcctccacatcctgctcaaaggccgagtgcaccaccagctgggccttgccatcagtccccccatctgggggctcttctgcctccaacgggggctgctccagcagggagagggttagggcttgccgcagggcagcagcctcctcctgctcagccacctgaccttgaggctccagtgaccggtggagggccagctgcagagcggcctcctcctccagccacctgggtgccacagtgctgggggccacaggctcctcctcctcatgccctggggtcgcctcctcctctggctgctcctgaggcccttcctcctccagctcccgaggcagccagtcctccccgtctaggtctaggccctccagggtggccagcagttctcggacctcctccaggctcacgtcctcctggtcaccacctgtactgtctggggtccacagggtgtgggcgttgccagggagcactgggagggcctcggtagggtccacctcttcaaggcctgtgtccaacgtggctgtggccaggcgctctgtcccaaagacacactggaactgagcctccagcccctggagaaggtgctgcccttctgggcccaggagaaacctggcgctgcccgggtgctccaggcacaacacatggcagctaatgctgcccagcaggctccgcagaaactcctcagccgcctggcaggaagcctgggctccacagagccgaaagccagtcatatccggtccttcaagtggcaagagagcgacgtctcccaggcccgcaagaaggtcctcatggtagagctgcaggaagcgcatcgcccctggctccatcaatagcaccatctccaccaggccctcctgccctgccagcttcacacatcctgggctcacaggccctgccttctccagagaccccatggtgatctctggagaaggtccaggtatgccgg

SEQ ID NO: 709418 - DNA, 559 bp, Homo sapiens
cgtcatgggttgtgggatcagaggatctggcgtggcatcccgtagccagtcatgccagctgtacttcccctctctcttgtccccaggcacagcctagggaaaaggatgcctctctccaaccctcctgtatgtacactgcagatacttccatttggacccgctgtggccacagcatggcccctttagtcctcccgcccccgccaaggggcaccaaggccacgtttccgtgccacctcctgtctactcattgttgcatgagccctgtctgccagcccaccccagggactgggggcagcaccaggtcccggggagagggattgagccaagaggtgagggtgcacgtcttccctcctgtcccagctccccagcctggcgtagagcacccctcccctcccccccacccccctggagtgctgccctctggggacatgcggagtgggggtcttatccctgtgctgagccctgagggcagagaggatggcatgtttcaggggagggggaagccttcctctcaatttgttgtcagtgaaattccaataaatgggatttgctctctgca

SEQ ID NO: 709419 - DNA, 159 bp, Homo sapiens
  misc_feature (31)..(31): n is a, c, g, or t
  misc_feature (33)..(33): n is a, c, g, or t
tggacccgcggttatgtcttacgactgtacnancttatgtttggattcacattacacagtgaagtgattgcttgtcaaattaattaacctatccatcccctcccataattagcactttcttgttctctagaacgtcatcatcgtaagacataaccgcgg

SEQ ID NO: 709420 - DNA, 1354 bp, Homo sapiens
ttttttttcagagttcccgggtcccttccgcctgggttcacgttcacgtttattcaaacaacagagccgactcgggcgaggtctgggagcggcgggcgggcggtgtcgcctcctgggctctgctgacccctggtggtggggtcggcccaggctgggacctagcccggcccccctcggccgctgctgaccgccatcccccacaccgccttctggagcccgcagagggaggcaggggcgtccccggggacagctcaggcggccacagttgggggcggggagcatcagcctgtgcggagctgggagcctgggaagcaggaggccagagggtggccccttcggttaagtgtctggggagcggcccgggagcccagaggggtcgtcgggggaagcgcggggcacgtgctcgcaggtgatgaggtgggtgggcagcgcctgggtgtcgtggaagatgacgaagatgctgggctggcagatgcagtccacggcgctgtcgtagcgcaggagcacgtggccaggaccccgcagagggggcgcccgcagaccgcggcggccctgcccgtagtcgccagtcagcacccgtgccacgaacaccgccttatggccatcggcgttggggggcgagtagcggtcctgcaccgacagggaggcgcgcctggcgaaatacacgcccttcccgtagaccgtggcgttgcggccgcagaagctgcggttgaagccgtgggcgcagatgtcaggcactgccggtgccgtcgtgccgtggtacagcacctgctccaccgggcgccgctcgcatcgctgcagcaggcgctcccggtacagctcatactgctgctgcagcagcgggtgcgacacgcgctccacctgcggggaaggcccgggccaggattaaacaccctccctacgccctggggccgacgcagggcagagctgagcctggcaaccaggagccctctgttggaggagtccagggtttgagggagcccttgcagcccccatcatgctctgtccagcagcagacagtaacacctccgtgaagcaagtgacttcagagggccgctggggaggcctgacccctccccctcccgtggaggtctgcgggcgggcaaaccccacccactcaagcgaggcctctgcagagaaaagctgagccagggccctatgctgcctacaggacttgactccaacacgaggagatgccacagacctctcagtgctgaaagacccaggtgggagagaaagcctcaagtgaccaacctgacagccctgggaaacacttttaaagaaattttaaatagctttcttaagagagttgcaaaagaacaccatgtctattaaacaaaactagctggtatga

SEQ ID NO: 709421 - DNA, 720 bp, Homo sapiens
gatacgaagcaggcgggcttcagagtgggttggaaaaatggaggtgccgcgcctggatcatgtccctcaacagccccactcagcccctgtgatggaggtgatcaaaaacctcagcctggaggccatttcagctgtgcgaccgggagcgggaacgaacatcacaagacagtggcatagcagagatggaagaacttcctgtaccacataacatcaaaataagcaatataagcgtgtgactctattcaagatttcatgggaacatggattcaagatcaaaggatcgcattacacactattttatgacctcaacaagaacgagaacaagaagcctcctagataagattgtaaacacaacggatgttcccactaaaatcggtggcataaagctgttcccttgcctatgactgtccgtggacacttggtttcttaagcccaatgaactgaatatacagtaggcagtgccagactgtctcaaaaacaagtcgagtggtgactcatgtagtgtctgagatggccgtgaaaattcatcgaattctgcaccgcaggactatgtcaaaaaggttcattctaacacaattggtggcagaaggctggagtgattgccggaccgcatgtcttaggtttcctggtccagtatcgggaatccagccaccaagcgaatatttcgactatggttcgagcaacctcatggggaattggctatgcagcccatcccgctcg

SEQ ID NO: 709422 - DNA, 241 bp, Homo sapiens
cagaggccaaacagtgccaacgatgacatctgcccatttagatcacctactatggggtagacactgtgcagccataaaaaagatgagttcatgtcctttgtagggacatggatgagctggaaaccatcattctcagcaaactatcccaaggacagaaaaccaaacactgcatgttctcactcataggtgagaattgaataatgagaacacctggacacaggaaggggaacatcacacaccg

SEQ ID NO: 709423 - DNA, 755 bp, Homo sapiens
ttcagcctccgctggatgcgattggtggagcaagggctgctggagaaacccgtcttctccttttacctcaacagggattctgaagggtctgatgggggagagctggtcctagggggctcagaccccgcctcactacgtacctcccctcaccttcataccagtcaccatccctgcctactcgaagtcccacatggagagtgtgaaggtcggcacagggctgagctctgtgccagggctgcagtgccatcctagacacaggcacatccctcatcacaggacctagtgaggagatccgggccttgaataaagccattgggggatatcccttcctgaatgggcagtacttcattcagtgttccaagacgccaacgcttccccctgtctcctttccaccttggtggagtctggtttaacctcacaggccaggactatgtcatcaagattcttcagagcgatgttggcctctgcctgttgggcttccaagccttggatatccccaagcctgcgggacccctctggatccttggggacgtctttttggggccctatgtggctgtctttgaccgtggggacaaaaacgtcggcccgcgcgtgggactggcgcgtgctcagtctcgttcaacagaccgggcagaaagaaggactacgcaggcgcagttcttcaaaagacgccctggttagggtacaagctcaccgggccacagcagctatgcttctttccaattaaacaaattaaaaaaaaaaatcaactttca

SEQ ID NO: 709424 - DNA, 991 bp, Homo sapiens
  misc_feature (196)..(196): n is a, c, g, or t
  misc_feature (244)..(244): n is a, c, g, or t
  misc_feature (268)..(268): n is a, c, g, or t
  misc_feature (278)..(278): n is a, c, g, or t
  misc_feature (281)..(281): n is a, c, g, or t
cttatagtgatgatgcaactttcgaggaatggttcccccaagggacggcccccaaaagtccctgttcgtgaggtctgtccagtgacccatcgtcctaggaaccttataccggggacccgtgtatacagacataccctattgccgactagctcagagcgcttcgagagaatccatatcggttgatggcttctacacnaagagcgtaccgattcacatcgctcgctatgcgagctgcactgctccnagctgtcctctgagctcacgtagnggtccacacnggngcgcgctcaactctaccttggagcacccatcccatggactctggggcgccctgagctctttgtgccatgaaaattgtcattaaatgaagagatgtcgtattcctcagaagcttctttcctgccctgattgggggctctggctgtgccgtttcttgctcgccggcttctctcgccttttgtcatctgcgtgatctttggcctaatctagtttctgtgttccctgtttccctcgtagtttcttagcagggtttgcgtctgtggtttattcaactcgtaactaaacatacgaaagattccaaatagagatagaaaaagaagacaacagagaagaaggagactgaagggcggggagggtgacaacaagaagtacctccccccgaggagaggcccacagtgtgacacggggcaaaccgccggtggtcatgggggccacccaggggcgtgcgccaaaaagggatcggtacctcgaaaaagtcaacactgacggctcacaggcggaacgcagaactacagacacctggtggtacctgccgggaaaagacacggccgcgcactcgtggggaaacaccctagggcaagaaccaacacatcgcaaaaccacacgcgcagggcggagacacagacatggcccaccgacacccaaccttccacggggaaaaaccaacccccctagacggccaatccaagaaccttaccgggacaaacgggga

SEQ ID NO: 709425 - DNA, 201 bp, Homo sapiens
cctggctgctcaggtctggtctcgaactcctgacctcaggtgatccgcccacctcagcctcctaaagtgctgggattacaggcgtgagccatggcacccaggcctgaatgcagcctcttgccttggccaggttattcttcagagaagtagcaggagttggggaaggaagtctcggcactcctgacagaggcctggggcgtc

SEQ ID NO: 709426 - DNA, 196 bp, Homo sapiens
  misc_feature (18)..(19): n is a, c, g, or t
  misc_feature (21)..(21): n is a, c, g, or t
  misc_feature (89)..(89): n is a, c, g, or t
agcccaacatggtgaccnncnggccatgctgttcccatcaagtataccccagaggagattgccatggaactgtcactgccctgcgtcgnactgtgcccccagctgtcccaggagtgaccttcctgtctgggggtcagagcgaagaagaggcatcattcaacctcaatgccatcaaccgctgcccccttccccgacc

SEQ ID NO: 709427 - DNA, 1039 bp, Homo sapiens
tgaccagaccggatatgagtgcctctagtgaactcatcttcttgccgcgtcctcgtgacttgggcttccggcgcgtcggctcttggcttgtgcagtgccgttggtcgtaggtgcctgcttgagtcagcccggtgctccataaggcccgcatgtgcatcatcttgtcctgaggcctgtgtccttgcaccgtcgggtccctgcgtaggcctgggtctctgccaggccttggcatgacagtcttgaccgcaccggagtatgcctttgtacgcgacagcagttatacacttctatgcctacgttagccctaatcccttgcaagttacatagttcatccgcataaccagcgccatttcccgaagggtcacacataatgcacaaaaccaacgggaacgacataacgatgcgcttgccaaaccacaagggaacctggtgagccccgaggacagagcacccctcaaagcactcattggacacctctttgtccagatcaacagccccctacaaggggcaagattcgccgtccaacagcggtcgtggagacccaggcacccaatagttccgcgaaagcgtgggcccccccacgctggagcacaccgaacccagaacacgttcacaaggcaatggtaaacacacaacgtcaagtccaaacccatatcacccttacgaccccacttccagtcacagcacaaatttgtccctgttgcacaattcaccacttatgtcacccacatttcttcttccactacttcataaagcatacttctttcctacaaactttccaaatcgttgcgcacttcctccaaccccattcatactgcgccacgaaatcacacttgcccccgttagaagatgcccaccgtgggcacaaaccctttggcaaatgccatcaacctcgctccacgcggtacccctattgggcgaatgtgggaacgaccccgtcgaggaccaccagccggacttaacagatcggcaccgcgtccgaccaccgcttgttcgcaaccctggagacgatcactccccaacccctcacgctaagccg

SEQ ID NO: 709428 - DNA, 443 bp, Homo sapiens
cctatgcatgcagtgcattagacagcttgtgtgcagtcaacagtgctaagataataccgacattcctggcaatgggctctcctcccatggtctgtctgtaggagcacggtatccaagccatcgtctgcaccctgtcagcccatgctatccattccatcgacatgtgcacagtcgagggtcatatcttcaaagaagtactcagtcgagtcaaaagcagaatgtggctcatcgtgatcgcagcatggttcaggcacgacgtgcctttagtgcctgagtctgacattctccgtcaggtcctcatggcatccagcatttagcgcacagccaatctccccgaagcttgtcagcgagcggtcattctcatatcatgagtatccatctgtctagtctagtgcgtcagagtgatctacagtcgcccaataaacctgaagcgcccacagacg

SEQ ID NO: 709429 - DNA, 1684 bp, Homo sapiens
gctcgcttcccccagcccgtgagctcggtccgaacgagaggttccggagcctcctgtgctgcgggcggggttcgtgggagtgctagacgctgctggtccagcgcgacctccagccgaagggttcgtcggcctagcctgcgcattgcagcagctatcaggctgctccgcgaggcattagaaactcctcgaacgaaataatcacaactgagtcaatccggcggactttcgtgcatcgctctggagaaggtggcatggtaaagtaacttgtacaaccatagtggtgcatgcaataccacctcatctcctccttgttatacctgagtaaacgatggaccctgtatacatggaatcacaataccttcagtatcaggctgtctctatccatgaactctctctctaccagccactgctggcactgaccacgtggccttacggccgtctacctcttagcaaatacggcagcaggggctcatggcattggcagaggaaagctccagacctgtcacttaaatgaacacgccaattggctttggcagcggtcctgcaccactacttgtaacaccaacgtagctcactctccagccgaacgtcttgacctttggccgcgcacatcagcctaaatgcctgacaccgcaactacaaatggaacataccaacatctgcttaacctctccttcgaccgcacgcacacacacgtcatactccaatggaagcgactccccgtttgcaacgaccagccggggcctggccttctgcttcaaaccctgcacagaccacggtagttgcgcaggccaccccgtgtaaagggtacccctcacggccacaacacgaacagcaacggtgcaaggatctaagcccattcacccacatgtaatgggcttagcgccctggcgtactgccacagccgggaacacccttacatgcgcaccattagactgcccaagagatcgcatcacacacagcgcactatatatcgccatgaatgagtccacctcctaccgccgcacccgtcgcctatgccccgacagtatgcaacgctctcgacccacacgaccactccatcccctacctcggaacacctggccccgcaagccatcttgcatctccgcatggcacatactcacgcatgcctactcctgtatatcatcagcgacactgcgcacttgacaccgatcgcacatccacgccggctgcgacacgacggcaccgtccaagcacgactgctactaaacacatctactcctaaaatactcttagtaactgcacatgcaacaatcattctacctactaccatatgaaattacaaatcaactagcccaacaacctatacaataccaccatgattaccatctcctatcatcaaaccactaaccttatacttattctccaatctaagataataaacacataaccataaactcgcagataacacactagtcgactaacccagcgacaaacaaccccacacaccccacaccacaccaccgccaacaacaaacaccactcagccctacccatacagcacctaatactcaaacaccaactgcactacaccacttacaatacagcaaccataacacagaatcatcaacaattagtcagcctcccatcacccactccattacaccaccacacccagcatctacacaatcagaactatttatcctaaaaacaccacaaccac

SEQ ID NO: 709430 - DNA, 868 bp, Homo sapiens
gtgctctacccccggcacggatcgccgggctagtatggactgcgcggctccaggctgagggtcggtccggaggcgggtgggcgcgggtctcacccggcattgtcccgggtggcaccgtgtccgcgcggcccacctgggcagccagcgagggagtcactgtctacaagccatctgccagccatccgtcctccctcctcgatcttctcggccgcgtcgagcatcgatccgaaagccccttccccagagtcctcaacatttgataggagagtcggatcgtacaacgtgcacgatcagacggttggaagaaggatagttcgcgaaatgcacgtgcacgctccttttaggcacgtttgctttctagccatacatgcctcacacgtaggcacgaagcccagagagacgtacttgtttgcctaatttcaagacgaaaagtaaacaacaaaattgaaacactccagaacccacgtgaaaaggccgctttcactctgggtagaggccctctcgggccaccgtgtaattcccccggtgttgaaacccactctcgtaaatacttagctaacaagctttttaatagtgaagccctggcattttgacacttccaagttgttgctccataggtggaattgcggagagtactgctttggacatgggggagctacctattagtacttaaagtggttgcctaagccattaggtttgcgtagaaacccaatttgtgccgaatactctaataaccattgcttggcccaaaagcacacaggaatgagaggagtgaacacaaatgtagttaccccaaaaagaaggttggctttaatcttccacaatgcacgttgcaaatcccaaaaagcccctaattccacatgggacg

SEQ ID NO: 709431 - DNA, 1729 bp, Homo sapiens
gctgcattggctacacggccaccaatcaggacttcatccagcgcctgagcacactgatccggcaggccatcgagcggacagctgcctgacctggatctgaggctgccaaccagcgggcaggagggccacgggtgaacaagggctgcaggaggaggcatgcaggcaggcaggcaagcacagcaggaggaacgtggcatgagcaacctgctaactttgcaaatgtgggccccctagcacgttggacggacggacggacgggaaggagggccacggggcgagagaaagacggacggcaggacacgagcgacggacctcacaagacacgccaacaggaaggaaagacgccatggacctccacggcaatcgagccaacacatgacagcccgaccgagaaagcaccggcaacaatcacccattgacactcggaagaaaaccaaattcacgaacaaatcgacaaaccaaaaaagaaagagcaaggaacggaaagacaacacacaggagtacccaaaaagaaacaaagagagaaataaacataccaagacacacaagaagacagaaaacgaccataggcacacacgggcacgcctatcagaaaccgaagagctcagaccggaggacaaagttagagaacagaaaccacaaaacaggaaagaaagatgacgacagaaagaaacgcaagagcaagcaaccgatcgcaaggagagaacaaagacgaacgaacccaaggaaaaggaaagataagatatcactacaaatcaccaaaagggacaggacaccaacggcaagcatacggcgaggacatatacccaccctacgaaacattcgagacaaagaacgacccaatctaagacaagcaggaaacgcatataataagcgagacagtatacgacgagtaaataacatagacaaacgtgagagaacagcacattaggatcagaatcatcttaggacatatgcaaactcacagacaacagggagataacacccgggagaaacataaaaaaaagcttgacaacaaaacatccacgaagagcacaaagataatcaagatgataaaaatacagtcaacagtagaagacaagcgccaccgacgacaaaaaaaacagcagtagagcaccaaagagaaacagacaagaccacacgaacaacaggagaagcgaaaagacaagggaacgaacaacgacaaacaggagagaacgcagaagcgaacaacgcacgaaggagagaaaacacaatgggaggacgaaacatagcacaccgaagaagcagaaacagagaacgaacacacaaacagacacgagtcacgacagagaggacaacggggagagacaacgagaaacaggccacagtaacagacgagagacagccgccaccagaagcaaaacaccaagaacaagaggagcaacgccagaaactttctcaataacgcacgagcggcgagcagaacatacgaccaggagacatatagaccacaatcgacaaaccacaacacaaaagcaaagagaccagtagaacagaccagcccagaagacagacaaacacgggaacactagaaaccagaagtaagccaaacagcgacgacactagacaaagaacacgaagcacacatgacgcgcgaacagacggcgacacagacacacatcaaacagacacagcaacagagcaaagaatgacgcgccacacacacgaagacgcacaacacataacgaatactcggcacccaagtacg

SEQ ID NO: 709432 - DNA, 358 bp, Homo sapiens
  misc_feature (7)..(7): n is a, c, g, or t
  misc_feature (68)..(68): n is a, c, g, or t
  misc_feature (131)..(131): n is a, c, g, or t
  misc_feature (203)..(203): n is a, c, g, or t
  misc_feature (229)..(229): n is a, c, g, or t
  misc_feature (261)..(261): n is a, c, g, or t
  misc_feature (315)..(315): n is a, c, g, or t
  misc_feature (321)..(321): n is a, c, g, or t
caactgncttccaacacaaccctgccaactccctctgcaaatacagtctctggtaggctgcccctganaaggatctgaaggaggccctgcatagcaccggtgagccttaccctacctgctggctcacagtnctgtggcaaggttcaaagccaagcccaggccagagctgagctgctaactgggttctttgcttccctatgganaaagccttctgccaaggtttcttgtnggggggggggaacccatggattccaaaactanagggaaacagagactggcccaatagataagggagcagcctgggagagtaggganctgggngcaggcattccaccgggccaggaaatggagccctcag

SEQ ID NO: 709433 - DNA, 968 bp, Homo sapiens
ggacgcgtgggtcgaccacgcgtccgggataactgttcaggaggagatgatgactggagaccatctgtcttcaagatgaagtggacccgtctacaggtgaactccagtgccctacagatgtcagaatccgagagggccaagctctctggacccctcccaggagggacccacagggctgaaggaagctgccttgtaccaccacatctcccggctcagaggctggagccgcggttgattgagtccctctcccagattgctgtccattgggcttctctgatgaaggctgggtggctcaccaggctcctgcacgaccaatgaactatgagatcgggagcggtctggacaccatccagtattcaaagcatcccccgtcgttgtgaccacttttgcccacctcttctgcgttgcccctcttctgtctcatagtcgtgttaagcttgtcgtagaacttgcaggtctctgtacgggccagatttcgtctgccttcttccaggatcatggggttacgggtgcaatgaagccatatagggccagtgacaacaggtgacatgaagggagggtccctggtgtgtgtgtgtgtgcttgagtgtctcctggtgtgccctggcttccttgcaggccgtgctgtgccctgcgcatcacccagggctcactgctgccgggctccctgaacgctccctgcaggggggctacgttcatgcaggcctagcacatagtgggcctagtggtttgccactttcgctcttgttctaactgactccttggtgcctgacttggggttgaccagttgcctgcatagacccggtaacccctgatttagatagacattagccaacggttggcagccgcaagctgggaggccacgttggggcccccgctggggtgagagcgcccacgggctcgccacggtggtcaatcagagggccctggttaccacagtgtcttcgttaaccacaaacgctaaaaac

SEQ ID NO: 709434 - DNA, 1062 bp, Homo sapiens
cgacgtggaaacaccgcgggtgatttattggctccggggtgcgcgaagcgtcttgtccggagccctgcctacggatgagaggcgccgactgctgggacccatcggtgtccacttatgtctgtgacggctgcgacatcccgcacgtagtacccgcgttctctaagcatgcgaaccacgggtgtcttggcgcgcgttgtggccccctggtcgggtggcgcggggaccgatcaatcgcttgcgcggaaccctttggcttgcaatgtaacatgctatatgactgcgctagaattctgagctcgagattgtcgcgaagtggctttcattctcgacatagctaccactgcactgggttgctagttatgctactctctacctactatggcaagaatcaacagagatatctggagtcaaactatcccttgaattgcccctacaaagggagtgacctccctgtgcgttgggctccaggctgtacttcgctgtcccagaagtgtcgtgtgcgttcttagccttatgcatctgtttcaaaaacggtttatctactttcacgggatgttttgggactggatagtaaactatgactcgagcactgcgagtcatgaaacgtcgatcggtaattaacgtagtacggtcgtgcagagaagttggctggctaatgcctaattaaactggcgggtaccgatgcgtgagagttgaccaagcatgctgcattagttactgcctgaagaagttctgctttgtgacttaactcctataccagcttttctgtggatatgttcccgacggtgccgtcaggtcctcaacgttgttagaatacatatgtgctctgtcacccgtattacaccagacgcagggtagagacacggtaaacgtcggcggagaggaacgtatatacattaaaggttgaacaacactagcgaacacagacgccgtgtgcctaatgtggccaatagacaccgccacaccctttcgcatattgatactagacagtcagaacagtccagacgtcacagtcgcacgcatcaagcagggcgagatagcagaacgacttgcgcgtacaca

SEQ ID NO: 709435 - DNA, 386 bp, Homo sapiens
cacgaggagaacgacagaaactgggattacctccacttacatctaccacactaagtgtatgtagtactactctctgggttgggcaagtgggcaaaaagggaacacagcaagacttaaccaacctgtttgaaaagtttggacatattgaatccattaatataattcctccccggggctgtgcttatgtctgcatggttcatcgataagatgcatttcgagctcttcaaaaacgtcagttctgtgcatcatataccattgggtccaaggtcattaagatcgcttggcctttagacattggtgttaaaacagaatatttgcaattctgggatgtggatcttggagttacatggattccacgggaaacagttaaggtggatgacttggaa

SEQ ID NO: 709436 - DNA, 123 bp, Homo sapiens
gtgcatccctcctcctaactcagcatggggctgcggcattacggtagctcgtggttggatctgtcatctgggacctattccatcccctaccccatgtcttttctgctcatagttctgcgtctg

SEQ ID NO: 709437 - DNA, 227 bp, Homo sapiens
ctgacggtgtatggaagggactgtctgcccggtatcatcatgattgttaccctgactgccctacagtggttatctatactccgtgaaggtctacttcagacttcctcgcgctcctccaccccagatgccagagtctctgaagaagaagcttggttaactcagtagttagatcattgcaaatgtggactgaatctgcttgttgatcagtcttgcaagaactactcgga

SEQ ID NO: 709438 - DNA, 201 bp, Homo sapiens
tcgcgaatacaaaggggtatatgagcatcagtagactttagttactactgacttcatggtgtcgacgtgcattcgatcctaagatatgagcagcatgatttctggtctagtatcgtagcaacacatgtatgcagtgccacacatggctatcctctcgaaaacctatttgtgaacgttttcttactttctgactaacggaca

SEQ ID NO: 709439 - DNA, 214 bp, Homo sapiens
cctggttatcctgcaagattacacgaacagtgctcctctagaggggtatgaagcacctgccaagctctttgagtttaaagctgtggttcgtagtgtcctgtgcgagcagttttgtggattaaacttgttgaggttaacgggctaagcataggtggggatatctatatcccagtttggggctctacaagctattgtggtgtgtcccagattatgt

SEQ ID NO: 709440 - DNA, 144 bp, Homo sapiens
ggtcggacatcctcctcttcttcttcctctaactcaccttcttcttcctcaaattcttcctcaaactctccttcctcctcttcttcctcttcaaaatattcctcttcatcctcttcctctatggcagaggtgggaggagaggaa

SEQ ID NO: 709441 - DNA, 265 bp, Homo sapiens
ttgcgcccaatagattttttatagcagacagtgatctcaggaatcctcctcggttcccagggcttggtctcaaattcctggactcaaatgatccttccaactcgggctcccaaagggctgggattacaggcatgagccaatgggcccgggagggagggggtaaagtgagaggcataagggtcccgggcaggtgttagcagggggcttcagaggtgaagagagagcagggcagggaggctggtaaggccgatgggagcaagaacgg

SEQ ID NO: 709442 - DNA, 1111 bp, Homo sapiens
  misc_feature (1059)..(1059): n is a, c, g, or t
  misc_feature (1098)..(1098): n is a, c, g, or t
ttttttttcagagttcccgggtcccttccgcctgggttcacgttcacgtttattcaaacaacagagccgactcgggcgaggtctgggagcggcgggcgggcggtgtcgcctcctgggctctgctgacccctggtggtggggtcggcccaggctgggacctagcccggcccccctcggccgctgctgaccgccatcccccacaccgccttctggagcccgcagagggaggcaggggcgtccccggggacagctcaggcggccacagttgggggcggggagcatcagcctgtgcggagctgggagcctgggaagcaggaggccagagggtggccccttcggttaagtgtctggggagcggcccgggagcccagaggggtcgtcgggggaagcgcggggcacgtgctcgcaggtgatgaggtgggtgggcagcgcctgggtgtcgtggaagatgacgaagatgctgggctggcagatgcagtccacggcgctgtcgtagcgcaggagcacgtggccaggaccccgcagagggggcgcccgcagaccgcggcggccctgcccgtagtcgccagtcagcacccgtgccacgaacaccgccttatggccatcggcgttggggggcgagtagcggtcctgcaccgacagggaggcgcgcctggcgaaatacacgcccttcccgtagaccgtggcgttgcggccgcagaagctgcggttgaagccgtgggcgcagatgtcaggcactgccggtgccgtcgtgccgtggtacagcacctgctccaccgggcgccgctcgcatcgctgcagcaggcgctcccggtacagctcatactgctgctgcagcagcgggtgcgacacgcgctccacacgaacgacgcggatgctgctgcgggcagcgtccagggtgtcgtagaaggcccgcaccacctcctggaactccccggtgttctctgccagacgctccaggttgttccagggccccttcagcgtctgccccgccactgatgcatggggaaaagcggggggtcagagccatgcctggggcactagcccctgctaaccagnccaccccaccgtccctcagtccaggaggtagactcacangtagggcctgaag

SEQ ID NO: 709443 - DNA, 232 bp, Homo sapiens
  misc_feature (40)..(41): n is a, c, g, or t
  misc_feature (61)..(61): n is a, c, g, or t
  misc_feature (95)..(95): n is a, c, g, or t
  misc_feature (205)..(205): n is a, c, g, or t
ctgcagctttcccagtgtctgtcctgtggcatgctgggcnntgctgcccacatcgtccttnctgtgctgcgtgtgtggcctctgcagtcccacgnacctgctggcggcattgggcccactggcaggagctgggtactgttgccaggaggcctggggtcggtcactctgtaacactgtgggccctcaccccaggagctggcctatncctccccagcagaggcgattttacctc

SEQ ID NO: 709444 - DNA, 373 bp, Homo sapiens
atcccccgggctgcaggattcggcacgagcagcatattccctgacggtcaccttagggcgggtggcgtgcgcgtgcagacacagcatactgagaccttcggggcccggagcagcctccctttggtctgcttctcgaagggtcaattcacagagcacttcatatctaccaggatatgttccttgaggagaccagacaccatgcacaggtcgtgaagaaggtgaatgagaagatcgtcacggggcagtatggcaggctctttgccgcggtgcactttgccagccgccagtggaaggtgacctctgaagacctgatcttaattggtgaactagaccttgcgtgtggagagagaattcgactgggggtgctgctggt

SEQ ID NO: 709445 - DNA, 367 bp, Homo sapiens
  misc_feature (32)..(32): n is a, c, g, or t
gggagccggggaaggaggccgtccatcccgtngacgtagaacctcgaggtttctcaaagaaatttccactcaggtttgttttccaaggcggccccggccggggtggattggatttgtttttggtgaacattgcaatagaaatccaattggatacgccaacttgcccgtattttaaaagcgtcataactagaactgaattttgtctttatgatttttaaaaaaaagttttgtaaatttctctccggtcccggtttcccttttggatattgggatttaaatgaaagtgagcctttgagggggtatattttttgggcagcccctgttaagccatgtgttccaaggcattttagcggggagggggttatca

SEQ ID NO: 709446 - DNA, 377 bp, Homo sapiens
  misc_feature (268)..(268): n is a, c, g, or t
gcggcgcgggaccggcgtgggcggcggcaacggggcactgacctgggtgaacaatgctgcaaaaaagaagagtcagaactgccaacaaaatgattcttcaaagagttgtccaagatagaatcttagttcactttaaatttgcccacagaaccctctaaatcccttgtaatttaactgttagtcaaagaggacagctctttggacactaggaaaaaccttgtagagagagtaaaaatttacaccatagtaggctaaagcagcaccaatnagaagcgttcagctcacaccactactaaaattccaacatatactgactctcacaccaattggccatctatcacctatagagactatgttgttagtacatgaccatctcc

SEQ ID NO: 709447 - DNA, 716 bp, Homo sapiens
tcgaggccgcggacctgatttctgcgcggtctccgataattagtttatcacggccagcgatatggaccgcttgcacagtgtcatgaagatcacagtagtcatggacatctagatctagtccgtgtctaagaacgaactcatgtgcattgctatcatggtattagcctccataaatttcgtcctgctggtgattatgccggagcaggatctgacccgtatgtcagagcggaccaagaccctggcatgagatcgtatcagtttcaaggcttttcacgtgatcatgggtatacaatggccacttggatctggacgcaacatctctatggaagtgaccatcggcatgcgctacaacatcctgctgcgcaaggtatacatagtcccaagatcatagattacgacgctagcacttgtagcaagcagggacacttccgttgtacggtgctaggcatctgccattcatacattgtactgcaattgcttacccatattgactagtattcctatcagacaggttcctactgaaatgtcattgacctatgcaattcattacagctctcatctatgcaggtttgcacggcaccttggaatcatgccataacctacttttaccacctcctaagcactagatcaacaccgcttcaaccaactgcaagcgaactagtcaaccaagaactcctttaggtcctcaatgaggttctgttctagcgcccctttcc

SEQ ID NO: 709448 - DNA, 935 bp, Homo sapiens
cgtgatgactatgtgtgtacaaaatcccatcagtttcgtgcaccgcgaggtgggcggatcacgtgccggctcgtgagtacaagatcagcctgactagtatggccacctgccatgtttactagaattacaagagttgagacagggcagtggtggtaatgctgggtgaattcacagactagatcaaggagtggtgagagcgtgagagaatggattggacgacgaggtaggcaaaggtctgtgagtgagctgaggatttgcgtgttgctgtccagacactgggtaagtgaagcgaacacatctgtcttgaaaagcctaaatgagatcacagcaaaagagaaggtttctcttcggccatccactagtgaattcgtgagtcagagtgtggcggctttgctcgaaaaagtggtctgatgaagaaataccaaaggagtcgttggggtggttctcctaccatgatgaagttgtggatcgcggagggagggtaccttgaggagattgaaacttgcatgcattatggcttttagaaaagggggagaagacgtctgggaataaagttggtgtcctcaaggaggctagactaagatcatggccgggtttggaaatggatggctaagagactgataccgtcaaaacttgggtgggaattgactcggttggcaattgggaagaaagttatgtccgaggtggtcggcaagaaccaaagattaaagaagggtggggcaggtgtaatacgggagagagtggttgacagtgtttgggagcctgccacagtgaggattgttaacggggggcaacagtaaatggctccagacaatgtgggaagttataggacaacttttgcgcggtgtggaaagaacactcaccaggggtgggctctacagagaatgtgttaactgaatggtgagtttgtcgatatacgcgggggaaaattttgt

SEQ ID NO: 709449 - DNA, 531 bp, Homo sapiens
ggtattaggtattaggtggtattgcacagaaaaattatgggcatgacattaaatacattccaagtgtcatgatcccaacggtaaaacgggctattgaacgtttgattaagatgtcagagaagcctagacatttagcataatgtgcttgagacgagcgataaatttccgagacatgagctttgtcccaaagtacttgatgatcaattattaaagcgtacggaagtgttaatggcaatgggttttgatgtgacgctatatgatgatcgtcaagcaaataacagcggtatacaatttttaaaaactcgtgagattcctattcatgattattcagtctgctcgaatgatttaaatattaccctacgaaatagactacctaaagattttccctatataccgtttaaaacgggtaatggtgtacaggttaaatggtcagaagctttattcgcttgttttactcatcagtatcacaagatatattctccaatattaacagagttatggatgccacatattgatactttaaatgaggat

SEQ ID NO: 709450 - DNA, 255 bp, Homo sapiens
  misc_feature (94)..(94): n is a, c, g, or t
cccccccgggggggggggtgcccccccccaaaagtttttcccgggggggggggtttggggggggggggccccccccgttttttttgtttaggcngggccccccccccccctttgggggggggccccttttttcccgggggggccccccctttgggggggccccgggttttttttcccccccccccccccccccccctggggttttttttttttttttgggggggggggggttaaaataaggggtttttttcccca

SEQ ID NO: 709451 - DNA, 268 bp, Homo sapiens
  misc_feature (66)..(66): n is a, c, g, or t
  misc_feature (135)..(135): n is a, c, g, or t
  misc_feature (193)..(193): n is a, c, g, or t
ataactttacaaaactgactgatttgcaaagtatatagtctgttattacttgaatccatgtaaaanggtgctctgctccaattcttaaatgctcagtgcagaagtagaatgaattccctttaatactcgtttgtnctaacgatgtctttattcttggtagaacaaacagaagataacagagtaggcttatggntccttctttcaggccaaagatcacaatgcctattaattcaaccttatttcactgtccatcgcataagagacgaag

SEQ ID NO: 709452 - DNA, 250 bp, Homo sapiens
attttcacctaagtactatcaacatttggagtgggataattcttgattgtgtgggctgtcttgtgcattgtagaatatttagcagcattcctggcctctgcccattagatgccagtagcatcctacccagttatgacaactaaaaatgcctccagaccttccagggtttcctgggggccaaaatcacccccaagttgaggaactgctttaggtacctagaaggcaggaggatcagagcagatctttgctg

SEQ ID NO: 709453 - DNA, 811 bp, Homo sapiens
tgtgctcttctggttctgtggctgctgtgccatgtccggctggcggctggcccgctctcctctctgcacgctcttacctttgctttggctcaaggccccggtgtggatgcatgcgttcttagtggagtgcttggccgcattcgaatgccctgtgaaatccagcagtagggtgtgtccgatgtctactgctatgtcgcccgtaggtgagcttgcagcacctgacgccgctcatcctcaccctgaatcttgcacacttctggctcaagacgctcgggaggcttacttgcctgggagcctcgggcccagctcctctactagtccccgcgacccatcgctcatgccagcgctgcccccatctggtctctggggaggacgaagtcctagcagtctgcagcgcggattgccgggggccctgggtggcctgcttactcccctcttcctccgtggcgtcctggcctacctcatctggtggacggctgcctgccagctgctcgccagccttttcggcctctagttccaccagcacttggcaggctcctagctgcctgcagaccctcctggggacactgaggtctgttcctggggcaagcgggacagctagccatgccccctctgtattgcgcaccccgtgtccccagcgtgcaaggtggggccggactccccggcgttcccttcaccacagtgccatgacccgcggccccccttggacgccgagtttctgcctcagaactgtcatctcctgggcccagcagcatgaggtcccgaggccagttgtctccgaagcgtatacccaggggtgagtggcgacggg

SEQ ID NO: 709454 - DNA, 178 bp, Homo sapiens
tgagggctccgttccagttaccgctgcccgggcgggtctctggggcccggctcccgcgggggtcgctccgccccgccgtccgcacccgtccggccgccggggaggctctgtcacgccaagccatggccacccgctggctcctctgtctctccctgccccagcctgctgtcgccgcggg

SEQ ID NO: 709455 - DNA, 732 bp, Homo sapiens
  misc_feature (201)..(201): n is a, c, g, or t
gcctcgccccctttttcccccccggaatggtttttgggcccaccaaatgtgtcccgcctccttttccttctgcttgcgggggagaaacccaccccacacttctgcgggggatgaacttcctctccacagtctcgccccactccccacacaggagggccttcgcctcggccctcctggcttgcaagaacgtgcgcccccacncttcgtctgcgtcgccattcatacgctctgccaccccacagaacggtgctcctcctgccgcccctaattttcgaatcccccgaggcgggcccaaatttgggggcccgccctcatagtgtccatgggggcgggcatgtattgagtgggcgccccccccccttcttctggcgaggccttttcggggaaccccctcttttcctctcaggacacccctttcggtgttggtgcgtctcctcctcccgcacgcctccgagtacgacctgcggtcgcacccccccgctcgccactctgcggcagcttgtgtgccccacactatcctccgcccactcctccccggtggatttctgggggcgttctctctgcggtcacccccactctttttctcctaggaccacacattgctttacccccgacagccactccttgtgcatgggcatggtctccatctcccctctgcagaccccgattgttcctcacacctctttctgcatataaccaccaggtgtccccacccaccaatcatagtcaaaa

SEQ ID NO: 709456 - DNA, 1152 bp, Homo sapiens
tgtgtgcaggagagtgagatgcatatgcaccttgcagcaaagatggatgttggtgcatgcaaacgatggtccttgatggatgagcacctgcctgtgacttacatcctgacatgcatcaccctgtgtgtgcctgcattttggcagttccactgcttgccccaaggttgcaccttgacaactgcactatcttagtcatgttgtgttgtgtgtgttgtgttgtgtaccatcaatacatgtcatgtaggtatgattagttgtgtgaatgccacttgcctcaattgtgtgtcatccaacacattgatgacccaggaacacgacaactgtgccagaattgggcttcattgtgcagaactcgaatgccacttttgggtgtgcatgcaccggtgacagggcccccagggcgaacagtgaccctttgtggcccccattgaagaggttgaaggcaacacagttggggtttagcaccaacgttggtcaacaaccccgttgtccattccccagaagtccgtgtggcacgttcacaagtaggtgagggacacacaattctgaagtgagacgttggattagcttggaacccgttatgccgcaaaggagcaaatgcacattgggcagttgtaagttcatcgaccgctagtaagcgagaagagaccaccaaatggccacaccattgtgttggtagacagaacacccattggtcaccgtttgtgccagctttaaaccgaatgtttcccaatcgtttgcacaacagtgggcaagtttagagagcagctttaccaccaagaggtcaagggtgaacgggcccagagatttcagcgcaccgcaaaagggtgataccgtggttgctaacttgtggtctcattcccgatttccaaaggccgtataaacgtacaacggaacacgcacgtgcatttcctccgaaggcaaagacaggcgcgattttatccacccaaaggtgggggccgcccaaaagaagtgaggacccccacgggtgcgaccaagttagtatgtggaccgccggtttaaaacaaggggaatcacagtttaaagagtggcgccctattgtgcagcagtaccacccaaaagtgtggccaaaagggacaaagggggggtgctggaccgagaaaacggctacagtttggcgccaggcggggc

SEQ ID NO: 709457 - DNA, 290 bp, Homo sapiens
cagaagatccagatcactggacattgcgaactttactcctgcatgtgtatatctgtcacaattgtcagcatgacaaaagtgacagatgttatttttgtctttttaaaaaacaattggttgtatatccaagtttttttcatttcgttttgtgccagatccactttttcaacactccccatcaagtcaggtcatctcttatcagttcgtcagactcatggcaatgtccaggtgttccagcccaaaccagtcatgcatggcaaccagtgcaaagtccaattccagtgcatggc

SEQ ID NO: 709458 - DNA, 719 bp, Homo sapiens
agtacataagaacaatataaggagaatagtgaataaagatagtaggatggtagtatagttagagtgtattgttaacgaggacatatggtatatatagtatgtaatatagatgatatattttaggagtaggatttatttatagagtatctataaacagatagtatagatgagaagtatgtcgatgatagttcttcatttaatgttttataatggattatagagtgtattatgctaaagctctagttgttcgctaatatctccgtagacttatggtgatgctagttagtgtagcatgtgctaagttagtagcttcattgttatatgatttactcataattcatcgtcatatagtgtacgtctatccagtagttgatatctctatagtacgctaagctaatcggactataagcatcgatgtatgatacttgcttaatattgagatctgagattgctgacgtgactagatgaattcttattttatatttctattattgtagttagacatttatatactcagcatactcgtatagcctttctcctgtgatagtttatatctattcatgcgattcatatctacgtcgcggcagcgcttgtgtccatcccggacgtcttatctgactctatacgcctactcgaagttaactgacagaatatgcattcgtcacaccgcccccaccacgactcccgatctatgcagcacactgagtagatcgtggtct

SEQ ID NO: 709459 - DNA, 138 bp, Homo sapiens
gccagccgagatcgccgggcatcctcatcgacctcttcgaccgcgagcgtgcacggcgggctcatccagttgacggcttgtagctgccgccgtcggagtgcacgagcagcgagccgtcgcccttgtgtacgaggagcc

SEQ ID NO: 709460 - DNA, 197 bp, Homo sapiens
catgtctgcaataccactgtcttaggctcgagcaataataacacacggtgtcgggattgcataactaaatgatatgtaagatcactgccagtgtaccgctaggtaacactaacaccatattcaattatacccttgcagtctccgtaattcaaacgggagagcaggatggataggggcaacaaccaaacaaacaaaca

SEQ ID NO: 709461 - DNA, 166 bp, Homo sapiens
ggtgcacgccgagaagaaggtgaagatgctggagcagcagcgcagtgagctgctggaagtgaacaagcagtgggaccagcatttcccggtccatgaagcagcagtatgagcagaagatcactgagctgcgtcagaagctggctgatttgcagagcaggtgactgac

SEQ ID NO: 709462 - DNA, 143 bp, Homo sapiens
  misc_feature (54)..(54): n is a, c, g, or t
  misc_feature (70)..(70): n is a, c, g, or t
  misc_feature (118)..(118): n is a, c, g, or t
  misc_feature (132)..(132): n is a, c, g, or t
ctgcgtctcatggtttgagtgccagatcatatgcagtaaagtagatcaccaagnagacttctaatgtatnttatcctaatccctggctaccagacagcacctccaaaaactcttgagncctaggggaacttnccatcctgaat

SEQ ID NO: 709463 - DNA, 1508 bp, Homo sapiens
  misc_feature (1330)..(1330): n is a, c, g, or t
gggttgcctccgcgtaggcctatgagtcgtcgagcgccaatcgagatctgggctaaagtgactgctggataggcaagagctacgtcggaatgggggaacgtgatgggtgccctgaacaatcgatacgtaactgaccagctgatccttggactcctcggatgaagaacagccatataggtgtgcgcaatggagccattgaggcagccagctgggcataagttatgtagacgatcgactggccatctgagtcatatgtggtgaacgcatgaatcgacagtgagaactaacggcatcagtatgtgcagactggcgttctcgccccatatgccttcgttgtaccggtagccggtagtcgccggcttggaaacaaaggagtcggcaagctcagtagccgtcagattgagggtagacctatagggcatagaataatcgcttatcgtgcagaatgctagggatacaccaacttgggtcagaggccaaaaggcggcccctatccttattacttccaccaggctcgcgaaagctcacaccttaagtcggattcagggagacccgacgataaaaccctcctttaggcccccttcggtgcgtaaagtccatcttcgatacatgccattccccgccatgaaacttgcaaagttcacattacgccgatggtaaataagtccctcaaattggaggaaccgaattggtaacaacacgtagggaagcccaggcgatggcagaaggcgtccacaacgtccgaacttccaattattggcctaaactgtaccttcctattttggcatcatctccggggatgaggacacaccgaaacagacgctttcctcaattgccaccacacccgaagtccctttcgtgggggggcaattacactacggaattcccaaacgcaccctcgggagattctgcacacgttggcggaagaatgctcccgggagagggaccagcggagggagaaaaaaagggggcggccttcgtggcacaatttggcggtctttataggggcacccacatcgcggataaacagcttgtgggtcccagcggttcgaatttctttcccgtaaaccaaaccctgcggccgttctcacggcgttagagagggagacccattctcccggccgttgttggcaacagctcgtctaatatagagtgttaaccaatgttggctttgggcgggatacctcttccgtacaaagtgtgcctcatatgcgaacacgtgtcctataggcgaattaacggtaagccgtctaccggttaaaggtggcgagtccaaagactgggtagattctataccaaaattgttttcctgggtaacccaattaagaanattacaaaagctttgcgggttgcggacctaattaggttcggcgtaagaattggtaataagcgagtgaatttgtcgtaagaagcgcttttgctccggttggaaatgggcgtcggaataaagggaatatggtttttataagaaggtaaagtttgaggacaattaaaaggggagtactgaa

SEQ ID NO: 709464 - DNA, 1187 bp, Homo sapiens
aagcccctcttctgggtctgcgacagatgtgaacgactgcggagacaacagacgacgagcaggggtgcagttgtcctggcccagaccttcaggtgttccaatgggaatgtgcctctcgaaaagccagcagtgcaatgggaaggacgactgtgtgggactgtggtccgacgaggcctcctgccccaatggtgaactgtcgtcacttgtaccaaacacacctaccgctgcctcaatgggctctgcttgagcaatggtgcaaccctgagtgtgactggtgaatgtgaggactgtagcgacggctcagatgagaaggactgcgactgtgggctgctgtgtcattcacagagacagtgctcgtgttgtatgggtggcactgtgatgcggatagagggctgagtggccctgtgcaggtaagcctgcatgctctggtgccatgggccacatctgcggtgcttccctcatctctcccaacttggctggtctctgcctgcacacttgatacatcgatgacagaggattcagtgtactcagaccccacgcagtggacggacttcctgggacttgcacgaccagagaccagcgcagcgcccctggggatgcaggagctgcagagctcaagcgcatcaatactcccaacccattcttcaatgacttcaccttcgactatgacatcgagcatgctggagctggaagaaccggcaagagtacagctccatggtgcggcccaatctgacttggcggaatgcctacaccatgacattccccatgcaggcaaggccatctgggatcacgcgctgcggagacacaaccacagaattgaagggactgaagagcatgatcatgcaaaaggttagaacaagagatatcaaaccagagcacatgaagaacatcagtccgagaagaaacaaccggccataaaatcgagtggcaccacagaggaggaaccacgccggcaacacaggggacccgccacgtaagcagagaggagagcacacagcacagaagagaagagaacaggcccacccagaacaaagcgaaaaggcacaccgcacgacaacaacaggaaggagccacacaagtagaaaccgcaacaagaacacaacgtataacaccatagacacaacaacacgaagagagcacgccgcgcagaaaaaacagccacacaaacccaccaccccacccaccgt

SEQ ID NO: 709465 - DNA, 517 bp, Homo sapiens
  misc_feature (348)..(348): n is a, c, g, or t
catgctaccaagctgtaggtgtcccattaagtcctgctatttaagaaatacttacataacccttaggaactcttcaggctttaaaaggcaaggagcaaataattttaggagaccgataatgtcacctaaatttgaaatactaagaagaggttagtgttctcaactatgtgaaatctgtttctcctactttctcaatctaatccctaggaatcttgcttataaacaaagcatttctgggacaggagtacttcctctattatagcaatgcttcacatcatattgtgctgcagtttccatcatttttaaaggacagagacataaatgataaaataatgggtatacaaatanttacaattctaccaccctcaaaaaaacaaatatttgtttatgggatttcagagtttgggagattcaaagtattgattgcagttttttttttaaaaagaatgctacaattatgtgggtttttatttctcatgtttatattaaaagctaataaactcttttttatttaaaa

SEQ ID NO: 709466 - DNA, 254 bp, Homo sapiens
  misc_feature (104)..(104): n is a, c, g, or t
tttcatccatgcaaccaaattgttcattccttgctgattctgggttttaaggaaccatgctgcatcatcacagaaaccaggcgattctattctgaagcccagangtaagaaatggtggggatttctgagttacagatggtgcaggtgttaacactatctgccactatcaagggaaaaatctatctatgctaaactttggtcttccctagtgacctgtatccagagtagcgaagatcagggcctgcgtgaccgat

SEQ ID NO: 709467 - DNA, 166 bp, Homo sapiens
catactttcgagcagttctaagggaccatacagagtattcctctcttcacaccaggaccagccactgttggggcatgagttcccagcagcagaagcagccctgcatcccaccccctcagcttcagcagcggcaggtgaaacagccttgccagcctccacctcagga

SEQ ID NO: 709468 - DNA, 1113 bp, Homo sapiens
  misc_feature (239)..(239): n is a, c, g, or t
  misc_feature (466)..(466): n is a, c, g, or t
  misc_feature (471)..(471): n is a, c, g, or t
  misc_feature (479)..(479): n is a, c, g, or t
  misc_feature (482)..(482): n is a, c, g, or t
  misc_feature (511)..(511): n is a, c, g, or t
  misc_feature (517)..(517): n is a, c, g, or t
  misc_feature (519)..(519): n is a, c, g, or t
  misc_feature (527)..(527): n is a, c, g, or t
  misc_feature (530)..(530): n is a, c, g, or t
  misc_feature (536)..(536): n is a, c, g, or t
  misc_feature (542)..(542): n is a, c, g, or t
  misc_feature (544)..(544): n is a, c, g, or t
  misc_feature (581)..(581): n is a, c, g, or t
  misc_feature (587)..(587): n is a, c, g, or t
  misc_feature (600)..(600): n is a, c, g, or t
  misc_feature (684)..(684): n is a, c, g, or t
  misc_feature (687)..(687): n is a, c, g, or t
  misc_feature (890)..(890): n is a, c, g, or t
  misc_feature (1037)..(1037): n is a, c, g, or t
tccctttatctgccatcttgcgtacccgcgatgtgtgcgcctaatctcaggtggtccaaccgagacgccattgagcagctaacctcgtagtcctccacagcgcggttccctttattctgctccgcacgaatgatgtatacagaaacaatccagtcgaaccgaggcaaagaacgtcgccgaaacatggcatggccactgaggttcgcgtcgattggggttgcggaaacggtaatctggcntgcgcgacggaaatgaagagaggctgggtctcataggaaccagcgcgatcagggctagcatcgacgagagagataatctgtgcagtgtgtctcacttatgaagaatgttataggggcgttaaaacagactgagtcgtctggcgataattatgagacgaacggttagaaagtgagttgttttgaagcaacgattccaattagggcacagcaaagtgcatcccgggagntattnataagtanacncgcgtaacacaggtctcgacgtgcggatncatacntngcgcgtangtnagaaancggacntntgctctactccaatgtaaacgatggggctcgatggcntcggangaaacaataggcnatggcatggagcaacgacagactggctgactcccgagccagttcttctaggaaccgaagcgtttgggtctgacggcatcacgtnctnggatctgaagttctgaaatggaagaactagtgtcacggtagagtctctttgagcacctaataaacaaatgctggttgagagtgcgaacaatgacgacgcaatttgcataaactaggtacgaagggattgatagcatcgcatggacaggttataccatggattctttcgtgcgaacggacacatatcttgcattgaagcggctntaccaaagacaactggacgggcacacactggaagtcggagctcaaagcttgtcttgacaggattaaaaaccctggagagacagcgtaacctgtgggaagcctggcttatttttaataattcattggactggcgtttgtttacagacnaatttatggtgtaatggaatcttgagtaaaaattctagaatactctaaagtagtgtttgtacagcccaaaggcccc

SEQ ID NO: 709469 - DNA, 739 bp, Homo sapiens
ctacaactctgggggtcataggtctatgttaagggatcagagagaaaaagcagcctggtactatcttgcaaggcatatattatcatgtcccgtagcttgcttcaaatagcaatgtactttctacctgtacccttttacataaagtgtttaaatttcagaaagatcttttattaagcatactttcacagaataactgtgtttaggagctatattcatataaaaaagttaaacacgcttttttttcctgcctaaaaacaaatacaatgccagtatgtatttttaatggaaccctatttttataatggtacgttactgaatgtgttcatatgcgtgaccgttaagatatatcattggaaggtgaaggttgcaatcaaaagcaccaaccgggggttaacgatttagtagatataaccaaaagggcggcgtttagagtggggatatacatttaaacattttcctggttaaggttcccaagagagtgtaaaggttttagcagaaagcaaatatcttgcatctttatggaagttaaagcatgtttgcaaatattgcagccctctcaacacttcgcccgttcaggaaagatgtggacgcacgcgggtggcgcaatattaagacgctcatggtagcctgtcctagcctcgcaacaaggggggttctggggtcaacaggtaggttcacagaatcaggtctggttacaacccgcccaatttagttcaaattaactcttgtgctcaaaatt

SEQ ID NO: 709470 - DNA, 954 bp, Homo sapiens
ggtacaagccccaactgggccccaagtcccataaatagctttggattccaacatacaagcatttgacgcagtgaggtgctgccgacttgctctgtgactggagcaagtcatttagcctctctgggcctggtgtcctcatctgcagaatggagatgataatatctacttcacaaaggtgtgaaggccctgtgagacaccgcatgtggatttcctcgacattgtttgcccatcgtaactgctccagagaggctgggctcccttttctcgttgcaacactgctgtttatttcaggagatactctaaaagggaagcaagctaaaacaaagaacaaccaaaaacactgatcccgggacaactgcccggcaggacagcagagcaagggtacttggtgctcttcgttggggggatgttgggagaaggggctggagccatcccagggtctccaggctctggaagggagcaccccatgtcctcctctgggtgtggaatagggtgagtgtcttaggggtggagagagaacaggcagagtgtgctctcaccccttagctctgtagtgattttaatgattaaggctactgttcggtctgcatttggacctgagcaacagggacccctgcccagaggtccatccttcagcagggtgcactgcgtccccctccactgcagctgtctctatgagatgaagcatctgtcgctcagtgtagccatcaggtccactgcccctgaaatatgactgactaggttcaaatgttgactctgacacttagaagctgtgccaccttggggcaagttacttcatctctctgtgccttactttcttcctttataaaatgggtaaaataataaccacaccatcggttgtctatgaagattaaatgagttgataatatatgcaaagcacttagcatggctactggcacaagggtcagtaaacgttaactgttccacaaaaaa

SEQ ID NO: 709471 - DNA, 404 bp, Homo sapiens
tgaaacacccagagctggattctcccaagaagaagctgaacccccaactcccatccctgagaagcagcccctgggctgatgatcaggacttacagaacctggggcgatggaaacctctacaaatatcccatttagaaagaccgccagccctgccaacagaatgaaacggaggccaggttgctatggtctctactcaaatgttgactctgacacttagaagctgtgccaccttggggcaagttacttcatctctctgtgccttactttcttcctttataaaatgggtaaaataataaccacaccatcggttgtctatgaagattaaatgagttgataatatatgcaaagcacttagcatggctactggcacaagggtcagtaaacgttaactgttccacaaaaaa

SEQ ID NO: 709472 - DNA, 99 bp, Homo sapiens
ctgctttctcccactggtagtgggcagcttaatgctgtcagcccatgacaactgggccaaactacagcgggtgagctgggcagtgttggtgtacctgag

SEQ ID NO: 709473 - DNA, 646 bp, Homo sapiens
ggagccaagggacgcaagaaatgtgactccgggaaatggatgggaaatggattctgcagagacagcaaggccccgccaacaaccggatttgggcccagtgaaactgaattcggacttctgacttccagaactgtaagagagtaaacgtgtgttgtttcagccaccaagtttgtggtaatccgtcacagcagtcagggccaatggatacgcgggtctttcatccctttcgtgtatgctgcatggtacacctaaaaacgcaggctcggccgggcggggaggctgttgcctataatcccagcactttgagaggccgaggcgggcggatcacgaggtgaagagatcgagaccatcttggctaacacggtgaaatcacgtctctactaaaaatacaaacaattagccgggcgtggtggcatgtgcctgtagtcccagctactggggaggctgaggcaggagaatcccttgaacccgggaagcagaggttgcagtgagccgacatcgtgccactgcactccagcctgggcaacaagagcgaaactccatctcaaaacgaagacaaaacaaacaaaaaaacgcagactcggagcctgataggagagtgggaaccacagactatcaggaaggttctcttcccaaagagggtaac

SEQ ID NO: 709474 - DNA, 1717 bp, Homo sapiens
gccatggcggactgtggaccctgtacacgtatcctgaaaactggagggccttcacagggctctcattcgctgcgtcagatacagcgggggctcagggtccgcggtgctcgtccggcagcactccaggttccatgtgttggccaaagcaaccgcagccccgtgaatttctccgcaaactttcctgccggcaaggtcccagcattatgaggtgtgattgatggattcatgtgatggttatgacgaggcgaacgaccgaattgtcctacattactgtgtagcaagtgacgggagacttgcgtcggcacagctacctctcagcaggtcagacagacctcaggatgagttgacaagcagaggatgcagacatgttcgcgtgaaattctcagaatactagatgcaccgcactagcgcaacgaatcacaatggcgatgattaccaccaaagctatgagcgcaagtcgaatgcggacccaaacaagacaacacacaacgtgacccacggtagcagtcaaagtgcagaatgcgtcagcgaagatcgcaagcgcaagagactctcatcggtgcagccttgacatggggaattgtctcatacagccttgcagtcaacgaaacggaaagggaacgtaacacaacatggatcgagatcccgaaacgagaacggctcgacccactacagcaactagacacaatccccaccataccactcgtcacctagcaccccaccaccatgacatagagaagaagcgtcaataaaatgcaagacgacggaagataaccctaccaacaggcagcacaaaacagatacacaacacacagcaaccaataggggacccacactaatggaccaccaaaaagtgaagacacacaaccacgacgccaacggagacaaaacagaccaaacaagaattagacacctaagaataacagcaacagcatcacgacaacacaacagtagccccggagcagccacatgaggcatacagaccgatagggaaccaagtctgcacacaaccccggacgaaatcaaacgacaaacgcgcaatcacacacacccaaagaacatgcaagaccaaggcaatcaacgaacaaagagactcaggccagacacgaacagctcgaaaaaccaaaccaaatacagagcaacaaggacaagagcaaaacagagaacaacagacagaaaaccagcgataaaccaacgagactaccgagagaacaagagacaaacaacaaccagcacatgtcacgaaacacccgacaaaacgagacggtaacaaaccaaaaaagcacatagaagacacccacgcaacaaatccaaagaaacagcacgacaacaactacaataaacacaaataacaaccaccacaaactacagaacgaaacacaagaccatcagacatcataaacaaaacacacaaacaataacaaatatacacgaaaaacaaacgaacaaaccaagacaatagacatgtatgtacctaacaactacaacaaaatcatagaaaacataacaaataatacattatcacaaactacatgacccaacacaccaaccaacacacataacaaataaacaacacaacaaaatacacaagcaacaaacaatacacaacaatcccaccaccaacaccaaaacaacaaacgatactccactcatcacaactaaataaccactcatacaccaacaatacacaccctcaaaagtacaaaacaatataaac

SEQ ID NO: 709475 - DNA, 826 bp, Homo sapiens
cacagtggctcacgcctgtaatcccaacacttgggaggccggggcgggtggatcacgaggtcaggagatcgagaccatcctggctaacacagtgaaaccctgtctctactgaaaaatacagaaaaattggccaggtgtggtggcgggcacctttagtcccagctactcgggaggctgaggcaggagagtggcgtgagcccgagaggcggagcttgcggtggggctgagatcgcgccactgcattccagcctggcgacagagcaagagtctgtctcaaaaaaacaaaacaaaacgaaaacagaagattccataggcatttgtgtattttttctaaagtgacaacctatttggccaaaagcaaaatgtagatgacgaacgtatagccttgtgttttaacatttttgtgcaaatctcgtaaagtgcctgacttcatagaagacagcgtggatttctcatcagttcctggatttaactcgtgtgcgcaaatagttgtttccattgggagggtcatatgacaagaaacaattgtgccctcaggcaggtatctcattagacacaagagacggacgtggccaggcacaaggtggctccattgcgctgttaatctcaagccaccttgtggggagggcccaagggcggggcagaataaactgtgaagccccaggaagtgggagaccaaggcctggacaacctggcaaaaatttggtcctctaacaaaaagacccaaaaattagccaggcttgggtggtgtgccgccttgtagaccaagaaggaggctgacaggggaaggattgctggaacctgggaagggggagggctccgtgaa

SEQ ID NO: 709476 - DNA, 1184 bp, Homo sapiens
  misc_feature (1105)..(1105): n is a, c, g, or t
  misc_feature (1164)..(1164): n is a, c, g, or t
  misc_feature (1174)..(1174): n is a, c, g, or t
ggtggggggggggcggggtgcagtggggtagggttacctgttaattgctgagactcagatgaaagtccagctctccctgggcaaccctagagggcagcagaggaccccagagctcattcaggccttgctgcttgttctaaactacaccttaggattttttcttctttccaaaacattccattgattttataaagactttctatagagaggctttcacttttgagttctttgagtttaaagattgcttttcttgaaatgctctttttttaatgtagaaaaattttactttttcaaatatgcatacaatttttaaaacagtagaagcaaattcattttaatgaccatgtaaagagcgaatgtcagacagtattattaccagtttattcaaattacatacatgttcctaccaaggtggaaagaaattcaaacctcatggtaaaacttaagcacgatttaagataaaagcatagtatttcttcagtgtagacttattaagtgccttattgaacaggatcttaacctgctttttctgtttttttgaaagagttaatgcaattgttgaagcttctaaccaagaaacaacttaaggaattgggagacttggtcccctcgttgtcagggttctggctataagtacctccccacctttgggttttcttaaatatgccaaaaggaattctagtttttataaccaatgggtttttttgtttgtgtgcttatggatttgtgtaatcattgatgcttaatgttgtggattcataatataaaaagtggctcctgtcctttatatttattcatgtgctagaaatagtatgcattatataaagagtatgaagttttcataagcctttatatttcaagctctttatttaaacattgttggaatatgtggcataagccttgtttcatttatttaataaactggagtaatatataataataaaaatgatttctggttatttcagataaatagaaacattcaaacaaaggcaaactacatggagtctagaaggctggagtagaaatagtgttgcagctgcagacatttctctctgcatggagaagttgctgggataatcttactcattgcctggcacctgtgtanccccctaccctccccccccccaacccccctccccatgtatgaaatacttggcagctcantcaaagccantgaacttgat

SEQ ID NO: 709477 - DNA, 1260 bp, Homo sapiens
  misc_feature (446)..(446): n is a, c, g, or t
gctgggacagtgatcacaggtcgattgctgggaccccatctggattcttcgaatcacgtgcatcagcactagcagctacctgtgctggatactgaggagcacgacatctgatcctgatagtagaaacctttcccgtaggacctacaggaacttgcttgtgaggttcatatgtcgcacaaacgttgcatcgttcctatccgacagattgacgctcggttgtgtccttgtactaagcgcttgtgataggcgctcgacttgcgacacgcttgctacgaaccagtgcccagtagatgatctactaccgatttgcagtctggtgcaaagtacactatggaggtacctagtgcagagggtcacagacgcaaggtcatggacttgctccgcgatttgcggacattacaaagaaatacggggtattggaaattggagtggtttcacccaggaanacgccgaggggtgtctctgtcgaaagcgccaatcggtgggttgaacaggcccagagtccctgtcaacgcagagcagaggaagaaaactttccacaaacaggaacaccatacgtcagaaaaggcaaatcggtgtcgaaagacgatacggttacactaagcgtgaaagaccgcgagggccactttcaccttcagcgtgaaaaatgacagggacccatggactcgagattcgcaatcatagtacttagaaacatggtcttttggcacatccgaagcgccttccgtcctcccactggggacaacgaattcgcggggctggcggtaccgactacgttggccattgcagaacaggaccgcccacgttttccaattcgggttcctctgttgaacaaagacagagtaccactacgcaagaagggaaacatctacacgccgaggaacaggggacgttcccccaagggcgtgacaaccctgggaaagaacttggggtcgggccacgtgcaccccgacagcctgaaacagttgcaacttccctccaggagaggggccccaccttgcgggcagaagaacaacacgtggagaccctggtgagtcgaagaaacacacacctacctgtgttcgccaggaacgtgtcgcactcgcaaggggcgcctcttcacatgacacagctacgataacactgggggcagcgcattgacacacgcgtcgcacccccattgcccacgcacgacaaacccagaacacagcccatcgggcgctggtatcgcagagccaagtgggcgcacatctcatacgcaatgaacacccagaggagcaa

SEQ ID NO: 709478 - DNA, 1129 bp, Homo sapiens
ggtggggggggggcggggtgcagtggggtagggttacctgttaattgctgagactcagatgaaagtccagctctccctgggcaaccctagagggcagcagaggaccccagagctcattcaggccttgctgcttgttctaaactacaccttaggattttttcttctttccaaaacattccattgattttataaagactttctatagagaggctttcacttttgagttctttgagtttaaagattgcttttcttgaaatgctctttttttaatgtagaaaaattttactttttcaaatatgcatacaatttttaaaacagtagaagcaaattcattttaatgaccatgtaaagagcgaatgtcagacagtattattaccagtttattcaaattacatacatgttcctaccaaggtggaaagaaattcaaacctcatggtaaaacttaagcacgatttaagataaaagcatagtatttcttcagtgtagacttattaagtgccttattgaacaggatcttaacctgctttttctgtttttttgaaagagttaatgcaattgttgaagcttctaaccaagaaacaacttaaggaattgggagacttggtcccctcgttgtcagggttctggctataagtacctccccacctttgggttttcttaaatatgccaaaaggaattctagtttttataaccaatgggtttttttgtttgtgtgcttatggatttgtgtaatcattgatgcttaatgttgtggattcataatataaaaagtggctcctgtcctttatatttattcatgtgctagaaatagtatgcattatataaagagtatgaagttttcataagcctttatatttcaagctctttatttaaacattgttggaatatgtggcataagccttgtttcatttattataactggggtatctttacagaaaaaaaaaaaggggggggctaaaaataccgaggggcaagttaccgtcccggttttggtaagggccaaagaggggaataagaaagaaggcggggttaaacgggaggaaagacgggagttgtgggaaccccttggggggtatggagaccacaatagacgagaaaaggttgagagctggcgagtgaaaaaacgaaa

SEQ ID NO: 709479 - DNA, 119 bp, Homo sapiens
ccctgggctctgaaagaatagtgcctctgacctgccccttgatccatatctatactgtgtctttgttacatggcttgacagagcagagcccttacctattattcctatggacacggtaa

SEQ ID NO: 709480 - DNA, 1126 bp, Homo sapiens
  misc_feature (1047)..(1047): n is a, c, g, or t
  misc_feature (1106)..(1106): n is a, c, g, or t
  misc_feature (1116)..(1116): n is a, c, g, or t
ggtggggggggggcggggtgcagtggggtagggttacctgttaattgctgagactcagatgaaagtccagctctccctgggcaaccctagagggcagcagaggaccccagagctcattcaggccttgctgcttgttctaaactacaccttaggattttttcttctttccaaaacattccattgattttataaagactttctatagagaggctttcacttttgagttctttgagtttaaagattgcttttcttgaaatgctctttttttaatgtagattttactttttcaaatatgcatacaatttttagtattattaccagtttattcaaattacatacatgttcctaccaaggtggaaagaaattcaaacctcatggtaaaacttaagcacgatttaagataaaagcatagtatttcttcagtgtagacttattaagtgccttattgaacaggatcttaacctgctttttctgtttttttgaaagagttaatgcaattgttgaagcttctaaccaagaaacaacttaaggaattgggagacttggtcccctcgttgtcagggttctggctataagtacctccccacctttgggttttcttaaatatgccaaaaggaattctagtttttataaccaatgggtttttttgtttgtgtgcttatggatttgtgtaatcattgatgcttaatgttgtggattcataatataaaaagtggctcctgtcctttatatttattcatgtgctagaaatagtatgcattatataaagagtatgaagttttcataagcctttatatttcaagctctttatttaaacattgttggaatatgtggcataagccttgtttcatttatttaataaactggagtaatatataataataaaaatgatttctggttatttcagataaatagaaacattcaaacaaaggcaaactacatggagtctagaaggctggagtagaaatagtgttgcagctgcagacatttctctctgcatggagaagttgctgggataatcttactcattgcctggcacctgtgtanccccctaccctccccccccccaacccccctccccatgtatgaaatacttggcagctcantcaaagccantgaacttgat

SEQ ID NO: 709481 - DNA, 1110 bp, Homo sapiens
  misc_feature (1031)..(1031): n is a, c, g, or t
  misc_feature (1090)..(1090): n is a, c, g, or t
  misc_feature (1100)..(1100): n is a, c, g, or t
ggtggggggggggcggggtgcagtggggtagggttacctgttaattgctgagactcagatgaaagtccagctctccctgggcaaccctagagggcagcagaggaccccagagctcattcaggccttgctgcttgttctaaactacaccttaggattttttcttctttccaaaacattccattgattttataaagactttctatagagaggctttcacttttgagttctttgagtttaaagattgcttttcttgaaatgctctttttttaatgtagaaaaattttactttttcaaatatgcatacaatttttaaaacagtagaagcaaattcattttaatgaccatgtaaagagcgaatgtcagacagtattattaccagtttattcaaattacatacatgttcctaccaaggtggaaagaaattcaaacctcatggtgatcttaacctgctttttctgtttttttgaaagagttaatgcaattgttgaagcttctaaccaagaaacaacttaaggaattgggagacttggtcccctcgttgtcagggttctggctataagtacctccccacctttgggttttcttaaatatgccaaaaggaattctagtttttataaccaatgggtttttttgtttgtgtgcttatggatttgtgtaatcattgatgcttaatgttgtggattcataatataaaaagtggctcctgtcctttatatttattcatgtgctagaaatagtatgcattatataaagagtatgaagttttcataagcctttatatttcaagctctttatttaaacattgttggaatatgtggcataagccttgtttcatttatttaataaactggagtaatatataataataaaaatgatttctggttatttcagataaatagaaacattcaaacaaaggcaaactacatggagtctagaaggctggagtagaaatagtgttgcagctgcagacatttctctctgcatggagaagttgctgggataatcttactcattgcctggcacctgtgtanccccctaccctccccccccccaacccccctccccatgtatgaaatacttggcagctcantcaaagccantgaacttgat

SEQ ID NO: 709482 - DNA, 1130 bp, Homo sapiens
  misc_feature (1051)..(1051): n is a, c, g, or t
  misc_feature (1110)..(1110): n is a, c, g, or t
  misc_feature (1120)..(1120): n is a, c, g, or t
ggtggggggggggcggggtgcagtggggtagggttacctgttaattgctgagactcagatgaaagtccagctctccctgggcaaccctagagggcagcagaggaccccagagctcattcaggccttgctgcttgttctaaactacaccttaggattttttcttctttccaaaacattccattgattttataaagactttctatagagaggctttcacttttgagttctttgagtttaaagattgcttttcttgaaatgctctttttttaatgtagaaaaattttactttttcaaatatgcatacaatttttaaaacagtagaagcaaattcattttaatgaccatgtaaagagcgaatgtcagacagtattattaccagtttattcaaattacatacatgttcctaccaaggtggaaagaaattcaaacctcatggtaaaacttaagcacgatttaagataaaagcatagtatttcttcagtgtagacttattaagtgccttattgaacaggatcttaacctgctttttctgtttttttgaaagagttaatgcaattgttgaagcttctaaccaagaaacaacttaaggaattgggagacttcttaaatatgccaaaaggaattctagtttttataaccaatgggtttttttgtttgtgtgcttatggatttgtgtaatcattgatgcttaatgttgtggattcataatataaaaagtggctcctgtcctttatatttattcatgtgctagaaatagtatgcattatataaagagtatgaagttttcataagcctttatatttcaagctctttatttaaacattgttggaatatgtggcataagccttgtttcatttatttaataaactggagtaatatataataataaaaatgatttctggttatttcagataaatagaaacattcaaacaaaggcaaactacatggagtctagaaggctggagtagaaatagtgttgcagctgcagacatttctctctgcatggagaagttgctgggataatcttactcattgcctggcacctgtgtanccccctaccctccccccccccaacccccctccccatgtatgaaatacttggcagctcantcaaagccantgaacttgat

SEQ ID NO: 709483 - DNA, 641 bp, Homo sapiens
  misc_feature (58)..(58): n is a, c, g, or t
  misc_feature (68)..(68): n is a, c, g, or t
  misc_feature (91)..(91): n is a, c, g, or t
  misc_feature (101)..(101): n is a, c, g, or t
  misc_feature (203)..(203): n is a, c, g, or t
  misc_feature (349)..(349): n is a, c, g, or t
gtaacctcaattctactttctgtctctgaattggcctattccaggatctctcaccccntcactcaggntggcgcaatcacgactcattggntcactgcagnctagacctcccagctggagcaattctcctgcctcagccttctgagtagctgggactacagttggttctaaagagtggtgagtcagaagagacgtcaggcagncaagcgacttgggccatggctctgacctagacttctcacctccggagtgcccgagcccactttcctggagaacctgctacggtacggactcttcctgggagccatcttccagctcatctgtgtgctggccatcatcgtacccattnccaagtcccacgaggcggaggctgaaccgtctgaggcccagaagtgttgaggtgaccgaggaagcccaaggctgctgttccttctgtgaacaaagaggccaaagaaagagactaagacagaagcggtcgaacgaggaggcctgagtgagctgggcgggcagcgacgagggtcttggggaacagccctcctgggaatctacattgtgttcccccgattcaagggctcagggtcttgaacgaggttgtgacgccctattgaccgcagagatctagacagtccgtaaagtcccag

SEQ ID NO: 709484 - DNA, 774 bp, Homo sapiens
tggaaccatgaccggtggcctttatatttaaaaacggtaactacccccgtgccgggggcccctatacaaaaacaaaacacaacctaaaaatagggttcctccctgaccccagagacgggggaggggtagggagggggggggtggggggcaggacgtggggctctccaacaaatgtggaatgtgtgtgtgccgggaggggcccaccgtggaggcccccacttccacccccacccgactcctcaggagtggcgcgtgggcgtgtccccttcgcctcgtgttccttgccagaagagtggaggagaggcgggccccaatctctttctgtgagaagtgcctccggtggggaccccggtgtgtgcgtgagtgggcgtggtttccaccaggccggggccggtgttgtggcaagacgcctctcactccggccctcgtgtgttccccgtgctccgggggcccgcgggatctcttctttctccttccattcttcaaggcgttcgtgtctcgagaaagtctcctccagccgagtggggggcccccccagtgtgggtctccgcaatatcggccgcgggggttcccccggaaagggtgcaaaactcctccaaactggtgtgggggcacagaagggggataccttcggccgtgaagaggggcagtaaagagatcataacagggaagtgctcgcagctaacaacgttaatccccgcggaagtggacgtgtaaatgccagcagtggttggtgttgacaaatctccccgggccaaaacccccaactccgaa

SEQ ID NO: 709485 - DNA, 299 bp, Homo sapiens
  misc_feature (299)..(299): n is a, c, g, or t
ggcggacctggttccaacatcatgtagataatgccccgtaaacctctcggaagatgcacgaaatagtattcctcatagacaccattgcatagctcttgttcttcacgttccagttgtactcccggagccatttggtagtcatacacatcatctggtgcatagatccatctcctcctcctggtcccgctttcgtgacttcaacgtcgtcttctacaggcaggaaataggccacaaactggttccctacctcatccatcatgccactaatcatggcctgagacgtcatctccaatgcagtn

SEQ ID NO: 709486 - DNA, 697 bp, Homo sapiens
ctggccttcgtcttcctttcgtgcttggagcttcctgccctcgaacatcagactccaagttcttcaggttttgaactcttggacttacaccagcggcttgccacatggtctcaggccttcaactacagactgaaggataccctgttggcttccctacttttgcggttttgggactcagactggcttccttgtctcctcagtttgcagttggcctatcgtgggacttcaccttgtgatcatgacatctccaagaacttcgttcactgaagtcttaaacccctcacagtgacccatgaggattggaatcagcttctttcaaactcttactattgttgatattttgatcgcttcctatgaatcgtgaatattttaatgacatctaaaatgtgactcctggccgggcacagtggttcacgcctataatcccagcaccttggtaggtcaaggcgagaggatcatttgaggttagaagtttgagaccaacctgaccaacatggtgaaaccctgtctctactaaaaatagtaaaaattagctgggcgtggtggagaatgcctgtaatttgagctatatgggatactcaggccaggagaatcgcttgaacctgggaggtggagattgcagtgagccgagatcgcgccactgcactccagctgggtaacatagtgagactccactcaaaataaattctaaatacat

SEQ ID NO: 709487 - DNA, 558 bp, Homo sapiens
  misc_feature (168)..(168): n is a, c, g, or t
ggtaagtgtcgctagtttgctgcctcgtatctcaggtttgtctctgtttttgagaaatggacagtcttatttgaccaggatgtgcacttcatgtttcctatggtgacttctaaataccagcacagaatgactgtgactcaacatcagaccgtacttgtgttatggggnatgatgagccgcacagacctcactagtttgtgcacatacttaattgtgctatgatggggctgtaacggtgaacggcacgagagagggttcagtccgacattgttatgcatactgggcaaacgtgctggttcacaccgagtttgagattagtatatttatgactactacacttgtgataatcttgtaaatcagaacaattcctccatagttgtatccacatcatgtatgcttttacgcattgttaattggttactaacagcgaacgatcctacataatgttgtgataccacgctatcaacgcaaacttttccccacgtacgttcgtttgggtccaggtggcccgcgaaaaaagaaaatgtttactaatcggaaacaaggggagagatgcca

SEQ ID NO: 709488 - DNA, 1151 bp, Homo sapiens
tgtgtgcctccaggccgtcgcagtgaccacatggagtccgcgcactgggccatcacgtggcaccgctacaggtgtcccatgagggagttgctgtgtggcacctattatggatccccatggagcgccgggtggtaatccaatatgaatgtctcctatggcccagaccatggagacgtcacgtggcgatcagaggagctgtagtggaggatgcacgtggtacctgcagtggctcgtggatgtggtagacgtgggtggaccacacctggtgcctaagggtgcagagcctgtgtgacgtacacgtcgacatgtggcgcctgactaggctctacagactgcgtgttcgcgtggaggcagcatgcgcatcagttggtggacggctcacatggtgccagagaggtgtcagacctgcctggtacatgccatcgaatcgtagtgccagagtagacctacgcaggctcgacgcgtcgtaggctgcgcccggtgccccatggcgcttggccacatacgtgcggtagccgcgcccacatgccctgctcgtgatgcaggaggggcgccagaacgtgtggcatggccatcctagcaaaatctagaggttaagccctgagagtccgggtgggtacccccacagagaggacagccgagcgttgacccggcagggacgaggggcatggagaggtatgacattgggcgggggcctacgcctatgtgaagggccagcgcacacagcacgtgagccagggggacatagccccacgcattcgctttaaaaccgatgggcaacggtctgggaccaatggcattgacgcgatcgcaagggagacaggcccgaagacgccgaggaaccacgaatttgagtgataaacacttaagcaaacttgagggtacgcgcgataccgagagaagggggtaccagcccccattagaggttggacgacgagacaccgtacagcggaggggcccctaataaacgcggcgaggagcttaacacgggcgcacaagtgactggacatagagaagagatgacacactcgggcggcgatagcaccaccatggtagcgagcagaatagggtctcttgtggaacagtggcgcgttagggcaggccaaaaatattgggagccctggcgacacgacagtggacactacacgggc

SEQ ID NO: 709489 - DNA, 160 bp, Homo sapiens
atcacacaggtgtatattgtaatggtttaaggtgctataactgggctgggtgcagtggctcacacctgtaaccccagcactttgggaggttgaggcaggaggattgcttgaagtcacggagtttgaaaccagcctgggcaacaaagtgagaccttgtctc

SEQ ID NO: 709490 - DNA, 420 bp, Homo sapiens
tcgttttggctttttctccccccccaagtctgttttgggttttcacgtgcttcaaaaaaaaggggctgcccccccccccctcacgtcactcggggctcggtggacgggcccaaggtgggaacggccggcccccctgtcccctcgggaggggaacttagcccgacttttaccggggtcccccagcttccggactggccgccccccggaggaaccacgggggcgcttctgggaacgtgggcggggggccgtttccttaccctaccagcctgggaggcccaggtgtaacggtcccagggggccggtcctgcctgtcagctccaggttctggaaccccgtccagcccaaagtgggcggattccccgtggccgactcttttccctgctttggtttgtttgaaatttaaaaaaaacccccttatta

SEQ ID NO: 709491 - DNA, 428 bp, Homo sapiens
tgttgcccaggcagaagttgcagtgacccgagattgcgccattgcactctagcctgggagacaaaatgagactcccatctcaaaaaaaaaaaaaagaaaaagactggcttaaatcacatcaaatgtttatttctgaaatttcttaaacctgatattttgtataattttaaatatttaggcttcagttaaactaccaaaataaaacttaacgtatctcagagtaaataggaaacacctagtggggatttcttttgggtgtctctgtcctaaatcagactcatagcttagcctttccaacctgttcttctttgtgataggtcagttttttttctcccccagccaaactgtatccagctttaaagatactttccaaaaacagtcatggtatttcaggcagaacatggacaatccttaacaatgagcgacca

SEQ ID NO: 709492 - DNA, 637 bp, Homo sapiens
cagacgttcacagagtgctacccaccaagcactcagatcttcatgagttacacagcgtactatgccagtatgcatccgaggatggacttatacgcacaaatgaccagtccaggactctacccaatgaatgggaatgtctgtaagggccccagcaggtagaacatcctcagaaaagaagtgacagaacgatgaatggggatcatgaaacgtactgacacaagctattagcgtatccaggggaagttcgtctacactcatgctgcagtattgacagcaaacttgattgcacaaagctgcctgtgccttatatgttgacggagtcctggcatattgctgattgctagtaggcatttaatatgcgaattcggaatcagatgtcgacattacttccagctaatgtggcatcataggcgtcagctaaggtttaagacatggatgaagactccaccggagactaccatctctaccatgagctctgttaaggaaggctgattagtcgatattgccgctatattctgtacatttccgtgacatgtgcataatcatgcctttcttgctgaagtagtcaagcataacatctccgagtaatggagtcacggtcgtaggagataggaatactagtgattgtcccgtgtct

SEQ ID NO: 709493 - DNA, 253 bp, Homo sapiens
gggatcccgcagattgagaacctcatggaggagctgctacctgaagaagaccacgaggaggagatgaacgccctgcgaggccaggtgggtggtgagatcaatgtggagatggacgctgccccagtgctttggaccttgagccgcatcctcaacgatgatgcgtgaccatgtagtagtatggcggcagatgaagaacctgcaagtgatgcctgagtgattgtgttcttcatgcaatgacatgagtgaagctgaa

SEQ ID NO: 709494 - DNA, 150 bp, Homo sapiens
atacacaaaataagtcttaaaaattggaatatatcaatatcttctctgaccacaatggaaaaaaaactagaaatcaataacaagaggaatgtttgaaaccatacaaatatatggaaattaaaatatgctcctaagtgattgttccccgct

SEQ ID NO: 709495 - DNA, 180 bp, Homo sapiens
aaaccatctgtggggtgcagagtaacctgagggaggctgggccactctgggatatgggcggtctcagcactgtccatccaagaagcctgctcgccatggctgcagtgcgccatttcattctttgccgtccgtctgggttattgcccctctgctccagattgctcaccgcacttcaatggt

SEQ ID NO: 709496 - DNA, 919 bp, Homo sapiens
  misc_feature (143)..(144): n is a, c, g, or t
accagcttatgaccatagattagcgaatttcgaagctcccgtaccgcgagccagactcgtgatttccgagcacatcttgtggtgcgtgtccatgggacaacaagtccgctcccgtggacactggacggcatctatcgctgagnngtcaaggcacagtatgagtgagatggccaaatgcagccgggctgaggctgaagcctggtaccagaccaagtttgagaccctccaggcccaggctgggaagcatggggacgacctccggaatacccggaatgagatttcagagatgaaccgggccatccagaggctgcaggctgagatcgacaacatcaagaaccagcgtgccaagttggaggccgccattgccgaggctgaggagcgtggggagctggcgctcaaggatgctcgtgccaagcaggaggagctggaagccgccctgcagcgggccaagcaggatatggcacggcagctgcgtgagtaccaggaactcatgagcgtgaagctggccctggacatcgagatcgccacctaccgcaagctgctggagggcgaggagagccggttggctggagatggagtgggagccgtgaatatctctgtgatgaattccactggtggcagtagcagtggcggtggcattgggctgaccctcgggggaaccatgggcagcaatgccctgagcttctccagcagtgcgggtcctgggctcctgaaggcttattccatccggaccgcatccgccagtcgcaggagtgcccgcgactgagccgctcccaccatccatcctccagcaccacccacaatcacaagaaagattcccacccctgctcccatgcctggtcccagacagtgagacagtctggaaagtgatgtcagaataggttcaataaaggaagctcattctgaggcctgagtggtc

SEQ ID NO: 709497 - DNA, 326 bp, Homo sapiens
gggatcccacacgaccgaagactgagatcttgatgtcattgtcagtgtcagtgaactgaaggctggacagcatgtcagaagctcacaagttcttggagccttacaactgactcttatccagcccaaaagaatgatgtctgccgcctggacgctattacgaacagccagataatggagtcctcaactacccaaaatgtgcctgcaaattcaaaccggacccagctgggcaaattgtccggcatttgggggacttccacccactatggttactgcactgggcagccctgtgtcttcatcaagatgaaccgggtgtcttcgggtcgtat

SEQ ID NO: 709498 - DNA, 188 bp, Homo sapiens
ctacattctcgatgataataaagtaaacctagtgaaaaaaaaacaccaaattcccttaataataaaagtctctggataagtggtgatgtagtaaagtaaaagagcagtggccagcaatagcaaccaaaaatggtagagctcagaattcaagtaagtatacctggcgggatttttttaaaacaagaaaa

SEQ ID NO: 709499 - DNA, 321 bp, Homo sapiens
  misc_feature (2)..(2): n is a, c, g, or t
  misc_feature (12)..(12): n is a, c, g, or t
  misc_feature (20)..(20): n is a, c, g, or t
  misc_feature (29)..(29): n is a, c, g, or t
  misc_feature (40)..(40): n is a, c, g, or t
  misc_feature (47)..(47): n is a, c, g, or t
  misc_feature (50)..(50): n is a, c, g, or t
  misc_feature (68)..(68): n is a, c, g, or t
  misc_feature (75)..(75): n is a, c, g, or t
  misc_feature (81)..(81): n is a, c, g, or t
  misc_feature (90)..(90): n is a, c, g, or t
  misc_feature (113)..(114): n is a, c, g, or t
  misc_feature (124)..(125): n is a, c, g, or t
  misc_feature (142)..(142): n is a, c, g, or t
  misc_feature (145)..(145): n is a, c, g, or t
  misc_feature (163)..(163): n is a, c, g, or t
  misc_feature (175)..(175): n is a, c, g, or t
  misc_feature (186)..(186): n is a, c, g, or t
  misc_feature (233)..(233): n is a, c, g, or t
  misc_feature (249)..(250): n is a, c, g, or t
  misc_feature (297)..(299): n is a, c, g, or t
anttatcaatanttgttttnattaccccngtgttcctacngagatgnggnttaaatcctatgggattngtttgtnatttanaaaatttanaattgcgtccttactattcaagnnagtagaaacnnttttacacagtaacacnatncgttgttggtatttagtntatctgaagggncgcagttgccntgagcacttggtatctcgcagagcttggacctgtagattttgaggcngattaggaattctgcnngatgggtaagcttccggtattgggaggtggagaaggggagggttcgnnnaaataaataagagttattgcac

SEQ ID NO: 709500 - DNA, 285 bp, Homo sapiens
cggagtgtacgtgaagccgggcaacaaggaacgcggctggaacgcccccccgcagtttttatacgggctgcagacccaggccggcggacccaggcgttcgttgcttaccaagagggtagccccaccccaaggattggatcccccagagtccccgcatcaaaaactttttcttgggccctccccaaatggggcctccacctccttcaaggaagggctccaaggtccccacctgtgggaggtggccctccctctggggtggagccaacaagtttccagtgagtctag

SEQ ID NO: 709501 - DNA, 122 bp, Homo sapiens
  misc_feature (88)..(88): n is a, c, g, or t
ggctcaggatccggcatcctttatgcctccacagcaccttgctctttccccagccaatcactttagatgctgaatcgattttaaacanatgttttgtcatatggctaatcaagagccaggta

SEQ ID NO: 709502 - DNA, 169 bp, Homo sapiens
  misc_feature (68)..(68): n is a, c, g, or t
  misc_feature (91)..(91): n is a, c, g, or t
tgggatggaaatgcggggaaaagagacggaagggaaaccgaaccgaagggggaagggaaggtcccttntttttggaaggaagcctaagaanagcggtttgcccggcccccttaaaggttggaagcgaaagaagggaaaggttcctttcgcccgtttttcttccttgcca

SEQ ID NO: 709503 - DNA, 998 bp, Homo sapiens
  misc_feature (17)..(17): n is a, c, g, or t
  misc_feature (29)..(29): n is a, c, g, or t
  misc_feature (33)..(33): n is a, c, g, or t
  misc_feature (36)..(36): n is a, c, g, or t
  misc_feature (63)..(63): n is a, c, g, or t
  misc_feature (998)..(998): n is a, c, g, or t
cgggatggtgggggttngtttagggtgtngagnagnttgagtcttaggaaaagccctgcgggncggacacgagattatgctagcatatctacggcattacctgtagacagcatgattgctcaaagtccaccaacaaaagcatcagcttttcaacttcattatgctcggccatccaggtaggcatgtgtaactgagcattaaatttcggatggagtcatcatggccaattataggacctagattgctctcagcaggcctgagaaatgagttgaaatgtgcagaactgtagaaactttagaggcaacagattttggctccccgatcagtgagtgcctgttcacagcactatctatctttctctctccaaatgtcactgagccctttagatgtttatattcaccacgagaagccagtcataaagatacaggaaatttgtgcattataaatgcagtatcactgtcttacacttgactgtttgatattattcttgtgtgatcaagagcaccgcacgctattccaactgtacatgaagaaacgtgaacatgttctttccacctgaggggtatagataactgtgtcttctgaagacccacaaaatatcaaagacaccctgtggtgtatacaccgggttggcaggtgccaactgtactatttcacagcttcttagccctgtacatatgtataagaccagataggtcctcctaaaaaaacaaaaaaaaatgggctgcatggtgccacacaggaggaggacttgagcgcccgtggccccttaaacggggtctcagggggaaaattctcctcctggatactccggggcctgggctttttggcgggggggagggagatagggccctctaggggcggggtcgggggattccccgatccgggggaaaccccggagaaaacatgtgatgcaagtggcccgcaaagccgggatacgcattaagccgcggggagggggttttttcccttggccccgcccacaggaagataaaaan

SEQ ID NO: 709504 - DNA, 207 bp, Homo sapiens
cctaagccgcggggcccctcggctgcctcagcttcctgactagttggctggtatcgttcggacgcagtcgtcgattcggttacagcaggacttcgcggtgctcactgcagagatcacgtattgattagtgtgtgtgtgtgtgatgtgtgtatatgtttgtgtgagtcttgtggtgatgttattatgtgtcatgtttgttgggggttg

SEQ ID NO: 709505 - DNA, 845 bp, Homo sapiens
taactgttgacgtttccaaagttgtagagttagtatggcctctgtttccagtggctggggccaaaatacgggatgagttattatctcctactaaccttttagttttgtaaatcactaagacaattgtttgcttggcagatcataagttgacttggcaacactcattactatctattctctgaactgctaagaaccctttcagttttcttcacagctgagacacttttaacacagcgggcccaatgttcatcaactgcaatattcgatcgtgttttctctcttcacttccccttcaaccactttaacaccattccagagatttttttcccctcagaaatattagtcttggacgattgtgcccagctatatatttgctctagcagttcctaatggtgcccatttcatcctgacctaaccagtttattctcaatacatttttctaaaccacacgaatcactacctggcatgtgaacactgatctgtcggtaactggcacgaaacctccgcatctgtatttcatacccataaaactcgatacgtagtctactaagaacaccaccactacacccaccacccccaccctttccgggcagtgcaggctcgctcgcaccgatccctcacaccacccggtgcgcccgcgccccacccgtactacacccgcgcccaacgtgaccaacgacccgcgacctacacgtcgcaccaccgaaaaccaccacgagcgacgaggctcacaacccaagcggcgcaggcctcggcacccaggccccacgccatacaacccgcagccacccagccgcccgaagcacagccgacagccccccactaccgccgacccccaaaccacc

SEQ ID NO: 709506 - DNA, 567 bp, Homo sapiens
agcagccgaccaacagtgaagaaccgtgtctctactaaaaatacaaaattagccaggcatggaggcaggcgccggtaatcccaactactcgggaggctgagagagggaatggcttgagccaaggaggcggaggtggcagtgagccgagatggcaccactagactcaagtctgaatgacagagcgagactctgtctcaaaaaaaaaaatctgaagcataaaaggtttcttcagaaaagcagacacatcttatactaagggttttccaacattattaatctccggtaatttagctcggtctgggagaacgggaaacatcatagtcaaggacctagatacatgagactctgcatttcatttatccaggacggcaacatttggaatatggatgatttggaactccctatttactattaactaagtgatgatgtacttttcaggcggctagccacctgcgtaatgtcccataataaacgtaatccaggaagtggcttagagagcatagaatggtgtaacaagaatttcatctaggcaatagaaaccagtttattcctaaaccccaacctagt

SEQ ID NO: 709507 - DNA, 590 bp, Homo sapiens
  misc_feature (49)..(49): n is a, c, g, or t
  misc_feature (125)..(125): n is a, c, g, or t
  misc_feature (150)..(150): n is a, c, g, or t
  misc_feature (186)..(186): n is a, c, g, or t
  misc_feature (231)..(231): n is a, c, g, or t
  misc_feature (233)..(233): n is a, c, g, or t
  misc_feature (377)..(377): n is a, c, g, or t
  misc_feature (406)..(406): n is a, c, g, or t
  misc_feature (408)..(408): n is a, c, g, or t
  misc_feature (427)..(427): n is a, c, g, or t
  misc_feature (435)..(435): n is a, c, g, or t
  misc_feature (536)..(536): n is a, c, g, or t
aattcgcggccgcgtcgacacggctgcgagaaggacgacagaagggaangtatgaggatggtagaagctctcgtcgaaccagatggatgaagaccactaacggcttttgtttcctctggtaacancaagagacagagcgacatgagagantggaccgcggggctgcactggagaatttactggtangataattcatccctaaagagattgaagtgagcttcagaatgggcnangagccccagagtatctcaaagggactttgcaggaactgcagaagaaactgtctctgctgatagactccttccagaataactccaaagtggtggcctttatgaagtctccatgggtcatactttggacagccatccgtttctggncttcaccttgctggtgttcatgtcagtcngncgttcctgttgggattctnctgctcangtggtgcttaccaacctggctgctctgctgggggtcaaatatggaaggccactgacacagccaaacaccagttgtgacttctgccagccagaagtctgcanacttcgaagggctttaccaggatgatgatgctcggccgggcttctttcgttgct

SEQ ID NO: 709508 - DNA, 134 bp, Homo sapiens
ccacatgtgctggctaatgtttaaattttatgtagagatggcggggggggcgggggtctccctatgttgcccaggctggtctcgagctcctgacctcaagcgatcctcccaagtagctgggattacaggtgcaa

SEQ ID NO: 709509 - DNA, 1027 bp, Homo sapiens
ctccgactgcagggtctgatgtcatcgtagacagccttgcttcgtgggggcctggcagggcccctgcctccccgaccccacgcaaccaatgacaaacccccgaacccaccgcactacactctatcttacccagaccatccactccggcccctgagccaacatgcggcccaccagacccagacatacccagggaacgacaccagatagagaacacaggaacacagatccacatgaaccagaagatcctgacgaccagatgcacatggagatatacaccggagcatcggataaatgggcacacaccactaggaacattcacaggcatatgacacacagaacaagaaggaacacatcaccatgagaggaaacaaggagatgacagagagagagaagataaccatggtgacggcacgagagagatgagaacactgagagagaacgagcacaattgatgagactaccataccccaatacgcaacacctcgacccccatgagagcacatccaagaaaaaccaacataaaaataacaaaaagcgacatgatgtataccgatcgatgtctaagccataaaaggcatagagtaaccatataagcgtgcgaacagcacaacgacatagaagacatggaactcactgagagccacaacaaaacagagaaaagaaaaaagaaaaagatcaaacaccacatcaagacaaaagcacatagaaaaaaaacacatcacaacacgaaaaaacaaagacgacaagcgaaaagaagagcaacacaaagcaggaccgacgaagacaaaaaagacaccacgcagatcacagaccgaaaacaaaacaacccaacacaaaacagcacccaaaaccgacagaacaaagaacaaacaaaacagagaaaagacagagagtagcgaccacaagacacccaaacacaagccaaaaaaaagtagagatagaacaacgaggcggcaacaacatggaagccaaaaaacaaggacaacaagcacaactaagagagaacaacaaacacagatgatcacaa

SEQ ID NO: 709510 - DNA, 255 bp, Homo sapiens
cttagtaaggactgatgatacctaagcattattgctagttttatgtggatgtgtaagaaaacacccatatttttagcaaggcaaactgaattaagtagatatgtctggaatgcttataatacttcagtaaagaaaagaaaaaaagaatagataaagcaaaatggccaaatcttgataaatgtcgaatctgggtaacaggtatatgtgttcactgaattattctatttttgatagttcatatttgaaaatttttat

SEQ ID NO: 709511 - DNA, 1445 bp, Homo sapiens
tgcttggacggaaccctgcgctcgtaccccaccccggccggacgaccatagccagccctccgtacacctactatcacctgcaccctccgtgactagccccaatggccccactgccgcgcagatccagactgcctgctgcagccgacctgtcctgcactgcctgactgccctacctaccatatagtactgcctgcacatgactgacctgctgtacacactctgctaggtagctgccgagaactgacctaccagtgacgtcagagtgcctgccatacaaacctgcgcagatacagacctaggcagctactaacggccgtcctaacgtatgtacctagtaccatagtctatactcacctatttgacctgctgatgattgtcggctatcttgaacgaactatttggccaaaataactaaactatacacccaatactcccatgagtgcagcaggcgcaaccatagctagaccgaaaactagcattgcaagctagcaatgaacccaaccgaggtcaggcccgaatcctatacctatacaggactaatacaaaggacaaccaggacttgtcgatagacttggcgatccagcctgggactagaattagcccacctcgcgacgtagtagcattataacatatctgggacacagacgcacatagttgaatacaggtaccactaacctgtgcacactagccagcaaaacatagggaccacttgaacaaaaaaaattagacccccacaaatactagtagtaagactatacgatatgcagcacaacatataccattgaaatgaccctaggtagaaaagcccatccagagcaataagggggtagaaccaactgtagacccatagttagctgcaaagattggcgatgctgctccggaaaatactaggacttgggctgagaatatactacgttcagaacaaaggaacaacacttagggaagcacaagcttgattaattgaaacgcttaaaacactacgacgactaaatataccaccaaaaacacgatggtggaagtaaccataccacctggtggatcaacccaacgcgcaatctgcccatgtgcatgtaaatggcgcgaattaccatataaccgttaggctagtataagttattgatccacatcacacactcccacttaaaattatccaatggagaatggaacccgataccataaccagagtaaaggacacgtaggggaaccaccgacacaaaacaaaatgacaacaagaacaccacacggaaacacataagctagagatgcgcaaaacaaacgacgactacatagcgcagccaccaaagcaagacaaaacggagatcgaagcacacaaagcacgtgcaaagggcacgaaaaactgcggaccaccacaatgatcaagcaaattacacaagacaccgtacgaacaaacatagcacacgaccagtcggcgacacacgcggcgc

SEQ ID NO: 709512 - DNA, 880 bp, Homo sapiens
  misc_feature (558)..(558): n is a, c, g, or t
gggcacacgatcaggttgtgtgtgttgctgaagaatctgtacaagcaccattgtgacgcgatatgcggatcgtgcatgtgactgggtgcccggcagatgagaatgcacccacagtgcagtcacatcaagcaacaacctgaaagagcgcgatggaaccccatgtgtggcctgtccatagagaagagctggtgtggccccactgtagagagcttgccctaactctcctgatagaaccaacgtccaagaagtggcactaacacatactagagttgtgatgcaactgtagcctagatttgattttcacctacccgatatgctcattgagcactgccaaacggcctcttgtgggcagaggactcaacgggacagtgatgctagccttgaattaaacaaaaaagtgctatcacagaagcaaaagatagccacggcttgactgtgcacttgttgacgccagaatactttccgtgtgcacaaaacgaactcggagcgctgactcaaacgacatgtgcggtgcactattatgatagcccagccgtcgacatacagcgacccgtgaantataagatttgacacgttgtcccatgcacagtttcctgcgaacatcctcttggcaagaccacatagtttacccaagtgatgctaccaacaacagtctataacgcatcccacagcacttgcttacgaccgcttctgtgttgcccgtagccgttagaattacacctcctgcaacgtagtctacaacccaactagattaacaacagaattactgaagtagcaattacataatatcgtcgcggtggcccaagacactcacacactatacaacgattgtgcttcactcctgagtaggtacacaacaagaccaaaccgtgcctctaca

SEQ ID NO: 709513 - DNA, 757 bp, Homo sapiens
ggacctattcaccctccacttcccgtctcagaatctaaacgtggtcaccttcgagtagagaggcccgcccgcccaccgtgggcagtgccacccgcagatgacacgcgctctccaccacccaagccaaaccatgagaatttgcaacaggggaggaaaagagaaccaataacttccaaggccctgcgtttgtttatcgtatcacagagatacgttgtaaacaaggcaaattctgtactgatattctctattatttacagtttgtatattgttccgtcacagtattcgttacgggtcaggccagtttatatacatgcatctcgcgcatgacgcgaaagccagcacttcggcagtcgtcttctgttcctacttctgacgtttactttgtgggtgtgaccgatgttcgattataatctcaaacggagaaaaaaaacctctgtaaagaacacagccaaaaatgacaacagaaaaaaccaatcttattccggagcattccaggtgaacgttttgttggatgtatgtacttgagctggtacatatgaagtagttggtcttgtacttgagatggttaacacaggccacagatgactaggtccctatgttgttctatccgttgtggagtcgtatgacgtcgctgtttattccgtgtaggcctgttcgatgtatgtgtgaaacatatgtggtccacccaatacaaccaggactgtgatattgcggcagtggttctaaagactggacaaacgtcaaagccccggggcat

SEQ ID NO: 709514 - DNA, 516 bp, Homo sapiens
  misc_feature (82)..(82): n is a, c, g, or t
  misc_feature (292)..(292): n is a, c, g, or t
  misc_feature (320)..(320): n is a, c, g, or t
  misc_feature (323)..(323): n is a, c, g, or t
  misc_feature (330)..(330): n is a, c, g, or t
  misc_feature (335)..(335): n is a, c, g, or t
  misc_feature (339)..(339): n is a, c, g, or t
  misc_feature (343)..(344): n is a, c, g, or t
  misc_feature (347)..(347): n is a, c, g, or t
  misc_feature (350)..(350): n is a, c, g, or t
  misc_feature (355)..(355): n is a, c, g, or t
  misc_feature (363)..(363): n is a, c, g, or t
  misc_feature (365)..(366): n is a, c, g, or t
  misc_feature (371)..(372): n is a, c, g, or t
  misc_feature (381)..(381): n is a, c, g, or t
cggatccccatgggacaatcacttcttgctgtcctctgtgctgtgctgaggaatccaacctctctcttaagtgacgagtgcnagagagaaataggattatttgtgttttcggaaaaaaaccttagttcattgtagagggcggacagcaagaagtgatgaggacctttaagaccacggtagtggaatttgagaggcaagagcagatttgagaactattaagaagacagactcatcagccctgtatacatgattgtgtaatggacacagaggaatgagggacctatgtaagatnacgtggagttctggggtgggtggctagntgnttcatgntaccnttcnccannatnggnaagtncagcacangnnttggnnagaaagaanatgagttcaatgtgacaccaacttgatcccggccagacaagcagctattacatgggttgacatagaagacgttcttcgacgtatagacctaggatagattttagtcgatatcgcttatgagcgtcgagtcagatg

SEQ ID NO: 709515 - DNA, 522 bp, Homo sapiens
  misc_feature (82)..(82): n is a, c, g, or t
  misc_feature (292)..(292): n is a, c, g, or t
  misc_feature (320)..(320): n is a, c, g, or t
  misc_feature (323)..(323): n is a, c, g, or t
  misc_feature (330)..(330): n is a, c, g, or t
  misc_feature (335)..(335): n is a, c, g, or t
  misc_feature (339)..(339): n is a, c, g, or t
  misc_feature (343)..(344): n is a, c, g, or t
  misc_feature (347)..(347): n is a, c, g, or t
  misc_feature (350)..(350): n is a, c, g, or t
  misc_feature (355)..(355): n is a, c, g, or t
  misc_feature (363)..(363): n is a, c, g, or t
  misc_feature (365)..(366): n is a, c, g, or t
  misc_feature (371)..(372): n is a, c, g, or t
  misc_feature (381)..(381): n is a, c, g, or t
cggatccccatgggacaatcacttcttgctgtcctctgtgctgtgctgaggaatccaacctctctcttaagtgacgagtgcnagagagaaataggattatttgtgttttcggaaaaaaaccttagttcattgtagagggcggacagcaagaagtgatgaggacctttaagaccacggtagtggaatttgagaggcaagagcagatttgagaactattaagaagacagactcatcagccctgtatacatgattgtgtaatggacacagaggaatgagggacctatgtaagatnacgtggagttctggggtgggtggctagntgnttcatgntaccnttcnccannatnggnaagtncagcacangnnttggnnagaaagaanatgagttcactttcgcacttacttaatcctggcagacaagcaggtatcaaatggattgacctggaagacaggtccaggctatagcttagggagatgtatatcatactgctcatagatcaagctatgggtactcggatgagt

SEQ ID NO: 709516 - DNA, 135 bp, Homo sapiens
gcccccccccccccccccctttttttttttccccccctgggggggtccctccccccttaaaaagggccggcttgggggcccccccccctttttaaaaaaaaaaggtttttctttttggggggggtttttaaatta

SEQ ID NO: 709517 - DNA, 357 bp, Homo sapiens
  misc_feature (66)..(66): n is a, c, g, or t
ttttcaactgggtagggggaaaaagttttgccccctttgaggcccccctgccaatgttggaaggtntggatttgccccttgagccagggggatgtttcccgggggttaaaaaactttctgggtccttccctgaacaagcctagtcccacattttttcccagggggtccattttgggggtccagggggataaatccaaaatcatgttttggggataatttttccaaagggtttttttttgtggactaaatcaggggggggcattcccctataatgtaaaaagatttacatacaaacaatgcaccccactatccaagggttttacccactaaaaccccccataacccttggacagggga

SEQ ID NO: 709518 - DNA, 645 bp, Homo sapiens
ctcgcggcgcgagtctatcccgaaacagcccagcaaaaaaactccgcgttatccttttcacgtgaccggccttttcgcgccctgccttgctactgctacgaaccgagcatacatgaccttccgttacttcagccccggcagaagtaaagaagcatcccgcaccctgacttttattcgtcagttacgctccatgatccccgagatgttaaaacctccccctacccgtacaagttcccgagagccgtagctccaaactttgaacagcgcgagccgcacaattacttgcgcgcgtcccactaagataacctccaagaagagtcacgctccttcgagtacctgcatgacactcctgcccttatccagagaccctctcctcatagctaacaaggcgcgcccgaagatcgctatttgtaccttcttgtacttattcttgcccgatcgtactaccgaagttactccgactaattaactcctcactaaagtacaatcgaccgcatccccgccataagctatcggcgaccacagcaactataggccgacggctcaacctaaccagtctcagaaatcttacgcgagacgtcgggaatcgcgctaattacctaccgcccattaccgagtgacttaagtagtaagtaatgctccggg

SEQ ID NO: 709519 - DNA, 97 bp, Homo sapiens
  misc_feature (14)..(14): n is a, c, g, or t
  misc_feature (43)..(43): n is a, c, g, or t
gcaggttatagccnagtgtccccaggcatgtggcaagcaagcncttctgcctccttttgggcatgaatctcggacacctgcggccccactgtccaga

SEQ ID NO: 709520 - DNA, 971 bp, Homo sapiens
ctgccggggccccttttatgtgttgtggcctttttgaggcgacacacgtgcttttatatccccgttgggacaccaccaccggtttcgaccctaacccccgggctccgggtccatattgctcctgcgccaagacactccgggggtttgtcctcctccacccgaacctggcgctgtttgttggagtggggtcctgccccccggcggcaatctgtcctgagtcccacctgggtgagtacccccccgtcgtgctggcaaaccaggtcgtcccccgctcccccgtggtgcacagacaacctgtggcgccaacaacatgcgtgcccgccgaaatgggcggcaagacccactccaggataggcgcgtcctcccgccaggtaaagacggttgaagcaccccgagcccccttctgggacttccaacaaggtcaggacgggaacatcattggatagccccacaaggagtgccagagaggactagaacgtctctgcacccacaagagagtcgcaaccaagaaacgccgcgcagaccccgccggcacggtggacgacccactgtgtgtcgcactctctcggaactgaagaagctgggaaaacgctccgcggagtgaggaggagaccccacgaagaacggttgcgccacacaacacaaaacggggcaggcggacccgagaagcacaatacggaaccaaaggagctatattgcagggggcatcttcctacaacatagtgccacctggggaaccgggaagttaaaaaagcctcatcaaacctcgtgcgcagtggatccgagagaagtggaacaaaggtggaggccaatagattaagtgggagaagggcacagatacccagggtctgtaaggcgagcaacgggcgcccgcagactgaagcggggggtcctgcccctaccacaagacgccggaagacgacccgcgggcccccggcctttaaaaaaaaaaattacaaaccacatataca

SEQ ID NO: 709521 - DNA, 466 bp, Homo sapiens
ttcattgggtaaatgattacacaaaccatagtacattcataccgtgagtgctactcagcaataaaaaagaacaaactatgggtacaggcagcaacttataattccagagaattatgctgaatgaaaaaggccaatttaaaaaggttttgtaccaaaagattccatttatataacgttcttgaagtgacataattatagaaatggagaacagattagtggtggctgtgttaagggggggtgaggatgggagagaattgggcgtggctgtgagaaacatgagggatccttgtgatgatggaaatgttctatatcacagctatcgatgtcagtatcccagttgtgatattgtgctatagttttgcaagatgttaccactgggggaaattgggtgaagggcacatggaatctctgtattatttcaactgcatgtaaatctcacaattatctcaaaataaaaataaaaatt

SEQ ID NO: 709522 - DNA, 245 bp, Homo sapiens
gcccccccccccggccccctttttaaaaggttttttaaaaaggcaaataaaaagccttcccctttggaagattccagtaactttctgaagcaagtttttcctctacaaaaacctatttttgccatgaggaacggttccttttcagggagtcctttgagtttttgttattcagggaaacaaagttcccgttgtttttttagtccccaaagtttaacaaagcccctaataaaaagggctttccccca

SEQ ID NO: 709523 - DNA, 1409 bp, Homo sapiens
accttcctcaccccctcgactcctcacctactcagtcctcacgtcctcactccgtcaccttcctcacttccccatctcctaactccgtcactctccttctacgtcctgtcgaccttccgtcacactgcctcaccctcctgactcctctacgtgcgtcactttccggcaacgctccggtagctgcgcgtcacgctctatgacgtcgcgtcagagccacctgaactcgtccaacccgcgatcgacgtgggtccatctcgcatacgagtacacccgcgcggtcacagtacggctaacctctcgcgaacggtctcgtctcacaacgcgaccgatacgctgcggacctcctatcggggcgtcacatgacgcatacactcagccgagggtgcacttcatgtcaccacccctccagatacagcctcacatccagcccatacggatgcagagtcacgggaggccgtaaccatcagccacatccgctcaagtcgtgccactacagcgcaaacgatcaggccaatatgggttgcacgcgcttcgcggcaagagatcccaatacaaagcgtccaaggcaccgatcacacgcgagcagaccacctagcggagagaagaaacctcccgagcaaagtacggacaaagagccggaccacgtctcgagagcctcacacaagacaatagaccacgggcgaaagcaccgtgcctgcccacgacgaccgcatggccagaacggcaaaggggagagtcaccataccccgcaagtaccacgccaaaagagcccacatgaacaaatcccacgacacacacaagcgcagcacaagacacccgtagcacacaccgagaatacaccgcagcggcaacaccgaaagcgcccacacagggcccgtgcaaacccgagacgcggacacgcggaagggacgacaacagcgaacaccaccagcgggcgcatcacccagaaaagaggcacacaacggaacgaacgacaacaaaacaaaaagcacacatccgaggcctgcaaacggcccagacagaacacgacgaaggcgcacgacaccaaccacgacgccagcaccacagccgcggccagaaccccaacacccactgcaaccacgcacgacgcgcccactacaggagccaacaacgagagaccaccccacggccggaggaacaccaaaacaggagaacatgacacactcagacgcctgcacccacggcgcgcacactccactagcgcagagcacacacacacacaaggcgcaagaaaaaccacgacgaaccacaacccacgagacaccccgccaacccgccacaacgagcgaccgccaccaacgcggcgcaccacacacagaaccaaccagacccccggaacacacaaggaggcacacacacggacacacacacacacgggagaccaagag

SEQ ID NO: 709524 - DNA, 1080 bp, Homo sapiens
tatgtaaacaacctagtctttaatttggcccaaggccggctggtggcaagcactggaggccccaaaatcttccaaaagggaaggggaggaggggcaaagcactggtgctctaccaggtgctagcctgccccgtcctgggttcctggcgaggagagggtgggcaaggggagagaaaaagcgggaaattcggcgccatacaagtatctccccaggttttcagccactatttccagtgggtgaaggaggaaacgtggaggcacaggcatcccccacggggttctacgtggctagttccaggggttaaactaagatcccttcccctaaatcttcttaccccccagcaaaagtggagcgtgaaaaagcaaccgtggggagagggtcacgagagaggccccactcgtgggtggccgtgagggaagccgggggcagggcccaagacccgaggggctcaagggcgacaagagggagtggcgagggaaagacagagaaggagagatgaggcgcgtggagcggaagaaagaatagacatagggcagaagaagagggaagcaaacccagcgaaaaccacgaaaaagggggaggacccacaagaacaggggggataccccagacaagcggaacaccacaaaaagggggcggacacaggcaaaacagcaccgcacagaacagacaacaacaacagaggcacaaccctcggaagggcgcgacaaaagaaacgacccgagatatactgggggaaaagcggcgagaaggggacacaaacccatccaagagaacagacgaaaggacccgcaaaccgacacagtccccccacggaaaagcacccaacggacatctcggaagatgcgcggaagcacggacacgtggcgaagaggggacgacacacacccgaggtgataaaagaaacgggcgcggaaaaagaagaggctggaaaagagtcagcacagggaaccagccggggacacgacggaagaccaacatgacaaaaactgaacaaaaaagaaagaggaggcacaccgcatcacccacgacaagaacagggtggcccaaaggagaacgtccatgggggaatcgaaggga

SEQ ID NO: 709525 - DNA, 266 bp, Homo sapiens
cctagtgactcacgcctgtaatcccagaactttgggaggctgatgcaagtcgattacgaggtcaggagttcaagaccagcctggccaagatggtgaaaccctgtctctactaaaaactacaaaaaaggccgggtgtggtggctcaggcctataatcccagcacttagggaggccaaggcgggcagatcacgaggtcaggagatcgagactatcctggctaacatgcccagctaatttttgtgtttttggcggagacagggtttcac

SEQ ID NO: 709526 - DNA, 544 bp, Homo sapiens
  misc_feature (178)..(178): n is a, c, g, or t
  misc_feature (328)..(328): n is a, c, g, or t
acataatttcttctttgagaagtcatgtcttgccacttttcaagtggtgttgcttttctgtaaattgttaagttccttatagattctaggtgttagatctttgtcaggtggatagattgcaaaaattttttcccattctgtaggctgtctgttcaccctgcatgatagtttattttgntgtgcagaagctctttagtttaattagatcccatttgtcaacttttacttttgttgcaattgcttttgatatttttgtcatgaaatctttgcccatgcctatgtcttgaatggtactgcctagattttcttttagggtctttatagtttngggttttacatttgagtctttaatccatcttgagttaattttcatatcaggcataaggaaggggtcccagtttcaatcttctgcatatggctagccagttctcctagcaccctttattaaataggaaatcctttccccattgcttgtttttgtcaggtaaccaaaacagcatggtacctggtacaaaaacagacacatagaccaatgtgacagaat

SEQ ID NO: 709527 - DNA, 143 bp, Homo sapiens
atggcgcgtaggctcaagacattcccagccttcgccacatcttctttgtggtcttagccttcttcgcggcaacattggctttgtctgcccgccatagccactctgcttccgatcatagcgcctccttccctggccattcaacg

SEQ ID NO: 709528 - DNA, 433 bp, Homo sapiens
caggggcccgctgaggactgcagaaacacacatctgcacaacacactagtccttgtttctttacttagcacatattccagctacccttttctccaatgaacataaattcccatagccagtaaaatgaaaaagtattttgatcaggcaaattatattaatattaggtagaataaatacacatgaaatctataggaaacatttaacatgaaataagttaaaaatcataatattgagaatacttagataatgtttgtaacaactgggaaatgagctgggagattagaagagaatatacagtaaggaagatggcaaagaagaaatgaaacatttttgaaaagcagtcttggaataaaacagagaaaaagaaactaaaactttgaaaatacattcctgtcattagtgaataagaagctgaggtgtgactaagaagaca

SEQ ID NO: 709529 - DNA, 750 bp, Homo sapiens
  misc_feature (293)..(293): n is a, c, g, or t
tgccagtcttttttctctatcatgtgttgtcgcgcaggtagaggcttactacaagtgtaacaacgtagtctggattgaggccacagcgatttctagcatagtcagtagaattaggattgtgaagatgataagtgtagaggaaaggttaatggttgatagtgctagggtggcgcttcctattaggtgcatgagtaggtggcctacagtaatgtcagcggttaggcgtctgcacagggctattggttgtatgagtagtatgatggttctataaatacatagtatggggataggcngtgtatgtgcgccttgtggtaagaagtgggctagggcatttttaatcttagagcgagagcatataatctctgcgcccgctcataaggggatgcccatggctaggtatatagatagttgggtggttggtgtaaatgagtgaggcaggagtccgaggaggttagttgtggcaataaatatgattaagtatagtagtataagagatcaggttcgtcctatagtggtgtggatggctatcatctgttctgaggatagtttgaatagtcaatgctgggtggtgattagtcggatgatgatgagatatttgtaggtggggatctaatagagcgggaaatagaatgatcagtgctgtggcgggtagtcctagtattgtgggggcaatgaatgcagcgaccagattgtcgttcatgatggttctcagggcttgtgatattttttattatcatgcgctttggctag

SEQ ID NO: 709530 - DNA, 443 bp, Homo sapiens
acgcacatgacgccaacatggcacaagtgtggcatagtaaaattctgggctgtggtggctgcggctcaggcctgataattccagcagtttgggaggccgaggcgggcgaatcatctgaggtcaggagttccagaccagcctgtgcaacatgatgaaaacccttgtctactagaactacaaaagctagccaggtgtggtgatgggcgcctgttatcccagctactccggaggttgagtcaggagaattgcttgaacctaggaggtaaaggttgcagtgagctgtagatcacatcactgcactccagcccaggacacagagtgagactgtctttttttttctttttttttttttttttggttttttttttttccccccttgccctttttttacacccgggggcccggggggttttttgtggaatccggggccccttatgaatccc

SEQ ID NO: 709531 - DNA, 481 bp, Homo sapiens
cctggggcctggaatgacttagactgggtgtgatgaacattcatccatggtattaccctaccattttgcgttgtcttataaccaaggcacactccccactaagagtttactgtcagagaaagatcagcatagctagccaccctcctttaatttacaactcattatctgctacaggttttctttaattccttgatcactggattggatatgtttttttcccaccaggtactcagaggtctgctgtgaagtgagtcccggtctaggcagacttcagtcatcccttaagcgtgagcatgttgcctgcatggctgggtggggactggtggatgtctctggagctccagaaccttggagaattcctcatggaatttccctcccagctcttagtgcgctctgtggggtcaggaggagcctcttcctccaggttttccttctttcctcctcagcagagaaactggagaaaggacattaaactctgtgc

SEQ ID NO: 709532 - DNA, 316 bp, Homo sapiens
  misc_feature (202)..(202): n is a, c, g, or t
tagaggatcccgttatgccaacacatattaaaagcaaactgactcaactacaatcacttctggttatcactagtgaaccgaaagtgacttaaagtaaaatcattattagcagaagaatagaaacataacttcattgagaggtcactgtaaagagaacagttcattaaaaggttctgtataaaaagaaaagggaagggcccanatagcccatttcagggcagagcaggtgaaaaggcctggaacactcctggtgcgctcactgtcggctgctgaacagggagcccaaggccagcaggatggagggtgtgaccgaggg

SEQ ID NO: 709533 - DNA, 560 bp, Homo sapiens
  misc_feature (8)..(8): n is a, c, g, or t
tgagcgangtaaggtctttgcggcccgatgttgatcgaaagtacgctatgccaagcgaaaagctaggagagcggaagagacggacagcacaaaactgatcggagacgagcagcttagcggcggggcgttcaccggtgagctggacaacgctgtcgacaacgacagacgttcaagaacctgcaacgggagcgacgttaggcaagatcggcatcgccagccccgacgacatcgcggcgtgctgccgcgagtgcgcgcgccgctcagaaggcatgggcctccgatactccggataatcgggcagccgtttttccaaaggttgtgcaggttgcaaccgagcggtgggacgagatcgtcgagtggatcatgcgcgagagtggatcggtcagagcgaaggccgaattcgtgcccgaaggcgagaacggtgaagaggggcgcaaagcgcccggcaggccggcgcctcggacccgcccgcttacacgttgaaccggaacagcatcacgtcgccgtcgtggacgacatattccttgccttcctggcgcagcttgcccgcctcgcgcgcg

SEQ ID NO: 709534 - DNA, 555 bp, Homo sapiens
tcaggcggccgggaagatgggggacattcagacggagcgtgcctaccaaaagcagccgaccatctttcaaaacaagaagagggtccggcggggagaaacgggcaaggagaagctcccggggtactacaagaaacatcggtcggggcttcaagaacacccaagggaggctatggagggcacctacatggacaagaaagtgccccttcacgggtaagggtgtccattcgagggcggactcctctcgggcggtgggtgaccaagatgaagatgcagaggaccatggtcatccgccgagactatctgcactacatccgcaagttacaaccgcttcgagaaagcgccacaagaactgtgtctgtacaccgtgtcccccgtgcttcagggacgtccagatcgggtgacatcgtcacagggggcgaggtgccggcctctgagcaagacagggcgcttcaacgtgctcagggtcaccagggctgccggcaccaagaagcagtcccagaagttctgaggctgacatcggcccgttccccacattgaaataaagttattttctca

SEQ ID NO: 709535 - DNA, 331 bp, Homo sapiens
gagagttaatagcactataactggatactattagttcccattttatataattttatttatttatttagagacggaatttcactcttggtgcccaggctggagtgcatggcgtgatctcagctcactgcaaactctgtcccctgagttcaagcgattctcctgcctcaggctcccgagtagctgggattacaggcatctatcaccgcgcccggctattttttgtatttttttattttagtaaaaccggggtttaccatcttggccaggatggtcttgaactcttgacctcatgaaccacccgcctcagactcccaaattgcggggatataag

SEQ ID NO: 709536 - DNA, 189 bp, Homo sapiens
gtaaccgagcactgggatggcacatgttgttttttgaatagtcattccagatatgagatgcgtgttacaggaagtcccttgtcatccgtaagaagccagcccacttctctctaaggagaatggcccagtcctctcccaagtccagacaggggacggtgactggcatggcttgacgatgtaaacttatgt

SEQ ID NO: 709537 - DNA, 643 bp, Homo sapiens
  misc_feature (75)..(76): n is a, c, g, or t
  misc_feature (99)..(100): n is a, c, g, or t
  misc_feature (185)..(185): n is a, c, g, or t
  misc_feature (197)..(197): n is a, c, g, or t
  misc_feature (208)..(208): n is a, c, g, or t
  misc_feature (223)..(223): n is a, c, g, or t
  misc_feature (235)..(236): n is a, c, g, or t
  misc_feature (239)..(239): n is a, c, g, or t
  misc_feature (243)..(243): n is a, c, g, or t
  misc_feature (245)..(246): n is a, c, g, or t
  misc_feature (257)..(257): n is a, c, g, or t
  misc_feature (297)..(297): n is a, c, g, or t
  misc_feature (300)..(301): n is a, c, g, or t
  misc_feature (354)..(354): n is a, c, g, or t
  misc_feature (382)..(382): n is a, c, g, or t
aagaaaaaacacctgggccggggtgaccactaccatcaagacgcggagaccagtagtggccctgaacggtgggtnnctgatatttattgatacaagacnngggggcagggtaaggagggtgaatcttctaagtgattgacaaggtgaagcaagtcacgtgattacaggataggcgggccttcccntttaggtagccnaagcagagagngaaggcagcatatgncagcgttttctnntcncacntnnaagaaagatcnaagactttactttcactatttcttctaccgctatctactncgnncttcaaagaggaaccaggagtacgggaggagcatgaaagtggacaaggagtgngaccattgaagcacagcaccacagggangggtttaggcctctggatgactgaaggcaggcctggataatatccagccttccacaagaagctggtggagcagagtgttccctgactcctctaaggaaaggagactccctttcacggtctgctaagtaacggtgccttcccagacactggcgttaccacttgaccaaggagccctcaagcagcccttatgcgggcgtgacagaaggctcacctcttggcttctagatcacttctcataatgtccctcaagagctgagccct

SEQ ID NO: 709538 - DNA, 140 bp, Homo sapiens
  misc_feature (51)..(51): n is a, c, g, or t
  misc_feature (94)..(94): n is a, c, g, or t
  misc_feature (106)..(106): n is a, c, g, or t
gagaagagacagaagggcacttcagaaagaggaatagtcagattccagtgnatttcctagagctctgtgggcatctgggtatagaagttactgnatgtttatttgnaatattcagagtttacatacacccagagcagtgg

SEQ ID NO: 709539 - DNA, 607 bp, Homo sapiens
attgacctatttacagatactagtgccaaatcatgttgagctctttcttaaagaaaaatagaatacattaaaataaaaaaagttaaatgtttttttaaggatacttatacatccatggatatactgaaatcattctaagtcatctttatcattggcaaggtgaatggaagacaaaggaaaacattgtaaagataagagtcctgtgtgactaatgacaataaataggatgaggatgataaagagaattctctgtatctgacaattatggagagagagagagagaatgtggctgaggtctcagacccctagaccagcactttccatatagaaatacaatgtggggcacatatataactttaaattttctggtagccacattaaaaagaaatagtattaattttaaaaatatatttcactcaatctatccaaagtattatcatttccccatggaagcaatattttgttaatgagatatctcatatccttttcattgtactaagtctctgaaatcttgcgtgtaagtcatacttaaagtggatctcatttcagtctagccacgtttcaaatgctcagatgttgcatggctagcatcttattggatggggcg

SEQ ID NO: 709540 - DNA, 717 bp, Homo sapiens
agggaccttgccggggccggcgatgagtgctctccggtgatgagggcgaggtagcacgtgttggttacctgcacgcgtcgtaatccacgtgccgtgccggtgactccgtggggaccattgatgtgcgcggggcgaatgtttgcgtggccctttgtttctggtctctgtgggtttatggttattggcgtgtatgctgccggtggacgcccgggggtggtggtgattggattcggtgtttgcggccagaagcataatagtgtagtcgtggatggtgacgcctcagtggaagattgccagcaccgttgtgtgtgccttgtgtgtatggtgtttgaatgtgtgaatgaattgcatggtggcttgagtgccctgtggttgtgactggccagcatgcaggttgtgagatcacgatgatgcagcacatgtggcccttggtgcatgcagtgcaaggtgttggctcagatctgtattcttaattggatgtttaagagcatgtactaccttgttaccacgcttggtttgagtgtagtggacttacttggacatgacgatgcactcgagatagatgtggtaattttatacgcacatttatcacacatgattttgttttcgacccttgcaaggtaaacattaataataaggtggtacttgtgtagcttgtacataaaagccaaaattatagttgggaaaagaaataaactttataacttgcaaggtgta

SEQ ID NO: 709541 - DNA, 692 bp, Homo sapiens
aactaggctaggtacgaggcgggggtgactcggcgagccgggcgtaagatagcgcgacgtgtatgctcgggaggactgaagggctgtcacaagcccgtatgtatgtatgtcaagatatacatatgcatgggtctggtgcggcctcttccgtgacggataatataaaacgttggcttgaaagctggtgatagcatgatggtatgagagagaagcccagcattttccatcctggagatctacaggattatcaaatcgagtcactgtcgaagaagtgctggattcccgtggtcagcaatgtcaacattggagctgggtcagatgccctccgctgatccatatggtgggcaggcgagtcctgactgatgagctgaaacacggatatgatccgtcacctctatgtaccagaattccgagacatccagatccaccattatcctaatgggattgtaactgtgagactgtgcccggctcctgaaagccgagcaccatgcaaccaacggggtggtgcacctcatcgattaaggtcatctccaccatcaccaaccaacatccagcagatcattgagatcgaggacaccgtttgagacccttcgggctgctgtggctgcatcagggttcaaggacgatgcttgaaggtaaagcggcagtacacgctttggcccgaccaatgaggccttcgagaagatgcccga

SEQ ID NO: 709542 - DNA, 941 bp, Homo sapiens
cacaaaacaagaggttaatgcttcttggggcacatttcttagagggcttgctgagtgtgtaagatataatcgactttgttatgtgttacatgacttctgtgacttcattgaaaatctgcacaattcagtgttcagactctggattacttcagttgacctttgtgaaggttatatctgtgtagaatgggtgcccccttgtgtagcctataaattgtatttctttcactctgtattacaagtaaaacttactaaaagaaaagaggtcgtgttcacattaaatggtttggttgggcttcttttagtcaggctttctgaacattgagatatcctgaacttagagcatcttcaatcctaagattttcatgaaaagcctctcacttgaacccaaaccagagtactcttactgcctgcttgttctaagatgttcaggaaagagcatagacagttgcagtcgttttcaaaagtgagggagaaacattggcctgccgttgtaaataacaagacatcagtgctgtattgtttgtaaactgcattttagaagaatgggatagtataataaacaataaggagtaagccaccattaaatagggcacccatggtagataagatagtacttacatctacaagcatatgatgatttaccgttactaatcgggaaagaaaagcctaccatgtcataacaaagcccaaccaatatggcaccagacactaataacgaggtgacgttcgaaggtgggaagtactacacacaaagaagggaccataatggaaagcggtggaaaattcgacgaaaaacaggttgcccaagacacaaatttataagatgacttgcggactacagcacaggagaacagaagaaccaacacagaacaagaacacaaacagaagaacagagcaagacagggaatacacaaacacacgagacgagaaaaaacacaaca

SEQ ID NO: 709543 - DNA, 588 bp, Homo sapiens
gagagagagagagagagagagagagagagagagagagagagagcgtgtgtttgcgttgtttttctctttagctcggcttattacactggtgtgtttcgtcgagatgctcacacgactgaggttgctcatcggttcaaagatttgggagaagtttcagagccttggtgctgattgcctttgctcagtatcttcagcagtgcccatttgacgatcatgtagctgagaattgtgacatctcacttcataccctttttggagactaattgtgcacagtggcatctcttcgcgaaacctatggtgaaatggctgtctgctgtgcaactcatgaccctgagtgaaatgcaggcttcttgctcacagagatgacaacccataccttacccgattgctgagaccagaggttgatgtgatgtgcactgcttttcatgacagtgaagagacattcttgtatgcatacttatctgaacgtgcccgacgacattcctactttgatgccccggaactccttttctttgctaaagggttgctagtattacggaatgttgccatgctgttggtataagttgctgcctgccgcccgggtcgatg

SEQ ID NO: 709544 - DNA, 170 bp, Homo sapiens
gcctgcacaggagaactgctgataaatcttaagcatcaacagccaaatcgaccaagcagaagaaaggatataagagttgaagaccaccttactgaaataagacatgcagacaagaatagagaaaaaagaatggaaaggaatgaaatcccaggtgtccagtgtggagagag

SEQ ID NO: 709545 - DNA, 119 bp, Homo sapiens
gtccgttcgagcctgtaaggaccctgagaaaggcatgtggggcctcgttaacaatgacggcatctcaacgttcggggatggtggagttcaacatcctggagaactacatgcacgtggca

SEQ ID NO: 709546 - DNA, 127 bp, Homo sapiens
tcccctgtggcgcgggggtctcaccactgttgcagctgttctcaaactcctggcctcacgcagtcctcctatcccacagtgctgacattacaggcatgagccaccacgcctggccaccactagtttt

SEQ ID NO: 709547 - DNA, 299 bp, Homo sapiens
  misc_feature (34)..(34): n is a, c, g, or t
  misc_feature (135)..(135): n is a, c, g, or t
  misc_feature (149)..(149): n is a, c, g, or t
  misc_feature (171)..(171): n is a, c, g, or t
  misc_feature (265)..(265): n is a, c, g, or t
gaattcggcacgagccgtcagtgatcacgtggcngatcatgcactgctatcgtgagtaagcatgcacttatcatgtgccgggagccggggaggccttccactctggacaaagttcatgaggaaggatgctcggantacgcaaatgcggnatcgagcctcaggggtccaccnggatattctcgagcatctcccccgcaaaaaaaccagagtctgcctactgtattgctttgtgctctcacctctgatttcactgggggctatcccncaccaccatctcactctctctgtcaaagagttta

SEQ ID NO: 709548 - DNA, 866 bp, Homo sapiens
  misc_feature (22)..(22): n is a, c, g, or t
  misc_feature (90)..(90): n is a, c, g, or t
  misc_feature (102)..(102): n is a, c, g, or t
  misc_feature (111)..(111): n is a, c, g, or t
  misc_feature (268)..(268): n is a, c, g, or t
  misc_feature (276)..(276): n is a, c, g, or t
  misc_feature (298)..(298): n is a, c, g, or t
  misc_feature (333)..(333): n is a, c, g, or t
  misc_feature (348)..(348): n is a, c, g, or t
  misc_feature (354)..(355): n is a, c, g, or t
  misc_feature (364)..(364): n is a, c, g, or t
  misc_feature (372)..(373): n is a, c, g, or t
  misc_feature (379)..(379): n is a, c, g, or t
  misc_feature (387)..(387): n is a, c, g, or t
  misc_feature (394)..(394): n is a, c, g, or t
  misc_feature (412)..(412): n is a, c, g, or t
  misc_feature (613)..(617): n is a, c, g, or t
  misc_feature (744)..(744): n is a, c, g, or t
  misc_feature (746)..(746): n is a, c, g, or t
  misc_feature (761)..(761): n is a, c, g, or t
tgattttttgatgggggggatntccaggacacctccaagaagagtgtgctgaaagccatcgagcaggctgacttactgcaagaggaggangagtcgccacgnatttgctgnagaagatgggtttggcatagcccctgctgggccggggtgtggcgatggggtcctggcagcgtggcgggaacggctgcttctcctctgcccagggccctgttcttggtggatctcggctgcccctcctctgctgcctcagccttgcggagtagagctntggggctncaggccctacaaacatcccctnccctcccaccccctaacctccactttccccttttncccacgaaagttttnaaaagnnaaggaaggncaggaaanngttgancccagatngggggtngtctattttggcttttanttccctgcctttgcagaactgatgtcacctcagaatgtccttccctccctaataactgtaaatatataaatatgtcaggttaaagggaaaaggtgttcagggcacttcttgtcctctctgtcccataacctacctccacctccaccctcctcctagccagccaggcagcttctctgcctgggaggggagcctggacccccnnnnnactccttggctgcagtggggcctttatccagtgccagggaggaacaacatagttaatttttttctaaccttgccactttgagggaaggaagggttgggggaagggcaagctttatgggaccctggtncnggccctggcctttcnctccagttttggggtaggcaggaactgggagggggggggagggggagggggaagggtttgcctttatgtccttttttttgaaaaaaaaggaaaagcatttttgga

SEQ ID NO: 709549 - DNA, 183 bp, Homo sapiens
  misc_feature (68)..(68): n is a, c, g, or t
cgtcggagctcgtcaagtgtaagtagaatatattgaggaccaggtctcttattgtaccatgtccctanctgtagttttacatgagtgttttctggtgctcacgacatttctggtaacagtatattatctcattttacaataaaaagcaggctggcaggtgtggggtcatgctgtaatccagca

SEQ ID NO: 709550 - DNA, 195 bp, Homo sapiens
atgagcagaatgtcttccatttgtttgtatcctctttaatttccttgagcagtggtttgtagttctccttgaagaggccattcaacgcctccgggccattcaacgcctccggccattcaacgcctccgagccattcaacgcctccgggccattcaacgcctccgggccattcaacgcctccgggccatgcctccg

SEQ ID NO: 709551 - DNA, 291 bp, Homo sapiens
  misc_feature (46)..(46): n is a, c, g, or t
  misc_feature (149)..(149): n is a, c, g, or t
  misc_feature (201)..(201): n is a, c, g, or t
  misc_feature (234)..(234): n is a, c, g, or t
  misc_feature (260)..(261): n is a, c, g, or t
  misc_feature (291)..(291): n is a, c, g, or t
gaccccactttatccgtgggcagcagtgcaggtgaaggtctccccnatggttccatggctgggcacagccaggcaggacactggacacgctgtagcagccacagaggtcacgctcaggtggtccttgaacagcgctcttcccacttgangggcgtccaggtgaacggtggcaccagaaggcatctctcagggccggtcagntgtgcacgtgacgggttcgcttcttgaacctanagagcaggtcctctgagggccggtcnnggtgcagctgacagtcgggggttggcagcn

SEQ ID NO: 709552 - DNA, 121 bp, Homo sapiens
aaccgcaaccgagggtaactgaggcagcggaggtggtggtggaggtggaggtcagtgatagtacaaactacggcaagagccagcgacgtggtggccattcacgggccattcaacgcctccg

SEQ ID NO: 709553 - DNA, 795 bp, Homo sapiens
gacatcctatctgtggataccctggaacacggatatctcgtgagcttaacgtgcacatcgcgtgttctgcagtagccatctcggtacgctctcgctaagtccgaagagagcctagatggatagagcgtatcactaatgtcatatacatcatctgtagtctcgatgcccagaggcagtatctgggcattcttcgtcgggagaagtccccactttgtttggagcgtaagagtcgtacgttcaagcatctaatacaggtcgacttcctagggaagcgtggcgtgttgcccaatgttgggtgctacagctgtgtgttctctagtgagtgcccgaagaagcttccgaggccagaatgagtaggactcgcttggtatagggggacaacggttggtctcatagatcgcatgtttcgacgtcacatttacttaccaatgtagttggcgagctcttgccctgtgtgttaagccatgaatatgtgacaggtggtcaaatagggattagtggagcaattatcttggaactaccacacgttggatgaatccggcgattggtttgtgacaccacggatatagttacgcatcgaacaagattacggttcctaacattgcacaatctcctgtgggggtggccccctgtttggccggtatttgcaatagcttgggtgtaagccgaaaacgagtaaaggggcagatccccctgttgtgattcgggccgagattttccctagagtttgcgaggagcaggctctcgaaagttctagtcttgcgcagaaccggggaggatcaattgacactcacg

SEQ ID NO: 709554 - DNA, 1314 bp, Homo sapiens
  misc_feature (479)..(479): n is a, c, g, or t
  misc_feature (1314)..(1314): n is a, c, g, or t
tcacaaagggagtctcactcggttacccgggtctggattcgcaggggcgcaatctcggctcacttgcaaccttcggccttccggggtttcaaggtgacttctccgtgcctcagcctctcaaggcagctggggactacgggcgcctgtgccaccttcgccgggctataatttggggatattttaagatagaggacggggtttcaccatatggggccaagctgggctctggaaacttctgtgaaccttggtgtaactccggccacagctatacagccttctcaaaagtggcgggggatttaccagggcattggagttcaccatgtgcccaagcttagaggggatacacggtttctcacatttatatgcgcattttgggtagaaaatttactcccaggggtacccattttttatagcgttgtgggccatacacatatacatctctataaatatatgtgggggaatcacaatatgctctctcnctcttcaaaaaaagccggtgttttttttaaaaatctcagaggtggggtctccactcctttataacgaggtctcaaagctgtgggtgtttctttataacactctcaaaaattattgtgggcccacaatatgaggaattttgcggccaagggggcaaggtcaccactcttgtggagatctttttcttgtggggaaaataatcaccatgttgtggggtgtccctaatattttatccttacgcacatattatatttctagaagccccccgcggtttctttccgagggggaaacgaacacttatttctaattaagcgcggaaaaagaagacatctggggaaaagctgtggtgtttttttctccccggagggtgcctttctaatgatagctttttgtgagacccataccgagtgtgaaggagaatccacttccccttacaagaggacctaccttttcttttcgcgtggctttcacactcttcgaattccgcttacaatctcgagttggaaggtgaggacgtattcttgttctacatctcacgagaaaggttcctctttgtgatacagtcatcattaatccttttgttgtggcagcaagagaagaaaatcatttttttgaggaggagtaagaaaacttttgtcggttaaggaaaccacgtgtgaattattatcaacctctctctggggaaggtttcatcatgagggcgacacaaagaggtgcggcgacatacaaatttacttttttcggggggggagagaagatagagtgttaaaaagagagacgcccgtgtgggggaagagcttctctcccagatgtgcgaagagacagaagtcgtgttgn

SEQ ID NO: 709555 - DNA, 569 bp, Homo sapiens
  misc_feature (531)..(531): n is a, c, g, or t
  misc_feature (544)..(544): n is a, c, g, or t
gtaagatcgagcgagtaggcagtgctgcagaggtggctgaggagcagcgggaaggaaaccaggaagcactgggctggaggcagtgaagaccacaccacgtacgagtgggagtccaccaaccatagacctccggactcactgtatcgagacagccgatgctgtggcatctgcaagggactcgacacttgccacatgtcttgacgtgcgcctgaaactacaagggagtgacgtcacagagccatctttctctgttctgatgcatttcagcacttccacatggaccacactgactgacacagaggttacatgacctgccccgttggcctcttcactctcacactgaatgaaacccaacagcccatttccaaagcgacacgctcacacacctgtgcacacacacgtgcacacatgcacactgtgccagcaactgagatgggcaagcatttcggtacacctgtggagaccccagctcgtgtgtcacatggcacgcctgtccctctatcacagtccacaggacatgcggtgctgagngcctcaggcctgngttcaaaacctagaatcaaacgccc

SEQ ID NO: 709556 - DNA, 193 bp, Homo sapiens
tgttgtccttagtaataaaaacgtattttgcaaaaaaaaaaaaaaaaaaaaataagctgggcttgggggcttgtgcctattcacccgagtaacttgggaggctgaagcaggaaaattgcttaaccctggaaggcaaagattagcagtaagcccaagatggcgccattgcatttccaaccttggttcgacagat

SEQ ID NO: 709557 - DNA, 683 bp, Homo sapiens
cacgtggatttcctgtaagatgtttccagggggttaaaaacttgccctggccgttacattccctaggccatggagttgtttaccccgggcaccgaaaaagggtttcccatgggtccccaaaaatgggcgcagggaacccataggattggaaagcgtccaccggtgggatagggctcaagaactccccgatggggtacactatgcgttttctgtcttgggtctgtgttgggttttacttataatacgcctcccattccgatttcgggagaccttcttatggttcacgcaccccaaccggggccgccccattccgcggagaagatgatgggaattactgacccgcagaggggtcacgagcacacatgaactctggaagaaatggtccatcaatatgattcccgcacagacttgggaaagaacataggaaaggcttgcccatctagttatcctctccctgatagttcttcgcttaggataagttaaaatggctggagaagccccagtttggattggggaagctcatggggctttcatggtgaaggcccctaagtttctgggaaaacccctggggacgaaaccggggctaaaattggacgagctgatggatatgaccccccgtcccagagatttgttttaagttccagacttccaattgtggccaattaaaagtgctttttttgtga

SEQ ID NO: 709558 - DNA, 763 bp, Homo sapiens
ggtgtgacctacgtgagttcctcgaacgttgcgacatggtcgtaattgtgaggtgaaatcatgcacttggtggacggtgatagatctgcgatctcgctatcaatgtaggtgctatatgatcagatgatgacacagctgtgaatctgacctcactgaactcctaacacggggacaggactgagggtggatcgcattaacgtgttcgtacactgaggtcaccggcggctagtacggtgtgcccgctgccgtgtctcgtggctctggagcccggcaccatggactccgtgcgctcggggcccttcgggcagatcttccggccggacgaccttcgttttcggtccgcagtggtgctgggaacaactgggccaggggcactacacagaaggcgcggcgctggtgtccctcggtgctggatgttgtgatgaccaaggaggctgacgagctgtgactgcctgcaggggtttccagctgacccactccctgtggtggggggacctgggtctgtgactgggtaactcttcctcatcacgtaaagatccgggagagaggtacccagaacaggatcatgatagacgtaagggtggtgccttcgccccatagagtgtcagagcacaggggtgcgaggcctacaatgccagccctctctagtccaccagctcgtataaacagacggacgagagctagtgcattgctaaagaatctctctaggatgtttgcttcaaagcctaaagctgacagccgactactgggccttgacacctgt

SEQ ID NO: 709559 - DNA, 202 bp, Homo sapiens
agagaggatgctaagcttcctactcactttctcctagccaccctggactttggagcgtggggtgggttggacaatgctccccactcttaagacttccccccctactccccccgcatctttgggggaatcggttccccatatgtcttccttctaaactgtggggctcctcgagggcattgaccgtgcctaatgtctgtgtgtg

SEQ ID NO: 709560 - DNA, 345 bp, Homo sapiens
ccatgcttcctatgatagagcctgcaggcgtgagccaattaaacctcttttctttataaatgacccagtcttggttatttctctatagcagtgtgagaatggactaatacagatggcattttccttttgtgatgactgccaagaatatcagtcctgggtgcggctcaatttcaacagccttaaaatctactatccacacatacaagcttcacaaatcatttttggtgctgatctgccacactaactatattttacaggacaatgtctatttccacattcccattttaaagtatgaatcctggctggcgcggtggctcatgcctgtaatcccagcactttgggagg

SEQ ID NO: 709561 - DNA, 276 bp, Homo sapiens
  misc_feature (54)..(54): n is a, c, g, or t
  misc_feature (270)..(270): n is a, c, g, or t
tctttccttttccttcctcctttctttccttttccttccttcttttcttttctntctttccttccttccttctctttcctccttccttccttccttccttccttccttccttccttccttccttccatccttccttctctctctctctctccctttccctctttccttctcttctcttcttttctcttctcttttctcttctcttctttccttggagtcttgctctctcgcccgggctagagtgcagtggcgcgatctctgctcactgcnaagtcc

SEQ ID NO: 709562 - DNA, 373 bp, Homo sapiens
ggcataatcgatggaagaacggaaaaggcagcgtaaagaagaacgcaggataacatactatagagaaaaagaagaggaggagcagagaagggcagaagaacaaatgctaaaagagcgggaagagagagagcgcgccgaacgagcaaaacgcgagggaagagctacgagagtatcaaggagcggggtgaagaaaattaagaaagaagtggggaaaggggaaaaaacggccaaagggagtggaaatgaagaagaaaagggtagagaggagagagaaattggatgtcccttttaaaggatctgtggggagatgagatcagaaggactggaaaggactgagaatttggtggagaggccgcaaaagggggagtggagg

SEQ ID NO: 709563 - DNA, 835 bp, Homo sapiens
cggggtccagagtggcagtaaaggaggaagatggcggggtgcaggaggtctctgtgctgctgctgcagtgtggtgctgctgctgcggtgagcgtgaggcccgcacccccgaggagctgaccatccttggagaaacacaggaggaggaggatgagattcttccataggaacccgactatgagagtttggattatgatcgctgtatcaatgacccttacctggcaagtcttggagaccatggataataagaaaggtcgaagcatactgaggcggtgcagtggcatggctggtgttgtgccagttggagtctgcactggcctggctgggctctctttgtggactttcctgtgcgactcttcacccaactcaagttcggagtggtacagacatcggtggaggagtgcagcccagaaaggctgcctcgctctgtctctccttgaactcctgggctttgaacctcacctcatgtcttcctggcaaagcctccttgttctcattgagaccgagtggcagccaggttccgggatacccgaggtcaactgctatctgaatggcgtacaggtgccaggaatcgtccgtctccggaccctgctctgaaaggtccttgagaggtgctgtaccagtgtggctagaaggagatctaacgagagagaaggcacgtgccaattgattccacaggtggatccggcggcctggacagccatgccttacacatcagctcccaggagcatctccgattacgcgaagaatccagtgtaacctgtcgcccatatatcccgcaagcgacagcatgaagaagaagaaatgcctccaccaggcaacggcgccgccagccg

SEQ ID NO: 709564 - DNA, 780 bp, Homo sapiens
  misc_feature (12)..(12): n is a, c, g, or t
  misc_feature (139)..(139): n is a, c, g, or t
  misc_feature (151)..(151): n is a, c, g, or t
  misc_feature (233)..(233): n is a, c, g, or t
  misc_feature (247)..(247): n is a, c, g, or t
  misc_feature (265)..(265): n is a, c, g, or t
  misc_feature (302)..(302): n is a, c, g, or t
  misc_feature (318)..(318): n is a, c, g, or t
  misc_feature (351)..(351): n is a, c, g, or t
  misc_feature (362)..(362): n is a, c, g, or t
  misc_feature (384)..(384): n is a, c, g, or t
  misc_feature (399)..(399): n is a, c, g, or t
  misc_feature (411)..(411): n is a, c, g, or t
  misc_feature (463)..(463): n is a, c, g, or t
  misc_feature (531)..(531): n is a, c, g, or t
  misc_feature (537)..(537): n is a, c, g, or t
  misc_feature (628)..(628): n is a, c, g, or t
  misc_feature (634)..(634): n is a, c, g, or t
  misc_feature (651)..(651): n is a, c, g, or t
  misc_feature (682)..(682): n is a, c, g, or t
  misc_feature (687)..(687): n is a, c, g, or t
  misc_feature (695)..(695): n is a, c, g, or t
  misc_feature (714)..(714): n is a, c, g, or t
  misc_feature (718)..(718): n is a, c, g, or t
  misc_feature (773)..(773): n is a, c, g, or t
atgatacatgtnccacgttggtgtgcagcacccattaactcgtcattcagcattaggtatatctcctaatgctatccctcccgcctccccaggagtactgttatttcatcaggttaagattcaatgttgttattaaaanccctagcaaggnttggcatgtaaccaacgccgcctcaacacagtgaccccttgtctcaggacccatttatttgcttattccctctgcctggaanacgccaacaaaggntaaaagcagcatcccaanagaatttcccctcttgctggtttctttcctctacaantgactacctcaatggnctcacctctccagcctgtgacaaacagcatccnctccactgggnctcactaaccctacccaggccnccagcctgtcctaancatgggagggancaacacggggcgcttgtggtaatcccttgcaaaacgctgagtaccaactggngtgactgggtactcagagccgcatgcaagcttccgggaaggaaagaacttttcttttttatcgctgangaaaanaggacttggtgtgtatttgtggggtgacaatctttatgtactttatgtactgatgtggaaaaatctccaagatctgccaagtgaaaaaaancaagangcgtggagttagccccngctttgcacagaaggggtggggggggaatgncaccncgtgtgtntatatatggcatgggtctngaangctcctctttcgcttcaggctacacttggatcaacagttcccactctggctcttnaaaaata

SEQ ID NO: 709565 - DNA, 342 bp, Homo sapiens
aatggcacgaccaaggagctgcaagagcacacagcaggaggtgagcggtgtcgagtgagggagtgagggaagcttcgtctgttatttaaaaggccattcccctttgctcacattcccgcctgagctccaccttctcagatgagcagcagcattagatgctcataggagaacgcacctgttgtgaaccgtgcatgtgagggatcgaggttgcgctgtccttatgagaatctaatacctattgatctgtcactttctcccatcacgctcaggtgggaccatccagttgcaggaaaacaagcttaacaacgcccactgattctacattatgctccttggtcgtgg

SEQ ID NO: 709566 - DNA, 343 bp, Homo sapiens
  misc_feature (11)..(11): n is a, c, g, or t
cgactcgttanatagcgacgcatacaacatgactgttaagtaacagaggtaggtatacaatgttacaggataggaatacaaccctgggaatcctcacagaagcaatgaggagaagaggaagagaaaagctgacagtgaagaaggggagtaagtggactttcagcagaagaaataacatgaaagaagagtgagagccagctgcagaatatagccttccagatgattccagcttcctcatctctcacttgggtcttcataacctgcttccaacttcaggtctcactggtcctcccctctatcttaaccttccagccccaaggagacgttcatgctccactctcca

SEQ ID NO: 709567 - DNA, 152 bp, Homo sapiens
tgtctagaggatccctcaattttcgggctaacccataaccaaaaacacatactatatgagcagacagcatttgacttcactgaagagcaaacagtatccttaaaatgttaaggcaaggccaggtgtggtggctcatgcctagaatcccagca

SEQ ID NO: 709568 - DNA, 1089 bp, Homo sapiens
  misc_feature (496)..(496): n is a, c, g, or t
  misc_feature (509)..(509): n is a, c, g, or t
tggcttgacagagtcttaactttaaaatgattatcgatacaccaagtaatacttgtaacaagtttcttgaatttctatctcatcttagttaattttgtgatttaagaagaaaacataaagagcgagccccaaacaattctccacttagttattctcactgtggtctcatacaccattatagcaagaaatgtggactacttttagagggctgtgggcgtgggtggctttcacacgaggtttcacaaagaaactatatttatacatactttttctcaatagaaataagagccccgtggaccttctcagagaaagaggtgtttgaggggaaaacaaaaattatttataatctccccttctccttttcttctacaagagaaattgtggtatagtggtgcgcgtattatatttatttattcttaaacacaccatagatatctcttagagacacacaacaaagagcaggggcgggcgcggctctcatagagagtatatctcncctcgcgagaggnggcccccacgaaagcctatatagcgcgcgtataacccgcgagtgtatatctctgtgtgtctacacagacgaggtgggtctcccctatatatatgtgtgagagcgctccatatatatatatagagcatatagagcacacgtgtggccgccgggcgtgttctaacaacacggcgtctgtgagcacgtgtgggagacacacacgtgtgcgattaagctgtgtggggcacctccttgtgtggcagaagggggacacccttttatactttctcggggggggggcggtcgaccatataaatgtgggggcgccaatatctataacctattaagagcaagattttataaagagccctctataaggcgtgtaaaccatttctcttacaaactacttcttcaacaaaagggctggcttaataaacacgcgggcggttccaaacaaactaaaggccgtggacaaattagtatgccattaggcgttggtctttagaaaaaaactctagggggccctaaacggggagaatattgaactttttaactggcaaacactttttttataccagagtgtcgaaacaacatatataagg

SEQ ID NO: 709569 - DNA, 219 bp, Homo sapiens
agtgagacccagtctctatcagaattttttaaaaattagccaggctggtggcatgaagccgtggtcccagttacttgggaggctgaggtaggaggattgtttcagcctggcagtcgaggctgcagagagctgtgattgcaccactgcactcctgcctgggcagcagagagagactcttctcaaaacaaaaagaaaaaaccacacacacacaaacaaaag

SEQ ID NO: 709570 - DNA, 304 bp, Homo sapiens
gcaggaattcggcacgagaaagaaaggagtccgctctttgctaggccacaaggctggaatcctttctttaaaaagcagaagcagtgatgtggagacacacataggacctaactggtttttccttgttttactgcctgtcctggaagctgctgtctttctttgcacatgcgtgtcagcctttccctggtacagcgtaatcttagactcttaactgagcactttagtggcataaagttcaacacttgtatatttggggatgcttaaagacagcagagcattaaacagaggttgacctgctacaatt

SEQ ID NO: 709571 - DNA, 337 bp, Homo sapiens
agttcagtacattgtttggccaattgatttgattggtcacggagggatcgttgacctcgtctgttatgtataagtgatgcgtacggatgggagggcgattaggactaggatgatggcgggcaggatagttcagacggtttctatttcctcgagcgtctgagatgttagtattagttagttttgttgtgattgttaggacaagggcatacaggactaggaagcagataaggaaaatgattatgagggcgtgatcatgaaaggtgatcagctctcctatgataggggaagtagcgtcttgtagacctacttgcgctgcatgtgccatggacacgaatgt

SEQ ID NO: 709572 - DNA, 387 bp, Homo sapiens
gggaggaaagaagagaggaaaaaaaagaggagagggacatagaaaataaaacaagactaaaagatgtggagataaaaggaaagagggaagatcatttaaaaacagaaggggacaagaaaggatctgatcatgtcaaaaagcagggtgtaaggagtacacagtctctgtagctcataggaatagaatgtgaacagcagcatatggaatgtgggatgagacactgatcatatggaagtctgcagcaatttccgcaaaagactatcatttggtgtatggaactttaaaaaagcggcacgagtctctctctctctctctctgggtctctctctctcggtctctctctctctctctctctctctctctctctctctctctactctactatct

SEQ ID NO: 709573 - DNA, 111 bp, Homo sapiens
cccccccccgggggtttttggggcttttttttcccaaaaaaaaaaaggggggggggtttgggaaaaaaaattttggggtggggtttggggttttttgttaaccccccccca

SEQ ID NO: 709574 - DNA, 597 bp, Homo sapiens
cgcatgactgttctagagtacccggtgatccagaatgtgttgctcgtgtacaggttgatgcaggcattctggtgatgctactgtgctgctcagttaccctgaacacattagttttttactgcattaatggtatgtcatattttttactatcaagtacttaggtgtgaattagcataagaaaatgatcgctaatcagaagcatataaattcagagtcaggaatgatggtgatgccaaacaaccagattgtccacatggggggctgggagagtggcacctttgccttctgatggttcaatgtacacaaactttatttcatgcataaaattataaaaatattgtataaaattacattgggactatgtctataaggtatatatgaaacataaataaatttggtgtctagacctgagtcttgtccccaagagatctctttatgcacatgcaaacgttccagaatcccccaaaatccaaaatctgaagcactctgttcccaagcatttgggatatgggatactcaacctgtattttatatatatatatgtgtgtgggtgtgtatgtgtgagtgtatatatgcatatatgactacttttcaaat

SEQ ID NO: 709575 - DNA, 127 bp, Homo sapiens
cctcttagcactgtgggctggtggcgacagatagctcataggctgtttctggggctgcatggtgcttccctgagctggatgttgtgggtgttgctgtgcttcagtgatgtgtggcgaccagaaagcg

SEQ ID NO: 709576 - DNA, 913 bp, Homo sapiens
  misc_feature (305)..(305): n is a, c, g, or t
  misc_feature (374)..(374): n is a, c, g, or t
atagtgttcctgagacgcaaaaacggacgcgagaacttctaccacatagctggaaggcatatgctgctggatttggggaccgcccgagaagaattctggtcttgggtctggacaacctgaacaaaatcacagcccaggggcagtacgacgctccgggtggcacctgcgggaccatggggcatgacagcgctttgctgtctatgacaagttctagcgtgggagatgccaagactcgctacaagctgaaggtggaggggtaccgggggacagcgaggtgactccatggcctaccacaatggcagatncttctccacctttgacaaggacacagattcagccatcaccaactgtgctctgtcctacaaaggggcttnctggtacaggaactgtcaccgtgtcaacctgatggggagcatatggggacgaataatcacagtcagggcgttaactggttccactggatagggccatcgaacactccaatccagttcgctgagatgaagctgagaccaagccatcttcagaaatctgaaggctaggcgcagacgggctgtaaattccagggacaactggtgtgagagaggaataaggcctagagcgaggaaaggattgttaccaagagcatctaataccaacagcccacaccatcggtccacacctgggcatgtggtgagagtcaaagctgaccatggatcctgggctaggaacagtatgtgctaacctcgctgtgattcttctttgcccaaaagatccggctccacatgttccgcttgggtgtgtcagcaaaagttcccgtgaaacatcggaagttacttcctaagggccgggacgggcaagggaggaaacggagatgtaacaccggctagaagggcaaagggtttggcagaattgttggcccttttttacggacaag

SEQ ID NO: 709577 - DNA, 1022 bp, Homo sapiens
agcggggtgcgagcttgcgggggacagccggtggtggcggagcggaggctgcgtggggcaccgggccgcgggccacatggggtgcgacaggcgctgggccgcggactgcagctgggtcagatgcgctgctagcgtgcagcattcacggtgcaatgcgcgggcgggtgctacggcattgagggcaggccgggccctggcaggcgggctgtgtccagcgggggagcgtccaggctgggccagcaggaccagggcgcaggagcctcggcaggggttcagggcctcgagagatccctaaaccggtactcccaacatttgttcccgaccaatgtccgagatggcaccgtggccattgaccgggaaggcggggtatgacacgcgtgacaagatcaccgagcagtgccgggagcccttggggagcttgcaccaggagcaccactttgccgacgcccaggagacagtccttacttggaccactttcgcaggcatagggagcattgagccctcatccgcagggcaaaacaacacagggcgcggacgacaggcccgggcggcggcggtgacctcggcgccagggtccgcgaacgacatcccccaggcccacctgtgataccccccagacaacggccaacgatcgggagggccccctgaccgcccggatgggccaaacaccccgaagaacggcgctataaccgggccactcctccgcggcctgaaaaggaaggttcatcttaggaatatagggggcaaagatcacaaattatgggctaacaggggggattgggagagatgcattcaggatcggtagatatttagaagtgggcgacccatagttggacgataacacagtttaaggcaccccaagatgaaaaaccccattgtgggagagggttgcgacccaaaacagcaaggacaacccacgagggttattggcaatattcccacaggtcgagaacagcaagggagcaccagagagtggtacacaaaaagagttaggacaacccagacgggtcaagacacaggtg

SEQ ID NO: 709578 - DNA, 246 bp, Homo sapiens
ggcgtacccgaagacgaccatgacgatctctagctggatgggcgcagagaacctcaagaaggcatgaagccatcccctgcagtgacgaagacccgcctttctggcctgcctgtgcgtctgttgccctcctctgtggcggcaggacctttgtggggcttcgtgccctgctctggggcccaggcgggcgtggtccacattcacaggccccaacagccttcaaagatgggtaaaggagttgccctccct

SEQ ID NO: 709579 - DNA, 317 bp, Homo sapiens
tcagcttatgaatgtaatatgttctcttccttatgattttttttctcttcatttatttttgagacggagtctgctgtcacccaggctccatctcaaaaaaaaaaaaaatggattggggctggtggttagattatagtgtggtcccattgttccttcccggtatttttccggtggttccgcaagggattgtccttgtccttaggagatccacactgaattatttgggggcaagggggcaactaactcttaattcgtccaaattttagccccggttgccccttgaccttgggttggaactgcttgatcccctttttttt

SEQ ID NO: 709580 - DNA, 240 bp, Homo sapiens
  misc_feature (94)..(94): n is a, c, g, or t
  misc_feature (102)..(102): n is a, c, g, or t
  misc_feature (114)..(115): n is a, c, g, or t
  misc_feature (155)..(155): n is a, c, g, or t
  misc_feature (158)..(158): n is a, c, g, or t
  misc_feature (200)..(200): n is a, c, g, or t
actgagggatgaggaggtaagccagggataccgctcacagggatggtcaggtgtaaagtgatactgcaaggtaggattgctagacctgttagcnggaagcanggtgagcaccanntctggacgctcaggccgtgtcgggcttcagtcatctccancanacaggtacagcagcgctttctggtagtcgcccttagtgtctngctggatataatagtacagggacttgccgaagctggatca

SEQ ID NO: 709581 - DNA, 304 bp, Homo sapiens
ctacagtgacaatcatttaaaagtaatgctgcagtaaataaagtactatgtgatagtcgggggaatattcctaaattctatattgaagtgtataggtttaaatgtgactcagtacttttttcagtgctagtcatatataacccaggctacatttcaaattttttttatcatatttgtaggtctcttttgttaatatcatttgaagctgaaccatgatattaatactattttttcagtaaaaataattgccttcataatttatactgcacatgatcctttagtgatcaaactgtaacttacagtg

SEQ ID NO: 709582 - DNA, 215 bp, Homo sapiens
  misc_feature (69)..(69): n is a, c, g, or t
  misc_feature (77)..(77): n is a, c, g, or t
  misc_feature (89)..(90): n is a, c, g, or t
  misc_feature (130)..(130): n is a, c, g, or t
  misc_feature (133)..(133): n is a, c, g, or t
  misc_feature (175)..(175): n is a, c, g, or t
tgctacgtcccctcacagggcgggccacggggactgtgatacgcaacgcggtgggctagaccgttagcnggaagcanggtgagcaccanntctggacgctcaggccgtgtcgggcttcagtcatctccancanacaggtacagcagcgctttctggtagtcgcccttagtgtctngctggatataatagtacagggacttgccgaagctggatca

SEQ ID NO: 709583 - DNA, 723 bp, Homo sapiens
  misc_feature (122)..(122): n is a, c, g, or t
gtttcctgctttggttcttacagtagtcggcgtaggccttaggtgggttcgtgcgccttctacctcgctgttcggttttcctggctcctcggcccttttctcccctgtgcagctgggagcgnacgaagcgcgaagctgggattttttactgtctcctgaagaatttaacacaaacatggatatcagaccaattcatacaatttatatcaccattatgatatgacaaaattaacaaaggaagaatggaagagatccctatatgccctgttttctcagttggtcatgtggtggacatggtggtttaaagaccatgaagatgagggggcaggccttggtcatatttaaggaactggctcatccacaaatgcctgtgagacagctacaaggatttccattttatggtaaaccaatgcgaatacagtatgcaaaaacagattcggatataatatcaaaaatgcgtggaactttgtgtgacaaagacacagacacagaaaggaaaaagacaaaatgtggaacgagaactggaaaacaaaaaaaaaagctggcagggaactccaaattcagtaatacccaaggaaattcaaaccaaatctcaggtcctgattacctccaatatattttattccttaatacttacagaagagataatgggacgctgtttcctgggggtaaccaggcccggtccagaagtacgttgggcagggggctggcatgggttgcgac

SEQ ID NO: 709584 - DNA, 153 bp, Homo sapiens
ggaaaccatcatccgtcgtgcctccccgaggacacgcagaggcaagaaaagcgaccaagactgagtggacagaagaataagcgagacttttaattcatgaaacagtctcttccctcgatccgaagagccttccctgagccggtccccatagcc

SEQ ID NO: 709585 - DNA, 406 bp, Homo sapiens
actcagagtgacgggagtgggcggctcatggtgctgggaagctatcccacaggctctcctgccgggtgtctatagatcccatggcaataaaacatcaagctcacttagcatttccagctccatgtccaagagcttgcaggcactatatacgggaggcttagagtcatcaggtttcatctgtcccatgggccttcggattggggtgccagaaaccaacgacagaggaggcacggccatggtagccccactggtaagtgcagccaaatttggcatcaaggcattctccttgttcctgaaacatgattccgccgttggtagcatgctgccgagcggcactagaagtctgtggtagtctcctatggtggctggcacgggcctcgtggcagaagcctgggagactgactgc

SEQ ID NO: 709586 - DNA, 166 bp, Homo sapiens
cctctacttctaactacgcataagtctactccacctcaatcacactactccccgatagtctcacaacgtagaaataaaatgacagttggaacatacaaaatccaccccattcctccccatcactcatcgcccttaccacgctactcctacctaactccctaaacga

SEQ ID NO: 709587 - DNA, 296 bp, Homo sapiens
ttgccggatgaactgagcagcagccactattaatgtgaggcagacatatcaacaattgaactattcacttgcatgccaggaggtcataaacatcaaggtcaccaaatgaattctagctatcagctcttggttatagtactgtacctaagtttggtattacttattagttagttagtaatcaggtttcagccctcatcttctatttgggaaattaaaactggtctgtcggcatggctggtgacagagcggcaggcacatttgcatatcctgcccctctggaagtaccaaaagaaaaa

SEQ ID NO: 709588 - DNA, 158 bp, Homo sapiens
aaaggcggatctacaataaccaagagagctagccggacaggtggtagcaatggagatgacagaatggtcagactatggatatctttatgaaggtagaatcaagaacctggagttatccttgattcctttctgtccctcatagaagccatcagcaaatg

SEQ ID NO: 709589 - DNA, 248 bp, Homo sapiens
tgtgaaggccaagctgcgtaataggacaagccttggaagtaaaagaatgaataaggagagactgccagagagacacatagttatatatacaaagcaggtagaaacccaagagctatccataaacattctatgaggattcattcatcatatcattcattcatatcaatgaaaggtaaattatatccagtaatctctaaatgtatcaagaacactatagataaggtacttgggaaaaaccagggtagcag

SEQ ID NO: 709590 - DNA, 311 bp, Homo sapiens
gtggggcaggatgatccagcaggtggtctcagtggaggagctgaacttgtataactttccctcatcaaggtggcagtttaattttgtgtcaggtttagtttcatctcctggtatctgacctaattttacggggtgggaggatctttccctgcgtgtgaattttttaggaacagtttgggacaggtcggtggctcatgctataatccagcactggaggctagcaggtgatcatgaggtcaggagtttgagacacctgaccacacagtgaacccatctctactaaaatacaaaatagccgggtgtgtggcgat

SEQ ID NO: 709591 - DNA, 490 bp, Homo sapiens
  misc_feature (19)..(19): n is a, c, g, or t
cgcgccaccaacacgcacngctggcgggggccagcgccgccacaccgcgggatacgcctccctggccgggccacacatcggtgggccaccgggccgcgccggcacaaaccaacacgcacggcaagcagacggagcggtgcgcggcggcgccaaccaccaacggggaggcgcccctccccaacgacgaggagtgggaccaacaaacaacgggctctctccccgcgtgggggcgacattctcctcccctagatggagcaatctgtggagagcacaagttgttcgcgcgcccgccccccagaagagggtgcttttggcggcccccccctaaggagcagcgggtgtcaaaagggcaccagcacaaccgagtcaactgtccgtctttgaacgccctggtctgtccgcaccacacgtcgcccaccgaggataccaccacgtgtgcgctcatggggtggtcgtgggttaaaaaagggctctccctttctcccacaaa

SEQ ID NO: 709592 - DNA, 1423 bp, Homo sapiens
  misc_feature (348)..(348): n is a, c, g, or t
agagagacgacaactagtctcgagttatggttgccctccatgtattgcttcttttgttttgtaactggagtgtaacgggcagaactggactccgggccgtaggacttcaatcggtggacgactgtattaaagcgcgtccccgggtgccgggtgcaggggcgcaggtgtagatgcgatgacctcccgtgctacctcgcccaatactcgatgttcgacccgtgtgagaccgcctagaactcccatcgcattgtctgttgtgtgtgcccagacaagctacaagatgctgagtaattggggctgggatcgtggcgagaatcaggtcccctgtgtgcattgagtcataccganctgacggagccacggtggtggtggatccatggggggccacatacagacgcatacacgcgcaattgttcgttccgcgtgagaccgctccatgcactgtatggctgacctatggcagcatgagacccgcttgcgccccgagttgtcgtcctcgcgcgagcgacaggtgatcgtcacgagaggggtacctccgggcgatagcgaggtacggcgcgatagaagcgcctcatagttgacaaatgggggagaggacattgccctatgtgagccttgaataagggggtctcggctccccttcggactcggttcaccataccagagttccctttgcgccacgaatttaaacggcttcgatatgcgtgagcgtttggtatggtgcggaccattgggctctccgatggcgtggcgccctaaatagaagggccccttggctcgataagcgcgccctaaaatatggcgctaactctacgaggtcaacccgcaacgattgtggggaaaacaatcttagcgaaaagcgcaccgggcgcacccacgtggagacgctggttagcaacccccgagcggcaaaagccatactcggcacccagggaagttggcgcgtctcgcaaacagcggatcgccaaaacgaggattacgatcactcgaaagttgaccatggttggcggacatactaagggcacggctatatccaccggcgacagctcaaaggttatttattttgcggcagcggggcaatcgcgttggctgtgagcattgcggacgtggacgagagccccagttgttggaacacgccgtcatcgtgcaatggtggagcgccgagtgcccccaacgggcccaatgaagctcggttttgggcgcttcggggggcatattcgccgtctcgtgtttgtgtggtgtggtcctggctgttgtgtcccccccctctcaaacggctgtgtcgcgggcccaaagtttgtacaggcgtcgtctgacccccaccgtgtttcagcttcacaaccagggtgggggttgcgagtaggtcggacaattgtggacagcggtcggccgccagctgttcctataagtgtcgtcttcccct

SEQ ID NO: 709593 - DNA, 114 bp, Homo sapiens
ccgttttatttgaacaggcttttttaatcagatttatatcatccatttatctgttaatgaacagttgttttatatgtgtgtataatattgtatatctcatcttataattgacta

SEQ ID NO: 709594 - DNA, 312 bp, Homo sapiens
  misc_feature (83)..(83): n is a, c, g, or t
  misc_feature (116)..(116): n is a, c, g, or t
  misc_feature (129)..(129): n is a, c, g, or t
  misc_feature (160)..(160): n is a, c, g, or t
  misc_feature (279)..(279): n is a, c, g, or t
tttttttttttggagaacggggtctcgctatattgcccaggcaggtctcgaactcctgggctcaagctatcctcccgcctctnagcctccctgagagctgggattacaggcgtgantactatgcctggnctcaattaaattcccaaagacctttccaggngctatgactttaaataaaccagcttcttggcctagtaaaatgtctggggttggtaacaacagatatgcttcctgtaaataacacttgttgtgcacacaaatctgccttctcattagggnaatcattattttataaacatttgacttcagagg

SEQ ID NO: 709595 - DNA, 137 bp, Homo sapiens
tgctgctcctctcagttcgatttgcgttttcttgttatgtgctagctagactgcttgaaacatcttctgtgttccactatttcttccagtaaccaatatattttaggccaggcagtggtcacgcctgtaatccagca

SEQ ID NO: 709596 - DNA, 177 bp, Homo sapiens
gcgacaattgtatcccccccgcggtcggtgcggcgtggcgaccccacccccgaggggcggcgcggcacttctcttgcgcgcccccccaaccccttggggggaaaaggagggccccccccccccaccgaggtttgggcccccccccccccgggccaagcggggggtttttcccccaca

SEQ ID NO: 709597 - DNA, 278 bp, Homo sapiens
ccaatcaacatccaacccttaattaagggttggagaagaaacaattggtcaagtttggctaaactgtaaataatttctgtggatttgaagatttgaatgggatgggatcaatggtaatagtttgtgcctgataagataagaaagctccctcagattaaaacgggccttgaaagtcattttaaagggtttggactgagtgccaaaggaaatagttaaaaggctttttttatatttatgctttagaaactagcataggcagtaggttggatgttgattgg

SEQ ID NO: 709598 - DNA, 1147 bp, Homo sapiens
ccgctctctttttgtgttgaaagataagtaaagtaatggatgggcgcgagaaggcgcgccaccccgtcctctgcgcctctggtcgcccctatgtatggtttctccctccccttcgtttcttatatggtaccgttgtgagtgcgcagagtcctcctgttctcgagggtcccgctgttggcccttgtaccctccttcctgggcgggattgtttgtcccttgtgctttctattcatgtgttgccccttctcccttgaaggtgtttcccccggttaagggggaaccctgcgccgtttctcctgatgttccggaacagacctgccggccagaacgcccgaacgccccattgacgtgtgggtgcccccacaccagccgcgcaaaattgcttggaggccaactttttggggaacttgtcttgtgatccttggagcttccggagaactttttcggggaaattaccccccgaccaccttggcccgttggagacaaggacttgcctggcccgacgtggggagtcctgacatccagtcctgcgacccaccccgcgaccgtcgcccctcccatcctgaaggcttacccaacataccaatggcccaccaaggtgtctcacacttagcctcgtatccctggctacactcgggcattcgtggagcttttggtggtccctctgggtggctgatggtacacaagcttcacggagcccctcgtaatggacccgagcttgccctgctcacccttcgcccagtggacctgccaaattcctcgacctcggtgtgcacactccctcgttgaaatgtggggcttgatgtcacaacacgagtgtacctaaccacgggctatttttccctaccacgctcaccctgggggccgccctcaagcacacccggagtaacacagcacgcacactgggccacagctgacacactagaaaaaccctctcacgaatgcttgccacgaagaagttgaaggaattgaaggatgaagctattgaacaccacgagttcaacgaagtttcccgcgagttcacccgaggacgagctgccctatgatgactgtgtgtttggaggcccgcgtctgaccttatgagccccaaggggctgaaagaaacctggacttgtataatttgtaccaaaaaaaagttttatttttc

SEQ ID NO: 709599 - DNA, 1010 bp, Homo sapiens
ggtggcagcagcaccccgagctgtcatgtgctgttcctgccgctggcctgctgatggccctgccggcctggctgtgtggtgatgctactgctcctgtgagctggccatgcatgtgccctgctgtgtgatgttgtgtgtgcattgcctgctgtgctttgacgtgctgatgtgctgtgtgcctgctgctgctgttctgtgctgtcaacaatgcactctgctgtgcattgatgtgctgcccatggtggctgtgcctgtgtgcccagctgagctgcctgacaactgctggcctgtcttgcagtgtttgccctgccttctgtgatgttgcttcccctcctgtgtggtcccactgtggctgtcgccttgtgaactccctgaggcttgctggttgcggctgtgtgactggtgccttcctgtgtgctggtgtgcctgtggttctctggtggccccttgtggtgaacattcagggggttttttgcggtgcctggaatcccgagatgatgaatgtggtttcgccccttgcgtttggtgcccctgctcgtccttctggtggaccacacagtcgggtatctttcccagagcctggcggcacgttgcatcgccttactatttttagaacacactttcgttatataccacctggtgagtagcacgctgcgtctgtgcgacaaagctccagagtcttttcatcaagtttgaacgtactggagacctctttaaactgaaacatgaaagatcgagaactatggtgagcgaacctccccatttaggaaccatttcagcgtggttattcccagcagcaataatagctatcaacacgtttaagagacacaccttctgtgatgctatagagctcatgtctcccccctattccactttaagttatctggcgcagcttcgagtcctgtgagggcatgtctcatggaacgagcagtaccatttcatccacacaacctggcacccgtgatcttctctcttggcgcaaccgtgaggcgttggcaaatcgctttcgg

SEQ ID NO: 709600 - DNA, 668 bp, Homo sapiens
aggtgcagtggttcacgcctgtaatcccagcactttgggaggccaaggcgggtggatcacctgaggccaagagtttgagaccagcctggccaacatggtgaaaccccatatctactaaaaatacaaaaattagcggggtgtggtggtatgcacctgtaatcccacctactccggaggctgaggctggagaattgcttgaacccaggagggggaggttgcagtgggctgagatcacgccattgcactccagcctgggtaacgagagaaactgtatttcaaaaaaaaaaaaaaaaaaagaaaaaaaaaaccctttaaataaagtagagtttggatttgccataaacccttcaacggaaaagatggcaaaaattcttcttagcctgctgcataatggttaccacacatagggcatttcacaacatggaattttcaccctatcatattttctcactatttctagcaggtgtaaagaattcttctgagttggcccttgagtgagagatgataaataaaatgttgtttcttacaggactgaggtaccatagtggagatgggaagggctggtctgatattcccaaaagatgtcaattttcaaagttgatagctactaaaaaaaaaaatctgtctaaataccagcaacaaacattgttattgaaatcgtaaactac

SEQ ID NO: 709601 - DNA, 916 bp, Homo sapiens
  misc_feature (35)..(35): n is a, c, g, or t
  misc_feature (67)..(67): n is a, c, g, or t
  misc_feature (81)..(81): n is a, c, g, or t
  misc_feature (107)..(107): n is a, c, g, or t
  misc_feature (110)..(110): n is a, c, g, or t
  misc_feature (113)..(113): n is a, c, g, or t
  misc_feature (115)..(115): n is a, c, g, or t
  misc_feature (117)..(118): n is a, c, g, or t
  misc_feature (120)..(120): n is a, c, g, or t
  misc_feature (148)..(148): n is a, c, g, or t
  misc_feature (155)..(155): n is a, c, g, or t
  misc_feature (160)..(160): n is a, c, g, or t
  misc_feature (180)..(180): n is a, c, g, or t
  misc_feature (186)..(188): n is a, c, g, or t
  misc_feature (194)..(194): n is a, c, g, or t
  misc_feature (202)..(202): n is a, c, g, or t
  misc_feature (205)..(205): n is a, c, g, or t
  misc_feature (209)..(209): n is a, c, g, or t
  misc_feature (234)..(234): n is a, c, g, or t
  misc_feature (237)..(237): n is a, c, g, or t
  misc_feature (240)..(242): n is a, c, g, or t
  misc_feature (248)..(248): n is a, c, g, or t
  misc_feature (273)..(274): n is a, c, g, or t
  misc_feature (298)..(298): n is a, c, g, or t
  misc_feature (479)..(479): n is a, c, g, or t
  misc_feature (723)..(723): n is a, c, g, or t
  misc_feature (778)..(778): n is a, c, g, or t
  misc_feature (815)..(815): n is a, c, g, or t
  misc_feature (836)..(836): n is a, c, g, or t
  misc_feature (893)..(893): n is a, c, g, or t
tgtttattattctgtgagagtgcatattgtgcttntgggttgtttgacgattaaaaagaaaaattcntcccggcgcgtatncgcgctgtgtggcgtgcgggttgccntgntcntngnngncgcgagtgtgcgtggtgagtgctgttgngcttctnttgtngctttgcgcgtgcgcgagancgcgcnnntgggcnttggtccnttnggcntgtgttgcgttgcgtgctttttagngtngtnnncgtggngtgcgagcgtcttattttagaaaannagtattaataaaacaatgaatgcntagttcacttaattactatgttcttataaatgaaattaaattggtctcaaaatatatcctcttagagccaatgtatcttctgcaactaaccaaattcattctcagaatcaagaccttttcgacgcttcaatttccttccatattgcagcttcaatttttgaagtatcatattccctcatcntatcaaattcaagccatggctgattccacttctgagcttctttcatttgctgttcagttaaacaaagatcaaatctgattcctttaatattaaaatttggacgttcccagcgtttagaccagggcttaggcttcatttttactttcagctcattaacaggaactttttggttaggctcttgtactactggcttcatattcacatcaaaagtgctatattcaggaagggcatctcgtaagtatanttagctatcatccagccgtttctctaatttgaccacctgaatctcctggacccgnggattataaagttcaaagcaaatctcgacaccttgtncttcgataacattcctaaggntgaaagtagctccaagtcctcttcctgatctctgaatgcaaatccccagaaactggntgatttttccactggcatatggg

SEQ ID NO: 709602 - DNA, 650 bp, Homo sapiens
  misc_feature (357)..(357): n is a, c, g, or t
  misc_feature (593)..(593): n is a, c, g, or t
aagttgagagtcctgtataagtaaatcttgacacatataactttgctcccaagttaacatggaaccacgaggaattctgttgtgtatcagtgaggaccatatctcataaggctgaatactcttactaaccgatagcgcatagtaccgtgagggaaaggtgataagtacccctggaggggagtgaaatagaacctgaaattgtgtgcttaccagcggtcagagcccgttagggtgatggcgtgccttttggagaatgatcctgcgagttacgttaaacggcgaggttaagtataacggagccgaaggggaaaccaagtcttaatagggcgatatagtcgtttggcgtagacgcgaaanctggtgatctaaacctgtccaggatgaagctgtggtaagacacagtggaggtcctaacccaccgccgttgaaaagttgggggatgaggtaggtttaggggtgaaaagccaatcgaaccaggagatagctcgttctctccgaaatgcatctaggtgcagccttgagtgttcaattatgggggtagagcactgaatgatctagggggcatattgcttactgaaatcaatcaaactccnaataccataatttatagctcaggagtgagaccatgggagttaacttccattgtcaaa

SEQ ID NO: 709603 - DNA, 245 bp, Homo sapiens
cgccgttggaggaatgctgagtctagagaaatgtagtctcaagccctggtaagtccctctgtatctagcccgtagttcatagcatcagtgaactggagccgcaacagcaaattctatcagctgtgtaccatacagctggtgctgaaggcgaatttctagagccattactcagtataaagcactgagttctatctttagagatttatctataagagcaaatttctgctcagcattcctcgcaacag

SEQ ID NO: 709604 - DNA, 109 bp, Homo sapiens
tcatagatagctagtggagcacatctgtttaactatagaggttcatccatgtagctctgaaggtctctgtgtagactatagaggtcgcgtcccatgtggctagtggagg

SEQ ID NO: 709605 - DNA, 315 bp, Homo sapiens
ccttctagcatcctttaggaaagatgcggcagctcaaagggaagcccaagaaggagacctccaaggacaagaaggagcggaagcaagccatgcaggaggcccggcagcagatcactacagtggtactgcccacgctggccgtggtcgtgctcttgatcgtggtgcttgtgaacgtggccacgctccctaccaatcaccgagtgtaccccgcagtctgccgtgtaccccatttgtagggataggatgtgcttaggaggtctcattttatttttggctttcttaattatagctgttttagatttatgtcatgtttcg

SEQ ID NO: 709606 - DNA, 171 bp, Homo sapiens
ctgagatccaccactgccctccagcctgggcgaaagagcaagactctgtctcaaaaaaaaaaaaaaaaaattactttccttccatttaagccttttcattctgttaccataagggttgggccagattaggttgagttagaaactgaggataggaagttctgggtgctagag

SEQ ID NO: 709607 - DNA, 122 bp, Homo sapiens
agactatcatacatacagctccaggtagcaaatgatggcttgagccggagcaggaggaggtaagtgtctaaatagtatccataggaaagaaagtgcctagctatcctgggggatcttatgga

SEQ ID NO: 709608 - DNA, 170 bp, Homo sapiens
ctcagatcggctttttctttgttctgtataccgtgggctgtctggctcgggtatccccgagtcactgatgctcattccgtgccagcgttggctgcttgggacatggggacggcgaggtccccacaccccacatgtgagctgctggtagctgggctgagcccagtgtccca

SEQ ID NO: 709609 - DNA, 682 bp, Homo sapiens
  misc_feature (156)..(156): n is a, c, g, or t
atggcctagaagtaacatgcgtatgatatactgaagagcggggccaaggagagcttagaaggggagacccgtcatcatgaagttccttaatgcatcttcggaggagcatagcagatgtgtaaatacaattattctaatcacaatatcagtctcaantcagagtattaatgagagataattagctaaagagaattaagatctatataagtaaatgtattggatgcagcattgataaggcatttgtagaagaagcaactattatcgagagggactttaacgaaagacaatcaaccatggtacgcgaaagtgaggccgtatcagaatagggttgggcataatacactttagaatgtgtagcgctcgagatagaagcttcttccatggggggtataaaaacttgtaagcctaaaagcaaattccgggagcagaggataacagagcaaattgagatagaggtaccttggtagacacgggcagggattatacgagtttaaatgccccggatgacttaccacagcttaaagattaatgtgttataagtcgtagtgtgagtgatatataattatgatgggcgaactttaatactagagaataaccgagggtgactgaaagtactggaatgctatgtacgaggagaatttgtgtctataaagcctataaggcattaataaggcgaagatca

SEQ ID NO: 709610 - DNA, 386 bp, Homo sapiens
cagttggacttcttgctaaagttatttatgttttaggtattcaaatattaatagtttttttttaatttcttaaagccagaataatttcaaatgtgatagtccctatggtgtgtgttttttttttttaatatcctcccccccccccccccatccttaggcactgcttggcagataaccctggttggccacagaagctattaatacgcgacagcatgtggggaagaacttatggtgggccaggtggccctcaccctgtttcttcctccctttggtttaaagagatatataaactaatttcacataagttgtgtgtgcaggtgattggtttttacataagtcctatttaagccttttatatgttacagaaataaaagttaatttatata

SEQ ID NO: 709611 - DNA, 243 bp, Homo sapiens
aaaatccccttaaccccagggggtggaggttgcaattaacccagatcccccccctgcattccagcgtgggtgacaaagtgaaactctgtctccaaaaaataaataaaatcgtttttttgtaatactggattaaaaaatgtccctgagctcttccgtgggctctgattgttggttaaaaaatatgtgctccaaaacaaaatcgttgttaaactgtgaccttttgctatgtttgtgtatgtatta

SEQ ID NO: 709612 - DNA, 707 bp, Homo sapiens
  misc_feature (44)..(44): n is a, c, g, or t
  misc_feature (61)..(61): n is a, c, g, or t
  misc_feature (78)..(81): n is a, c, g, or t
  misc_feature (86)..(86): n is a, c, g, or t
  misc_feature (90)..(91): n is a, c, g, or t
  misc_feature (94)..(94): n is a, c, g, or t
  misc_feature (99)..(99): n is a, c, g, or t
  misc_feature (102)..(102): n is a, c, g, or t
  misc_feature (104)..(105): n is a, c, g, or t
  misc_feature (107)..(107): n is a, c, g, or t
  misc_feature (126)..(126): n is a, c, g, or t
  misc_feature (190)..(190): n is a, c, g, or t
  misc_feature (203)..(203): n is a, c, g, or t
  misc_feature (211)..(211): n is a, c, g, or t
  misc_feature (217)..(217): n is a, c, g, or t
  misc_feature (231)..(231): n is a, c, g, or t
  misc_feature (258)..(258): n is a, c, g, or t
  misc_feature (263)..(263): n is a, c, g, or t
  misc_feature (283)..(283): n is a, c, g, or t
  misc_feature (287)..(287): n is a, c, g, or t
  misc_feature (324)..(324): n is a, c, g, or t
  misc_feature (342)..(342): n is a, c, g, or t
  misc_feature (346)..(346): n is a, c, g, or t
  misc_feature (573)..(573): n is a, c, g, or t
  misc_feature (594)..(594): n is a, c, g, or t
  misc_feature (612)..(612): n is a, c, g, or t
  misc_feature (628)..(628): n is a, c, g, or t
  misc_feature (645)..(645): n is a, c, g, or t
  misc_feature (648)..(648): n is a, c, g, or t
catttcaatgagtaaaaaagagcataaaactgtatgtgtaaggncaaaatgttaaaggggntaccacaataataaaannnngtcantttnntcntctcnttnanntnggccgggtgttcaggggtntggggctgggttgtcaatagggcaacacaagttttttgttgtgaattgtttgtgctctttgggntcttattttttcnttgcttantcttcntcttcttcttcttnttctgtctctgctttttttttttcttntttcnttgcccgtccggttcgtggntgtnttggtggctctgttgggttgtctgtggggttgttgtnctcttctgtttcctgttnttangttgtcttcttcggtttcttgcttgttgttttgggtgttttcctgccagggttttattcgccttcattttctgtgccagttgctttccttttctttgcccctcggccttttccttttggtgttgttgttcttctttggattgccttattctgtttccgtgtcagggttttctgcctcttctactttcttctgttttggggctctcttgggcttagggactgtatctnaagacggttttccctttttancagctaccgttttacttngaactttatctgtctntttcagaccaaatgatngtnaaaaacagaagcagaatcttcttcattactgtcaaatttagctgaatcatcttctgact

SEQ ID NO: 709613 - DNA, 354 bp, Homo sapiens
  misc_feature (35)..(36): n is a, c, g, or t
ctgcaaaggacatgtctttctttggcaaccctttnntactgtcgccatagttcttccttttctagaatgtcatattggaatcatatagtatgtagccttttcagactggcttctttcacttaataatatgcaattaaggttcctccatgtcatttcatggcttaatagtgcatttatttttagcactgaataatactccattgtctagatgaatagtttatccattcacctattgaaagacttcttggtggtttccaagttttggcaattatgaataaagctgttgtaaacatctttgtgcaggtttttctatgggcatgtttttaattcatttgaataaataccaagagcttc

SEQ ID NO: 709614 - DNA, 354 bp, Homo sapiens
tctctagcaggatccccctaccttaaatagctgtgtagcatccccagttcaccttctcatttgtcatctaggaaaactcctgtcagctggctttcatactttcaacttaaaagcaagcagtcgataatcaatgcctacaccttagatcaagtcacatttagaaccactggagggaatcaaacaacatattttgtcgattgaagaaccagtacatgaagctggatattttacttgccttatctcattctatccataagtacgaatattatggccccccattttacatctgcatgaaactggaggtcagaacaaggctaagtccatagctggctttttgttgtttttgtcagtttg

SEQ ID NO: 709615 - DNA, 516 bp, Homo sapiens
ggagtctcactctgtcacttaggctggagtgcagtggtgtgatctcggcttactcctccacctcctgggttcaagtgattctcccacctcagcctcctgagtagctgggattacaggcacacgctaccacgcccagctaatttttatatttttagtaaagatggggtttcaccatgccggccaggctggtctcgaactcctgacctcaagtgatccacccatctccgcctcccaaagtgctgggattagccaatattcagccagtaattaatttcaaaagatagtgtccctgtttcacaggaacatggagagaaatgatttcacctaatgaagtaggccattgtttcctattcctgcctatagatcatgaaatgactaagaaagacatcataaaaacatttcaaatgtcagcttgaaagtcaacattggtaaagaagtctttctccttcaataatataatacactatttcatgacctgaaagtaactggccatttccaaatgtccttgagtctttg

SEQ ID NO: 709616 - DNA, 754 bp, Homo sapiens
gggcagctccaataacagcagtctgaggaggacctgttccatgcaggatttcagccgccaatctctcggccaagtcctccgtgactgcttcttcggaaacagcgttcatcgtgtctgaccatccccatctggttatactggcagaatatgtgcctatggcatcttattcatgtactagcatgtctcgtatagtgtgatgaccctagtaagcgacatatttgtgtactccggtatgcagtagcaacgaatgtgaagattctgttctcgaagcacaacagttagcgagctagcaagagggaggcatgctgtgttccaacagagaagtggactacgcaagacatcttagcttgagacgctgatacactatgaaatgactgtcgtcggaagagggacgaagacgagtgacagcgcaactcgttggtggaacgtacacgaatgccggtaagctgattatcctgaagtcgagcagaccagattttcccacatttacctactaaccaagacgtgcttgtccactctgagtcgcgtagcgatcaatcagtatagcatgtccctctcctcacagtaatatcgacagaaccatctcaagccggcaatctaagctaagaaacctaagatacacagacgcaataaggtagcaaatcgctctagggactctgcctttgttcgcagcgtgtcatacgtaggcgtcgagacccgtagaacccatgtgcacgaattgttccccacctaggactatggggtcgaattgggt

SEQ ID NO: 709617 - DNA, 635 bp, Homo sapiens
ctggcggccgtcttgatactttcaggaaagaatgcattccctgtaaaaaccaaaaacataaatactgagagagggagatagagagagaagatagagagagacgggggagagcgaaacagagggagcaacgaatctgaccgagcaggtcgtagccggcgctcctcctcctctctgctcttcgctacccaggtgacccgaggagggactccgcctccgagcggggtgaggaccccggtgcagaggagcctggctcgcagaattgcagagtccgtcgccccttttttacaacctggtcccgtttattctgccatacccagtttcggatttttgtcttccccttctatctcttgtgctaaaaggacccctccaagataagtttttaaaaaacccttctcctttgctcaccttttgctttcccaggcgctttccccattccccccagctgtgaaaagcaaagtcattcaagcgaacccccccgaaccctttccgcgaggggctaggaaaggccccccccagtatgctctcacccaggtgcaggggaacccggctgcctaatccacatcgagccgagcggacgggccgggtataatcacggtggcgccagtggggggacaagtggggtgttcgaagctgct

SEQ ID NO: 709618 - DNA, 401 bp, Homo sapiens
acccacttgagcttattacaacagagacttcaccaaaccatttacctatatgagatataagtgatggaaatagacacctggatcaatataaatagtactgaaaggaatacacgaagaatcatgacacagcataatataccaaggaataacctgtataagtactgcataatgaattcactataaataactctgtaatgagagctgctactacgcttgatatcagactagctacctacgaacatctatgagaccacacccgtctatgttgctgaatagagggaagatttatacgtagaggcgacgaacttacggagcatgtagataactggatggtctgatagaatcttagtgcaacgatctatatgaccagagaatcctatctctgccattgttgtccctgc

SEQ ID NO: 709619 - DNA, 1432 bp, Homo sapiens
tataagatttttagtttaaagggggagaatagggtaggagtataggcggtggatagggggcgagtgagtgtggtggggacggaagtgggggtgggtttgggttgtgttctcaaagcgtggtcatttttatttttaacgtgggtagatagtggggagataggtggtgattgtggagggtggaagtataaattatagggcgtataggtgtagaaagttagaaggttatagagggagggggtgaagatgggtggaaacgtggtctcctttaagaagaagagtggatattgccgtggggccgtgaaaagaacagaggggagaacaccgtggcgacagagagagcctagcgagaagagagtgaggtacgtgacagaggggtgggtaaccccacaatatagagacagtttatgcgtgacagaggggtgcgcagaacaaaagaggagggcccatctccttccagagtggggggggcacccccgtgggaaagccgaggggccaacacccacatatgagtgcccagaaaaaatctcacgagggggtgcgggggagagtgcaagaaatatgtcacagagaggaagaatagtgccgggaccctcaaaacaaacaaggggggaaatctcgagcccactagagggggaaccagggaggtgtgggcatgaagaggactcacaacaagggggagacacgcctcggtgggctagggagaccccacaaacgagaaaccaaaaaaatggccaacgaaggataccattatgtgcgaagaaacgggccacgggaaagaaagaagaacaacagaaataataaggccaaaagagaactcggggacaatgaggtcactgcggtggcgctcgaacatcgagtaccccccagaagagaggggaagaacaacacaacaccgaaagggggaaatggggcacagcggtgggaggaacacatggcgacgggggctcaaacgacggggtctgttcactacagcccttacatcaaacgcggtgcagggcctgtgcgcaccaaagagcgctaacacaaaaaacccccgaggtaagaagatggggcacccccacaatgggtgaacacatgagcggatcgacaacaaaaaaaggtagcaaaacgtgggcaaccaccatgtaggggggagatcaaatagagagacggcgcacgaggagtgaacacacgaaaaggggagcaacaccgcgggacggccctcaaacgccgcacaagcaggggggtgcccacaccacggaggagaaaacagacacaacaggggaaccgacaaaagaacaggacgctacaggagcgagagcgagagaaagcaagaaagaaaaaagagcgcgggatagaaacgaggactacatagcgcggagcaaagacagggaagagaactgagtcacgaagagaagaagagtaacagtgagaacaacagacatagcaacag

SEQ ID NO: 709620 - DNA, 251 bp, Homo sapiens
atgttgatattcattgtgtgtagttttaattcggtcccagccccgtttccttttattttggagataatgccagatgcgagtctagttttgagtgcacgtaaaatagaatcagcaaatcactattatttttcatccttatccggtattttatgggatgtttctgtcagagcagtgtacaacaactcttcctgtatattgcccttcagttgaaaaatgttgaatgatgaatagaattttctataaaaattata

SEQ ID NO: 709621 - DNA, 100 bp, Homo sapiens
actagtccacggtttggctactagtacgctggaatggaattgagccaaccgtggtactagtactagtccacggttggctagttacgctggaatggaattg

SEQ ID NO: 709622 - DNA, 284 bp, Homo sapiens
  misc_feature (127)..(127): n is a, c, g, or t
  misc_feature (238)..(238): n is a, c, g, or t
  misc_feature (244)..(244): n is a, c, g, or t
  misc_feature (277)..(277): n is a, c, g, or t
aggcaggaacatgggttatttatgaaggatgcctgtagagttcaacaagcctgcttactgcgggttagttgtgaccattgtctaaggtaatttaatggttttcctatggaggagctgaagggagccntgaaaggggaaaagggtggctcccaatgagttggcagccaatggggaacaatttggatataataaataggtctcatgttgactcctttccaaaacggcctttcaaaggggnagtgtnggcttggcctggcaaacttctccccacccactncaccaca

SEQ ID NO: 709623 - DNA, 560 bp, Homo sapiens
tatggcatcctccatatatcaatttctctgggatatgtggatcagagatcgcacctacagacttcgcaagattcgcttctgattgtatactctttataagctgctatgtggacgatgattactgttagttaccccaggatacggagtataagcgatacatcatcactgatactcacatcaaaggaagatcaaagtagcctgagaccctagaaggtcagacgcaaagaccactgacacaggcaaggattaaggtcaaggctgcctagagcaagctggaaaatgagggtaataattacaagagcaggcccaggtataggcttatgggtactcgtctgactccaaggcaagtgggctgttaggcaccagacaacttagaaagagcaacctcccttgcctttttcacaaaagggccaacagtctggagatgagtagattataggggtttgtgctcctgtatcacctccattcatcacctccttagtcaaggctctgaactgctttttctctccaaggatctgaagcaggtatgcaagcagcagatgttgatttttgttttcatt

SEQ ID NO: 709624 - DNA, 414 bp, Homo sapiens
cacgaggaggacgctcacttcccgcaccgcgccgttcacttccagggaataggtgagggcgcggccctcggccaggaaggggacgtcccggggctcgaagcgggggacgcccatgtccaccgtcacttggccgtcggcttccagccggggcacgatcacccccgagcgggtctccacccggatctcccgcttggcggtcaggcccttctcgtgcacgaagcgcacgaagcagcgggcgccgttgccgcactgttccacttcgcttccgtcggcgttgaagatccggtagcggaagtccatgtccggccgggacggcggttccaccaggaggacctggtcgcagcccacgccgtagtgccggtcggccaggcgccgcaactgatcccgggtgagaacgatggattggcgcacgcc

SEQ ID NO: 709625 - DNA, 365 bp, Homo sapiens
ctcttccggacggcggtcctccggacttcttggatgtcctgaactttccgtagtcctttttctggaattggttcattataaatatagctgggcattggttggatcttttcaacggtcttcacggcatcagtagttttattccatagttctggcagatattggacaggctggttactatattttccaaattcaaatccacggtaagctcattattagcagtggctttacagaaggctttagtccacctaacctttggagaatggcacttcttttaaagttttggtgacatttatgtttatacaatcggaacacctggcaacagcggcagatgaacatcatgatgtggtcaggaagagaccgggtac

SEQ ID NO: 709626 - DNA, 271 bp, Homo sapiens
tcacacctgcaatcccagcagattgggaggttgaggtgggaggataccttaagcccaggagttcaagatcagcctgggcaatatagtgagaccccatctcaccaaaaattttttaaaagagataggcatgctggtacatacctgtagcacagctacttggaagattgaggcaggaaggtcccctgagcccaggatcttgaggctgtcagtcgagctatgattgcactactgcacgccagccctggagacagagtgagacccccatccctta

SEQ ID NO: 709627 - DNA, 216 bp, Homo sapiens
gggcatcgaccgatgagaccggtctggcagactcatccgcgcagtcaatggagaacgccaggcccttggcctgggcgctgccaggtgaactgatggcgcaaggtatcgagctcgccgcgcaggctgaacacttgcggatgggccaccaggcgagcggcctgcaactcggtgaaggtgaggatgccgttgaccatgcgcatcatgtcccgcgccgag

SEQ ID NO: 709628 - DNA, 981 bp, Homo sapiens
gattttagcacagttaagaaaattcagtattaattacacatcattacttgattgctaccctcttgttcggcaaggaggacaaatacgcaatgttggaaacaccgttgtgcatggcatatctctctcctcttaaacacaaatgtaaacgataactttgcgtctctgcacgggtttaacactgcgttagataatgccgtctaccaacgagacacagaacaatacagatcagaaatacttagtgatcagcacatcatgggtgggcacgagtaggccttctcgacggagtgatgatggagggaaggttgtagcttggagtccagggaagttcggagaaccaagcccgaggcaagagctagtatggcgtaagacgccgtattctctgaatagactatattgtattaatgacgccaagggtcgccgaggtgggcgttcaacggccctggtgatatcccccaggcaacttcctcgggtacgagtccgatgcgaccggggttgggactcgattgcaaggggtgccagagatggaattccgaaggaacgcgaattacgcttggaacgcgttagaacaaatgcggtggaagagaacctcagcctggttgacgttcgtcaaccttcacattcacagaaattagcccagatacaagacgaatcttaaggcccccgtgagactgccggaggtgtgcgagccctgtgtagactgtcaccctcgagagtaaagggttcctcccgatggccatataaacattacctggtcgtagagagtgtggctttcggaacgggtggcaaggggggaatagcatatagttgtgcggcgctggttaggaaaaaacggcccccggggggtacacacggttggagcaagcgcctattatcgccccaattgtgtctggcagggcccccatggaagcgaaattctgtgtcagccccaaactataggcccaaggatccggaggcttaaggagtccaccgagacctttggag

SEQ ID NO: 709629 - DNA, 189 bp, Homo sapiens
cgcacatggtagcaggcagcctgtagtcccagttactagggaggcgtgaggcaaaagacatagctttaaccccaggaggctagtaggctgcaatgagctgcgagcgtgccgactgcactccggcctgggctgactgagccagctgaaccttggtctcaaaaaaaaagaaaaggaatggggaagcaaact

SEQ ID NO: 709630 - DNA, 328 bp, Homo sapiens
gcagcccgtggtggtcagacgttggcacgggattggacggtgtcttccatttcctagtgtttcaactgaataccacagacctgggactgtaacgggggtttcaagatttgggcctgggtggacttaaaccagctcctctatcaacatttttggggtctcccagggatcaaaaagggagtgggttttaaaaataaaaggaattcagcggccaaattgtttttcagaaggatggaattggtttagcggcccaattttaagggagtggacctccctcaacactccgaggcatcggctcaaggcaagtttgaggcggaagcgagtgtaacca

SEQ ID NO: 709631 - DNA, 111 bp, Homo sapiens
atccgtatcagagtatgaattatgctgtcatgccgatttgggttaaattgttttgaccaatccagtgtgcacacaggtaggagaaaaaattgcccttaggtcttgatttga

SEQ ID NO: 709632 - DNA, 268 bp, Homo sapiens
cacagagaagagacgatgatgacaggtgagtagatccaaacataattgccacatttgtaaaacattttccatttctcatccatccttaaagaaaatcatatatcgggtcacaccatcctcacggttctccaataaagcaaccatgccatctggattcatgttttcacctgtccagaactggctagtttttgaaattagcaaggatgtgcttgatttgttctgcagccccttgtcattataggttttactccatctcgtctcttctctt

SEQ ID NO: 709633 - DNA, 129 bp, Homo sapiens
  misc_feature (17)..(17): n is a, c, g, or t
  misc_feature (24)..(25): n is a, c, g, or t
  misc_feature (27)..(27): n is a, c, g, or t
  misc_feature (113)..(113): n is a, c, g, or t
aagagaggcgggtctcnggaagcnnangcactgctggtggaagccagctgcaggcaggggaggaaggaggccttactcttccttcttgtcatgggacatctactgcagcctgnagctttgctgtgctcc

SEQ ID NO: 709634 - DNA, 310 bp, Homo sapiens
agtcgcgtgtgcttacacttactgcagtttatccatttacttttgatggacatatgggttagctccagtttgtaactatgacaagcagtgctagcacaaacatcctgaaatatgtatttaagagaacatgggatatatttctattggttatatgcctaacaacaggattgttgagtagcagaatgtgcatataattctacatttttgcctcttttttttactagtgttgcctgacttgtttgtattgactagtagggatttctttgcaactctagatatacgaccagctgtggtggctcatgcctgtaat

SEQ ID NO: 709635 - DNA, 376 bp, Homo sapiens
ccagttacaacagctctacagtttctatgagacaggctccctgtagacctgcagaacggggattctgagcatcctgatcataacgtacagctgatcaagcggagttcgatgcggaggagctgacaagcccaagtgtgcaacacatcattgttaatcctaatgctggctatgacaagttcaaggacaagagactgtcgacaaagggactagatttctcagatcgtattggaaaacaccaagaggacagggtatgaatctggagaatatcagatgcttggagagggtctgggagtgaaggagacaccccagcaaaagtaccagcgcctactgcatgaggtccaagagctgacaactgaagttgaaagaatcaagacga

SEQ ID NO: 709636 - DNA, 401 bp, Homo sapiens
ggggcttacctggcaaatcaaaaagaatgaaatcatgtcctttgccgcaacaaggataaagctggaagccatcccatcctaggcaaattaacacagaaacagaaaaccaaataccacatgttctcactataagtgggagttaaacattgggtacacatggacagaaagatgggtacaatggacactgggactaccagtggggaggaagaaaggggacaagggctgagaaactacctattgggtactatgctcataacctgggtgacgggatcattcaaactccaaacctcagtgtcatacaatatacccatgtaacaaacctgcacatgtacccccctgaatctaaaataaaacttcgaatttttttaaaaagaaaaattaaaacaaaggtgacaacaaat

SEQ ID NO: 709637 - DNA, 210 bp, Homo sapiens
gggccaattattttaggccccggggtttaaaaaaaaaaaaaaaaactctgtttctgcaggggaggatattggtgagttgccaaaaaagcaatacagcaaatcggcttttgccttctgttgtttattttcccggcagaaattaagaaggtatgcattatgtaaaacgcccaattaaaaatttttgttgggttttttaattaaagacttgta

SEQ ID NO: 709638 - DNA, 147 bp, Homo sapiens
aagcaaggccaagaaaggctcgtcctttcagactgtgtcagctctccacagggaaaatctgaccagctgttgcccacttgcgctccaccatcccactttgtacgttgtatcatccctatgagcaaagttccaggggtatgcaacccc

SEQ ID NO: 709639 - DNA, 517 bp, Homo sapiens
cccggttgaaggcagtggacatgggcttgaaagttctatataaaggggaagcacagaacactgtcccagatggatatcagcagagtgtcagagctcaaacctctttggagatcatcaaacttcccaatcaccaacgaaagaactaattcctagagagaagtgacttagccaaagtcacccaaagtttattggtagagctgaaactcccaaactggatttttgctactatagcaaattgcccaggaaatataccaacgagttagagaaaagaagaaaagagagtactgataataatgtttgcctacagccatccctaagtgctgccttactgtcctttcccagcttctgctctgattttatctaaatccaaggaaggctgggtgcagaaacaacaaagagccccagacactcaggagagtagtaattctccacttgacccccctctcctgaacatgataaatacacttaactatggaactttgctgaccccctcacaccaacaaaatgactcaaactg

SEQ ID NO: 709640 - DNA, 446 bp, Homo sapiens
gtgacgtacctgtgacatgaaataaagggggctgaaagaaccacttagaaaaaggattttcatttaaggcactgtgtcctatcagaaattctgatgggccaaaggtccttaaagccagaacctctacggttcatattctggagagaatgtacggtaagtggtgaagaggttagctggccaacggtgagaagtatgaagaaagcactaggagtctacttctcttcatacaattcttttttttttttttttttttttttcccgggaggggagagtcgggccccagtggcccgggggggagggcgggggggaaaccccgagccccagggagcccaaaacttttggggccaaggaaaccttctaacctaagcccccggaaatagggggacccgggggtgctgtgattcaccccgggttaattttcctatatggggaagaaagggggtgcc

SEQ ID NO: 709641 - DNA, 281 bp, Homo sapiens
agctgggaccaaaggcgtgtgccaccactcctggctaatttttgtatttttagtagatatggagttttaccacgttgtccaggctgttcttgaactcctgacctcgtgatctccctgcctcggcctcccaaagtgctgggttacaggcatgagccaccgcacctggcccacattttgacttttatgattaccttctttatatgtgtaaaaacagaaggctctgtttctctcggtcctgcgaagttcggctcctgacaccaagttcttcctgcagcacacac

SEQ ID NO: 709642 - DNA, 532 bp, Homo sapiens
  misc_feature (149)..(149): n is a, c, g, or t
cacgtttgtttcttcgtgcctgttttatgtgacacatagggcattgagacttcaagcttttctttttttgtccacgtatctttgggtctttgataaagaaaagaatccctgttcattgtaagcacttttccggggcgggtggggagggnggtctgcctggtcttcaattaccaaaaattctccaaaacaattttttgcaggatgattggacagaatcattgcttatgacatgatcgctttttaccctgtattacataaataaattaaataaaataaccccgggcaagacttttctttgaaggatggccccagccattaaataatcgaagtaattttgggtggggaaaaaaggcaaattcaattttctttaaccagtttgaagtttcatttatgatacaaaaaaagatgaaaatggaagtggcaatataaggggatgaggaaggcatgcctggccaaaccctttttttaaaatgggttttccatttgtataaaatggggttttcatgtaaataaaaacatttttggaggagca

SEQ ID NO: 709643 - DNA, 207 bp, Homo sapiens
cacaggcccgactcccttaccctgcgaatctcctggaagttggtcacagagagaacgattgcaggcaccacccgggcagtgagcaggagtggatcctgagtgcgaccacttcaggcatcttcctgcactggatgtggtcaaccttgttcagtcaaagcacttgctaggggcaagtctgcatctgctgaggagctgaggcggcaggct

SEQ ID NO: 709644 - DNA, 196 bp, Homo sapiens
  misc_feature (51)..(51): n is a, c, g, or t
  misc_feature (147)..(147): n is a, c, g, or t
  misc_feature (156)..(156): n is a, c, g, or t
  misc_feature (176)..(176): n is a, c, g, or t
gtaatgaagcctacgtaacgcatcgtcaggcaggtaaagtcagtgtgattnacgcgaaaagctataaagtggtgaaaacgttcgatacgccgactcatccaaacagcctggcgctgtctgccgatggcaaaacgctgtatgtcagtntgaaacaanaatccactaaacagcaggangctacccagccagacgttgt

SEQ ID NO: 709645 - DNA, 121 bp, Homo sapiens
gcaatacagaacacaccgaccgcggtataaactgccggggttgttcatatgacccacggagaaagttacatggccactggctcgttacattttaaggggaccaagtattgcaggagccaaa

SEQ ID NO: 709646 - DNA, 751 bp, Homo sapiens
gcctgtggtctccgcgcgccggagcgcagagactccctggcatccttaccccctaccttcggctcgtgacaacgaagcgccacgcggtctgagtgctgtgcggcgtgcggccgacgtgtgctgacctggctgagctgctgagactgtggactgcctggcctcgcggatcgccccgccccctgggtcttggactccgagcccctcccctctcggcgctatcccgttacgccccgattggatcctggacgcgggtgccccagagagaaccaatttccacgagacccagagggcgcctggtcagaagacacaagatcagacaaggacgaccaaagatgaagacataacccatgacgtgagactcgagcagacaggaccttggacaacattccaaagccatatcccgaaccgagggaataatagggagccatccctcgaaatgacccgtggcaaaaaccatcgatgcgtatgtgcccagacaagagaccaacagaaggggccacactaggaatgaaacccaacgacccccagatcacagatatcccagacccgtacccgaatgaagcaatatgtgggaaaggccagaagaccgattccccgaaaagagggaccgtgacataaaccaagaagaggcagacccgcaaaatttgaagacacacagagagaacacacacaaacgaaccagaaaaaggaatacaatacccatggtgaggacacgaaaccggggaacaagactagacataaccacaacgga

SEQ ID NO: 709647 - DNA, 911 bp, Homo sapiens
tgacaacttccaccagatggcgccaaagtacatctgggaccagaagggatttggatcctgtagccagacccacaactctaccaaaccaacatcgcaggcccaggggtcatttcattaacctctcaataacatcgctctgaattttaatttaattttttagtttccacttactgctttatgacagcggttttagtgtgcatggatagggctaaatcatgtaaataatagagaaagatacaaaacaaaaatgcgttttttttttttttttttgggaaacagggctcttgctcttgtcacccaggctggagtgcgggtggcgcaaccacggcccacttgcagcctttgaccctccgtgggcttcaagcagatcttcctgcctcttgccctccataagatagtgtgggacatacaacgcgtgtgctacagatgcctagttaacttttaatttttggtaaaagatggggtcttgctctgttgcccaggctggtctcggactctggggctcaagcagatcctctggtttaggcctccccaaatgctggaattacaggcgtgagccacctttcctcgccataaatgcttccatttccgcctcgacaattattccacctgaagctgtccatttcttctggacattccttccagaaaaaggttatacacatgtgcctgaattttaagcacctacttaatactatttcctccctctgggtttggcaatatgcaatagtttaccctaaaaggtgacttgcccgcgtgtttgggactaccctttgatcttaactaattatcttgggcaatatatttccttacccaaatttttttcgccctaatctccacatttctcaaatcactcaatttccataaatttattcacaattgtgttctaacatttcgtataaatatagaaacca

SEQ ID NO: 709648 - DNA, 782 bp, Homo sapiens
agggcctcaatgcaagaagggcggacaagaagttcctcgggcactgctggtgccacaaatgacccgccatggaagcacggctcacgctcagggatatcctgaaccatccggccccaattagcccggctagcccccgtatgtggattgccaacccgggtcacattgcaagccagtttggctgagctgaaggcaaagattgatcgccgttctggtaaaaagcttgggagatggcccctaaattgttgaaatctggtgattgctgcccattgtttgatatggttcctcggcaagcgccgatgtgtgttgagagccttcctccagactcatcccacccttttgggtcgcctttgcctgttctgctgatatgagaccagaccagttccgggtgggggtctatccaacgccagtggaccagaaaggctgctggactggcaaggtcacccagtctgccccagaaagctcagaaggctaaatgcatattatcccttatgacctgccccccccactcttggatcagtggtggaaggacggtctcagaactgtttgtttccattggcccatttcaagtttagtagtaaaagcactggttaatgatacaccaaagcatcgttaaacctctcagaagggaaggagcaatgttttgtggaccaatttggttttcttttttgcctgtggcagttttaagttattagtttttaaaatccgtgaccttttacatggacaccagcttgaccccaaatttgtcaccgaattttgagaccccttccaaaagttaaatgaga

SEQ ID NO: 709649 - DNA, 1770 bp, Homo sapiens
ctacgatagttgataggcgccacacggtgtggtgacgaatctcgcgtcttggtgatgcctgctctgcgctcgcgcgtgttgattgcctcggtggggggtacggtcttcggagtgcgttatgctctcgtatagtgccgaggtcgcgtctcgtcgtttgtgtagtgatcttcgtatcagaatggagggagcgttttgggcctccttcgtatagaattgcctccctctgttgtgggtagatcgtcgttggtgacgcccgcattaaactctctgtgcggtgtttggtatggtagaggctccgcacgcttggttggggtccgtcgcgtcgggagtagttgttcgggtgcggtggcgcaaggagaaggtcgtcgccgcggcggtgggtggtggtggtgcggcgagcagagtgaggtggttgcccgcgctgctggatgaaggtggcttgagtatagatgggggatcgtggccccgtcgttgtttgcaacgagggtgtcggcacaaggacgcgctggccagcagctttgtagtatagggggaagtgtgtaagtaagatgccgctcgtgtgtgccgtctggggggaaggaaggacgcgcgtggtagaaatagtggtgcacatcatgggtgcgcccccggtggggaatataggtcgtctatgtgtgcggaaagacatgcgtgtggggacggccgactgcgggaggtagttgaagacgcgccaacagctggagtggaagttgtctctcttatagtgaaattaggaagtatggtttcgcggggtgtgaaaggaggagaagagggctgggcgcgcaccgccacagcggggttggtacaataggggagcaggggagacaagggttgatcaagttcgcggagaacggggccggcatcatggccacagggggcacaggggaggagtcttcgggaggggttgtggaggaaaatgccgacggcggcaacagcgccaacactgggaatagaagaggggggccacggcggggcgctcgcggcggggggagggactgaggaagtagtgtcggttgtgcgaagagacgccgcactaggccaccgggggcgggaaggacacaggaaagggacgacaacgcccccaacagaggagaggcccgcaacaggctcaacgggccccccgcaacgagagacttggcccacgcggggcgcacacgccacagaggaggcacaccggcacacacggggagagcctcgtggggggccgccgcagcaatgtgcgtgtgtggagagataccggtcggcggtgagaccctcgtgtgagtgtcacgacaccacgtgggacacagctgagagagagaaccccccacgtgcgccacacgctctcctgggggtatgttgtttaagaaagttcttgcacctgaagcccgcgggaacacgctcacggtttctgacgttcgttctcgtgttgttgggtgtttgtgtaataattgtggcttaattttaaagggagacactctttctctgtgggtgtttctatgaagaacgccccctaagagtgacccctcggttccacttaagaccggtttccacaggtgtttttcccacaggtgaacgctgttaagcgcctcacagctggcggtgaacacagccggcccacagcgtggcgccacccaccacacacccccacagaagctgtccacaggcaccaagctccgtccccagcgctcatggtgttgtaaactgttctgtcaagcaccccggggtctgggtccaaccccagtaataaacggtttactgtccgccaaccgt

SEQ ID NO: 709650 - DNA, 175 bp, Homo sapiens
  misc_feature (120)..(121): n is a, c, g, or t
taccctgagtggatcggggacgggagagagcacgagcccatcagacaaagtggtgaagaaagggaagaaggacaagaagatcaaaaaaacgttctttgaagagctggcagtagaagatanncaggctggggaagaagagaaagtgctcaaggagaaggagcagcagcagcagcaa

SEQ ID NO: 709651 - DNA, 131 bp, Homo sapiens
agttcgacggagactctccctcagtcagtcccccaagtctttttttgttctcccccctgagatagggtcttgctctgtgaccaggctggagtgcagtggtgtgatcacagctcacagaagcttcaaactct

SEQ ID NO: 709652 - DNA, 479 bp, Homo sapiens
  misc_feature (328)..(328): n is a, c, g, or t
  misc_feature (437)..(437): n is a, c, g, or t
  misc_feature (459)..(459): n is a, c, g, or t
caaacagacgccctccaccaaaaaaaaaaaaataatacatggtggtttacagaagaaatatcaaaccttgtaagtactaggtagaaaatggataggcttcagcattaacatcaatgctggccaaagctgattatgtcctgggagctgttctaagtaatagatacatttaatcctcatgaaatcccctgtgggataggtattgcttttatccctaatttgtaggtggagaaactacagcatgtgactttcccaagaccatccagctaccaatttgtacccaggcagcctcagcccagaatccacttctaaccaccaaactgcctcacangtaaagggcctttctcccatgtttcacgcaacattggcgttcatatgtatcctcatcagaagcgtcatctatttgtatagtactacttagctactggcttttgtacagngtgctcgtctctgtaccttttnccattttgcgctccttgggg

SEQ ID NO: 709653 - DNA, 497 bp, Homo sapiens
acttatctgagtactaggaggacaccctcaagatacctcactccagttgactccttgagtctaaatctttgagttaaaaactacaggaggttcttcatggaataaacaggtattaagctatataaaggcgagggctgcgaaatgcttgattatgggctcaacaagttcgcaggccaagcgttagtcatttccttccagtaactagacatgtgtctagcccctaatagttcatcagactatatttgcttaatcgaatcaaacacagttgcctatgccctttgacattctggactaacaacagcgggcctctagccccatattagcttaccaaactgaacatcatagatgatctggattcaggcagggactgcaaaacgagcgactgggccacataacaataatcaattcactgatgacacaaaactaacctacaattgtccgcacccctctctactccttatcttgcgaaatcaaatacagcatgagaacgtgccggg

SEQ ID NO: 709654 - DNA, 434 bp, Homo sapiens
aacgatggtcctcagcttccaccagcttagccaaagcgcctttgtctaagctgaggacatcgttgcaatgatggtcctccagcttgaagtgctgtatacttagaggttctcttcagagtctaataaactatctgaaaagctgccatgtgttcatcaagttcaaggaagatagtgctgtaataagataaccacatcatcaaaggccatgctgatgatggtttggaggaaaggaaattgaatgttaagcaaaattagcagtccaataatgatagagaatccaatattgaaaatgcaaaggtgtacataaatcgagcaatcaagttttctgatttctttcttcttccttcccagaattatcttgaaaaactctagcaaattcagagagaatcaatgcacagattatcgtcttatcctatcacgtgaagtgtggatgt

SEQ ID NO: 709655 - DNA, 333 bp, Homo sapiens
aatgcaaaaaaaggttccccaggggggccttgattttgtcctaaaaccgtttcccggaagcttttcctggggggggggcttttaacctaatcccccatcgattccagaactattactctgtttcccccgggaaactgggtttaggttttagggaggcccgttcctttatgtttcttaaaaatgctttcccgggggaaagttccttaagtttgggggttcaaattccctaccgccccttaaaatccccttcctgagttttaaaaactgctttgttgttttggaaaaacccatccaattgttgggtgaagtgatgtggataaaaaaggggtttta

SEQ ID NO: 709656 - DNA, 443 bp, Homo sapiens
cagtgacatagattagcatgtcagacttcgagaactccaggaatatggagccaatgacatacatggtgatgcctcttcgatcactcaggagacatccctacggtaggaaaagaagagttggttggcaccactgagatgcaccacagagaccaaagaagccaagaaggccataaaggtcatccaaggaggaagccgcgatggcctacatagacttcctgctccagtcgctgcaccgtggccgccgaggcccaggacggtccccaggaagcctagacggtgtcgccgcctgctccctgataccattggaatgatcttcagaatcatgtcgatcctggggccctcagctcctggggtacccactccctgctctaagacctgcctaggtttttcctactgtcctcagaggcgttgtgtcccctcctcagtgacatcaaagcctggca

SEQ ID NO: 709657 - DNA, 409 bp, Homo sapiens
tctgaggatgagatacagctttcatggtccggcgatttgcatcggcttagagcgtatcagcataatgaaactttcaggggtctcacaaacgacaccacaactccggcaagtacaatgaccagcgttcaggcccgagcttccacccagcccccccaggccctggaggactcgctcccggagaatatctcagtctcaatcaccctaaccctggacccactgaaacccttcggagggtattcccgcaacgtcacccatctgtactcaaccatcttagggcatcagattggactttcaggcagggaagcccacgaggagataaacatcaccttcaccctggctacagcgtggagctcagatgactgcgccctccacgggcactgagagcaggtggtattcacagcctgcatga

SEQ ID NO: 709658 - DNA, 193 bp, Homo sapiens
cgtccttcgattgcatcgattccattcgattccattcgatagcagtcggggtcataccattccacttgcattcccattccattccattgccttccattccaattccattccgttccattccattccattccattcgaatagattctattccattcccttccattccattacatacaattccattcgagtagat

SEQ ID NO: 709659 - DNA, 829 bp, Homo sapiens
  misc_feature (12)..(12): n is a, c, g, or t
  misc_feature (475)..(475): n is a, c, g, or t
  misc_feature (505)..(505): n is a, c, g, or t
tactgggcccgnggcaccgggtgggctcaatgccctggtgactgcgaggcacttttgggggagggccataggcagaacaccactttgggagggactcgactcaacacaacacaacttgagtccaggagttcaaggacctcaatctctattaaaaaatagctgggcatggtggtgggtgcctgtggtcccagctacttgggaggctgaggcaggaggattgatggagccagggagattgaggctgcggtgagctgtgattataccactgcactccagcctgggtgacagagcaagaccttgtctcaaaaaaaggggagaaaatattggagctctgtaagaaatgtaattacataacatgactaggctaggaataatagttgcttcatcataatcgtgtaaacactggatattaatctattctcaattataaaactgtcctgaaggaatccgagaatggaattatatttcctactangtggggaggagcatgggagaaggaagaatncttcattttttcacagaaaggatggtgatagataacatctatacttacaaaaagaaaaagcaggtgggggcaagtgggtcacacctacaaatccagcactttgggaggccaaaacggggggattggttgagtcaagaggtcaagaccagcatgggcaacatgagggaaacaccggtttacctaaaatacaaaaatagccggcgtgggaaggggccccggagcccagctacttgcagggtggggggggaaaatacgtaggttagggagggggacctcaatggggcggggatgttaacccggcccacccagggggaagccagacct

SEQ ID NO: 709660 - DNA, 435 bp, Homo sapiens
actttttataaagcacagcagaggaatcaaaagagtgaagagataatttatgcaacagaagaaaatatttgcaaaccgtacatcagataaggggttaatatccaaaatatataaggaactcaaaaataactcaatagtaagaaaacaacctgattttaaaatagggaaagaacttagtcatttctcaaaaagaagacataaaatggccaataagtatatgaaaaaaatgctcaccatcactcatcaccagggaaatacaaattgaagccataatgaggtattacctcatacctgttagaatgacaatcatcaaacagacaaaagataacatattggcgaggatgctgaggaaaggaaacccttgcacatcgctggtgggaatgtaatttattacagccagtatgaaaaacagtatggaggttcctcaaaaaaaaa

SEQ ID NO: 709661 - DNA, 860 bp, Homo sapiens
  misc_feature (290)..(290): n is a, c, g, or t
  misc_feature (558)..(558): n is a, c, g, or t
agcggggattacaggcacgcaccagccacgcctgggtaatttgtctgtattggcggtagagacggggtttcaccgtgttagcgcaggatggtctcaatctcctgtacccttgtgatcttgccgcaacattctacctcacgcaaataggtagcttggggattactaggagcacaagtggtttattcttaagtcttgatcacattgtcgatagtttacgtgacaaatctatcagtctcgctggcaacacgagtgtatgacattggaagtcatacaatcctttctctctagtnttcatttctttggtggtgaccgatcttgttagagcaacgatggaggtatcattgtcgtatgcttgcgccagggatggcacgtggcagtgaacctaattcaccagggtatgaatcgagtagcaactagcgtgcaagtcactcaagcttccttgggactcatggcgatccccagtcccgtcgagaccatctccgaagattaatcctaggcgtgattaacctaggttggtggtcagcacaaccagttgtcgtgtagggtctctctatactnaaattctaattcttgtacttacattttcataaaaagtttacatgtagtgcaacttgttgtatgaaaatggcggctagaaacagcacgtgattgcatgaagcactcgtttgtgagagcagtctcccgatggccctatgcaacgttgctatgccccagttgtgccggctctagctagaaatctcttcgttttgatcctccagcaaaagctactaggtgaagaccttatttcgttgaaaacgctataggagagataagccaccggaatcacgtaggggagttgcctgcaagaaaaagtcaattca

SEQ ID NO: 709662 - DNA, 312 bp, Homo sapiens
gcccccccggttttttcccccccttcccccctttttaaatgggggggggggccccgggggggggggcccccccccattttctggcccccggtgggggggtttttaggggggccccccgggggggtttttggggcccttttggctaaaagcctttggtttggggggggggggggggccctttttttttttttttcccccttttttttttttccaaaaaggggggggggggggggccaccccccctttttttttccccccccccgggtatttttgggcccttttttttttcctaaatttttttcccccccccca

SEQ ID NO: 709663 - DNA, 118 bp, Homo sapiens
gtggtagtgatggtcatgatggtgatgatactatggtggtggtgatgactgtgatgatggttgtggcaatgatgactatggtgatagtggtggtggtagtaatgatggtcatgatggt

SEQ ID NO: 709664 - DNA, 433 bp, Homo sapiens
gccagtatatgaagtcccaattttctggggatattcagtgtaccgaaagtaactgcatttaaaatcattataaaccaaaaaacacgtcaaatagcattatcgtattattattttttgtttgtttgttttgagacagagtcttgctcctgtcccccaggctggagtgcagtggcatgacctcagctccctgcaacctctgcctcccgggttcaagtgattctcctgcctcagcctcccaagtagctgagattacaggcacctgccaccatgcccagctaatttttttcgtatttgtagtagagatggggtttcaccatgttgaccaggttggtctcgaactcctcacctcaggtgatccacccgccttagcctcccaaagtgctgggattacaggcgtgagctcccacaccctgccagattattaacattttaa

SEQ ID NO: 709665 - DNA, 325 bp, Homo sapiens
tatactgtagtcgtctatgtttcgtgactctgctcccacggcctcccacttatctactctgcagaagcggaaatctccctgatatctagctcagacggccagggagcacggccgcccctggtgagggtcctgactatagcaccattgacccagagggggaggagctagcagagcttccatgggggcttcccccaacatccctcaggagatctgggtccctggagccagtacgctcctccagagtggagccagggggacagtggtatgactccaactcctgaaaccccgtttagccctgaccagggtaataccccacaagaggatc

SEQ ID NO: 709666 - DNA, 131 bp, Homo sapiens
cgcgagtgtaggggctattacttttatgccgcggcagcgcgccgggcgctcaatgcttgggatgcgagggcgtcagacagctatgtcgaccagggcgatgcccagacgcggacaggatgaacagcgcgtgg

SEQ ID NO: 709667 - DNA, 269 bp, Homo sapiens
agcctttaaatcaatactcttcaaatactgggagataaggaatctataagcattatccttgagcatatatgaaaaacgttacaaagtgaagttaactctttttttcagtcccttacagatgtattaataaggaatccatagcttaattgttcagttttctagcagttctctagttcttcatgagtaaagaattcttttgatacacaaatcatagtaattacagtttctcaaatgggagataaaacaagtgtgatagaaaccaatgcaac

SEQ ID NO: 709668 - DNA, 372 bp, Homo sapiens
agccggcacccgctctcgtgaactctagtcggatatgtttcccctgccactacaggaatacctcttttgcttttctaaacctcatccttgtctctgacccctgaaacctcacttggatcttgcctccctcactagtggcccctagtttatttctgcacatgggtggggtgaccttcgtgctctggcagactcatactgaacccctcgatgttcctcaagaggcttagtcaccaagcaagaccataatacttagaacgcgccacattttgcttactctatgagaggtaactaggaccagaccccagagccaatgcttcctggtactcagtgacaccaggaaatgcttgactaaagggggtggggcatggagag

SEQ ID NO: 709669 - DNA, 145 bp, Homo sapiens
tcttctaaaacagggctactcctcggggtcacagagtgtgaataggtggtaggcttgtacatacaagtctccagaggggtttctgcgtattcatagtatgtatggtacaataaagtcttaactactgtgtgtcttatttatgtag

SEQ ID NO: 709670 - DNA, 740 bp, Homo sapiens
  misc_feature (7)..(7): n is a, c, g, or t
  misc_feature (112)..(112): n is a, c, g, or t
  misc_feature (126)..(126): n is a, c, g, or t
  misc_feature (129)..(129): n is a, c, g, or t
  misc_feature (135)..(135): n is a, c, g, or t
  misc_feature (164)..(164): n is a, c, g, or t
  misc_feature (186)..(186): n is a, c, g, or t
  misc_feature (245)..(245): n is a, c, g, or t
  misc_feature (251)..(251): n is a, c, g, or t
  misc_feature (323)..(323): n is a, c, g, or t
  misc_feature (367)..(368): n is a, c, g, or t
  misc_feature (429)..(429): n is a, c, g, or t
  misc_feature (442)..(443): n is a, c, g, or t
  misc_feature (445)..(445): n is a, c, g, or t
  misc_feature (451)..(452): n is a, c, g, or t
  misc_feature (470)..(470): n is a, c, g, or t
  misc_feature (479)..(479): n is a, c, g, or t
  misc_feature (484)..(485): n is a, c, g, or t
  misc_feature (488)..(488): n is a, c, g, or t
  misc_feature (497)..(497): n is a, c, g, or t
  misc_feature (507)..(507): n is a, c, g, or t
  misc_feature (515)..(515): n is a, c, g, or t
  misc_feature (519)..(519): n is a, c, g, or t
  misc_feature (548)..(548): n is a, c, g, or t
  misc_feature (552)..(552): n is a, c, g, or t
  misc_feature (554)..(554): n is a, c, g, or t
  misc_feature (563)..(563): n is a, c, g, or t
  misc_feature (576)..(576): n is a, c, g, or t
  misc_feature (590)..(590): n is a, c, g, or t
  misc_feature (593)..(593): n is a, c, g, or t
  misc_feature (612)..(612): n is a, c, g, or t
  misc_feature (617)..(617): n is a, c, g, or t
  misc_feature (623)..(623): n is a, c, g, or t
  misc_feature (628)..(628): n is a, c, g, or t
  misc_feature (724)..(724): n is a, c, g, or t
agtccanctatgagttatacacatttagcatagatattcagagacggaagacttagagcaatattaactaagtacaaatagcaggcagcccgagatgtgctctgatatggtntattctaattcatncangcctgntcaatagtctccttagtaaactttcagtntgatttccacaaatatatagcngcccaaacacaaatccaggagcacaatggcaaagtttgcgcaactgttttgggctaatnatgacntttaaagaaaaccttatatcgaccagtatctacgctctcatgttagccactttgcaacatgaagtgaatttntaaatgtatttgacactcaaatcaatgtacaactcaatgaaaannaagaagaaaagggggctttaaaatatttgatggcactacacgttgtatagtaagaggcagngaaaaatgaaagnntnttaaannatctcacacgtttctccngggccaggnacgtnntgnatccatgtnaacttaattncattccanattncatttgtcgacgtcacacaacacacagcnaccntncggttccancagtttccctttncttgacacaagtcnganaagacacacactccaaaanggagnttgagnctagnctcacttcagtcatccacatagtgtctacagggcagcttctctcccaaagcaattctctgttcactaatccgcgaggcactgatggaactgtaatnaaaaccccaaatataa

SEQ ID NO: 709671 - DNA, 466 bp, Homo sapiens
cgggaacctctccgacccggcgccgccgcatgctagcctccagccttctgccgctcgccctctgcctgtggatgcacccggctccgagctcgtcagggatcccgctgcacaagttcacgtccatccgccggaccatgtcggaggtggggggctctgatggagtggacctgatggccaaaggccccgtctcaaagtactcccaggcggtgcctagccgtgagctgaggggcccattcccgaggtgctcaatgaactacatggaggcccagtactacggggagattggcatcggggactgcccccccatgtgcttcacaggttcgtctttcgacaactgggctccttccaacctgtgggtcccctccatccaattgcgaaacttgttggacatcgcgtgcttgtgatccacccaggaagtacaagcatgcgacgaagtccagcacctacgtgaagaatggtacctcgt

SEQ ID NO: 709672 - DNA, 118 bp, Homo sapiens
acaaactttcagttcagttctaaatttatgttagttaaaaaagtgactcaatctatccggaaaatctggtcaaggatggaggagaataagtacgaagtatatgaggaaactaaatgag

SEQ ID NO: 709673 - DNA, 113 bp, Homo sapiens
  misc_feature (97)..(97): n is a, c, g, or t
ggggtcggggaagggggcgcagaggggggcgcagagggggcgagccttggaagcgagcagtgtaattggcgggccgagtcgaggcgagtctctttantcgggccgatcaattt

SEQ ID NO: 709674 - DNA, 485 bp, Homo sapiens
  misc_feature (14)..(14): n is a, c, g, or t
  misc_feature (230)..(230): n is a, c, g, or t
  misc_feature (246)..(246): n is a, c, g, or t
  misc_feature (262)..(262): n is a, c, g, or t
  misc_feature (422)..(422): n is a, c, g, or t
  misc_feature (424)..(425): n is a, c, g, or t
  misc_feature (455)..(455): n is a, c, g, or t
ctcaatgcccaccntttaaacacaaacacacacacacacacagactttaaaatctgaaaaccaaaaatcattatattctgcctgctaatttcttcagctggagaataccaacacaatatcaactttctcaagaaatgaaaaatgttaccaaaaagtaacatacattatcatttaaacgacgcataaaatccaacttgcctttaagattcattcattttttaattgctatngttaatggtaaaaaanttaaccataataaatngtttagggtaaaataaactgttccaggttaaagcacagtaagcttataaactataaccttttatttgagtaccaaagcagagtacaagactatttgagtactggaggaataatacaaaaaaaactaaccatcactacaacctttaatgaaaacattgtgnanngatgcaaaacttctagaaattcattagttngccatatatgtgtatatgtatgatgcctcc

SEQ ID NO: 709675 - DNA, 601 bp, Homo sapiens
agaactcttattactctggggctatgatcccgagagccaaaaagaaaaaatcaaaataacaacaacaagaaaaaaacaaaaaacggcagggttaggagatacttgtaaaatgggaaagaagtgaaccttcatgtttcagcttcttaaaaacaaaaacaaacaaaaaaaactgttctatttggttctgtaaaatattagagcaactggttttgcagaaatgacaggaggacgcatctcaggcgctccagcttagaacccttttacaaatctacgctctggagctccctccaagagtcctctggggttttgttctgcttgttttccttctcacatacattggagcacaggaaaggaatgcaaactcgtattttcttacccggtgggactctgaaatggccgcaggtttctcctagggaatgctgtgtgccttctgcatccctcttccagatcgctttagaagtgacgtgctgtgtccctcctaccctgcgtctcattggtacagaacaactgccactcatttttctcccgcccttgagaagagccaaactttgagttttatgtctgtttgtcattgataaatttcaataaatcttttttatac

SEQ ID NO: 709676 - DNA, 313 bp, Homo sapiens
aagcttttaccgcggccgacgcgggcggtggtgctgcatgcagtgtgagatccggtggattgctgctagcttgctgtcaagtgccaggggtttgtctaggtcttggtcagtctgctgcctggatctgcgaccaggacgatcgatcgagtcgatcgatcagtcgcctagttgtgaggtcgtcctcgtggctcatgatcgtcctgatctcggatctaggtcctgtctggactgtctgtcggactatgtccgactgtttgatcggatcgatcgccatgtcgtcggtggacctgacagcctgatccggtgccggcga

SEQ ID NO: 709677 - DNA, 933 bp, Homo sapiens
gcgcttccagggaatttcgctggggccggtgccctaacgccggccttgcctgggtggccgtgtccccccacgggctcccagaggtggtcagtgtagaccgaaaagcggtgcatttttgccggcccctcttatatccgctcctggctggttaggacccgcgcatttcatgaccttggtgggatccccccggcccttcccacccacgccccccatgggctctcgcccctgcaacatatctgcggaacattattgttcaaaaaggtaaccccggggacccaaacgcccacaaatgtccgcgtgtctcccaataaacccgcagcccgcccctatgtgtaaagatgaacctacttctcgagccatttttgggggcttaattctgggcccaacggagcccccctataacacaacttggggaggcataacgtcctcccaacaccgcgccgcttgccgttgagagcgaaccttggggaaccatttttgcggccccaagcggtagaacttgtgtgcacgccagacaagtagaagatactctctccccctcgtgcaaatatctccaagagggcaatacactcgcttgccaccaccccaagagcagcggtcaatctttatggtcaggttttgccaagaggccaaaacaaccacgcggggcttaatcggtaaacaaagagagatgatagggagacccttgcgctcgtggggcgccaccttcataagttagacaggccctcgatgcccccttcttccgtcaacaggtcttggctaaaacgattggctggcctataatgtagcactccccgacgcagtttgtcagaaagtgagatattccacttgtttgaaatatgaaaccaccccggagcagcactataacgcgcccgcacaagcccctcacccaaagaaaaacatttataaatcgcaaacccaccccacaaaaca

SEQ ID NO: 709678 - DNA, 317 bp, Homo sapiens
tccccggctgactaccggggaaggggagggcctgacttggcacccccgacctcaccagctctgtataggcctcacaggggctgggagtgggctgcctctacggttggtgagcttggcaacatgattacagggtcgagagagtggataggcaaatgccataaagcacatttccagttcctgtgaaactcctctctccgcaaaaagtggaggacaatttgaggattgaaataagagcatgatatttcacaatgaaaataaaaccaggccacgcaagaaccactgcggcctgcccgtgacttggcttaccccgtcgtcag

SEQ ID NO: 709679 - DNA, 330 bp, Homo sapiens
gggcccaacacaaagctgtcagtaataaactaaaacatttttaaaaggtcgcccaacgaataatgggtggggcatttcaaggaaatgcaactgacccaaattttggttaaatgattttatttgaagggggattaaaaaaataataaaggggttttcataatcaaaggtggaaacattttttttttatagtttaagaatttaacacccatttgtggcccttgttttcaaaatccagttttttttgttttttttaaaaacctttgagatctagaataaaactgctccattctaaatgtttagttttagataagaatggaacacttgtggata

SEQ ID NO: 709680 - DNA, 205 bp, Homo sapiens
  misc_feature (93)..(93): n is a, c, g, or t
  misc_feature (147)..(147): n is a, c, g, or t
agcagacagccaagccccttccacatctacagggtcactgtcatcctcaccacagccagggtaatactcacctctgactgctaatgtggggtntggcgatactcccttagtcatacatcatttagcacatatatataaggctacgtngatgtgtcaggcacagtgcttggcacacagaatacagcgtgaattaaacaggcaaaat

SEQ ID NO: 709681 - DNA, 393 bp, Homo sapiens
gttaacgggccttcataatcattaattccaggggtgagaatatcatctgccggaacaagctccatcggtcacatacgcaagcgggggcaacttgggaggatagattgcctcaaggttgggctgcaataaataaagatgaaatcccaataagctgtaaaagagtttttacaacatttcctggtgtcgccatataccgggtcaaagaaatctggtgccaggtaaaagggtctcccggtgaagtttatagacttcacacacctccattaaccaatccagaagaatggctcgcatggtggggctgcagaagagggtgtggctcaagaaagtgctgatccgcttaagtatgtcttttcctggtataacatgatttaccagacttcctctctattggcc

SEQ ID NO: 709682 - DNA, 149 bp, Homo sapiens
tggcccgacttcagttcccgcaaatagtcaaaacgaagtcattactcaaaaggtggaagagagtgttctggcagatgaaactgaaagttcacccgctactcggagggtaagagggtctgtaccccttgtcccagtgtcgagagtgggtc

SEQ ID NO: 709683 - DNA, 462 bp, Homo sapiens
tgaggatcccgggaggccatatactttgctttctgcaagaagctatagagatacagaaggaaacatagggatggaagtaggattctacctatgaagagtatcaagcctttaagtcctataggggccctgtggccccttccttccattgaccagtttattcatccactgatgcttttcattcaacagactactactaagcatcttcgactatgctaagtcctgagcagacagtgaagaactagaaagacatggccctgccctcatgaagattacaagttaggcctattctccacacttgttctaactcaatctgctacatataccttgagtacccagtatgtgttaggtactaaaaggagctacaaagatgaaccagacacagtcttcaagaacttcagggatcagggaaggtttatcctgattgtaatccctccagaggttttgatcatttctctaatcact

SEQ ID NO: 709684 - DNA, 187 bp, Homo sapiens
tttttcccagtgtacagtaacccttgtaaaaggccgtaggtccctctggggaagaactggagaaagggtaacagcaaaacctttgagtgtcttatcaagatccttcctcagcggaacctggccaccccttcattcaaggggttctggatctgcagtagaagcccccgcgaatttagtagtagtaggc

SEQ ID NO: 709685 - DNA, 632 bp, Homo sapiens
ctaattaaaaaaaaaaaaaaaaaaaaaaaaaaaaaaaaaaaaaaaaaaaaaaaaaaaaaagagaaaaaaaaaaaaaaaaaaaaaaaaaaaaaaaaaaaaaaaaaaaaaaaaaaaaaaagaaaaaaaaaaaaaaaaaaaaaaaaaaaaaaacaaaaacaaaggaaaaaaaaaaaacaaaaaaaaaaaagaaaaaaacccggggggcaccaaactaaaacgccttgaagaacagccccatttaaaaagcgggcgaaatagcagaaaaggcccgaaccgaccgcccttaggaacagttgcaaagcctgaggggggaatggaaaaaagaaagcgtaaatataaagcaaaagggcgcgccaaatattggtggaatgagctaaatttttaaccaacagggggaagaagtaaaaaaacctgataaaccaaaggagttgaccaaaattgggcacacggatgttccagatggaaacaagagggcattattaaggaacaaggcctccaacgaaattgggggaaaaaaccgttataaggaacacaggccactagggggagaataaccttaaaaaaaaaaatggagcccaggtgccgaaagtactaaaaccgaaccttaaggagggccccctttggcggggccc

SEQ ID NO: 709686 - DNA, 127 bp, Homo sapiens
catcgaatgtagatctgcggggacaaggcctcaggctatcattacgggtccacgcgtgtgaaggctgcaggggcttctatcggcgaacgattcgactcaagcttgtgtatgacaagtgcgaccccga

SEQ ID NO: 709687 - DNA, 88 bp, Homo sapiens
cccgaaaataatcaattcttaagcattggagtgaagactgttatttgctttatatctgttagaaacagtgtcccagagctctttctca

SEQ ID NO: 709688 - DNA, 843 bp, Homo sapiens
gagatcgcaccattgcactccagcctgggcaacaagagcgaaactctgtctcaaaaagaaaaaagagcgtgggtggatcacattgaggctcagggttggagatcagccgtgaccaacagtggtgaaacccatatctctactaaaaattatagcaattagccaggcatggctagcgcacgcctgctaatcccatcttctggggcaggctgaggccaggcagaatcgctagaaactgggagtgtgagaggttacaggtagccagaagatcgcggccatctgcatttccaggcctgggcaaccaacaaggcgaaactctgtctcaaaaaaaggaaacacacacacggaaacacaacaaggcactgtgaccctatcttgacggcctctccgcgcgcactgggtcacacttcacaccggggcctactacacccacgttcccgcactcttaacaaacttcagtgccgaggggcccccccttagtgtgtgcgccccattctcctgggtaccgacacagcccacaaccgtggccccgctgcatactttccctccaattgcgtgaggatacaggggccacaagggaccaaaaggcccaatcaaccccgggcaacccctaccgtgtcggacacaccccccacggggcacaccaacacacacagagacccactaccgcactaacacgaaccccaagagcacacttcacaacaccaacgaaggagacacaaaggggacaaacacaccaataacctagaacaacacccagggagaacaacgcgacagacagaccacaggggacacgcggccaaagcacaaccggaccacggacaaaggctagaacaacagacgcgc

SEQ ID NO: 709689 - DNA, 285 bp, Homo sapiens
cattgagccccttgatgctaggatggagggcgatgaggcactaggatgatcgcgggcaggcatagttcagacggtatctattatccttagcgtcttgaaatgttagtcttacttagttttgttgtgagtgtgaggacaagggcgtacatggactaggacgcagattcggaaaatgattatcagggcgtgatctttaaaagtgataagctcttctatgacttggggaagtatgcgtcttgtagacctaccttgcgctgcatgtgccatgcatccaggggcttcatg

SEQ ID NO: 709690 - DNA, 234 bp, Homo sapiens
ccaagaagctagaggagagtgcagtcaaatcgtgactgcgctgtagtgggggactcgggtgggcgtgggtccacatggctctggtttcccgatgtcctcttgtggctacacggatgtcgtggtcggccctcagaatcatcagataagcgaagtcgtggcaaaggccgagcacccagaagcccaccactgagtcgtgtccaccaacatgtgcctcttgtctgaccatatggctcg

SEQ ID NO: 709691 - DNA, 469 bp, Homo sapiens
ctaattcttgtatttttagtagagacggagtttctccatgttggccagactggtctcaaactcctgacctcaggtgatctgaccgccttggcctccgaaagtgctgagattacagttgcgagccactgtgcgtggccagaactttataataagagacttgaagctgggtgtgacggtgcacacctctagtcccagctactcgggaggccaagacagaaggatcaccttgaggccaggagtttaaggccagcctgggcaacatagcaaaacctagtccctaaaattaaaaaaaaaaaaaaaaaaaaaaaagggaaaataagggaaactggaatttttggaaccaaaatgggggggggggtcccctttgggtttttttttaacccccctggtttaacccctcaaacgtggtgaaaagggcgcacacttggttgtgttatcccttatttttcctccaactacacagcgtata

SEQ ID NO: 709692 - DNA, 144 bp, Homo sapiens
agatagaatcgagctggtacccgatgagtaatcttggcgatgaggatccggcggcgagatttcctcatcggcaagattagtcatcggccaagatttactcatcggccaagcatcggcccagatttactcatcggccaagattta

SEQ ID NO: 709693 - DNA, 241 bp, Homo sapiens
cttaccgtttcgaaaagcgccggccggggcgaggacgagggcgagcacggcgcaaaggaacggcagccccctttccattttcccttttccgggtccgcaggcaaacgcgggagaacgaggacgtggggggaaatgcagcaaaaaggagaattttagcgatccgaagagccccaactccgcctagagctgttcaatcctcagcccgttttgaagaaaagaaagcagcgaggcaatgcctgga

SEQ ID NO: 709694 - DNA, 158 bp, Homo sapiens
aagtcgagtccttcccgggcttaatccatgccggtttggagctctctctaacgacagttcggccgcccaggttctctgggtcgattcggggacgccttgggttcctgccctgggcccggggaacagaacacacatctggctgttttgtaggaggtctt

SEQ ID NO: 709695 - DNA, 144 bp, Homo sapiens
gaaatggatggaacagggaaggaacaaagtttccccagaggaaacagaggaggaggaaccgggggacacaataccccatgactctagcggcacacgtactcaagcgaggcagcacgcacaattgacaggcacccatggactggt

SEQ ID NO: 709696 - DNA, 138 bp, Homo sapiens
tcgggaactgctggggaggtgggatggggtcagggagtggccagagccctgggcactctctccctacaccccttttcctgaactgaagtcacccaacacccaccccccgccaccttccagcatggaggagcaggactt

SEQ ID NO: 709697 - DNA, 342 bp, Homo sapiens
ctcaagggggattgaacagacagcgtacagaatggaagaaaacattcacacgctatgcatacagcaaaggcctactatccagaatctataagagacttagccaaatcaacaagcaaaaaataaccccattaaaaaatgggcaaagaacatgaacagacagttttcaaaagaacacatatgtggccaacaaacatattaacacatgcataccatcgctaatcattagagaatgcaaaacaaaacatcaatgagatactatctcacacgagttagaatgacttctgttaaaaataataaaaatatttccacattcaatattaaaatgttatatgagttgagata

SEQ ID NO: 709698 - DNA, 1426 bp, Homo sapiens
  misc_feature (263)..(263): n is a, c, g, or t
  misc_feature (267)..(267): n is a, c, g, or t
  misc_feature (289)..(289): n is a, c, g, or t
  misc_feature (298)..(298): n is a, c, g, or t
  misc_feature (431)..(431): n is a, c, g, or t
  misc_feature (549)..(549): n is a, c, g, or t
  misc_feature (625)..(625): n is a, c, g, or t
  misc_feature (773)..(773): n is a, c, g, or t
  misc_feature (877)..(877): n is a, c, g, or t
  misc_feature (881)..(881): n is a, c, g, or t
  misc_feature (922)..(922): n is a, c, g, or t
  misc_feature (976)..(976): n is a, c, g, or t
  misc_feature (1020)..(1020): n is a, c, g, or t
  misc_feature (1076)..(1076): n is a, c, g, or t
  misc_feature (1273)..(1273): n is a, c, g, or t
  misc_feature (1301)..(1301): n is a, c, g, or t
  misc_feature (1382)..(1382): n is a, c, g, or t
attataattatttgattagatacagatatcctaccgaacagaaacaacaatgcgcagtacactgagctaggaaggaggactccttactgtaatagattgacacgacgctacatagaaaaaatatagtaaacattagggacacgatattggcagtcccacgacgtagtttggccacagggagggcagtcgcatcatatatatacgatctagcagtaaagcagttaacgttaagtgttatgtagtgtcccgcgaggcgatccgcnttantctgcattctgattatgctccnctgtccatntagtccaagcgtgtgtagctagggtgagagcgttgacggtactattcgccagatatggcggagcatgagagtaactgatgtgtagtacagacgcgattgtgagtagaagaaccgactattagaattgataatncatacgctatcgtcatcgacgagtactatactatagcatacgcgtgatgatgagagcgatgatcgacgagcagatgatattcagcgcgatgtgttgcagtgtaagtgcgttatcgctngatagataccaaggtgagagagcacgcgccggatacaagctttgcgatgagtcgtaatccatgaagacgcgcgctnatgagtgtatattgcgccggccgcgagttattcacgagtgttatatgatacaaggtcactgtaattaattaaggtgagatataggccggctgctgctgattaagcgaggcactaagcggccatcgtatgattaatctacaacaggagnattcgagtgataaagtcaaatacgtgtactacggagcgatatacgtctgtagtataacaagagtttaatatttgcgctacatattatctgtagaaggtgtgcgntgtnccagtcgcacgcgaacagcaatccataaatcaccatgatantcatatatattcgcgagcagtgtggttaccagctaatattgatgcgctaggcgntggttcgcgtacatatgatatgacgagattgcgttgctcctcanccagatcgtccacccatcataatgatggtaagtcgcggatatcatccagagagtcntgttatatatgttatacacggctagagtgtcgattatcacaatttatcgcgccctcattcagagcagaagacgtaggctgatacctgcgtaaccacatctgacgactcaatagagcacgtccatagtatatacgcgcgagaagatagtgctatgacagcgcatattagcgagtataatcgaatttacactcattagnatatgtggatgtacggcatagtatgacnacacgtcgtgacggcgaatgtagcgtcatagagacgcgaaagcgtatagagaatgtgaatactgctcatcttggggcatantctctgaatgcatctgtacatacatgtgtatataatatgtgcag

SEQ ID NO: 709699 - DNA, 664 bp, Homo sapiens
tgacccccagtggctacgaatggggcctgccagaacacatgacaatggtgcaacaaccccaatggtgctaccttgccttcacactactgagatgtgtgtgcagattgcttgcttgtctgtgacctgtttctcttgtgccttccttcattgtgtcgccttgcccaaggtccgtcgttggaagctcacgaaggcatttccacttgtggcgttgtctcctgtgcaagttgaacaccctcaagagacaacttcggacagattacttcgcaaggccttagcaatgccttggggctggaaaaacccgccagcgagaagaacgcacatggtttccgtccaacgcaaagcccgacaggtggattggccacagcaatcttggtggccccctccatgtccacattccaaacaccggtttattccaccacgttcccagagaacgccggattttattcagttgggacaattcccaagtttcagcccgtttggtacgtcagatgacgcgcaaaagcggagtggatggtacggcgggaaaagatgtcggcgttactagagtaaacccacggtgtcccgctatttatgggcacacgggtgggaaaacgttcccagatggtatgggtaagaaactgggcggaaacgcgcctgatttgggtataaaatctgtgggcacccg

SEQ ID NO: 709700 - DNA, 915 bp, Homo sapiens
  misc_feature (454)..(454): n is a, c, g, or t
  misc_feature (457)..(457): n is a, c, g, or t
  misc_feature (582)..(582): n is a, c, g, or t
  misc_feature (629)..(629): n is a, c, g, or t
  misc_feature (650)..(650): n is a, c, g, or t
  misc_feature (661)..(661): n is a, c, g, or t
  misc_feature (693)..(693): n is a, c, g, or t
  misc_feature (734)..(734): n is a, c, g, or t
  misc_feature (742)..(742): n is a, c, g, or t
ggcgatcgctgcctgaggctgctcccggacaagggtccacgagcgtatcgtttggacttctcgacttgagtgtccgtcctccttgcgccgcacggctcgtgcgagtcctcagcgcagtctttccacagggagcccagcagtacttcctgaacatggacgagtgttagttctgccgctgcgccagttcgttagtcccagaagtcacccagctaggtccgtattcatgctagaaagcgacgtgcaaatctgctgatacgttcatatgccacaagaacgtgctctccgaaggatggataggacaagtttgggggtgccgaatgacaccaggtccccctctggagtcgtttgttcgcgaccgtggtcgaggctagggtaacacgttacacaagaactagcgagttcaagaagtagaagcgccgctcccgtggacctgatggtgaaggaaaaggagcanaangaggctgtgtcgtttatatcgtgtccagtaagggtcgcaacaccacgaatcatcgccctttgagatagaggagtcgcctcgatgacaatgcacagctgcccacgagtcgagtcgagacaagcagncgcgtataccggatccatggagaagcaacgcgcgcgtgtatgacgcnttgtgtcgcgaacgaagaggncacgagaggtnggaccaacgataggctcagaagggacgaatanattgtggcccacatttgttacacgtagggacaaagactganccaagaanttagcaggactcctaggggaaggatggcggcagaggacagagaggtaggttcatatacgtacgcgcagaagaaggtcgcgaagggtccctgttggagggcctattacacacgcgggaagcgaacttcggttgccacgtggagaaactcgacaatttgggccgggtcgacgggg

SEQ ID NO: 709701 - DNA, 831 bp, Homo sapiens
taaccatataccaatgatggcggcgatgtaacacgagaaagcacataccaaggccaccacacaccagctgtccaaaaaggccttcgatacgggataatcctatttattacctcagcaagttgtttttcttcgcaggatttttctgagccttttaccactccagcctagcccctaccccccaattaggagggcactggcgccccaggaccaggcatcatcccgctagatccccgtagaagtcccagtccttaaacacgatccgtattactcgcatcgaggagtatcaatcagctgagtctcggaccataggtctaatagaaaacaagccgaataagcaatagtaatgtcaagcacggcttattacgatgtttactgggtctctatttgtaccctcctacaagcctcagagtacttcgaggtctcccgtgtcaccagtttccgacggcatctaccgggtcaacattttggtagccacaggcttccgcggacttcacggtcattattggctcaagtttcctcactatcgtgcttcagtccggccaactaatatttcagtttagcatccaaagcgtcacgttttggctgtcgaagccgccggtctgatacgtggcattttgtagattgtggttggactattgctgtattgtctccatgctattgatgagggtcttagaacaaacaaataaaatggcgaaaaatgatcgagtgtgaaaagacaaagtgggaagagtgaaaaaagaaagagaggggggggaggataaaatcttcgggagaacaaaataatacacgaaagattttttaaaaagagagccataagggggataaaaaagg

SEQ ID NO: 709702 - DNA, 438 bp, Homo sapiens
aatgaaataaaaacttttaaaatgaataacaccacatattcaaaattcaatctaatataaaaagtatatagcgcaatatcttatgaatagcagctactcaatgaatgtttattctatttaattaaaaagtaaatgcaaaactttttaataagaagcatggccattatgactataacataaaaaacagagcatataacactaagagttatgcatgtaaaaagatacagagcttactgagaagttatttgaattaatcaaagcatattttcagttacacacagtgaaaaaaattatttggataaattcaaattttggtaattaatagtacctataaggcatattggaccagatgcaaaactaaacaaaaacaaaaacaacatgaagagaaacaaacttaagttatgtgttatcttctttttaaagtcttattttaggtag

SEQ ID NO: 709703 - DNA, 1191 bp, Homo sapiens
tcgccgccgtgtggtgggtgttagcggccttctttgggccgtgtggtttcctctgcgggtgcgtcccttctccccgccggttgtgggcgccgccccctcgtaggaggagctcccgcgggggtcgtcgtttgtcctgcctttccccgcggattttttagcgcctctgggcctccggcgcgggccggctgtatacgcaagtgtttcacacccccccgggggtccccccgctttgttggtccccctctttgggcccccattttttatagggggcccccccctgtttaggcaccacaccgttgtgcgcccgccacaaaaaggacacaggcgttgggtgaaaccccgggttccgcggagaaatttccccccgggagattttttgttgcgggagacccccaccggcgtttctccgcgcgaaaacgcgcgtgtgggagagtaattgagagccctcctctccccgctcggtctccccgcgcttgttgtttgttgtcccctcacaggagatagtaggcctctaatgaattatgaaaccccttctctcttcacccgcccgactctttgtaaaaaaatttatcaccgcgcccgccacacttttctaaggcacctcaaccacgactcttgtctggccacacacacatggtatatgccacataatagtgtataaaatatatataggggctcgagagagaaggccagagagaaatgagagtaaacactcttgggggagaacacccgctcggagaatattcctctcacaaagtcgcagaaataaggtcatacaccacgcgaaggctataaggggcccacagagtgtttcccctcttcttccctctttaattgtggcacctctcttgtgtttctcgggtacaaattaacctccccctcgggggtgcaccccccctctcgaggtggagaagtgacacctctcctcggagagaaagaagaaagagagtggggaaccggagatctgcactcgaccagactcttggaattgaggaagggagcttaagaacattggcgtatattccccgttttgttgttttgggatagggggcacacatattttaaacatgcccacataatatccaatacccgcttatattgctttggcacacacattttaaaagtttgatatttttttttttttataaatttgagagttggtttttaaaaaacccttttcccaccttttga

SEQ ID NO: 709704 - DNA, 313 bp, Homo sapiens
aaaaaaaaaaaatgatggggccccgaatgggcttaaggggaaaaatatttatgaaatatgggggttttttaaacccccaaaattataaaaaatgggatcccgggggggggtgtgtgtgtgggggtgggggggtgtgtgggggtttgaataaaaaaagcttatggtttgccagaccccttttagaataaacccccaactcctggagggggaggggggaatcccttttacggaccccctgttttacggtttgaattttttaaaatgggccccaattgtataatttttttttaataaaggggagaaaaatccctta

SEQ ID NO: 709705 - DNA, 262 bp, Homo sapiens
tgtctggaggatctctagagtcgacaggctccagtttagatatttggaggtcagcacggtgctcacgtgtcgacgtgaacttgtacaggaaggcatgcaccgcagatggtgaatacacgtcgaccaggctccatgtttgcgtgcttgggaggtgagcacggtgctccagtatctgaaggaacttgtcactagggaggctgatgcacgcagtggtgaatcacacgtcgcagctggaggacaatgcaatgcaatgatcagggtc

SEQ ID NO: 709706 - DNA, 356 bp, Homo sapiens
gccgtcctgccatcgttcaaattgaagggcgaaaatacttagatttttaccccccaattacaaaatctaagtatttaggcccttcaatttgtaggagggcaagcgtggaagtaagaagttctattttaagtactttcagtgctcaaaatatgcagtcacgtgtgttgtatataatagtgcataggtggatcagtcataataattgagtctaaggcttttattaagaaaacagcagaaagattaaatcttgaattaagtctggggggaaatggccactgcagatggagttttagagtagtattgaaattctacctagaatgcaaaattgggtatatgaattacatagcatgttgtcg

SEQ ID NO: 709707 - DNA, 743 bp, Homo sapiens
tgagttgcgcagaggttactccaaggcgaccccgtcttgtacattccggccggcgtcctgtgctccacgactgagcaataacggtagcccccgatgctcgctatcgattactgacccatagatctgctgccgctcagctagaaccgtgatagcctatctcgctcacgtcttctcgaatgctgtatccatgcaagtagcaggcagttgtaggtggattaagacctgaacccggcgtacgcggtaatcgttagcgactacagcgctgcggagtaccccacaataggatgaatgaatagcagttctaccgtacaacccgtaacgataacgcattcgtaatgtaactgagggataggatcgcgaactactaccgcattcctactactcaacttaaaactccgagcagccagcgaccctacgtactatctcgcacctgaaacataggtaacatgactaagcacccattaattccagtccgcaccctcgctctgccctaggaggcctgcgccccgctaaccggctttttgcccaaatgggccattatcgaagaattcgacaaaaaacgatagcgctcatcagtccccaccatcagtagccacgcatcaccctcgttaacctctacttctaccatacgcctaatcctactccaccgtcaatcacactactccccatatctaacaacgtaaaaataaaatgacagtttggaacatacaaaacccaccccatttcctcgcccacactcatgg

SEQ ID NO: 709708 - DNA, 399 bp, Homo sapiens
cttgtgtggtgttatgaacgtaggtgagagaagactgatgggtctgaaattgtacaagaaacgattgataaaattcgtcacatcagagaaaatctaatcattgcacaaagtagacaaaagagttatgttgataatcgcagaagaactttagagtttaatattggagatcatgtattcttaaaggtgtctccaatgaaaggtgtgatgcgatttagaaaacgaggaaaactgagtcctaggtttgtgggaccattcgaaatgttaaagaaagttggcaacgtagcttacgagattgcgctacctccataattatcagaagtacataatgtctttcacgtgtcgatgttaaggaaatatgttcctactcatgatcatataattccataacaccacacaatt

SEQ ID NO: 709709 - DNA, 400 bp, Homo sapiens
agcccccctgctgctgcccggagggttcactgaggggtggcacgggaccactccaggtggaacaaacagaaatgactgtggtgtggagggagtgagccagcagcttaagtccagctcatttcagtttctatcaaccttcaagtatccaattcagggtccctggagatcatcctaacaatgtggggctgttaggatttacctttgaactttcatagcactgcataaaccttttaaaaaaaaggattttaaaaagaaaatgctttatgaatatctgctttcctacagtagggtatgttaggggaaggaggattagcttttggcttctaaatgactgaattgctttaaatgtatgtatagtagcattttaaaccaaagaacccacagttatgagggcttaatg

SEQ ID NO: 709710 - DNA, 876 bp, Homo sapiens
ggagtatgtcaatctggtggaagatgtggacacgaagttgaacttagccactaagttcaagtgccatgatgtcgtcattgatacctaccgggacctgaaggatcgtcaacagcttgctagcatacaggcagctaacggtacgataaatggatcacgcacgaggacggcagaagcattgatgctcgttctcagccagctcgcacaattcgatggccagaatctacagtggcattgactaccttgaagcctgcctcatttcctcctctcctgcctgtgcaaagcagagcgagctcttctctcgggagagctgcggcatcacatcgctcgggcccattacccatggcgcacgctgcccgcctactcttgacaccagataacttcagactgactctatctgtacacggcaacatcatctgcaggctcgacgatctaaacgctccgagtcatgagactgacttctctccacctggtgctcatctgacggcgggagtgatacctacatagggcccctactggcgtaagatctcacttggctgccacaccgtgaccggcccagacacggacagaggcatgccgcagcccaaacggaagcccaacgacccccaccacagcccacccaccacccccgccctggcccccgccaaccgcaacacagcaccgacacgaacgcacaccgaaccaacaggcccacggcacgcatgccagcgtaccaagacaatatggaaaagacaaaacaccgcaagcaccgaaaccccacatactgccaccacaacacaaaccagtagccacagcaaaacccccgactcacacaacacgccaacacacaacgacactcccgacaacaaagaccgaccacacaacacaccccaaccccac

SEQ ID NO: 709711 - DNA, 737 bp, Homo sapiens
  misc_feature (671)..(671): n is a, c, g, or t
cgtaaaatacactgtgcggagccactctggagcacaaatgggggaaaggaccggcaccgttaaaaggtcccaagtgtcgaaaatggccccgaatttcctggggaatactgctgggaaagaggcagaacaacattgtgggcacaacgcgaacagagaaccccaccgcttttcagttggccccccccagtggcgcccactcacaccactcgcgacaaggtccacagacgaggttcccccccaaacgtgcaccaatcacgcccgacaattcttgtctgcgtccagcaccgttacaaacccgggggaagcgttctccccggatagaatcaagaaaaaaagccgttcggggcccccacccaatgttggggaggagagagagacgggtcctcgggcactcgcggagtaccggaggcggttacacggccgcgaacaccacagagggcaagagccgccccgtggattcgcccccccactccctcagggaagaaggaaaggtagcttttactcttcacggagccacccgggttatgcatgcgtctcttacaggtcgattcccgacgacttccgctaacacgccctcttggagcggagcgatggaacaaaaagagaggctttatttcggttactcaaatttagcaaggcggagccacatcattcttattgtttttgctttnttgagccactccacgagttatgaacgcaaccaaagttgggaacacttcctcggtacaacaatagca

SEQ ID NO: 709712 - DNA, 278 bp, Homo sapiens
gcctttgattctgaccttttctttggtgcagcgtagttcctgttgtttttccactcccaccccaactggaaaaactccattctttggcttacaccatcatcacctgaggtgggggggcgggggtgaacatcttctgggagctggggagactgcccccttgcataaggcatttgagagccacactttaactcagcctaccttacttctcagatcattttatagtctagaatcaacaagtcagtaaaaattgccaaaaaagcatcctatttctactttta

SEQ ID NO: 709713 - DNA, 756 bp, Homo sapiens
aaggctgagtgtgtaaatcaggacgaggcaccaatggcggggttaacttgaagctggtgtgtgtatccttacagcgtcaagggttccacactgttgggagtcgctgcaagaatcggacaggcgctgagcacctgtggctgacccgacatctcagggacccatattgtgaaggctgcgaaggtggagagttacctggtgtctgaagctgccttcaatgctcctggaggtgaactgagaggcaccagatatactgcggacctggcctacgggatgtatagactgtggggcagctcctggggccttggagtcaggtggcggatgcagaaggtcaacgcctgcagggcacaagatccccagcatctcctgttggacttcgatgctatggggtagatcttcttacacatattcccccatggaaggagcaactttactgtgcccatgctgacgtgactgacccgagaacctcacagagaatcctcgaggtgcttccatggcaggagagcagatgtgatactagagctgacatgtggacccaatgccacagggtaccgggaacctcgatcatgacaggctacatcagaactgtgcacagaacctacatcagcgtgaccccagacatcctggaaccaggggggacatccagggacaaacatgggctggaagtcaaagccagcggtacagaggagactggcagcaggaatccagactggcaggacaacaactgaagcagaggaagaagaacagaaggatcaggca

SEQ ID NO: 709714 - DNA, 1300 bp, Homo sapiens
  misc_feature (175)..(175): n is a, c, g, or t
  misc_feature (1300)..(1300): n is a, c, g, or t
ggcgagatcgttggtcatctgactgtctcctatatgatggccgcttgggcgcaggagcgcgtaattgcgagccgtgcgtccgcatatggcggagacagcgcgccgcagtagatcggtgagacgttgctccgggtcaccacgcactgcctgatcattggtcgcactgacgaatctnagcgaatcgcgtgagaagtaactgccgcacacgtatcccacggtgttgtaggtacaggaggacttgggatgtccaggactcgcttgtgaataggaccaccatgatacgaaggcttaacacttgatggaaattgactccacacgacgtgcaggcttctgagtcgcaggcgagggaacgacgtgccccgacatggcactcaagctccgtgggagaccaaccattgcacttggctacaaatgcactgagatcggttggcctcgtgactggagccaaccgtgtccattgcgcatcaattcaagacacctgggtgtgaggaagcatggcgcccgtttaggcatttagttcacgcaatcgtgatcattttgtcccacattgaccccagcggtatgggatgattggcgatgactcgcatagcgttcgttagcatagtattcgactacttacttggggaattcgatcctttgagtcagaggtcattttggagcccccttttggcctttggcaaagggttaccccaaaaggttggtgcacagttaccttgaactggcctttacttatagagttggatccgtctgccccgttgccctttcttgtcaacaacaacttccaccacttccattccctagcgccccgtgttggtggtgcttggggtccccggggaaagggagccggaagcccttgcaaacatggacacaatggaggaaccttggcatacgaatcaccggaattaacgcaacctagggctctcgcgcccctttgtggttggttaacctaggggtgttgatcacccgcacgcggcaatttttagcgaaaaccttctaattgccgcggtacttgagttttccagggtcaagaaacccagggggaagggcggagaaggcagaagaagatcagcccgaggtcgccaacacaggaaggacgcataccaagaagcttattttcaaggatttccgggcaccacctcctttgttgcacgggggcaagccagcgaagcccctgtgtggggcacgagtggtagtaggggctttaaggcaatttaggttaaatttttaaagcagaaagttaaccaggattcaccgggtgtgttaccccaagggctattcacccggagttcatttatccccn

SEQ ID NO: 709715 - DNA, 622 bp, Homo sapiens
gggctgctgctgctgtcgggggcgctgagaggacacgagctctatgcctttcctgtggctgctcatccctgctcggcctccttgtgcgcgctgcattgcctcagcaccattgtgccggccagtgtcccgacgtgctccgctgccagatcccgcccactacagggagcgagtcaagggcatgttctaccagcgcctacgacagctacctggaggaatgcctttcccttcgatgagctgcgacctctcacctgtgactgggcacgacacctggggcaagtttttctctgactctaattgatgcactggacaccttgctgatttttggggaatgtctcagaattccaaagagtggttgaacgtgctccagggacagcgtggactttgactattcgattgtcaacgcctctgtgtttgaagacaaacattccgagtggtaggaggactcctgtctgctcatctgcgtctccaaagaacggcttggtggttgggaagtagaaggctggattggcccctgtttccagggcctcttccttgagaattggcttgctctgagcgcgggccctgaaaagctcctcccagacattttcagacccccacgactggcatgccatatggacacggg

SEQ ID NO: 709716 - DNA, 540 bp, Homo sapiens
ctgggacacggaatggccgcgggcctcctccccctcggcctccagcatctccacagacgtccagtcaacctcatcgcgtgtcccccccagagctagagagatggggccacctggatggccacgagggcgaagaggctgagcgtcactacgcaagcggagcagacccatgacagggacgcggagggtggcgctcaggagcgaggcgcaggaaggcgcctacaccacaggacataccagatgaccagcaagcctataacatcactagcgagcgaaaccaaacacatcaccctggatggacctccacagaagacaggggggacacgcacagctaatgcaacattacagtcagaccaaccccccagacgacggaggcacaagcgtgcaacgagacgcgcaatcacaggaatagagaccccagaacggacacaaggacggcaacacacaagacggtacacgcatacgaaacgaggaaagcgcccacaagggatacggcaacaacccatgagcggccccccgcagccagagacacgagcacacaac

SEQ ID NO: 709717 - DNA, 227 bp, Homo sapiens
ctgccttcacaaggtcaagtaagatgcatgactgtaaatagactaatagaatacacaaacatgcatgtcactagcgagacctatcatagaggtgctctggtgaaaggtgagggctaacgctatacattgtaaggggggccaagtgaaaattggaagaacaaagtatgacaagtagcacgtagatatagcaatcttccaaggagtttcactgctaaggtccaggcatg

SEQ ID NO: 709718 - DNA, 84 bp, Homo sapiens
ccagggcaaattgtatgtgctccttactgggtttattataagtgtcacatgttttttataataaaacataggtgatttccaaaa

SEQ ID NO: 709719 - DNA, 360 bp, Homo sapiens
agcggtcaacattcatttgaaaagacttggttttgccttcttccagagaattgataagaactttgttcttcacaaaacctgttagatatttcgccagttgcatcatcatagaggattttccattgtaagattttccgtagatgatccaaacgccgcgggcttctggtttgccaaacgatgcctcccattttccctgaaagtcaaaatctttaaactttgtgctttcaatctcatccacagaaaagaagtcgtttgccattgatttaggttttgtttttgagttgatatattgcgtttttgttgacgttgtattctcgtgctatcgcggcgccctgttggccttgtgcctaattttctaat

SEQ ID NO: 709720 - DNA, 840 bp, Homo sapiens
  misc_feature (98)..(98): n is a, c, g, or t
  misc_feature (143)..(143): n is a, c, g, or t
  misc_feature (803)..(803): n is a, c, g, or t
agcgggagagccgcagcggcagcggcgcgtctgcctgcagagagccaggccggagaagccgagcggcgcagaggacgccagggcgcgcgccgcagcanccaccctccggaccgcggcagctgctgacccgccatcgccatggnccgcggggaaagccacagaggagggcagctgtgaagaaattcatctgggaactctcgagaagaacgagtttctgggcacgagccgcggtgggccgttgggtttaaagatcctccctatatctacgtaaatatattataggcgtgcgtgggtgggatcttcatcggaaacactccaaagtgagtgctgctcaccatcacgtgaatttaaagcccacatatcttggagcccgagatgggccccgccaggatttacacagatttctcagatccagaaagactggtaatttcctttcgtgcctaaatgagtccccagagcgtatgagggcgtatgtgctgagacatagttaggtgcccgggaaaagtcacagatttcacccagagggatgacactgagtatttgacagattgtgggcgatgtgcgccacgtgtgaccgcagaagaaacgaggagactttaatctactgtaacgaggagagcgcaaaggtctgcgcgattccagcttgaatgggtgggaacatttgctctgggatttaaactgagtgagaactttatgggtacacaagaggggcaaaccgtggcgattattataaagctcaaaccgaggttctagaggcgttcaaacctaaggcttcccaagaaatgaggtccttggagacttanccccgtgatgacagtataaccccaaatgtgctttccg

SEQ ID NO: 709721 - DNA, 188 bp, Homo sapiens
tgcacagcctgacattgagctgagtatcttgaacatcctcattcaatgggtgtatggcagtaagtgttccgattattatgaattctgtggtgtggatgaaaagcaaccatgcgttcactggtcaatagccgttctcgtatgtgtaattcaagacgtttatttttaatatcctcaccttatctgcgcat

SEQ ID NO: 709722 - DNA, 415 bp, Homo sapiens
  misc_feature (34)..(34): n is a, c, g, or t
ccagtgtagctctcagctcactgtaacctccacntttcgtgggttcaagcgatctcatgcctcagcctcccaagcagctgggattacaggcgcctgcaccaagcctcgttaatttttgtatttttagtagagatggggtttctccatgttggtcaggctggtcttgaactcctgacctcagttgatctgcctgcctcccaaagtgctgggattacaggcctgagcccaccatgttcaagcccatccagagaatttaaatgttcttctgagggcagagtaactgcatatttggggactatccctaatgaatgaccattggttttggtttccttaaattgggaaaagaaggcatgagccaaaatctagtacagaatacttgatcttctcttgagcttgaaggcaccaagttttaggt

SEQ ID NO: 709723 - DNA, 220 bp, Homo sapiens
tttttaaaacccccccccttttcccctccttccccccccagccattaaagggccaaaccattttggggggagcttggggtttaggggccccccccccccccaaaaaccctgggttttttgccccccttttcccaaaacccccccttagggggcggaacccctttttaggggggggaaagaaaaaaatgggtttttaattttttcccccctttggccccca

SEQ ID NO: 709724 - DNA, 208 bp, Homo sapiens
aattcaagcttctaacgatgtacggggacatgcacctgtcatcccagctactcgggaggctgaggcaggagaatcgcttgaacccgggaggcagaggttgcagtgagccgagatcgcgccactgcactccaacctgggtgacagactctgtctccaaaacaaaacaaacaaacaaaaagattttattaaagatattttgttaactcaa

SEQ ID NO: 709725 - DNA, 1132 bp, Homo sapiens
  misc_feature (533)..(533): n is a, c, g, or t
  misc_feature (1132)..(1132): n is a, c, g, or t
ccacgcgtcgggtgacttagggaatgattttatttgagttaaccttctttctgtttgccccgagaatactcgccagtggcgcttgcagttgtagcatttaccccaagataactttgcctacgaaatatttcgcttttattattttcacatcattctagtatatggactttggaaacaaaagacattgttctatttatagcattcttttcgtttctttctgtagtagcggtatttccatttacaaaatatagtaactctgggattactgaaaagtgtcaaatcctagaaaacgtagcatgcctatacatgatgttaacatcattctcgaacagttgtgggccgaagattcatttgatgaatccaattttttggaaatagacaattctgatgttctctttagaaataactcagtttttatcttttttcacattgaacaactcagtctagattggcttaagcctcaaagcagaacgtgtccatgtaaattaccgctggcacattttcttttttctaaaccaggcacaacgggtcancattgacggttcgataacagtggctgtccactggtcttctctgaaacgtgacgctggcttgaagggctgacatacatattctcctctaagtatattccaaacaagtgcatggcttcccgcgatggcacgttaagacctcaacatgtctgggaactgggtaacgcctcaccacaggtttctccatgaattgggctgcaaagggcacatagccgaatcatccaccgcgacacccgccagcacgaggaaccccaacacagggacacccgtgcggaccgacttcgggacaacttcacgcgtccgacgtcgacctcggcatgtccaaccccgccaaacgggccctcatgccgcactcagaatagcccctgccggcccactcgtgaccacgaacctctgggcaatccgtcaccaacgcgagcgcgcaacacctactactcgtcccgacagacacacacgtgctcacacctcggctccacacaccacaccgccgctctctcgcccacaactctctagaatacgacgcacacccctgcgcagcgccccggcacccgaccacccgccacaccaccaccacgcagttatcgaagtagtgttgtaactan

SEQ ID NO: 709726 - DNA, 197 bp, Homo sapiens
aatatgagagaaggaccatttcagcactaaaggcacacgcccagttcaactagcttagcatatttgaggaggggacaagtataacaactgtcacttaatgagcatagatagggatcaacttggacaggaaggctcgatgagaatataaaaagtttttgaggtgatggcaagaatttacgccccctgtctttcatatt

SEQ ID NO: 709727 - DNA, 1208 bp, Homo sapiens
  misc_feature (580)..(580): n is a, c, g, or t
  misc_feature (867)..(867): n is a, c, g, or t
gcgcggtgtgcacgaagccattagcaggagagtctctcgcagaggggccgtgtacgaggcggtgcgggacacgtcctgtcaccgggaacccagcggcaagtcgccgcacaggttccctggatgcacggtggcaggcttgcgaggagtcacggcttgcacatcaacgtagtgactccgcgcaggagaggagcaaggcgcgttcgtcggggcaccgcgtgcaggcgttacatggtccagcgtcgcaccggcgccttatagttcgtgctgatgctgatgtccttgcggggacccatggcagctaccttgtgaccgacgggggtaacggccagtggagtatctcccacagcatgggacattcgtaggtccgctgaagatagactcaatcaaggacataatatgaactctcggttcagacgcaacgctgagtcacagcaacgtattgtactgcgtctcttgtgggcctccagatggtctacttggatcaagggcattgattcccagcgggaatccatcggatccatgcgtgttaagagtaaggcatggacaccatgttctccttcaccgtgcttcaacacacaantgcaaagatcatggtagtgcccaaaggtgggactgacggctgacagtgccacgaattgcaatgttcgcataatgaaagagaggtggtaatagtcgtggcattgtaagcgtgttcgagtcaacgttgacagactgacatgaacgagtgaggcgttggtgtaataagcattgcacactggcttggtcaaactctctttgcgtggtcatttgcctcgaatgaacaaacctggcagagatcgtccggggaccttatagtatcacaggagcaccagtgggcgaaagccgcantgccatattttaaagggcacactttgacttcaggtcctatttaccacgtaggcgaaagctccctgatccatcacctgagcttcgacattaagaccacctggccgtttaccaggcgttagagacacggctttattcacacggggaccgacagtacaaagcaacggacattgttggtaaacaccggaaccaaggtgagggaaatagaatagggggcaacaatagcccgcagagatatctcttcggaagacaccgggagacatagacaaaaacaggggctacccaccactacaaaacaccgtagcaacatatactggcactacacgacaaacctctacaaacag

SEQ ID NO: 709728 - DNA, 114 bp, Homo sapiens
tactcggggcaattctggactggatggctgagcattggtccttcgtttttggttcgtttgtgtgagacagtcttgctctgccgccaggctgagtgcagagcgagactccgtctc

SEQ ID NO: 709729 - DNA, 306 bp, Homo sapiens
gaactaatcttgatgcagtctgaaaatcaagatcaagcaagagatgaaaactatacctttgaacatgcattaggtaaccaggaggcaacagagtagggactaataaggccagcaactcaggcaaattagcctattcatctgatatatatggcctccataaaactgccatggattccaactgtactcaaatatgatacaacttcttcaatgctgctttataaatctgacagaaaaccttatataaggagtcaagatgctgaacaccctaacaaaagcaaaaacacaattacggcctatgtggtgagt

SEQ ID NO: 709730 - DNA, 115 bp, Homo sapiens
tcctcggggtacgtgtattcaccagtgcggtgcttgcctccctgtacaagttccgtcgacacagtgagcacctgtgtgacctccaaatatcgtaaagctggagctggtcgagtct

SEQ ID NO: 709731 - DNA, 521 bp, Homo sapiens
  misc_feature (25)..(25): n is a, c, g, or t
  misc_feature (81)..(81): n is a, c, g, or t
  misc_feature (102)..(102): n is a, c, g, or t
  misc_feature (240)..(240): n is a, c, g, or t
  misc_feature (479)..(479): n is a, c, g, or t
  misc_feature (511)..(511): n is a, c, g, or t
tcagggggaatcatgctgcacagtnagcaggacaaccctgacggcccagacccgaatgcaactccaaaggaaatcctcagnctagggtaatacagcccaagntgctgccctcctacaatcatgggaggtttcaacccttctgggagaaaagcccctaatgcagcacatgatggtatagatttgatcccaggaaggcagagtaaacaaactatttaaagacatgagtcttggctgggcacnggtcgtcacgcctgtaatcccagcactttgggcggccgagacgggcggatcacgagatcaggagatcgagaccatcctggctaacacggtgaaaccccatctctactaaaaataaaaaaaaaatttaaaaaaattagcagggcgtggtggcgggtgcctgtagtcccagctacttgggaggctgaggcaggagaatggcatgaacccggaaggcagagattgcagtgagccgagatagnccactgcactccagcctgggcgacagagcganactctgtctc

SEQ ID NO: 709732 - DNA, 1007 bp, Homo sapiens
  misc_feature (46)..(46): n is a, c, g, or t
  misc_feature (205)..(205): n is a, c, g, or t
  misc_feature (275)..(276): n is a, c, g, or t
  misc_feature (278)..(279): n is a, c, g, or t
  misc_feature (281)..(282): n is a, c, g, or t
  misc_feature (285)..(288): n is a, c, g, or t
  misc_feature (366)..(366): n is a, c, g, or t
  misc_feature (383)..(383): n is a, c, g, or t
  misc_feature (421)..(421): n is a, c, g, or t
  misc_feature (436)..(436): n is a, c, g, or t
  misc_feature (550)..(550): n is a, c, g, or t
  misc_feature (714)..(714): n is a, c, g, or t
  misc_feature (720)..(720): n is a, c, g, or t
  misc_feature (728)..(728): n is a, c, g, or t
  misc_feature (730)..(730): n is a, c, g, or t
  misc_feature (765)..(765): n is a, c, g, or t
  misc_feature (768)..(769): n is a, c, g, or t
  misc_feature (777)..(778): n is a, c, g, or t
  misc_feature (780)..(780): n is a, c, g, or t
  misc_feature (798)..(798): n is a, c, g, or t
  misc_feature (803)..(803): n is a, c, g, or t
  misc_feature (808)..(808): n is a, c, g, or t
  misc_feature (812)..(812): n is a, c, g, or t
  misc_feature (819)..(819): n is a, c, g, or t
  misc_feature (826)..(826): n is a, c, g, or t
ccagtgtgtgcgactcagcaagtttaactctgaacgcagcatcagntttatcccgccagatggagagtttgagcttatgaggtatcgcacaaccaagaacatcatccttcccttccgggtgatcccgctagtgcgagaagtgggacgcaccaaactggaggtcaaggtggtcatcaagtccaactttaaaccctcactgctggcnaagaagatcgaggtgaggatcccaaccccactgaacacaagcggggtgcaggtgatctgcatgaaggggnngnntnnttnnnnggccagcgagaatgccatcgtgtggaagatcaagcgcatggcaggcatgaaggaatcgcagatcagcgcagagattgngtttttttttttttttnacaagaagaaatgggctcgaccccccatttccatgaantttgaggtgccattngcgccctctggcctcaaggtgcgctacttgaaggtgtttgaaccgaagctgaactacagcgaccatgatgtcatcaaatgggtgcgctacattggccgcagtggcatttatganaactcgctgctagctgccactaggcagctagcccacctccccagccaccctcctccacaggtccaggtgccgctccctcccccaccacacatcagtgtctcctccctcctgctttgctgccttccctttgcaccagcccgagtctaggtctgggccaagcacanttacanagtgggancnggtggagcagcccctgggctccctgggcagggganttnntgaggctnntnatctcccatccacctgtntgtcntggcntaangccaggntctgagntctgtgaccaaaggacaggatcgaggataccatctctttccaacctcctgtggcacacagatcgtggactgggaaggtgtaggatgcccctcacgttcatgtgctcccacaaaggtcagtaatggataccccggcgtcagtgcatactgagctcgaactactgtggccacactttgaggac

SEQ ID NO: 709733 - DNA, 172 bp, Homo sapiens
gtaagagccttttgcattctgccatgattatgaggcctccccagccaccaggaactgtgagtccattaaacttctttttctttataaattatccagtcttgggtatctttatcaacagtatgaaaatgaactaataggctgggcgcagtggctcacgcctgtaatcccagca

SEQ ID NO: 709734 - DNA, 237 bp, Homo sapiens
taatcgagctcgtcctctcttagcgtgccaacatcttcagcatataactcatatctacctggcagctgattagcaagggactacaacactgaatatcaaatattatgattttgagttatatgagcattttccttttcacaggaataatatgaagaaaattacctcagtacattcagacttcttttttttttttaatgagtattttctttaaattcttattgaggaggttatgggcat

SEQ ID NO: 709735 - DNA, 1051 bp, Homo sapiens
  misc_feature (46)..(46): n is a, c, g, or t
  misc_feature (205)..(205): n is a, c, g, or t
  misc_feature (275)..(276): n is a, c, g, or t
  misc_feature (278)..(279): n is a, c, g, or t
  misc_feature (281)..(282): n is a, c, g, or t
  misc_feature (285)..(288): n is a, c, g, or t
  misc_feature (366)..(366): n is a, c, g, or t
  misc_feature (383)..(383): n is a, c, g, or t
  misc_feature (421)..(421): n is a, c, g, or t
  misc_feature (436)..(436): n is a, c, g, or t
  misc_feature (594)..(594): n is a, c, g, or t
  misc_feature (758)..(758): n is a, c, g, or t
  misc_feature (764)..(764): n is a, c, g, or t
  misc_feature (772)..(772): n is a, c, g, or t
  misc_feature (774)..(774): n is a, c, g, or t
  misc_feature (809)..(809): n is a, c, g, or t
  misc_feature (812)..(813): n is a, c, g, or t
  misc_feature (821)..(822): n is a, c, g, or t
  misc_feature (824)..(824): n is a, c, g, or t
  misc_feature (842)..(842): n is a, c, g, or t
  misc_feature (847)..(847): n is a, c, g, or t
  misc_feature (852)..(852): n is a, c, g, or t
  misc_feature (856)..(856): n is a, c, g, or t
  misc_feature (863)..(863): n is a, c, g, or t
  misc_feature (870)..(870): n is a, c, g, or t
ccagtgtgtgcgactcagcaagtttaactctgaacgcagcatcagntttatcccgccagatggagagtttgagcttatgaggtatcgcacaaccaagaacatcatccttcccttccgggtgatcccgctagtgcgagaagtgggacgcaccaaactggaggtcaaggtggtcatcaagtccaactttaaaccctcactgctggcnaagaagatcgaggtgaggatcccaaccccactgaacacaagcggggtgcaggtgatctgcatgaaggggnngnntnnttnnnnggccagcgagaatgccatcgtgtggaagatcaagcgcatggcaggcatgaaggaatcgcagatcagcgcagagattgngtttttttttttttttnacaagaagaaatgggctcgaccccccatttccatgaantttgaggtgccattngcgccctctggcctcaaggtgcgctacttgaaggtgtttgaaccgaagctgaactacagcgaccatgatgtcatcaaatgccactgcggccaagtgtagcgcacccatttgatgacatcatggtggtgcgctacattggccgcagtggcatttatganaactcgctgctagctgccactaggcagctagcccacctccccagccaccctcctccacaggtccaggtgccgctccctcccccaccacacatcagtgtctcctccctcctgctttgctgccttccctttgcaccagcccgagtctaggtctgggccaagcacanttacanagtgggancnggtggagcagcccctgggctccctgggcagggganttnntgaggctnntnatctcccatccacctgtntgtcntggcntaangccaggntctgagntctgtgaccaaaggacaggatcgaggataccatctctttccaacctcctgtggcacacagatcgtggactgggaaggtgtaggatgcccctcacgttcatgtgctcccacaaaggtcagtaatggataccccggcgtcagtgcatactgagctcgaactactgtggccacactttgaggac

SEQ ID NO: 709736 - DNA, 545 bp, Homo sapiens
ggtttcatggtccatcattgactcggcctcccaacgtactattgaagcccccgcatacctacggaaggcccctctaccatctccacaacagatccatgagaatatttgtagtgcattggcatacaacccgtactatatcatggacatggattaccaagttcaaattcaagaagagtttgaagaaagttctgaaattctcctgaaggcagtttctctaagacgcgttgggaggcacactccacttttgacctaagcacgggcaaacacaaacacgagttttacctctttagtggaatatggtacacacgggcagggggtgccacccccagtttacttatcgtgtgtccggcaccacataggatgccaccacaacaaaactaatcgcggcggcttcacaacagcccacaaatgttcttgcgcgcttcttcaaggggtgcgacaccacaacatttacgggggggcaccacggagcaccctaaaaggaagcccaccctcgggtacacaacagaggcgtttcaaccagccaccaagccccccgttgttca

SEQ ID NO: 709737 - DNA, 984 bp, Homo sapiens
agcggaggggaggacggcgacagcgccggagcagtgtcctgtttcccagaggaacagttcatttcaacagccagggagaaagcctggatgctacaagttaggggaatggcggtcaactgtgtagtactacctcgataacgccaagagactactgagcagacatgacatcattgcatgggattaactgacgtagtatctttaaactacgcaaaagtggaacagcttgttgttcaggatccggcacatattgtcgcaaattcactgggacactgcttcatgcccgtggcttgcagttagttaatgatacgaacagtatggaatttctagagacgaaaggctggaacatgcaatatattcacaatggttaaagctgtctgccaagcatcagtgttaacgcgaatgaagcgttgataaggtaacttccagtggagaacgctagtgaaaggacgtttccaggacaacctggattttattcaatggtttaagaacattctatgatgctaactatcgatgggcacggagtatgatcctgtaagaggcacgacacagggcaagatgcaattcctcctcctgaccctgggtgaacagatcttcaaacctgccagacaaagtctcaccatagcgaaactgccaccgagagcaggtgcagtctatatctatgtccagcagctaaaccaggatccacacttctcgaacctcatcagccaaaagggcttcttccagctggctcagccatccaaaatcagataccgcatttacgaaacgccgggtcataccgcctttagtgaatcaggtacatctccattgaagagcagtgcccctggcaagggcgctgcaaaacggcaccgcgaattaccaacccgggcaacgtgcagcaccatctgacccagcccgtccagagaaacccgcacgcaaaataatcacccctgcagcactatggaaccatcggcatactccggaccaccacagggcaccagaaaagcg

SEQ ID NO: 709738 - DNA, 169 bp, Homo sapiens
atctcttccatacggcaaggcaaccctttaggtatttttgttttttgtctttttagggccacacccatggcatacgaaggttcccaggctagtggttgaattggagctgtagccgctggcctagaccacagccacagcaatgccagatctgagctgtgtctgcaatcta

SEQ ID NO: 709739 - DNA, 949 bp, Homo sapiens
tgaaagctgaacccattgattctggtgagggattagcatggcgagcaggcagaacccctctggcaggcgggtcccggactggaaaagtggtgttggtttggatgctgcgtgtctgtcaatatgctcctccggttcactgggtataaagctcatccgggacgcaggttctactataggagctcaagattgcatggtaggccaagatgtccgagccagcggaacaatatgtgagggcatctgtggaggcgtggttgtgatacctgtcttaccactgagaggagactgctacgttgatagctcatctccactctgtagtgtaacttgaggaattggtggctcaagggctccgtgaccattggcatgttggttctgagcaatgctgatccataatgtgcaaaaagggccgtgtgacgccaaggactctgtaatgcccatcttgtccaatctcttggttaaggctcgtagggttctctaccgtatggaactgcttcatgcacccttcatagggatcagacagagcagccgtcaaaaggatcgcttctcccatcgccatggatcagattgagttgcatcagaggatctcctgatcgtggtcactgctaccatcgggagtgcaacactaccagtgatcctgatcaacatgattactctggcaaaatttgggcaggaagatggaggtattgaagaagcgcaaggcatctggcggggggtcaattcaaaagcaaagcccaatgagtaggtgctggtggcgcaacaattgggtggggctttttacaggagtttaatctgtggggtaactagtgatacatttgcttatttaatttatttatttacatttaagtagtttccaattggttacacgatcgggtaactactaaaaagtttcctcttatatggaagtttttaaatacctttaggaaggcatataaagagggaaattgtggtggta

SEQ ID NO: 709740 - DNA, 351 bp, Homo sapiens
caggctctgcagtgcaagcgcaactcgaagcggtccaggccccggcttgtatgactcaggccgcctgtggccacactgattctcagagtaagtgtaatgacctccacgtcatcatttgtgtctttagctaagaaggtgtgttgtaactttacttccaaaacctatttcatgagccaacagagcattaggacctgcacagatcgcggctatcaggcccttccggttttcctgctccttcagtatctccttcacagcagcacactctgatcaattctgtgcgcccagattacctcctggtagtaccaccacatcatatggtccctctttttttgcatcttcccggctggcatc

SEQ ID NO: 709741 - DNA, 606 bp, Homo sapiens
  misc_feature (361)..(361): n is a, c, g, or t
  misc_feature (429)..(429): n is a, c, g, or t
  misc_feature (443)..(443): n is a, c, g, or t
  misc_feature (463)..(463): n is a, c, g, or t
  misc_feature (465)..(465): n is a, c, g, or t
agcttcgtttattttcaagaataatcacgctttcctgaatccaaactaatccatcaccggggtggtttagtggctcaacattgtgttcccatttcagctgatcagtgggcctccaaggaggggctgtaaaatggaggccatgtgtgtgagcctatcagagttgctgcaaacctgaccccgtgctcagtaaagcacttgcaaacgtctgttatgctgtgacacatggcccctccccctgccaggagcttgtggacctaatccaagcatcccttgtgcccagaacagaagcatgggggcaggcaggcagtcaatacacacaagcattgcaagtcattttgctgggcaatacagttccaaattncttctgggaactccaaacctgcaggcaattttcaccctgtaaaaccttgagtcgtacagacaagctgncctggtatatccanaaagctttttattcctcctngntcatatggtgattctgggcttgtggggacttttcttaaagcttcagttatgattcttttttcatacacttatgtggaactcctgcgttgattttgtgctccttccagtcttccctgacactttaacttaccaaactgttac

SEQ ID NO: 709742 - DNA, 308 bp, Homo sapiens
  misc_feature (6)..(6): n is a, c, g, or t
  misc_feature (17)..(17): n is a, c, g, or t
  misc_feature (65)..(65): n is a, c, g, or t
  misc_feature (163)..(163): n is a, c, g, or t
  misc_feature (276)..(276): n is a, c, g, or t
tccctnactccccactnataccccgcctcccctggaaagttccctgctgcagagttcctttcctntttcagccctaccttgggtggtgatttacctgaaaatcttcacaactgatcattatctccttctctttgagacctgactgaaaaaattaggtgtgcanacctgtaatcccagctacctgggaggctgaggtatgaggattgcttgagcctgggagtttgaggctgcagtgagctatgattgcaccactgcactccaacctgggtgacagangtgagaccctgtctcaaaaaaaaataaaataa

SEQ ID NO: 709743 - DNA, 753 bp, Homo sapiens
  misc_feature (139)..(139): n is a, c, g, or t
aacagccccccccaaaaaaaaaatgttgaaatcttcccatgtttcctcctccccgcagaaggtttgggatacaaaattgtttttttttggcctgaagaactaaaattcctccccgggctgggtaggaggaatagggggnattccggtttggtgtcatttcaatcagaaagacacaggccccgttttggggattttgtcaccctgctctgtctgagccagcggaatatgatcaagtggccatgtgaattccaaatatttttaatggggtccagttctctatggattcttacatttaatttgtagggaaatgccatttttcccccttaaacaaggcatggggctcacaagtctatggagacaggccaaaaagaatgtggagaagaaaactgataaatacacagaggtcctcaagacccatggactcctggtctgtacccaaaaaagctgttcgttcctcaaaaacaaaaacaaggcttggctgggaaaacaggccaatgccccggcaagaaaggttgagatcagatgttaggaagaactttcaggtaaagtatgagaactatggagtccatcagcagagatagtagtgaagtctctccccagggaaaattttaaaaaggttgaatcagctgttgtagagttctatttggcaatctcatggttaaatgacttccctttgagctctttaattattggcaataaacaacttctttaaaagttttaaataaaatagcaaccccccccagttcctcttta

SEQ ID NO: 709744 - DNA, 664 bp, Homo sapiens
agggtatttactcattaaagccacgctagagagcagtggcgccatatgcagagagtgtaagcgttgcttgccaggggtatgccaagcgcctgtcgcggcctctcgagtcgctgggactactggaagccgccaccacactcgactaattcgttatatgcctaggagacacccggactgaccgggtgcaccagactggtaaagagctcctgagctcatggtccgtcctcctccgcctataaagcgctggcatacgggcctaacccatgatgcgcggacattacaagaaaactcttagccttcccacgtactatattgtttgagacaagttatctcagtccctgaatggaatgcggtggccctgacacagatcactgccatgtcaaattgagagagtgacgccgtcctgctacctaatcttctggatatatgcgaccattggacgttgccccccacggcagcccatttttttttgctagtagagacagggtctacctatgttggcctggctgtactccaacgcctgggggcagcgattctcctgcttagggctcccaagctccgggccaaaacctgcagagcggggaacccctaaatctcggtgggggggcaccccgggggaaccccggctgggttgccttagtgggggggaaccatgaaagagcgc

SEQ ID NO: 709745 - DNA, 406 bp, Homo sapiens
ttaatgcttaattcaaaaaatatctgagtacctgcagtgttccccatgctacatactgggcttaaacagccaaaaagacacagtctttgacctcaaaatactttgattcttgtaagaaaaactgacaaagacaaagagaaggcaatgtgaaaacttctacagttgggataaccttggaggttacaggatgtggactcactgaaagctttctgctggacttgaacttgaagctgaagtctgaaggacagatgggtgttgcttagcgaagggaaagtaggaagcaaagacccctggacagagtgtagcaggcacagagggagcatgacaccttcgggagagagccgcaagcacctgggcccagatcccagctttagcttcattagccctgtgaactctgtatgtcagc

SEQ ID NO: 709746 - DNA, 155 bp, Homo sapiens
aggtgctcaaaagaaccgtgactggattgaaacaatgttcatcgacatactgcatgcaaaaggcctgtgaagagttaaataatgctatggcgccaccttctggcacttgatccttgaccattaggaatgtgatgaaatgataattaattggactc

SEQ ID NO: 709747 - DNA, 189 bp, Homo sapiens
gcgccgctgcactccagcctgggtaacagagggaggctcggtctcagaaataaggaaacaattgggattatattttgggtgagtacgtgtcatgctgtcatgttacttaaatatgtcaaaacctggagtctgttggctgtatactctcttgtttaaggcattcgcgtaaatatgggatttcttgacgag

SEQ ID NO: 709748 - DNA, 388 bp, Homo sapiens
tacgactgcagcacataaaaataatgaacacaaagtccctcatgctacctatatatgctatacacaccatccaaagcctaagctctgccagtcacttttctcctatcagtatgacatcatcatgacatgaatatgataaacataaaatcgtttctgtaaataggttattactaaatgttatataaataagttgatatgaattttttattgatagatgagctatgtttagtcttttggtcatttgttgtacactcagcaaattactcctaaggttcatataagttgatgaatagttgtttaattattttttttaccaccatgtatctgaccaggatgaaagttgtttatatttgagagtagtatagcatatttgatgtatatacatgag

SEQ ID NO: 709749 - DNA, 224 bp, Homo sapiens
acgctgggagaaaatgtctattttttgtattccttaaaaacaaaacaaaaatcacaagtctaatactagtccttggaaatactgtacaccaatcaaagccaccttactcatgcatcaagacggtctatgttctcttgacttctggatgccaaatgctcctaaataatttctgcaaacagattcctcttaaacacattatatgcatgagggcaaagctggccagc

SEQ ID NO: 709750 - DNA, 209 bp, Homo sapiens
tctcaagatctacgagacccaatcccctgtgcctacacaccaccttcgctgaaacgctgtgtcagctgcattgctgacatctcacctgcggctctatcagcatatttgaactgagaaccacggcctcacgtagcgaggacggtatgacgctggggtgagcttctgggcagcgtggcgttatccaatgagtaggcaagcatgatggagcg

SEQ ID NO: 709751 - DNA, 238 bp, Homo sapiens
cccccccccccccccccctttcccccttaaaaaggtttgggtttttcccatcccccccccctccaggggcggggggacaaggggtccctttaaaaaccccaaccccttttttaaacctgtcccgggggtttattttaccaatggggtttttgggccaaaaggggaaggcggtttgccccaaaaaaaaaggtttttttttaaaaaaaaaaattttttaaaaaaaatccccttttgggga

SEQ ID NO: 709752 - DNA, 256 bp, Homo sapiens
cgggagtttcgaaacccagccccgatcgacatggagaagccccgtctccactaaaaatacgaaatcagccagacgtggcagcgcatgcccgcaatcccggctactcaggaggccgatgcaggagaatcgcttgaaaccgggaggcagaggttgcggtgagccaagatcgcgccaccgcactgcagtctaggccacgagagtgaaactctgtctcgggggaaaaaaaaacaattaaaaacggtgtgggcacgagttg

SEQ ID NO: 709753 - DNA, 112 bp, Homo sapiens
ggtacctcatgttaactgggcatttttcaaactggggaacaatcactatgggcgcttaacaacatatagcggttaaaatgcctgccatgctgccatgcctaggctgtaagat

SEQ ID NO: 709754 - DNA, 431 bp, Homo sapiens
gccccatctctggaggaagatcggggtcccacacctcagaggattaccaccgtggcctctgctctttgcggccagctgaacggatgacaaacatcatccaggcctcccctgtgcgaccttgcagggcagcgaggactctggacggccccacctgaacccaggcctccagcaacatcctcccctcctggccccggagagcagagagggcgccaaggggaagcagaagcaggctttggtttttctgcaatagctttgcctttttgtttctcaagaagaaaatattcagccctgctcccatgggggaaaacagggaggacaggactgaaggctatttttgagatgctgcctcccccaaaggaagggtgggaatggtgtgaagagagtcctgccctcatttcctggaatagagcatgtgggtcaatagttaaaaa

SEQ ID NO: 709755 - DNA, 310 bp, Homo sapiens
  misc_feature (253)..(253): n is a, c, g, or t
cacatcatgggtatgatggatgtggcgaaatgaacatattatggattttgttgtgtcatctattaacctaaattatttacagggtgtttatcgatgccacatccccctcaaagggagtgcgatggggatgtggcttgcttcttccgggctctgccgctcaaacctctaggggagcatacagatgggcaggctgtggggctccgaccccacggcagtgtctaggggtgaatgtttatagctgatgccccagtgngtgtatgttacagggtacttttttagtttagccatccataggtggcatcaataaaca

SEQ ID NO: 709756 - DNA, 758 bp, Homo sapiens
  misc_feature (174)..(174): n is a, c, g, or t
  misc_feature (449)..(449): n is a, c, g, or t
  misc_feature (734)..(734): n is a, c, g, or t
acaagagatcgagaccagcctgctcatcatagcgagactatgtctctatacaaaagacagattgaaagctgtataatgtcactgtattactgtgaagatagttgtaacttatatgaatctctggaccatcctttgcgaactgcttctgtacatgatcagattctcactaacagnggttggacttatgatatttcatctttacactgatgccgaagcaatatgcattctatagttatacttgaagtacacttactaccatactgacttcacttacagtatagtatacaatatattatatgagatattctacactctattatagaataggctatgtgttacgcgagtttgcccaactctacgctaatagtagtagtctgagcatgtttacagtatgcccagctaatctgtgatgtgcagcattagatatacatgcatttttaacttacagngtgttcaacttacgatgtgtttatcaggaagtaaccccatcatatgcacaggagcatctgtgttgcgtaatatgactggcacagttgattatgatatgttcagacgtttctctcagcatatgtttatagtgtgagtagacaggttatgccctgtgacacgctgagtaagaatagtctctcctcacagcttatagtatacaccggaagatatccttacattagtggctagactatcacacgcaagatataccactgaagaacactaatgacagaattactgtggtntacagatagttagtagcttcacct

SEQ ID NO: 709757 - DNA, 175 bp, Homo sapiens
ccgtttacccccaaaaacacaaactggtgaagcattttggacaaccgtgtgttatcccagggcagttttaagtgtaacgttaaaacttaggcattttcctgtgtggcggaataaaaaaggatttaacagttacaagccccccaattcaaataaaatttaatcccagttcagatga

SEQ ID NO: 709758 - DNA, 238 bp, Homo sapiens
gcacggtttgcgcgggatacttgccggacgcggtttccgcggagagcatcacggcgtcggcgccgtcgaagatcgcgttagccacgtcggacgcctcggcacgcgtaggacgcggatgatcgatcatcgactccagcatctgcgtggccacgatcacgggcaaaccggccacgttgcacttgtggatgatcatcttctgcgcgctcggcacctgctgcggggagatttccaccgccat

SEQ ID NO: 709759 - DNA, 267 bp, Homo sapiens
tgacacttaagtacacgacatataatcactagtcatgtcattataaatactatgagtcaactaataccctgtcagaacatttcgtgcttgataactgtaatctccttgctatcttacctgcatcatatattaaccactgtccacctccacattatccctcttactgaagtcaagcactacacaagttcatggggacttagaggcaagtgtgacggctgaccaccccaatagttagcagagcctttcatctgacggtgcgttggccca

SEQ ID NO: 709760 - DNA, 217 bp, Homo sapiens
tgcggtgcttcaggagctagataaatcagtgcggcgggtgtggtcagctgtatccacatttgggagcgagtgggcagatcacttgaggcaggagttcaagacagctgcaatgtggtgaacctgttctataacatatgaaattagccgcgtgatggatgtacctgtaatcccagctactcaggagactgaggcaggagaatcgcttgaacccgggagg

SEQ ID NO: 709761 - DNA, 202 bp, Homo sapiens
catcttggaataattgtcttgttgtttttgtttttgagatggagttacgctcttgtcacccaggctggagtgcaatggcgtgatctcggctcactgcaacttctgcctcccggccccaggcgattctcccgcctcagccttccgagtagccggggttacaaacgtgtgccatgatgcccagctaattcctttgtattattag

SEQ ID NO: 709762 - DNA, 208 bp, Homo sapiens
tagctactgaacaacccatcgtaacctcagaaccagactgtgcagagccatcgcgtcccactctttatccttgctgcttcaggtgtctaatatttacctcatttgtgtccacctctagattacttcaggtttatctcctttaaaattagttactaccactcaaatgtatgcatacctataatcccagcacttagggaggctgaggagg

SEQ ID NO: 709763 - DNA, 83 bp, Homo sapiens
aattcaagatatctaacgatgtacggggacatgtcatgtaggttgtctaaaaataaaatgcatttaaacccgaaaaaaaaaaa

SEQ ID NO: 709764 - DNA, 684 bp, Homo sapiens
  misc_feature (510)..(510): n is a, c, g, or t
  misc_feature (531)..(531): n is a, c, g, or t
  misc_feature (548)..(548): n is a, c, g, or t
  misc_feature (578)..(578): n is a, c, g, or t
tagctttatcaggtcgaaggaggatacaatagaggttaaataacctgtttattttttaaagtgtcaatttctattctttctgggtttccaacatgtcaggttatagaatgcaacattaactgaagtgattgactaatctcctttctttctcactgaaattaactaatttgagacagagtctccctctgtcggccaagctggagtgcaatggcgtgatcttggctcactgcaacctccgtctcctgggctcaagcaattctcttacctcagcctcctgagtagctggggttacaggcgtgttttgccacgcctggctaatttttgtatttttagtagagatgaggtttcaccgttctggccaggctggtctcgaactcctgacctcaggtaatccgcccgcctcagcctcccaaagtgctgggattaccggcgtgagccaccgtacctggccttgttttaattcttttatcttggaaaaaatagacctgcagaaaatttcataagcacttnttttggatttccacatctccnttcattgctaacattgngtcatatctgctttctctattcagtatttntgctgaacatgtgaaaagtgtagagatcatgactcttcagtaaatccacattgtttatcaaagaacatggcaatttcttgcatatcacagtgaattttaaatttag

SEQ ID NO: 709765 - DNA, 177 bp, Homo sapiens
cactaggttgcgatagaaattgaaacctggcgcaatagatatgtaccgcaagggaaagatgacaaattgatgaccatagcataatatatgcaaggactatagcccctataccttctgcatatgaattaactataaataactttgctaggagagccaaagctaagacccccgtaaacc

SEQ ID NO: 709766 - DNA, 125 bp, Homo sapiens
cacgctctctctgtggggtgccaggcatttctacttctatgcttcccataaccactctgctggtcaccacctcttccacgagctcttcctgcaaatcctcctctagatccccacagagagagcgt

SEQ ID NO: 709767 - DNA, 185 bp, Homo sapiens
agatgctacgtgtcctggcatattaggtgtcgattgggtaggcagtcatggatcacgtaatgcagtatgtctgagccaagtcggccgttagtacaggactccattcggctggtcaaaagatgcactaaacctgatagaaacgacttccagaagattgccatggcaaccagcactaggatttgcta

SEQ ID NO: 709768 - DNA, 765 bp, Homo sapiens
ctattctcagcaagtcagactgtcgatgttccagaaaatgtctgacgttactctgaagggacgcacagttatatcgtgagagggccccgagaggagccctgcggagggacttcaatcacatcaatgtacaactcagccttcttggagagaacaagaagaggctcgcgggttgacataatggtggggtaacagaaaggaatctggcataccgattcggcaagtatcttgttagatcatggtaccaggaacgatgtatcgaagggtggttgcaactgggctcttccggttacaagatgaggtcatgtgtatgcatcacttctcccaatcaaacgattgttgtgcccagagagaatgggtcgtcgttggttgaaagccgaaatttcattggggtgaaaaatacaagtccgcctagggattagagatgagacccaggtgttgcgtagtcagtatctcaaagcccgagagagatgtaattacactccttgagaggaaatgagcagtttgagcttgtttgcaaaattcacgcggggtttgattcagcaaggccacaacagttaaagaacaacgaatatccaggcaggtttctggatggtactctatgtctctgaaatgggaagcgttgcaagcaggctgatgaaataaagatctaagagttacctggtacacgagagaagatgcccgatgacattatgacctacttgtgagtttgtagatgctgcataaaacggccctatcgttttgaactttcttctcacaagcaacagg

SEQ ID NO: 709769 - DNA, 177 bp, Homo sapiens
  misc_feature (158)..(158): n is a, c, g, or t
  misc_feature (174)..(174): n is a, c, g, or t
ctccccaatttttaaccagagataactttgttccttaaataacattcccttcccacttctcctttggaggtttccctttccctttcccatttttttacattaaggggtatgttccctcttgtccctttccttacctttatatttggggtccttttttntccagggaaaaccaancca

SEQ ID NO: 709770 - DNA, 130 bp, Homo sapiens
taaacatcattcggaagaccagaaagaagcttttagacatacatttattgcttatttggggagggcgggggggggataggggtccttggagggattataatagctgaaactctcattgaaaaaggggtgc

SEQ ID NO: 709771 - DNA, 146 bp, Homo sapiens
tgggtcacaggaaaaagtgggttttttagttgaattttttttaacattcctcatgaatgtaaatttgtactatttatccccccactcctaatgccccatcttgggtgttatatacagatagaaatgatcccaatttaagattcaaa

SEQ ID NO: 709772 - DNA, 320 bp, Homo sapiens
gaccccacgcctctcagaggcagaggctccatgccagcctttgacccacaacgagcacacagcccgtctaccagaccagcactcggactgccctgcagtggcacgcttgggcctccctggagagccccgccctgctcctacgctttaccttggaagcctgacaggcgccgactctcttgctcctccatcgatggacactgcattgcttctaatcgtacacttgaggagcgcaggggcctggtgagcagcagctaaccctgtaggcagcctttgcgtgatgagcccttcttcccttatactcccgcggggggtaccgagct

SEQ ID NO: 709773 - DNA, 272 bp, Homo sapiens
agcttctgggtatttgtctctttttctttctttcttgagacagggtctcgctgtgtcgcccaggctgaagtgcaatggtgtgatcatagctcactgcagcctcgacctccagggctcagcctcccaagtagctgggactacaggcgcgcaccaccacgcctggctagtttttaaatttcttgtagagatgggtcttgctgtgttgcccaggctggtctttaacgtctaggctcaagctcaagctcttgccttgccctcccagagagccggaa

SEQ ID NO: 709774 - DNA, 565 bp, Homo sapiens
ttgcacagccaggtcacacccgagttgcctgatttgaaggggatgaggccacagtgtgagatattcacattgcagtatctgggcagtgaccgtctacttgctgagaagagagccggtgcagccaagtgagacaggccctggggttccagccctggctccaccacccaccagctaggtgcccttaggcaacttactcaactgccctgtgcctcagtttcctcctctatgaggtggggatggtagcaccacctgcctcgcaggatgtgagagtggaagaagttaatctccatcttaaggacagatggcacacactatgtgagtatttcccaggagtttattcttaactgctctcttctgtgcagggaggctggctgtcttccagatcattcaggaagcccttgtggagctgagtgtggcatgtgtcccaggtcctggggtatgtgggtcctatcctcaagcagctctcaagagtccccttctccgtactttgaggcctttgcatgtttggggttggagccaccgttctgcctcgtaacggctccgactttgaatgagcctgtcgccc

SEQ ID NO: 709775 - DNA, 167 bp, Homo sapiens
tggtaccgggtgggagtacggaatgtcatagcaattcgccctcatcaggcagactgtgagaaagagcagcgatgtggtggacccccagcagtgggaaggccgggctacatgagggagccctgctttgccttgcaaggcggggacaggcgcacacgcattacacttct

SEQ ID NO: 709776 - DNA, 533 bp, Homo sapiens
gtggtgcagcccccccggggttttttttaaaccagggtttgggcccaattccttttgaaggcccccccaaaatttcggcaacaattttttcccttttgcaagtgcatgatttcccaggcccttcaaaaaaaacggccaatcccacaaattttggcccctggggacccgttgggaaccccccattttctggccttttggcaaaccctggattaaaacaagtccctcttggaaggaaaaactggttttaaaaactctggcccaaaatttaatgcccccgttgtgggggtcccttaccaacccattttcccctggtttttggccaaaaattttggggttttttgggcaacccacccaaaggtgggggttagaaaaaacggggggatttccaccaagttggggaacttttttttttttagcccaaaaaaaagccttttcccccagaccctttttgaaaaaattaactttttaaggggttcaaaaattaaggcccccccccagaaaggtcggggttttaaaaaaaattgggtggcccc

SEQ ID NO: 709777 - DNA, 162 bp, Homo sapiens
tgcgcaccgcgcgtctcggctgccctttgtacaccgcgccgtggaggggggctccgagggggcgcagcctcaaaccctgcctttcctttacttttacttttttttccttgggaagagagaagaccagtgtgtccgattctggccctatttatgtgtctcatc

SEQ ID NO: 709778 - DNA, 316 bp, Homo sapiens
tgcgggcgatctagaggatccctggcaggctctctacctcagcctcctgatagctgagatacagggcacccaccaccacgctgggttaattttggtttttaagtagaaagggggtttcatcaggtggaccaggctggtgctgaactccggacctcaggtaatctacccacttgggcctcccaaagtgctgggattacaggtgtgagccaccgcgccaggccctttggtgattttggaatggtaaggtggtcattcagatagcatcccacacgtttccagcaccacagatatagcatgacctttatttttggagatg

SEQ ID NO: 709779 - DNA, 983 bp, Homo sapiens
agcgggtgtggagaaataagaggatgcaacagcagaagagaagatgacgtatggcgagtgaagacgagactgatagtggagctggtagtcgtaacagtttcgcgaaggcaacgagagactaagctccacaggccactagtgtgttgctggaacgggacctgtcgtccgtccaatggtgaaagtcaagttcggccagagtgaagcacaagcagatttgcagatcaccatgagccgtcttaacagaaaccaagaaggtccaataggatacagtcatctctcagcaagcgtttccatagtgatgaatctgtgtcagcaatggaaaagcaatacctggcgtaacagtaaatctcacaccgacagacaagagaagatagatggaatcttcactcactggactttactgtgtttagatcttgaagaaccaagtggactgtagccccgtcacgaagtgatcagttcgtaagcgtgtgcacaatgattcagaccaaatgatacgagcgtaagacgaacattccaagaatatccacttatcgaaaactgttttagcaccccaaagcgggtctgtctgcatatcgatgaacagaatcgaggagtggatatctaccattatggaagaggacagaatatgtactaaaggtcttgtaagcacccgactacagggaaaaagggcagagatgtttcgtttgctcaatttaatagatacggatgacgagtgtagattattggtaggatacccagaagtatgttcatcctagtaaggggtaaggcttaagtaaatgtttcatattgggaagagtccaagaatagccacacagattgagcccaatggcccaccctggaggcagcacactgggagaaagcagaaaggcttaaaccaaaggtagtacaggggttaaagccccggaattccggaaaacaggggggggacacgcccgggcccggagaacggcagcttgccaacaagaaagcccatttggagagga

SEQ ID NO: 709780 - DNA, 338 bp, Homo sapiens
acgcagtgacgtgatgcacaagggagtcaggaagagacggcaacgtaaaggatgtggcggcatgtccatggtgccccctggacaacgtaaggagcgtgggatccgatggaaaggtggatctcagggaaaatggaggtccatgcctttggtgtaccgcctcaagcctgacccgatagattgagcaggaatgccaggtgcaccaaaaatggtactcacgtgggcatggaaatgggtcagattaggggaccattagtctcagaggggagggaaggtgtcatcagtgaccactcagggcacctatccctcagttgtggcaagtaaagggtcattgaagctta

SEQ ID NO: 709781 - DNA, 285 bp, Homo sapiens
ggggcctggtgaaggctcgccaaacgtcatcatgtcagctgctgtaatatactaaatgcatggtagctctgagccaggtcttatgaactgttgcccaattcaacagtgccagcgttccaactttgtgcaaacctaccaacatcctagatggattgcctgtggtggtaccctctaagaggcggacgatagctactatatcagttgagaatactaatcactttccagtatcacatgagagattgacactcatataatagacctagagtttgcacgctggagaaccag

SEQ ID NO: 709782 - DNA, 199 bp, Homo sapiens
ccacggtatcgaatacagaacatgcggctgcccaatctgctgggccacgagaccataaggaggtgctggagcaggccggcgcttggatcccgcgtggtcatgaatgcagtgccacccggtacaccaagaaggttcctgtgctcgctcttcgcccccgctctgcctcgagtgacctaggactgagaccgatccagccatg

SEQ ID NO: 709783 - DNA, 343 bp, Homo sapiens
tcatgtctataccaagtgagcagcttctggactcacaggggtagtgccccggtctgggacattgtttgcagcacatcagcctcgtgatcttggacagtctgcagaaatgtgtcttcagctttgacagccattgccaggagaaagccagtgaatatattgccgccatcttggagctcagtgcccttgtgacaaagggacaccagcagatcctcctgtacatagactatcctgtattatctcaaccctaatgggcagcgtttccgcaaggactgacgactggtgcacgaattcacagatgccgtcatccaggagcggcgccgaaccctccctaaacagggtgttg

SEQ ID NO: 709784 - DNA, 795 bp, Homo sapiens
gaccgtaacctcaacaccaccttcttcgagcccgccggaggaggagaccccattctataccaacacctattctgatatttgcggtcaccctgaagtttataggttcttatcctaccaggcttcgggaataatctcgccatgattgtaacttgactactccggaaaaaaacgaaccatttggatacatacggtatggtctcgagctatgatatcaatctggcttcctagaggtttatctgtgtgagcacaccatgatatttacaagtaggaataggacggtagacaccacagagcatatttacacctccgctaccataatcatcgctatccccaccggcgtcaaagtatttagctgactcgccacactccacggaagcaatatgaaatgatctgcatgcagtgctctgagccctagagattcatctttcttttcaccgtaggtggcctgactggcattgtattatgcaagactcatcactagacatcgtactacacgacgaagcgtactaggtgtagctcactgccacttatgtccctatcaataggacgctgtatttgccatcataggaggcttcattcactgatttccccctagttctcaaggctacacccttagatccaagacctacgccaaaatccattttccctatcatattcatcggcgtaaatctaatttcttcccacaaccatttctcggccttatccggaatgcccgacgttatcggatacccgatgcataccaatgaacatcaaaactgggggctcattcctacagcgcaatacacttccgatgaa

SEQ ID NO: 709785 - DNA, 288 bp, Homo sapiens
agaatatacaatggggaaaggatccctcctcaatggatggtgctgggaaaactgaatatccatatgcagaagaatgaaagtagacccctatctctcaccatatacaaaaatcaaatcaaagtggattaaagacttaaatctaagacttcaaactatgaaactactagaagaaaatgtaggggaaatgctccaggacattggtctgggcaaatatttgagtaggacgtcaaaaggacaggcaaccagagcaaaaattgacaaatgtgattatatcaagctggaaggctt

SEQ ID NO: 709786 - DNA, 1459 bp, Homo sapiens
  misc_feature (371)..(371): n is a, c, g, or t
ttatgattttggtgccggcggaggttgtagatgtgtagttcgcagcggcttgtgtgtagcacgtttgttctgtcacccctagactagtgttgttgtttccctgcttgtctgttgttgcaatatgctgtctggtgcgttgccgacggttgttgccctttgggtggtgctccgtgtggatcagaccccttatgctcctcctttgatcctgttttgtcgactgaatgatcatgccgactgtccacttttggtgccccccccttggttacgctccagcctgtgttttggtggggaaggtaagcttttgggtgggaaattcctccttatgtggacccacattttgtggtggggagggttccccctgtttgtgtgtnggtgttctagccacaatagccccgtctttgtggggtccccacatcgagattttctccgtctcccccccctctgtgttagttggcgagtctgtctctcgtgactgcgaatgctcttatgttggtggagggtgtcctcgcgcccccggcgccggtgataggtgttatgctattgttctcctccccccccactgcggttttatgggtggagcgtaccccggtgtattaggttttatataatagccaactacgtcttgttacatagacccctcgcactccatctgttggaggaaatctgttataaatagtggaagttgttcttttgtgacatcaaataaataatatgtttttgtccttctagtaagaacctctcctcgtagaagtgggtggttttgattaaaccaccttcgtattacatagaaaatattacccgctctgttgctctacatcaatattttaatatacaggccggtcttggttttagaataccatgttgtgcgtctaacaggggaggaaacaccccacaagactcggttgagccaacatcctccgcgtgttgttgtataacatagaattcgcgccacatcttccccagacatcgttgttatataagatagtgtgtgtggttattttttgagagttttgggtctcctttgggagacttatgaggtgcgcacacagtgttcaccctctgcctggggccacacatctgggtgtatttctgcccactcttaagttgtatagtgtttaatattaaagtttggtgtaccctctccacgagttttgatatgttctcttgtataataccccgcaccccactgcacttctctctcaagcccgcacactaaatattggcccacgcgagaatacgttctcttttttaaacaaacaacaaaacaaagactgtgtcacgccacgaaccacgttatccacttcacgaccactactggaatgaattttgaaatctttactatggttttagtctggggaaggcctcacgtatggcacttttcactaattcacctctaatgtaaagattgaagccccaagatgagttaaattcagtgctgtattgcaacccgtccgtgcca

SEQ ID NO: 709787 - DNA, 710 bp, Homo sapiens
gagaggctgatttaatctagtgaacatttcttttaggcagcagtaaagcccagacagtaatcctttctttattctcgatagtctgccggaacactcctctgtgcccagtagcagagcttccttcctggactgctggagaaatggatacattcttaaattttgcagatgacataatcttgggcctgtgcaggtgattcagtgacagttatctttcgttcatctgttggtctgcatgggaagatttagaggctcccttagtttctttagtggaacctcatcaacttatttgtaaattcttttttttttttttttttctccgttttgtgagacggagtcctcgctcgtgtccacccgaggcttggagttgcaggtggcacgatctgggcctcccgtgcaacctccgcctcccgggtccaagcaaattctccgtgcctcagcctccgtaagttagcgtgggcatacaccgcgtatgcagcaccacacccggctaattttggaacttttaagtagagacagggtttcaccagtgttgtggtaaggcgtgtcctgtaaactccgtgaaccttgttgatcccaccgtgccgtgggcttcccaaaggtgcgtgggatataccgcgtgttgacccattagtgcccggccctttgtcaattaattacattataaaatacctataggtcagtaaactcatataaatgagtaactaactcac

SEQ ID NO: 709788 - DNA, 305 bp, Homo sapiens
acatgacagggcatatgtcttttcgggatactggtgtcaatttatatatatatatatatataaatgggtattatatatgtatattatatataatatgtatttgatatatatgtatattatatataatatgtatttgatatgtatgtatattatatatataatatgtatttgatatatatgtatattatatataatatgtatttgatatatatgtatattatatatataatatgtatttgatatatatgtatattatatatatagaagtggcattgctatatctatatggcaattctatttgttgt

SEQ ID NO: 709789 - DNA, 85 bp, Homo sapiens
  misc_feature (2)..(2): n is a, c, g, or t
  misc_feature (9)..(9): n is a, c, g, or t
cncccagcnaccccctcctgccagtggccctgagctgagaagacagatctgctatctacagatcagagcacaggaggcagtgatg

SEQ ID NO: 709790 - DNA, 242 bp, Homo sapiens
aatcgactcggtacccactcggataccgtgtcatgatctcgggacgctcctcccatgcctattcgaaaaaggcatggaatcgattgccagcgagaatatttgttatcccgctaagctcaacaacggtcacgttgaggaccttgtgcagcgtggggtgaaacggatttttgatccctgtatccgctatgagcaggtcagcgtggccgacgccgacgcgcacttcaactgcccggtggttgcct

SEQ ID NO: 709791 - DNA, 754 bp, Homo sapiens
aaaaaaatttaaccaattttattgaaacgaatttcactgtgtaaaagttggtttgattcaaacatatatcttgaatctacaacttctctacatgtttgaatcaaaccaacttttacacagtgaaatgtagattcaagatatatgatttctctatggaaataaaaatatttgttagtgaatggttgagttttgattcctctaacttctcagaatgattctttagaattctataattcatagcaattttgacaagtaagattgcaaaatagaaatatctataaagattccacagtttgacattatggcttgctatgcagatgtgaaaataggttaaataatatgaaagatatggcagaatgtaaagtggaaaagatgacctaaacattttgagttgtattcaactcagttaaaaacattgtgtcagatgacagggtgggcttttactgtcaagacatgaatacgaactgatctggctgcctgatgagtgtttccacgcagcctgcatattgtagtgaccaaggcatcaaggacatcccgaaactggaaattcatatccatctggttatgacatactatcaactcagctgggcatatgaaatgtgtagtgagatattcacaggtaataaaaacacttaacgacaggcaaacattacacttagtggaatacgaaaacgttagggggtacagaagacagttggaccttgctgtccactatttattgaatgccctggatcagcatagcaatatcacatag

SEQ ID NO: 709792 - DNA, 322 bp, Homo sapiens
  misc_feature (26)..(26): n is a, c, g, or t
  misc_feature (28)..(29): n is a, c, g, or t
  misc_feature (34)..(34): n is a, c, g, or t
  misc_feature (231)..(231): n is a, c, g, or t
catttgctggctgcacatccgccggngnntcgtncgagcccacctgcctctggaggaaacagccagatgtatcagaggtcagtctgttcaacaactgggaccccaggccttctgtatgttcagcaaagagagctcgcagtgacctccccaaaggatggctccgtctccattttgggttctgataatgccactacttgtcacattggggtcctgttgcacacaggttatggngccacctgcttgacacattgtgatggaaccgacaccaaagctggggtccccttgatcatgaactccataaagtctttttccgactgcgctc

SEQ ID NO: 709793 - DNA, 550 bp, Homo sapiens
  misc_feature (78)..(78): n is a, c, g, or t
  misc_feature (84)..(84): n is a, c, g, or t
  misc_feature (102)..(102): n is a, c, g, or t
  misc_feature (114)..(114): n is a, c, g, or t
  misc_feature (226)..(226): n is a, c, g, or t
  misc_feature (409)..(409): n is a, c, g, or t
gccaagatggaggatcgctgagcccagaatttgagaccagcctgggcaacatagaggaccccatctctctctctcttnttttgnttttcttcaagagcattngtgagacaacgngtaaaagatacgaactttacattagataataatagtgtgttattgttaaatttcctaatgtgataattgaactgtagtttgtttttagaaaataacccattgaagtatttgnagaaaggacatgatgtctacaacctattatcaaatggttaaaaaattaataatagggccaggcacggtggctcacacctgtaattccagcactttgggaggccaaggtgggcagatcacgaggtcaagagtttgagaccagcctggccagcatggagaaaccccatctctattaaaaatacanaaattcgccgggaacggtggcatgtgcctttagtcccagctacttgggaggctgaggcaggagaattgcttcaacctggcaggcagaggttgcagtgatccgagatcgcaccactgcactccagcctgggtgacagagcga

SEQ ID NO: 709794 - DNA, 486 bp, Homo sapiens
  misc_feature (14)..(14): n is a, c, g, or t
  misc_feature (223)..(223): n is a, c, g, or t
  misc_feature (255)..(255): n is a, c, g, or t
  misc_feature (333)..(333): n is a, c, g, or t
  misc_feature (349)..(349): n is a, c, g, or t
  misc_feature (373)..(373): n is a, c, g, or t
  misc_feature (379)..(379): n is a, c, g, or t
  misc_feature (421)..(421): n is a, c, g, or t
  misc_feature (465)..(465): n is a, c, g, or t
ctggagcgactgantgacaggtaccccaagaagctagtgcagacttattcagtgtttccctaccaggacgagatgagcgacgtagtggttcagccctacaattcactcctgacactcaagaggctgacgcagaacgcagattgtttggtggtgctggacaacacagccctgaaccggattgccacagaccgcctgcacatccagaacccgtccttctcccagntcaaccagctggtgtccaccatccatgtcggncagcaccaccaccctgcgcttaccccggcttacatggaacaatggacctcatcgggccttcatcggcctcgtttcatntcccacccccaagggntccaatttccttcatggaaccggnttacancccggttcaattacagaccagtcaagtgggccagcgtgaggnaggaccaaggttcctgggatgttcatgaaggcggctgctgcagnccaaggaacgtgattggttgt

SEQ ID NO: 709795 - DNA, 335 bp, Homo sapiens
acagagtctcgctccgtcacccaggctggagtgcagtggcgcgacattcgcccactgccagctccacctcccgcgtcacgccattctcctgcctcagcctcccgagcagccgggaccacaggcattcgacaccacgcttggccaatttttttgtattttttttttttttttagtagagacggggtttcaccgtgctagccaggatggtctcaatctcctgacctagtgatcctcccatcttggcctcccaaagtgctgggattacaggcgtgagccactgcgcccagcctacagacacaacttctaaggccaccaaagagaactgacgggaaaaa

SEQ ID NO: 709796 - DNA, 489 bp, Homo sapiens
tcggcacgaagggaagaatgaatcaacaaacttgaaactaaatccatggagattatccagtttcaggaatagaaagaaaaatgaataaagcctaagagacctctgggacaccatcaagcatagcaacatactctaatagaagtcctggaaggagaaagagagacgataaagagaaaggagcagaaaaaaaaaatatttgtagaaatcgaccaggcatggtggcttacacctgtaatcccagcactttggaaggcaaaggtgggcagatcgcttgagcccaggagttcaagaccagtctgggcaacatggccaaaacctgtctctaccaaaaatacgaaaaattagccggatgtgatggcacatgcctgtggtcctagctactcaggaagctgaggtgggagaattgcttgagcctgggaggtggaggctgcagtgagccaagatcatgccgctacatgatgggtgacagagtgagaccctgtcttcaaa

SEQ ID NO: 709797 - DNA, 123 bp, Homo sapiens
tataacttaattcattggaatcataattttcaatttggtgaatcagagttgctttttaagataccagcactttggtgctgagtagcttacggggtcctctgcacacctccttgcaggtgaaag

SEQ ID NO: 709798 - DNA, 439 bp, Homo sapiens
ttaaactaatttaatacactattgagctttctgggctgaatttttaaatttttttcttacatttgatcacttcctaatccaaaaattgtagcactacataggacatttaattctattactaaataggctccaaattacattatacagttcagaaaccatttcaatgaatggatttacaaaaaaaaaaaaaaactgtcctttcaaatgaaatgcaatataaaatactaatacacttttcttccaaaagtggaaatgcttaagtacccctatacgaggaaaaaaaaaaatcgggcgggataattcaattccacaatgcataatacaacagttttaaggcccttattgatgacagcttcgataaaaactattaacaaggggttccaagcaccaaaatagatgtacagtatgagcaccgacttttctttatataaaattttaa

SEQ ID NO: 709799 - DNA, 153 bp, Homo sapiens
  misc_feature (12)..(14): n is a, c, g, or t
  misc_feature (72)..(72): n is a, c, g, or t
  misc_feature (131)..(132): n is a, c, g, or t
  misc_feature (136)..(137): n is a, c, g, or t
ccttggttgttnnngttcattctgaatccttggttctctttatactcaccaggtacaaattactggtatgtnttataagccgcagctactgtacacagcctatctgatataatcttgttctgctgatttgnncttnnaaatattaaaacgact

SEQ ID NO: 709800 - DNA, 788 bp, Homo sapiens
ggctgagttgggaggatgctctgtacccaggagttcaaggctgcagtgagctacgatagtgccactgcactcctggctggacaacagaatgagaccctatctcttaccaaaaaaaaaaaaagggttcaacatttctcaaaatttcactgaggctttccaattggccacctggaaccctggatattttattcttattttttcggagactattagtcctcaattggtgttggcccaggttgggacagaagtgggttgtggacgccaaggtattggccctattggtccttcccatccgggggcaacaaagagtggaaattggtctcaagaaaaaacgtttacccaatttattatacacttattgttgcctagtaattagacgctaactcacattttcaaacaactcctttccacaacgctattggttgtcccgcaacaacacttttttcccaccgtgtgttcacaaccaccttgcaaccaactttacgggcataatttttcaacacactacgctcacactttctattcaaccttgggctggcatactggacaaaaatagtgcccctttaaactaacgcggtgtagataccccatttagaacttctggctgacctttgggggggaggcctgccatacttctggactggactaccttggtgaacttcacctaccttgaaccttatacccgggcttccatcgaactcctccaagggcttcattggggcggcacattatcatttaaccatccagaaggatgggccaccaagcttgggggccaccttctcccagtg

SEQ ID NO: 709801 - DNA, 859 bp, Homo sapiens
ggtggaggttacagtgaggtgagttcaggccactgcacttcagcctgggcaacagagtgagatttgtatcgaaaaaaaaaaaaaaaaaaaaaaacggggggcgggcaggggaggcaaattagggcttggacaaagctgcctcagtgccacttttctgcccggcctcaaatgccattccacttaggcccaccgaggccctctccagggaaaagcctagtgtttcatgtggccgagaaccaggggggttgtgccctcaaccagctgtgtctactacgggagctgcgaagacacattcgggtgtgcggcccaccccctttccccaccgcgtgtctccagggtgggggccgtggcacccctggtggccccacgctctttcctcctctttagcccccatggttcctcctggcgacattgagcccgctattgtgggaaattacggggcaacaagcgtggagacgccagtaccaggtgccccgggatggagcacccttgaggcactcacagccgtcagattggcgcaagatctgccaggtggcggggcgcatacataacagggaaccaagcaggcctagggtcctcccacgcttggccccccaaataaaaggtggggccgcgaaaaaggaggcgctgcaacgtgttatcctggccccaccctgggctccccttgttggctgggggcataccaaggtctggacaggggggagcgacagagactgggacaagacaaacgcgggtcgactagaaatcgcagaccttggaaacgcacagagcgagaggatgttgaaaccagagagttaggcccagctggggaacaaagggaaccccatccacccgatacaaaaaaagtacccccatgtgc

SEQ ID NO: 709802 - DNA, 722 bp, Homo sapiens
cgacggggtaacaagttaatttttgggggcctccaaaagctaagggaaaagcaccccagtgggcaacaagcaacaggggtcagtaaatgtttatgactcaacaaattgccacagtctaagctgggctggggggaccatgctgccaagggtggggtgccaagagagagcaaattgaacccgggccccaaaggaagggggggcccaaaatagggagtgggggtaaagaggggggagttaaaatccagatggaaaagctacaatcgcccccagggtagcggatctaatgggcaagggctgggccaaggggttttttcccaaaacccaccaggaagtgggggttaaacttcacccctccttttacggggtgaacataaacctgcaaatcacagagccttccgtgaggagatcaggggaaaattggttggcccaggccctgtacaacagacggttgatagagaggcccttcccaaccagggttgagctggataatttggagggccccaaagccccgcggtttcctttgaaccaataggggcttttggcgggacactttaagatcttcgtccctcacgagtttggacaggggcctccctataacatggcttgcttccggggaaaaattttccttggaaggcgcgggttttgggggcgaagaaatgttaaactggcctaaaggcccccacgcaccccctttcttaaagaaaagaaagcccccctccgct

SEQ ID NO: 709803 - DNA, 1059 bp, Homo sapiens
ggtgtgcctactgaagatcctgatgtcgacatgggtccgccgcgccgcccgttgttaccggtatagtaagaacaagccgtacccaaagtctcgcttctgccgaggctgtgcctgatgccaatgattcgcatcttctggacctggggcggatgcatggccaaacagtggcatgagtttccggcgtttgtggcctacatgggtgtcgagatgaatatgacgcagcgtgtccgtctgaagccctggaggctgaccgaatttgtgctcaataagtacagtggtaaagaagttgtggtcaatggatggcttccatagtccggcgtgacgagctccacccgcgttccacggtcactccgacattcaacaagcatgttgtcctagtgctggggcttgatcagcgctccaaatcgaggtcagtgcgagagtgacctgttgtgaaatgccccatgggcgactgtaggccagaggttcacattgcggcaaagttatcatgtccatccgacaccaaagctagcacgaacaatggagcatgtgattgaggccctgcgcagggccagcgttcaacctttcctggccgccagaagatccgatatctcaaagaagtggggcgttcaccaagttcaatgctgatgaaatttgaatgacatggtggctgaaaagcggtcatcccagatggctgtgggagtcaagtgcatccccaatacgtgggccctctggtacaaagtggcgggcccttgcagctcatgagtgggcttccaattgtagcttgacaccccctcttaactactcacccaattaacagttctagctttctgtccatgctaaggacaagaagcataggaggaccatatcaatagacaagccctgagggacccctataaagccctgaggtcggggaaaaataggtcacccaaagcatcgagagtcatggtcgtagaaaagaggacttacacggcgcaaagtggctcatagcaattagacgtggatcaaagtgcgtgccgatacccttataggcagcgcacgagagtccttgtggataacgcctgtatcgcacgcttatac

SEQ ID NO: 709804 - DNA, 101 bp, Homo sapiens
cttatcggtacctgactaccatgctttaccagccttttggtgtgtttccagatctacaaggattctcttaatatttccaagtgggtagtcacagactgggt

SEQ ID NO: 709805 - DNA, 145 bp, Homo sapiens
  misc_feature (27)..(27): n is a, c, g, or t
  misc_feature (74)..(74): n is a, c, g, or t
  misc_feature (123)..(123): n is a, c, g, or t
ggaaggttcccgcagatagagtctgcntcccctgcccccttcttttctggattcctcgctgcccaccctcattntcccggtggaagcctcgcaacgaagggccggagccgcctttttgctccnggaatgcttcacctgtccgaag

SEQ ID NO: 709806 - DNA, 232 bp, Homo sapiens
tatctcgatgtcctgtctacaacagactgaaaaatgtctgagtaaagagagggcaggaacagctagagggcttcgacatggatgactctgacgctaggctgataaaagatatcatattactgcaccaggattcaaccaagagcgactgaggtcagtatgtgctcagcactctctccagattttcatggtaggaactcttgttcttcactcaagatgagacaccagaggctca

SEQ ID NO: 709807 - DNA, 121 bp, Homo sapiens
cgtacgcataaggtatcttcagtctcccccgcactgcatgcagaacccatgatgccccaacccattggcctgggccagcttgcactgcctgactgcgcctcgtgtcactggagccaatctt

SEQ ID NO: 709808 - DNA, 235 bp, Homo sapiens
tcgctctagacggatcccccatgtcgggatcactggtctcgaagctccgtgactcatgatccgccacctcggcctcccagggtgctgggattgcaggtatgagccaccaccgctcagccatgaacaggttctttccagttttgtgagatgccagtataacccatttgaattaattacacctacataaagacgcaacagaggcagtccataaagggtcagttcagcacagtcttta

SEQ ID NO: 709809 - DNA, 98 bp, Homo sapiens
tcaagcttctaacggatgtacggggacatgttttattatttaaaatcattgtcttaaatttttgttcaaaaaataaaaatttgaatacaatctaaaaa

SEQ ID NO: 709810 - DNA, 379 bp, Homo sapiens
gctcgactgtaaaggcatggaagtggcggctaccgtgggcggtggcggtggtgccaaggcgccggatgaagtgattgccaaacattgcaacgcctgccacggcaccggcttgctgggttcgccgaaaatcgggacgccgcagcctaggaaagatcgcgccgatcaccaaggcggcctcagtggcctgctggcaatggccatcaccggccttaatgcgatgccgccaaaaggcacctgcgccgattgctccgatgacgagctcaaaggtgcgatcgatgaaatgtccgggttgaaataagaccgatcgtctctgaaaaaaccgcttacgagcgtttttggttcgacgccgccggcaattttagttaggtagtaattcaac

SEQ ID NO: 709811 - DNA, 114 bp, Homo sapiens
acgtggacattatggatgtggactttgggtgagaacgctccaggcgcaagtgcaggcggccagatgggacatcctccagggtcagccactcatcaaggaagccactgtttaaga

SEQ ID NO: 709812 - DNA, 468 bp, Homo sapiens
aaaggtagagagtggtctcgctggggaggggaggcaggcagaggctgtccagctcactcgcatttgttctttccttgattctgttgtcacaggttgtccattaatctcctgaagcacccactcttgctctatcttcttggcagccgagaggttaagaaagcccctccatgtggcagactcctttagatcagatcctttagctgccggtccccacctaaatgaccccccccaaccttttcctggtgctccctgagtgcagaagcagtgggggaataagagtgcctcagcccacgattgctggacgtcaggactcacctccatcttaagagaacggtcagctccgaaattcggagactttgtgtccagattcctcaagctgtgtcaggaagtcttgtcttttcagttaagaggaaaccgggtcttcctgcatgggttctaataaagtctttgatctatttaaaaaaaaaa

SEQ ID NO: 709813 - DNA, 924 bp, Homo sapiens
  misc_feature (296)..(296): n is a, c, g, or t
ctgagttctcggtgaaggtatttcatttctcctgtcccctcccctccccaccccatctattaatattatcttttgaagattcttcgttgtcaagccgcaaagtggagggagtgcgattgcagaagggggtgctactcgttcagtgctacttcgggcggaggaggaagtaggggtgcacctcagtatatcccaagactgctggaaagcgagtgcctggggaaaacccagggcaaaacgctcagaaatggattcctgcacgaagcactagacgagatgacaactccgcagcaaacaantccgcaaacgaaacaagaacgacatgatgcaacttcaggaaagtaagaggcatactaaataggcttaactcctgcaaaagtgtgacaagctatgccttgcagcatccatcaatgtgggtgtagagactaaactcatccttaaaggggtcatactgctgatgtggacccaagccctagaagagccaaagtatagcatcactgatgctcagctatgtctgcgatggaacaagatgcaccaccaacctgatggcccagcaggcgagggtcaaacgaggacagaagcaaagcacaaaataccagagcatcacaataccaaaataccaaagaaaagaaaccgaaccacgaatgtagacgaaggaaaacggacaagcgccgcccgaaggagagtaagcaagagcagaggcagacggagtcgggcaacaactactcagagaaacggaacgaacataagaacagaaaacatacgagaaaatgggaacaaagaaagagaaaagagacaagagagaaacaataggccgcgatcgacgctcgtctgttcactcaacaagacaaaaccgatagagagagtgagacaaacaaaacaaagagaaaacacaaatagtgacacactcgtgtttcttgcgcctat

SEQ ID NO: 709814 - DNA, 751 bp, Homo sapiens
gaggtttctatgtagaaggggaacaaaaaaaaaaatatctgaattttgaaaaaccacaaagctacaaactgaccctctttttttttgtgaaacggagtttggctctgtgtttacccaggctggagtgcagtggcgtgatcttggctcactgcaacttccgtctcccgggtttcaagtgattctcctgcctcagcctcccaagtagctgggttcataggtgcccgccaccagaacccggctaattcttcagtttaagtagagacggggtttcaccacgtgggccaggcgtggctcttaaatgaccctctaaattttaaactgggatacctggctattctggccaaaagacaatttctagagtagtttggaatggggtcggatttcccccactcccagaaactctgaagccagtgtctagcttactaaaaaaagagtggtatataatattcaagatgctgagctattccataggaaacgctgaatgctgctgtaacgtgctcttaaagtctttcgtctatgtataaatccccttctaagtgatggaacctaggggaattcccgcgaacagacgatgcgaattggttgtatagactaacgcggtagtgctagtcataacccattccggttcaggaaaaagcaggggtatgggcacactttgtaacgatcggcggcactacccttgtgttgtccccttcgatgatacatcaagttgcacataacctcagtacacgtgacacttgcccctagcagg

SEQ ID NO: 709815 - DNA, 260 bp, Homo sapiens
gaccccgtcgcaggctacctgcgcaatatcactgctgacactctggagcactggatggaacctgtcaaagtccagagcattgagagctctgaccgtcgtctttggctccctgtccccgactttgtcctctgcttcctgtcttgtgtgcccttccttgctgttggatgatgtgtctctttcttcttccgtgccttctgcctctttgtcggtggtgtctgctgctcttcctctctctcctccttgttggtctttccttttgc

SEQ ID NO: 709816 - DNA, 226 bp, Homo sapiens
ccgagatcgtgccactgcagtccagcctggacgacagagcaagactccgtctaaaaaaaaaaaaaacccaaaaaacaaaagttagccaagcttggtatcacactcttgtagtcccagttactcaggtgagaggaccatttcagcccagaaagggtggtgatgctgtggtgagctgtgatggtgccactgcattcgggcctaggcaacagagtgagaccctgtctcg

SEQ ID NO: 709817 - DNA, 1010 bp, Homo sapiens
ggtaattatgcttggacatattcatgtatatggagttagtcagctgactcacggcatttaccctaaatatcaaatctgttttcaaaaattgcacattggccaggcacggtgacccacacctgtaatccctagcactttggagaggccgaggcgggcggatcacgaggtcaggggttcaagatcagcctggtcaacatagtgaaaaccccgtctctactacaaaaatacataaaattagctgggcatggtggtgggcgccctgtatagtcccatggcatagcttgcagagcgtctcaggcaggagatatctgcgttgaaccatggcgtaggtggcatgagttgcggtgcatgccgacgtattgcgaccatttgtattccagccccgggctgacaggtgcacatgaactccatctcaagaagaatgaaataaacaaaaattgggcgtcgtatccatcgttttgacattagatttagctgttgctggccttatttagctagagattgctggggagccatcggggattctaatttggttaaccccagaagaacggaaattcagcttgtatttatttaaaacccatttagccttttacttatatctgggtagaattccagtgatcatcctaataaggtatattcagaataatttttttccttcagaatacttagaatcagatgctatagggctcctaggagccagtgtgaaattcccgtaaagatcaactttggactgttgtaccccagtttattatttaaccaaagagggccattcccaattgaattggggtctttaaactggttaggtccctaccgaaaatactgctaagggggagatcatccaatgtaaaagagctggcgcccagacgctgtaatattcctagaaggtatcggttgccggcgggtgccacatttccgggataacacacaactgtatcctcctgattgaccaagaacaaagattggcccgcatggtacaggcgaccagccccttgtcgcggctacctacgcga

SEQ ID NO: 709818 - DNA, 355 bp, Homo sapiens
cagtgtccccatcatttgggggcccctggtgctgtatctcagctggtcctactaccgaacctttgcccagggcaacgtccgacttttcacgtcatttacaccaggtaatgccagtttctttcctgacttgccctgaggatcctagagggaggagacctcagtgctttccctggcccagagtttttgaaagcccagaacccccaactacatcccaggcatttttggtgaagcctctttgtaaaaatagtcttccaaaaaagaattttgtttgactcccattttcccccccaatggatccaaaacccccccacccatcagcagaaactaaatggaatcatcgggtggcatagcaata

SEQ ID NO: 709819 - DNA, 404 bp, Homo sapiens
  misc_feature (212)..(212): n is a, c, g, or t
  misc_feature (394)..(394): n is a, c, g, or t
taaagactgtgatgacagtggggatggtgatgatggtggccatggttctctggctagaatcccgaagtccagagccctcacggtttgatgcttgaattcattttacagcaaagcatgccctggtctgaagaagtccatgcacagcctgcatttaccccacgttgtgtgaatgttcgtgtgctttgctttggaaacacgaagtgggagactgnctcagactccactggaggaatcaaacggtctggcccatccccacgttccctcctaaaatccaaaacactccgagaagcatctggctccgggagtgtccgagaagacacagggatgtgtgagtacgtcaagccactatcccaggtgtttttcctgcctctcctgagcccctgagggcaaccgnatcacccgtt

SEQ ID NO: 709820 - DNA, 858 bp, Homo sapiens
tcatgttaatcctcttcttttgtcttgctattattatgtgtttgatcatttatcatttttcatatgtgtttttatcactctagtctcattcatcttagtacagtctagtcttttatctcatttaacttttttagtattttattactaatatgtaatttttattcacctacacttctaaaacttttgtgtggtgggggaggggatgtacgtgtatatgtgtgtgtatatgtaaaacattaaaatttctaatcccctccagtacattactttagggtaagaagtgcagtagggatctaacttttctttttccttaaacggttagcgtactggtttcaatttgtaacatttactgaataggataatgatagtgttatccttttatgcaaaagccaacatgctatttataattggcaaatttatgccaagtacgaatttcattttaaaaaaagatttattatggaaaatttcaaacgtaaacaaacagtagagaaaatagggaaaatagagtgaagccccagaatccccatctctcagcttcccacagtgatcatctcgtttcatctataatttaaccacctacttcgccagattattgataaaattcctcaggatcatatcatgtcatctatagataatatgaacatatatatctaaatgaagagaactcttttaaagaaatgacaatttacattagtataccgtaagaaaatacgtttaatataggtcaatatctagtcaggggtccaaattactctgatgtattagaaaaattgtgtctgtaaattttactgggtaataagggttggttacttgaaagttggtaacaagcaagttattggaccaataaattttccagat

SEQ ID NO: 709821 - DNA, 288 bp, Homo sapiens
tgctgaggtgcctagaggatctgtgtcatcccttgtgaagggatcgtccatctctaggaatagggcagagttagaaacccccaatttatagtcaggcctcatagaagaacagaaccaacaggatggcgggagatggcagagatttgtttaacggaactggttcataggatgtggggggctggaaggtctaacatctggagggcaggccagcatcctggagacccagggaagagctggggatgcaggctggaggcagacatttcctcctcctcacgggagttcaagcct

SEQ ID NO: 709822 - DNA, 187 bp, Homo sapiens
acgaaataggcggggtggtagagcatattgagtgtctgctacggtctaagcaaagcaggggtgaataaaagggaaaggaggcatactaattagtataatgatagggaatatattggggggcatgccaagtgtgggcatcactatggtcttagcaattaatgggatatggattactaaaataagttaa

SEQ ID NO: 709823 - DNA, 155 bp, Homo sapiens
tggacaaaaaaacttaaaaattttaaaaagggaccaataaaaaaaacaaaaaaacaacctttgggcggggggggaatattaaaaaaacatttttttgggaaggggttaaaatccaaaatggttaaaaaactacaaataaacaaaaaaaagcaaaa

SEQ ID NO: 709824 - DNA, 522 bp, Homo sapiens
  misc_feature (19)..(19): n is a, c, g, or t
  misc_feature (44)..(44): n is a, c, g, or t
  misc_feature (70)..(70): n is a, c, g, or t
  misc_feature (82)..(82): n is a, c, g, or t
caaaccccagaagcctttnccaggaaaaaaaagcaaaaggttcncaccacccaagcacttgctttccttnttcatttttccntccttctgtcacccacgtagaaaattaaagatagaaaagagtttctttagccaagtttgaaaccagcctaatttacatggacttgatgttcattttatcttgggcaatacttctaagaaggaagatttttttttgactttgttaagaaaggtggctgggcacaagggctcacgcctgtaatctcagcactttgggaggccaaggcaggcatatcacttgagccgaggcggacgtttttgagatcagcctgggcaacatggtgaaacctcgtctctactaaaaatataaaaattagcagggcatggtggtgcatgccagtaattccagctacttgggaggttgaggcaggagaatcccttgaacctgggaggtacaggttgcagtgagcccagatagccccactgcactccagcctgggtgacagagggagactccatctc

SEQ ID NO: 709825 - DNA, 915 bp, Homo sapiens
  misc_feature (629)..(629): n is a, c, g, or t
aaagagtatctcacaagtgccctgacttgttttcttcacataggtcactttcatacaatggaagtcctgtctcgtattcttcaatttacattagatatacctatcgtacatcaagtcatcgtcaaccacatatgtaactgatctctgatggaacgacaacccagctcgtaccggcaggctgtctcgtcgttgtgcgcgttactcttcatggcactgtctaactctgtttgggattggttgacgcgattgctatccatttagatagagattctcgagacactgcactatagagattaagaagcctatgctcagaaatatacagcggaagaagatggacaaaccagaaagaaaataactctatatatcccggagccaattcacactgtactgcttgttctatggctgtaatataagctctgagttctgatgactgatcaaagcgtgagtctcgcgattatgctaatgtggagtatgggcctatggaataaagagggcgccacgagggatgggaacaggattagctctaattctcttctctgccttctcgtgtggggtccctccaatgcacactatgaatctagatgtaaatctttcctctcccgggcctgatctgggagtgtactgtcgtntagataccaaatgcgcttttggtcgcacccctagggtataggtcacagggagagttcatctattgtcttgcgtgtgagcgcttggtttcttaaaccagatagaaagagcaccaaaatagaaggggtcgcggagggaacgccacataagaattgtgtgatctccttgcggacgccgtggtctcgaacccttggtctcgcccacgtggtccctcgcatcgtgtgaatgctttcggtgcccgaacttgggttgggcccccctgaaccccttggggcatccctctataag

SEQ ID NO: 709826 - DNA, 675 bp, Homo sapiens
ccagaggcagcatgcccaggtggtgctagtgggtgagctttgctgattccgatatagtgcccccgatgccagtacctgggtgtgccccatcgcttgggcatctatgcaccacaacgaaacaggccactgtaggaatgcaaaggaggaagtgagagtcggaattcgtggggtctgctggatgcttacgttgataggacgaggacttttctggttgggcgaacgagtgacattaggctgacgatcgagaggttgtctgcaccctgtggtggcgtctataagcgagggttctagagcgcttctttccgccaggacctttcgcgcaataccgcgaaccgctggttcctcagctgctgttaaccgagcgcccagttccggggctggtgctcttgctgggacatgctgtagagaactgctgtgagtaacgactggacccaggtgttggatcgctcacagagagagtctcgcgagatgacccgatagcgttaacatagggcacacacgcgacggacagagaagggttcacgggagagagaagcaggaagccccaggctgcagcggaagtgaggagacaaaaggcggttgtcctcgtgctcctgtaggaggagatggctgaatgtgagcaggcggctggctgctgagcccagtgccaagggagcccttcgctcatctgccaag

SEQ ID NO: 709827 - DNA, 762 bp, Homo sapiens
  misc_feature (38)..(38): n is a, c, g, or t
  misc_feature (73)..(75): n is a, c, g, or t
  misc_feature (79)..(79): n is a, c, g, or t
  misc_feature (81)..(85): n is a, c, g, or t
  misc_feature (101)..(101): n is a, c, g, or t
  misc_feature (138)..(140): n is a, c, g, or t
  misc_feature (144)..(144): n is a, c, g, or t
  misc_feature (148)..(148): n is a, c, g, or t
  misc_feature (160)..(160): n is a, c, g, or t
  misc_feature (169)..(169): n is a, c, g, or t
  misc_feature (182)..(183): n is a, c, g, or t
  misc_feature (214)..(214): n is a, c, g, or t
  misc_feature (220)..(221): n is a, c, g, or t
  misc_feature (227)..(227): n is a, c, g, or t
  misc_feature (236)..(236): n is a, c, g, or t
  misc_feature (243)..(243): n is a, c, g, or t
  misc_feature (247)..(248): n is a, c, g, or t
  misc_feature (250)..(250): n is a, c, g, or t
  misc_feature (252)..(252): n is a, c, g, or t
  misc_feature (261)..(261): n is a, c, g, or t
  misc_feature (267)..(267): n is a, c, g, or t
  misc_feature (274)..(274): n is a, c, g, or t
  misc_feature (283)..(283): n is a, c, g, or t
  misc_feature (285)..(285): n is a, c, g, or t
  misc_feature (295)..(295): n is a, c, g, or t
  misc_feature (308)..(308): n is a, c, g, or t
  misc_feature (312)..(313): n is a, c, g, or t
  misc_feature (319)..(319): n is a, c, g, or t
  misc_feature (321)..(321): n is a, c, g, or t
  misc_feature (323)..(324): n is a, c, g, or t
  misc_feature (327)..(330): n is a, c, g, or t
  misc_feature (362)..(362): n is a, c, g, or t
  misc_feature (364)..(364): n is a, c, g, or t
  misc_feature (367)..(367): n is a, c, g, or t
  misc_feature (370)..(370): n is a, c, g, or t
  misc_feature (404)..(404): n is a, c, g, or t
  misc_feature (406)..(408): n is a, c, g, or t
  misc_feature (417)..(417): n is a, c, g, or t
  misc_feature (419)..(422): n is a, c, g, or t
  misc_feature (431)..(432): n is a, c, g, or t
  misc_feature (442)..(442): n is a, c, g, or t
  misc_feature (452)..(452): n is a, c, g, or t
  misc_feature (468)..(468): n is a, c, g, or t
  misc_feature (579)..(580): n is a, c, g, or t
  misc_feature (604)..(604): n is a, c, g, or t
  misc_feature (617)..(617): n is a, c, g, or t
  misc_feature (732)..(732): n is a, c, g, or t
ttttatttttttttttatctaaaacaaaattaaaatanaaaaaaataaaatatattcaaggatactgcgttcnnntttntnnnnnccctccccggagtagnccgtccccccagaacaagactgaaggaaaatcgccgnnnccangacncccacagcaggncagccacangctggcacgcggnntccccgtgtctgtcacaacagactgctaatncgaggnncccagnccctgagcntcgtagntatnncnanccctttttnactgtngctactnacttttttntnctggttactnttccgttcacctnatcnnttatanangnnttnnnnttttttcaggttttttttctccagatgcctcngnttnttncctcctcacccctgccactcgaggacctccaggngnnntcacctganannnnccccgcttnntccctgggcnggtgcaaccnaaaacctgcaggtttnatccaggactccaggccctgagaaaggcagagctggctgagctcccccaggactccaggccctgagagaggcagagctggctgggctccggggccagggccctctgttgtnncaggtcccaagctggctttccagngcatcacagcccnaagccctgccccgtgggacagacccaggcacctgtgcctcagccaccctgctccgccctcactgtgtgtggcaacccttaccacaactgtctccatgggcaggttcaggtttcancctcgctccccagaggctcacgctcggact

SEQ ID NO: 709828 - DNA, 400 bp, Homo sapiens
ccgcttgttctttagagatattttttgcttatacaaatataaagaagcaaacgacagtcagctgtgatcctgcctgagacacccatctctgtgtagcctgttgacttccagtgacctggtggcttatgcctgtaatcccagcactttgggaggctgaggtgggagaatcacttgagccccaggagcttgagaccagcctgggaaacatggcaaaaccccatctctacaaaaaatataaaaattagccaggagtagtggcttgcacctctggtcccagctactggggaggctgaggtgggaggatcacctgggcccaggaaatggaggctgcagtgagtcatgattgcgccactgcactccggcctgggcaacagagtgagactctgtctcaaaaaaaaaa

SEQ ID NO: 709829 - DNA, 789 bp, Homo sapiens
agcgggtacgtgtgttaaaattcgtaaaaatgtataccaagaaacatatccattttggccgggcgtcgtggcttatcgtcctgtaatcccaagcactttgggaggccgaggacgggtggatcacgaggtcatgaagttcaagaccatgcctggtcaagaaggaatgactgggactagagtttgtgcaggctcctatttaccaagaaagtgaacatagaagttggacgaccgctgtcaatcttgcctggacagcaggaaacagtaacacgcgcttcggaatagcagccagagtatcagattgaccctgactgcctgcgttctcggctaaagtgaacaagctccagcctgataggtttaggatacactcagactctaaagccaggtgattaaactgacgactgtcagctcttctggatggcgaagaacgtcgatgctggtggcctacaagcttggtctaggactggcaatgtcaagcatacatgaatactgtacaatctgtttaactggtaaactgattttgcagcatagctaccttcagaatttaggtgtaatcttggaacgtggtatgtcgtgggatgcaagtattgctaagatatgttagccctccaggcttaaagtgattcagctttaagatgttaccccttccagaggtacagaagaaaacctatttccaaaaacaggtgcctttcagtggatagactccggggagaacttggtggcccctttgcagatgccaggttttctttgatctagaaaatggcttgcaggttggaaagcggataaatactg

SEQ ID NO: 709830 - DNA, 106 bp, Homo sapiens
tctgcacatccgcctgcttggagtggcgtctccaggcctgagtccaggatgcttgccgctgtgcaggataaggaagagggcgtggactgcgcagtgcctcacgccc

SEQ ID NO: 709831 - DNA, 343 bp, Homo sapiens
aactcctgaccttgtgatctgcccacctcagcctaggagttaagagaccagcctgggcaacatagactccacacaaaaaatttttttaattagctgggtgtggtggcatgcacctatagtcccagccacatgggaggctaaggtgaaaggatcatttgagcccaggaagatttaaagcggcagttgttgtggtgattgtgcccccgcgctttaagcttgggcaagaaggtaaacctgttttttgccaacaacgacacaaaccacccaaaggcgctatttctttttggtggggacaccagccataaagggggtgtctcctctgccccacaaagggcgacaaatt

SEQ ID NO: 709832 - DNA, 240 bp, Homo sapiens
caaagtaaaagtaaagatgcaggaaaaatgaatggctgggtatacattacttcatgtatatcaagcacagcagtaaaacaaaaacccacgtatttaacttttttttaggattttggctttggtgattttttttttttggatactggcctaacatgcttgtgctgtaaaattagttaccaggaaaatacctggagaggagggctagcttggttaaaggtcttatgaaatttccaggaacaa

SEQ ID NO: 709833 - DNA, 300 bp, Homo sapiens
gcaatggcacgatctcggctcaccgcaacctccgcctcctgggtttaagcaattcttgtgcctcagcctcccgagtagctgggattacaagtgtgtgccaccactcccggctaatttttgtatttttggtagagactggttttggccatgttggtcaggctggtctcgaactcctggcctcaagagatctgcctgccttggcctcccaaagtgctgtgattatgggcatgagccaccatgcccagccatagagagctcttaaaagcccagcaggaaaccttctgttctcagtcctcagct

SEQ ID NO: 709834 - DNA, 123 bp, Homo sapiens
gaaccggcccggactacgtaaacactgtgtggttttgggcataggtccatttgcttagatgcattcagtggaacagctttgctaggttccatgtcattcaatttatcattttcactttgggct

SEQ ID NO: 709835 - DNA, 222 bp, Homo sapiens
aggatcccggtggacagcgacgtgcagatcatctggactttggtgttgacttctctcacgcacggacggcgtgggttcgggggttgccctcgtggccggagatcctgtcgcacgggtcacctccttctgccccagcttggtcacctccccaccggagtttatcagaaggttgttcctcagatccctgtgaagagtgttggtccccatgtggcaggggtcctc

SEQ ID NO: 709836 - DNA, 471 bp, Homo sapiens
ccttctggactgggaacaacctggcgtgagctccatacacttctttttcttttgctttttcttttttttttgccacggagtctcactctgtcacccaggttggagtgcagcggtgcaatctcagctcactgccacctccgcctccccggcccaagcgattctcccgcctcagcctcccgagtagccgggactacaggtgcccaccaccacacctggccaattttggtatttttattagagacgaggtctcaccatgttggccaggctggtctcgaactcctgaccccaggtgacccgcccgcctcggcctcccaaagcgctggaattgcaggagtgagccattgtgcccagcctcttttcttaataaattaacacataataataataaccgcggcagacagcttcactgttcatcgctagtccctagtacccatcacaaagacgggcacatattcggtgctcagtaaatat

SEQ ID NO: 709837 - DNA, 846 bp, Homo sapiens
acaccacagataataagtcctcatcgatttagtaccgaaccactataatttttcatataacccatcatgccacagttctaaattagcgtgtacctagcatcggaacagtagtgaaataaatgatttacaaagagatatttacatccatctggtttacacttaatatgcacaacgcaccacgaccttcccagggtgacaccgtcttagtctgcagcggggctggtactaatcaacgcgggcgctgtccccgcacgcagtctgggctggaactggagtctgacttctagcttgatcagagctcctgatgtatgttttcagaaatggcttgaagtgttgtgtcaaaatctgatcatccatatgctaggctacccatatgtattacaactaccgaactttctaaagaaaaaacgagagatatgtaattaaactccttcccttccgtactctctaccccaaaatactgtatctacacctatatctatacctttaacagtcattctccctattgtgattctttctcatttttcttccttattctaaatgtaaccctctttactcttctttcctcttaagtaaaattttattatatctttctgtcttctgattattgtttccctcccacaagttctgttacgtatgttaacccttttacgttttctttgtttgtctttatcgcccaccagcattccacctttattcacctatctgtcagtcgctcgcctcatacaccctccccatactttgccaattatattaattgtcctacattgacgtcccgattaagattttaatgacattaatactaacgcagaaataatcgcttagtcattataatatacatataat

SEQ ID NO: 709838 - DNA, 552 bp, Homo sapiens
cgcgagcgcgatgccgctgccgcccgcgccgagcgaaatgtcagacagcaccagttccaccgggccgtgctcggccagccagttcaacgcggcgtcgccgtcgggcactgcatcggcccgcgcgccgagcgccgcgaactggctgaccaccgtgtcgcgcacctcggcatcgtcgtcgaccaccagcacgcgcgcgcccgggcgcaccgccgcaggcaggccgcgcacggcgtcaggccggccggccggcgccgcgcaggccggcaaccgaagctcgacgcgcgtgccgcggccgacctcgctgtgaatccgcagatcgccgccgctttgccgtacgaacccgtacacgctgctgagcccgagcccgctgccttcgccggccgccttggtggtgaagaacggttcgatcaccttgtcgagcagcacgggcgcgatgccgcacccggtatccgtcacgctcagcacgatcgtcgacgggccgcccgatgcgtccggcgccggctcgcgtcgcgcggacagcgtgagcgtcccgccttccggcatcgcggccgc

SEQ ID NO: 709839 - DNA, 308 bp, Homo sapiens
acggcttctctaggagtgatatgaagcagcgccagggtcctttgagtttgcagactgtgagtcgtgagtgttctggcagagcagtttttgttgattttactgtatgaggttataggtgctaagcatcgtgaggtatctcatgccagttcgggtcttagctattgtgtgttcagatatgttaaagccagttctcgtagttcctgtgtctgtgtcagctggggtttttacaactccggtgagttttctgctttatcagcggagggggtgatctacaagtattctttacgcctggttctattgacttgggt

SEQ ID NO: 709840 - DNA, 794 bp, Homo sapiens
gacgggggcggacgtggccgatgtcccaccccctctgcctctcaaaggcagcgtgcagattacgggaattgatggaaaaccaggacttgctgggctcgccaacgacctccaactccccctccgaaccagaggcatctggccactcctatgcccagcaaaaactccgcctcctccccctccaaagacaattcgcaagcagaccatcggtggactctgggatcgtgcagtgacatcgcagggtcttctggaaagagtgtgtgccctccccaatctccatgccctctccttctgtgtccccctgagtctgctgtttacctcatgtgggcctgtgatgtcaccatttcgtgcgactgttttcttcacaaggagttcagttctcaccatggagtgagtggcctttagcgtcatggcgcacaggtgggtctgggcaggtagatcatgggtccgggatgtgccatcgtagttaccagagtggggggcctctgagtgttgtctggctcttgaagaagagtctgagtctgtgcccaaaacatctttctgtttgtgtggccaagtgatgtgcatttggaaagagctcaattgtctgagctcagccaagtaggagaggctaggcatcactctgtggaagctgtgtagtgatgatggttaagaattctcctcactgtcatgcgatgttgtatccagccctcttgttccagccggggggtggcaccgtaggtgaggtgggtgtcacacttacatcaaaccatggagtttaacctcccaggggagtctggattcccggtattgaacag

SEQ ID NO: 709841 - DNA, 202 bp, Homo sapiens
gcggccgcctactactactactgctcgaattcaagcttctaacgatgtacggggacatggtggcgggcacctgtaatcctagctacttgagaggctggggcaggagaatcatcacttgaatctgggaggcagaggttgcagtgagctgagatcacgccattgctctccagtctgggcaacaagggatgctccgtcccaaaaa

SEQ ID NO: 709842 - DNA, 160 bp, Homo sapiens
agcggggaagagagagagagggtacatgcaagcccgatacatgcaagacatgcacgcccggtacatgcaagagtatgggcccccgagtacatgcaagttattttgaatgatgagccttcgtgcccccccttcccccttttttgcccccggtacatgcaag

SEQ ID NO: 709843 - DNA, 361 bp, Homo sapiens
agcatccggccgagagcctcgctccacacctccatttgctggagcacaaggtcttttgcctgaacacttcctttgacctgatgcccctgtggtgctgccccacagctgctcctgctgctgctgcagccccagctaaggttgaagccaaggaagagctcgaggagtcggacgaggatatgggatttggtctctttgactaatcaccaaaaagcaaccaacttagccagttttatttgcaaaacagggaaataatcgcttactcctctacaagataacccccactgaaaaagattactttgcctgccctgtgaaccatgtgactctagaacaaagccaagaaatttaaggggggcccatacat

SEQ ID NO: 709844 - DNA, 529 bp, Homo sapiens
taatgcctgctatacatcattagggacgcttcgatctgcgctattgtgctgatcagtttttggagagccttcactgggttattcctcttgattatatcaacgagatttctttggattgtccggattggagtggagcaccgatacaggccaacatatcacggagaatgactattatactccaactggggagttccgtgtggaccgtgaaggttctccagtgctgttcaactgcctcatgtactacatgtgttactattgctttggacgggctttacacagaagccaagcgtcctccaggctttgaccgtctccgacatgcttagattgtgaagtaaagactttgagcttaatgtcctggaggaagcttataccaccgaacattggctgctcttgatattctatgtatagtaccccgataatctatgcttgtcctcgacgtgcctctcacgtccagctctcatatgcttcgcgctgatctcttcacatgtatgacgtttaagattcctaaattttccttgttttatttgcc

SEQ ID NO: 709845 - DNA, 129 bp, Homo sapiens
gaaagcacagtcagtcagggaaatatttacactgagaccacgcaccccagccctttcccaacctgctctgtcacaggatgaactccagcctcattagcctggcattcaagaaccttccatcatattccc

SEQ ID NO: 709846 - DNA, 313 bp, Homo sapiens
ccccagagaggagaggacgagtgctgctggtgcatgcgagttttcttcgcagcagcatacatgtcaacatcactgggagagcggagcacgtgctgtgcctttcgagaccgattcatctcttcccggcccttgaggctgtcagagcggcccatgcgaatctctgagcgtgaactgtcactctccagcaggtcctgaggaaagcttctggtcgagagtcgccgtgtcccaggttctggggcatgatactgctggttgctctcaaagagctgaatgatgttcctcacattgactggtttgacttccacaggggaca

SEQ ID NO: 709847 - DNA, 340 bp, Homo sapiens
ctttactgaaattttatttccccaatggtgttggaggggcaccagcaaaatccgtgcctttttttttggagtgtgtgaaagtccgtggtcctgagtatctcaccaaaatgtggcaatttatgtgatgttctgattaagaccattgggacaaaaacaaattcaaatgtcctcaaaaataatgcattgtttagcaaagtgcattgaagttatgggaaatggatcccttaataatgaaccctttgaaaaacccctttgccccatgtcctcaggcccttttgagggctgtgtcatggggcatggtccctcaaatttgacccaataaattttttcaaatatttta

SEQ ID NO: 709848 - DNA, 136 bp, Homo sapiens
atgatagactaaacatgaatgcctctccgtgtcaatgagtaacatggtggcctgggagagagctttaggacaaaggtccattaatgtatagttttcccgcccaaataaataagcatacactatattatacagtatg

SEQ ID NO: 709849 - DNA, 779 bp, Homo sapiens
cagacccatttaggttcaacgagtggttctgccactcagtagcactgagcacacgtagagtccagatcttggtttccaatcaaaggaatcagggctccttggaaagatggctgattctaaggctggggcaggaaacatgcaagatgagcctggagcttctcgtagtgacaggaagtaaggaagcactcaagtgtgccccccacccccacacacccccaccattgatggagctatgtcagaggggcgcagagacaactgcaaggcttctaatggccaatgctggaacaatgacagcaaggaataaataaagtgatatttaattataacccaaagcatactacagctgttcatgatcccatactgacataaataaattgttgaataaattaataaatggagaagaaacaaaccttccaggcagaagaattccaaataatgtatgtagatgctgcacactgagagagataaagcatagctccccactcctaagtgtgggctacacatagtcactttctgctcaagagtacaggatggaaaaaacaggaaaaaaagagtaacattccaatcacctggcaccattcaggtgatcgaggtcctcatcaacagtcataaatgggccaggcacggtggtcatgcctgtcatcccagcactttgggaggcgaggcaagcagccacttgaggcaggagttcgagaatagcctggcaacatggtgaaacccgttctataaattaaaaaattagccgagtgtggacacactgtattaagtacttgggaatg

SEQ ID NO: 709850 - DNA, 251 bp, Homo sapiens
caccctcttgcagcaggcggcattacccccattttccatgattgagggctgaggcccatgtgcggggaagagcgcgctacgtatcaggcccagatccttatgcccttgtttcccccctcccaggcccatgagtcgtctccttggtactcaccggaaacaggttgaaagtcgcaggtaaggctgagcctatgatagtgctgggagatggaggatgaaaattcgggcacatgaggctttagggtagaaggcag

SEQ ID NO: 709851 - DNA, 871 bp, Homo sapiens
  misc_feature (55)..(55): n is a, c, g, or t
  misc_feature (64)..(66): n is a, c, g, or t
  misc_feature (73)..(73): n is a, c, g, or t
  misc_feature (83)..(83): n is a, c, g, or t
  misc_feature (87)..(87): n is a, c, g, or t
  misc_feature (89)..(90): n is a, c, g, or t
  misc_feature (98)..(98): n is a, c, g, or t
  misc_feature (102)..(102): n is a, c, g, or t
  misc_feature (104)..(104): n is a, c, g, or t
  misc_feature (155)..(155): n is a, c, g, or t
  misc_feature (207)..(207): n is a, c, g, or t
  misc_feature (260)..(261): n is a, c, g, or t
  misc_feature (263)..(264): n is a, c, g, or t
  misc_feature (267)..(267): n is a, c, g, or t
  misc_feature (272)..(272): n is a, c, g, or t
  misc_feature (312)..(313): n is a, c, g, or t
  misc_feature (316)..(316): n is a, c, g, or t
  misc_feature (323)..(323): n is a, c, g, or t
  misc_feature (329)..(329): n is a, c, g, or t
  misc_feature (332)..(332): n is a, c, g, or t
  misc_feature (354)..(354): n is a, c, g, or t
  misc_feature (363)..(363): n is a, c, g, or t
  misc_feature (460)..(460): n is a, c, g, or t
  misc_feature (462)..(462): n is a, c, g, or t
  misc_feature (694)..(694): n is a, c, g, or t
  misc_feature (764)..(765): n is a, c, g, or t
  misc_feature (804)..(804): n is a, c, g, or t
  misc_feature (808)..(808): n is a, c, g, or t
atgtatgaatgtgagaagaatgaaacactacattaacagataacaagacaaatcngacggtgannncggacanagcttttgtncaangnnggcttgcnggtngnggcagggttcagcgccatggggtggccacagaggacacacaggggtcagcngaggacatgtggggtccgtggccgcgaacgctgctgaggaaaggccccagancccctggtgtatacagtccccgaaagatgacggacgatgagtgctatgtgctnntnnggntgggnggtgagcaagccattccacaggggacgcacagcctcaggnnttnggccccncgggcngcnggcagtctttctccgagttttntctgccgcnctggaaagacccgccccaggctcaacctccagtcgtcagacagaaaccaagaccctctgtcttcaccctcatgaccaaagtcagccgcctgtccgancntcctgctccactccttgctgctggctagacacctggtgtttcaaggctaagacccacctggactcctacgtccacgttaatgattttggcagaaggagggcagcgtggagtcctgcagcacaaaggtgcggtccaagaacaggaagatgcttctgatcatgatcatttgtctgcagtggtcctgccagcacgtgttaatcttctttaaaaataaaacactatctagtgagtnttctctaaacggaaggatctgtgcctggacgtggtcttcacaggcctgacgcattgccttgtagagcatnngggagactttgtaagaacagagattttccacagcctggnaganctcctcgaggttgttcctgaaggaggtgctgctctgcacggcccgcaccgcctcgtgcagctt

SEQ ID NO: 709852 - DNA, 260 bp, Homo sapiens
ttcttttggctcaataatgacgtagctcaccattgcgtttttagcaatagcaattccctgcatgcagttcttcaatacactacactaatatagttttgtaaaaagaattaacattaaacttttggttgtgcaaataaccaaaaatttatatcattgttaggtaattgcacaactttgtacttgtcaggctaaaagacaagtcatgttatattgtaatagcttagtgcagcagataaaataagctagctgactacgtaatc

SEQ ID NO: 709853 - DNA, 325 bp, Homo sapiens
cccccccttttccgggttttttaaaagggggattaaaaatgttttgcccgcccctttgaatgttttggggggggggttgaaaccttttgggttttggggcctttaattgtggagacccctggggggggggtttttggaaaaactttttgtttgttcttgaattaaaagccattttgggggggttttggttttttttggctttttaatttttcgccccccctcccccctggttttttggcccggggttttcccctggctttcccgaccggggtttggttttgggccccttccccccttttggggattaaatttttttaagggttta

SEQ ID NO: 709854 - DNA, 247 bp, Homo sapiens
gcagatcaggtgctggcagtcttatgtctggtgaaggactgacttttcataaaggcttcctcctagctgtgtctccgcatggtgagacggaaaaaacaagcgtccctcttgtgtctctctgctctctctgtctatcctgtgtctctctcccttcggtctgcacctacagtctaaatcactctggtctggcgtactcctctagagatcggacccgccggtcatgcaaggctcgggcactggcgcgtcg

SEQ ID NO: 709855 - DNA, 446 bp, Homo sapiens
tgcctaagatatctagaatttctgaaagagaatgctttgcagggtaccaggcttcctgttacatttggagaggcaggctcagtagcttcagaagagtaaaatgttttgtttacaccagaccagagctcagatctcagctctgaaagatatgggctgaaacagctaccttggaagtcacttttcagtcaaaggatgacattctggcagtctgctgcactcaagggtccatacttaggtttagaagtgactactaaagctgtaggtgcagccaaggatgggatgtggagtgagggtcttggctgacctattgatcacaaatagagggtaacgctcagcagtaaaaccctgaaatacatcaagatgtctgatttggtcatagtgtcagaattggagaaaagctaaaaactccaaggaactaaactactgtcacagtccaaaaaaaaaaa

SEQ ID NO: 709856 - DNA, 571 bp, Homo sapiens
aagtgtcactttcgaatgatcggtcggccgtgtgtaacccctgcgcccccggtaccgggggtgtctcatcaccagctatttattagcttcctgctcgtccctccgcgccccgccctggcagccccacatgttgtacatatcatcttccacccactgagaggggactacaaagcacgtggttgtttcccaccttattaaagccacacagccgggcgtgaaaaaagcccgggcggcaaccaccctaaaagcccgccccctttcgggggcaccacgttggcgaatacctcctgagaggtatgcaggagtgtcttataagcccgctccttgcccccatcggggatccccccttgtctttctgaaaaatacccaggtttacctggttggcataggtcggcgcaacaactctgtcagttgcctgtactcattcctggggagcgtgggccccccgggagaaaatcctccgtctgcggccccccgggctagccgggtaagtagtggccgccgggtggggttcccccccttcccccccccctgggcaccaacaagaggaaaccccccccccaaagaaaaa

SEQ ID NO: 709857 - DNA, 413 bp, Homo sapiens
tttcgaatcgagctcgctaccgattattcgtgttccctgcggtgtcttctgttaaaccagcctgcaatacgagaatgggccgtaaggagagagagtccctgtccgcagcatggcctggaatggtcgcccgcgcatgggttccgtctagaagagatatccttatggaggatctggaacatggcacggaaggagaatcagaacacgctctttgagctacagggtgcgaggaagtctctggaagtaccacgtggagattctgcggacggtgaaggaggaacgctgagaagccatagagagtaggccaaagagcagcaccagaagctgtgggaagagcagctggctgctgccaaggcccaacaggagcaggagctggcggctgatgccttcaaggagctggatgatgacatggacgg

SEQ ID NO: 709858 - DNA, 938 bp, Homo sapiens
  misc_feature (695)..(695): n is a, c, g, or t
gaccttgcaggcatgtcctgtatcatgtcccagagtgaaaatccgtattgcctttaggtttctcatgaaaacttggagcatgcttatgcatggtgtgggtcacgatgaccatgtctctctgccgaattgatctggctgcatctccctgtggcgaggactcactctgtcagagttctggcccggatagctctggtgtccgtcaatgagctctcactactaggaccacattgtctgaactggagagagtccctaaggagactccaataataccgttgtgggttaatctgggtagacgacaaagaatccctttcgcatgcacccgaagggaagagcactggagggatcagggcaagtgggtccttcggactagaaaagtcctgggggtcttgcatttttgcgcgctcttcaaatttcgtcgtatcgtgggtctagcaagacactcggacaaggtctgtgcacggtcgcagggctctcccaggaatctgcttcggagaggtacattcaatgccagagacacctgtgaagcatcgagtccgggtgtatccaggataatttcccactgtccttatcctactaagtctagcacctggcgtacgggaccttcgccagacgactacgtttctacaaggctgtgtcgctcgcctttgtagttacgcacatgatccatcacacggactcataagttgagctcttgncttttcgagtaagtcctaaataatgcgctctggacggttcccagtgactttacctgaagtaacccaatgtgaggcgttccaaggtcgacatgtgtcctccgtatgtggacagtgctctgaagcccttaattcaagcttaggaagcggacccacggataagtccacaagcacataatcggggggggtgcaaggactcaggaagaccctaaggctaacgggtcgggtttaaccggggcaaacgca

SEQ ID NO: 709859 - DNA, 168 bp, Homo sapiens
agaaaaaaaatttaaacattagcaggtatggtggcatgcgcccatagtcccagctactcaggaagataagaagggaggatcatttgagccaggagtttgaggctgcagtgagctgtgaccacgccactgcagtccagcctggatgatacagcaaaatcgtgtcgaatg

SEQ ID NO: 709860 - DNA, 501 bp, Homo sapiens
ttacgacgcccagacggagtaatcccagtccccgtgcacagcaacccttgccaaagtcatctgctgctccccgtggggagaggactgcggctcagtactagtcgcacagtgccaccagggagaagagaagtcatgagatgcagcgctcgcctgcctgtgtccaataccccatcttctcgctatgccctttagaagcctgccagtgtctatctcatgtaggcgtctatggatactctcttatcttgtgatcttcttcttatcgtctatgcgtctcgccctccatttgtgggttctatacagaaactgcagtttggagtgcagaaggtccgtgcactgtcatcggatgcgaagttgtctccgtgcaggggccctatcctggcatttcatcttcctacgtcgagagaggtcctgatctatggtgatgcaatctagtgttgagcctcacctgtcggtttccatgagcccggggctattttcgtcatctcagttttgctgggcccc

SEQ ID NO: 709861 - DNA, 373 bp, Homo sapiens
aacaacagagcagagaacttgcgaaatagccactcatggacgagtggaatcctgataaaaataaaaaacttgggtcacaacacaggcctctggccaggcacggtggctcatgcctgtaatccagcactttgggaagccaaggtgggtgaatcacttgaggtcaggagttcaagaccagcctggccaacacagtgaacacttgtctctattaaaaatacaaaaaattagttgggcatggtgatgcacacctgtaatcccagctactcaggaggctgaggcaggcgaatcacctgaattgaggaggcaccggttgtagtgagccatgatcacgcaactgcactccagcctgtgcgacagagcacgactccatctc

SEQ ID NO: 709862 - DNA, 143 bp, Homo sapiens
gagtacagctggggtaacgtgcactgtatgacgtatgtagcatgatgttaactttgctgtggtctaaacgtgtttacgctgtcaacgccggatgcctaagttgaccaaatctgtttattgaagtgttctgagctgtatcttga

SEQ ID NO: 709863 - DNA, 268 bp, Homo sapiens
acgtgtgtcaccagtgaatatctattggcaatactttaatcatgcccatacttcatttaacaagtataatcattagtttgtttcaatcaacaacatctcatgagctcatcacgagtcattataacctgtcattttggaaataactgggttcatgtttcaacagcatgtgtaatctcacacatatttcctagcaagaaaatcagactctgtaattagacctaatgacaagtgtaattcatgctgtagatttgtagactcaggtggtgtg

SEQ ID NO: 709864 - DNA, 148 bp, Homo sapiens
tctgtacagtcgcgatctcactctagctcgcgttgcgctcaggcgcgcacttgtcaggtagatgcagcgtcgtgagtctgatgtagctctcgtgccgtgaatctggcgcgcgaaaggacccctgtccaaatgcacggagcgccgccag

SEQ ID NO: 709865 - DNA, 431 bp, Homo sapiens
tttcactctagaggtcccctggccaggctctcttacctccacattggctattagctctgggccctagcactgggcctggttggaaactggacaatggaaatggatggagggggcaagggaggaaaagctggcggatcagttgtatctctcccttaaaataaagcggctccttgtgggctcctcttagtccttcctgggtgagcagctctgctcagactttaggcctatcagggctgaaagcaggaaggctagagggggagggagtcacgattctccaaggggtagtttagcttcaagggcggtatgtgtccggcaagtccggtcagtgtacactgagctcccatgatgtgcaagatgctggcagagggggtgggtgccctgtcagccaccaaagctggccatccccaacattgccatcccagtttttggga

SEQ ID NO: 709866 - DNA, 415 bp, Homo sapiens
  misc_feature (222)..(222): n is a, c, g, or t
ttagtatacctcatcagtgtcattcctttgtgtgatttcttaatgctgtatttgttcatctcaaacctagatgtatacagctctgagttataaatcaactgtataccgtgcatcacgtgtcattcctgttgtgtgatttcttacatgctcatatttcgttcatcgtcaacacctacgatgtatacacgctctgacgttataaactggttataacagctcctngttactcattatttagttatttacattcaaacaagcttttagacaaatggtacgaggtaaccaattcttgtcatggtgaaatctgattgagtaaccaagcagttttactactctggtgctgcttcataacaaaaatgaaaagctgcatgcatctacaggaggcacagattgcagtggaggcacagattgcagt

SEQ ID NO: 709867 - DNA, 819 bp, Homo sapiens
ggttggatgattgatgagaacattcgcccaacctttaaagaactagccaatgagttcaccaggatggcccgagacccaccacggtatctggtcataaagagagagagtgggcctggaatagcccctgggccagagccccatggtctgacaaaccaagaagctcagcaggacagtcagcagctggcagccagcacactcagacctagacctcagccttggcacagccagaggaggcacaacctggccaaaccaccacacttgggctccgcccgtcagcctaccagtatggaacactataatcggccacgtgggagccagagccttattcaagtccatcatctggatacatgcccatgaaccacagggtaatctatggggagtctatgccaggagatctgcagattctctggagacgcagatgaacggtgcaccaccgatccagtctcatctacacaccaatgccacggggatgcctggcatcagagtcatcagaggggccatgtacacaggctctgcggctgagctccaggagcaacagtgtccatgtgtagaagccggagccaggagccggagcccacggacaacgcggagatagcgccatacacatacccagcgccacagtctggatgactcctgataaccccaatctccccaaaccgggcatcagaggacagaggatgtcaaaaggaacatagtcaatggccacgaatccaccagcctcgaagggtacatccccttccttcgccgggacaggcacccactttctatcgatggggtctcagtcctggtcctgagtaatgaagaaagaggatcagactg

SEQ ID NO: 709868 - DNA, 420 bp, Homo sapiens
  misc_feature (299)..(299): n is a, c, g, or t
atattattaaggaccatctaacacgagggtgtatacgtcctgcaatactacgagtaatatcaacctcttggcctctgaatatgaggaagaatatcacagggtgggtgtacacctcgtgctctattatgcggagtcatatctgtctattatggggagtaatatcactctctccctttcaggatattaataacaatttcacaggctgggtgaacacagccggcaatgctgaaattattatcaacctctccccatcttcccctcctggctcttaggacccccatcgcaggggctgaggacancgcagaggcggggactgagtgccagcccctcttccctgagccccttcgtcagggctgagagaattttgagcgctagccgtctctcgatcgctggctaataaagaactcctgaattagtaaa

SEQ ID NO: 709869 - DNA, 350 bp, Homo sapiens
  misc_feature (64)..(64): n is a, c, g, or t
  misc_feature (269)..(269): n is a, c, g, or t
  misc_feature (285)..(285): n is a, c, g, or t
  misc_feature (334)..(334): n is a, c, g, or t
  misc_feature (343)..(343): n is a, c, g, or t
gttgatgccaagttgaagattcctagtctctggatccaaatcagagggccttctctacgtccantcatccagaggtggcccctttcagaggtggcaccttgacgagggtctttttagagctcaaggatgggtcagcagattcctgtgttcaagctcagtgggggaaaacggtggatgaagtgaaaaaggagtagagacgacccagaaagacccagcttgcttctaagtccatccttccctcatctctaccatatggccacttgggggtngttgcccatctcagtnacagacactccttgcaacccaattttccaaccaccaagttgggatgatnggtaatgtnccaacaa

SEQ ID NO: 709870 - DNA, 129 bp, Homo sapiens
gcacatgcatgcacttgccatgccctgcccttgcttggacccgctccggcgacgctccccgctcccctgtcatttcatcgcggacgtgtgctggcctgtggggttggggggctgggcctctcaccggtg

SEQ ID NO: 709871 - DNA, 568 bp, Homo sapiens
ccacgcgttcgcggacgcgtgggttacggtttgtatacggatatgaggtaactcaccatcacaaaaatgaccaaaaaacgtttctgaatgttttaaacactttagatactgtctgatatatttatgacaggattatagtcattcgttcggtattgcttcgttttaacaacatatcctttgcttattttccttataacgagttacaaacacattcattcttaaggaatacatgtccgtcttagctttactctcagtcttgagtcttcattattccacactttcgtaagcttaccttgttcagttcataccaggcctgccttacacaacagcttctggcataccagacctaacgcaacatggcctgtagtccgtaaccagtaccaacctgcaccagtaacgtacacctgacgcacacacttatggccccacctctctccttaaccatatctatccacttatgacactttctaccgcttacacacgggggcactactcaccttcgggcgcgacaaacgcgcaaacatgccactttgggacctcttcttttgcaacaccacatctcttaaac

SEQ ID NO: 709872 - DNA, 921 bp, Homo sapiens
  misc_feature (649)..(649): n is a, c, g, or t
  misc_feature (651)..(652): n is a, c, g, or t
  misc_feature (662)..(662): n is a, c, g, or t
  misc_feature (664)..(664): n is a, c, g, or t
  misc_feature (666)..(666): n is a, c, g, or t
  misc_feature (669)..(670): n is a, c, g, or t
  misc_feature (682)..(683): n is a, c, g, or t
  misc_feature (699)..(699): n is a, c, g, or t
  misc_feature (710)..(710): n is a, c, g, or t
  misc_feature (713)..(713): n is a, c, g, or t
  misc_feature (740)..(740): n is a, c, g, or t
  misc_feature (749)..(750): n is a, c, g, or t
  misc_feature (753)..(753): n is a, c, g, or t
  misc_feature (756)..(756): n is a, c, g, or t
  misc_feature (819)..(820): n is a, c, g, or t
  misc_feature (825)..(825): n is a, c, g, or t
  misc_feature (827)..(827): n is a, c, g, or t
gggcctaatagacctacagggagcgcaccccaatggccaaacgctaggcgaaaggcccttcccagtatcaggcaccgcaccgctaggtcccacgtggcgcccctgccatgggcttccccaaagagcacagtgacctggagggggagctcaaacctaggggccccgaatgtacaagaatggccgtccaaggagcctggtcaatatcgcgcgctccatgcctcgccgtcaagccgtctctaacatagacgccaggaccttgtgagcatcttctgcccttgaggcctgctccctaaatgagtagggcttacacgagggactctagcccttgacgtgtgaaaagcggagctatcaaggaacagagttatgtggaagccaccatcgggtcttccctagcctcaggcagagaagggcaggaaggagagcctggcttgcatgggctggtgtgctagaggactcgacctagaagaggaccagtcctagcctggaccacggcagattctgtgccccatgcctgtccagcctgggcagcaaggctgccaaggccagagtggcacaggccaggagctcttcaggcctccctatctctgtctgctctcacccttggccgtgctctcatccccagggggtcaccagcacacgcaccgggctntnntgcatgtacnantntanngacactagtttnnacttccttgtgaagantgatatactanttnttgttaagcgtgtactgtatttatgtngtgaggagnntgnctngcttgcagtgcgcgtgcacgtggagagctggtgcccggagattggacggcctgatgctccctnncgtancntggtccagggaagctggccgagggtcctggctcatgaggggcatctgcccctcccccaacccccacccacactttaaccagctggttgaaatag

SEQ ID NO: 709873 - DNA, 196 bp, Homo sapiens
tgatagtctagaattatacagtacggtagcattaggaatgccatatgcgataagaatgggtacaatgaggagtagccataggcggccatgacgttcaggtaaaagcaggcgggtatacggttactggcgagtagagcagctactgtctaggccaggcccctatggcactccgacctacggaatttaggggggctat

SEQ ID NO: 709874 - DNA, 449 bp, Homo sapiens
  misc_feature (8)..(8): n is a, c, g, or t
  misc_feature (40)..(40): n is a, c, g, or t
  misc_feature (74)..(74): n is a, c, g, or t
  misc_feature (79)..(79): n is a, c, g, or t
  misc_feature (119)..(119): n is a, c, g, or t
  misc_feature (131)..(131): n is a, c, g, or t
  misc_feature (142)..(142): n is a, c, g, or t
  misc_feature (157)..(157): n is a, c, g, or t
  misc_feature (185)..(185): n is a, c, g, or t
ccgtattnccatttacctcaatttctaggctaaaagagtncactggaataaaattttccaaatcaaaattcctnatagncttatttcccccagtagtctaggcattcctatgtgattantgtgtctctctnccactgttttntaagtcaaatggacntgagaagtattctgacattcatatggcntcccagatatattgctagtccagtcatagattggagtttgcatattgtaatgtaagtgtatgtccaacactattctaaatagtttatgactgaagtttaattaaataaaaggttgtaaaatgtgatgtgtatgtgtatatactgtatgtgtactttttaaaataggcctatgtcccgacccttttgatacaggtttgaacttgaaattacattatataaacatatactttattgttctaaataaagaattttatgcaccatcat

SEQ ID NO: 709875 - DNA, 449 bp, Homo sapiens
  misc_feature (355)..(355): n is a, c, g, or t
ctcttcccccttccatcggcaagcatagacttactcccttaagcccagacatctgttgagacctgacccctagtccttggttaccagtgtgtcaggccatttggactttcccgtgatgccccttagatggcccctgtccaaaaaacagtggttccctttttagattgtgggtcttcagaaaaattctgcccttttcctttcccttcctgaaaggcaggggcggcttgtgaaaaggtgtttaaccccctgcttaatgtgaaatgtccacccccccttttaactttccctgttcagagcctcaaatgaagacttccttggggtttataggggcctttttatttttgggaggcccctnaaaaagggagttttaaagttgttgtatactgtttacgattgtttgcccctgtcccgcccgaaaaaccctgattgtttatgggaaggttttttta

SEQ ID NO: 709876 - DNA, 131 bp, Homo sapiens
  misc_feature (86)..(86): n is a, c, g, or t
  misc_feature (89)..(89): n is a, c, g, or t
  misc_feature (128)..(128): n is a, c, g, or t
cccgccaacatgcttctccacttcggccgagggaacagctacaatggcttcgattagtcttttccctatacccaggggggcccacngantttgcacgtaagacgctaggacctacagagtttctctgnctt

SEQ ID NO: 709877 - DNA, 500 bp, Homo sapiens
gcacgggtctgagcagcatcatggtggcacgggtctgagctgcatcatggtggcacgggtctgagctgcatcatggtggcacctggcaaaagcaaactcgaaaccactctagaagaagcacatacgctcaaccgagctgcatgggactccgatacactcctttttagccttgtaagcactcagtacccactgtcctcccttcaagatgaccatctagccagtaaagtcccacatgggacagtagaacagggtcctgtgagtgagttacttaccacaatgggtcatgaaaccccactcgtcccacaaatggtgtacaccctgagaatcataacgaaactaaagagaatactaagcaactagcacaaagcggtgtggaaacaaggcaaagaagagctggtgacttgcatctgccttgctctttatgaactgtcctgaaacagtgagacccaggtaagaccaggcctgcacacactgctgaccatttcaccccagtcctgttg

SEQ ID NO: 709878 - DNA, 192 bp, Homo sapiens
cagtgaggatctccaggattctcgcacagaggatacccaagtgtattttcaccacctgacattggccgtgttgataggcctgttgaaggcccaaaagtccatcgtcagtgtgggctgcttgtggacatttgggggcacttctgggaaaatttctatagattatctcgggatgttgggttcaagtttcttctt

SEQ ID NO: 709879 - DNA, 308 bp, Homo sapiens
gcacgggtctgagcagcatcatggtggcacgggtctgagctgcatcatggtggcacgggtctgagctgcatcatggtggcacgggtctgagctgcatcatggtggcacgggtctgagctgcatcatggtgggaaaagattgaagaccctgtctatggtatctactatgtagaccacatcaacaggaagacacactatgagaacccggttctagaagccaaacggcagacgcagcgtgagctttctggctttacccctatccaatcactgtctgtcgttgcctaaagagctggccctgtgtcaggatct

SEQ ID NO: 709880 - DNA, 105 bp, Homo sapiens
ggaaccgtctgacctttcctgcccgccttcttcctggtcctcatcgccctccttccctccgcttcctttcctttccggacgaggtcaccgttccttcccttccct

SEQ ID NO: 709881 - DNA, 854 bp, Homo sapiens
agtcatcagcagttattatcgacaattttttataatataataaaacgtatgttggtacaagatcataattgactttacccagctggattgaaaggctccacagagggaagtgagagctatgaagaagatccctacttggtagttaaccctaacttcttgctcgaagattgagatagtgaaagaaactgaccagagctgaggaactgtggcacagaacctcgtggcctgtagcctggctggagctctgctacggacagaagtgtttctggaagtgatgctttcaggatttgccctcacaaacaacaatagatttgatggtcgctatctgtcacatatatcactaggtataatatcatctcttgactatacactacatcggtttgttcaccctgtccaacagcatcttaaatcccatcattgggtaatttatatatcattcccccatctgttaactagaaactaactaagacataaattatataacgtatgtatttttcttgtgaattctgtcgacttacattataatgatatattgtctgaaacaggatgaggagaagagaaaactcgcacctgataaccacataacacaatcgaataataccgtatcaaagcgtatacataaaaagataattgaacatgaacaatcgaaatatacaaattaaaaacagtttattaaaagttattgcgagccccatatatataagctgtcgcccgtttctaatcgcacttaacagacaaacttctactcgctcctaatctagtaatatgtaatatttaactaaatcaaagaactattggtatgattgcatttagtccacccataatactgatatactcctcctcatgtttatctc

SEQ ID NO: 709882 - DNA, 919 bp, Homo sapiens
atgcctgtgggggtgccctccagtcgtcctgggacccgagggcccccccccccgcccgtggtcactttggtcccgccacttcacagggcctggtttttgtgaccccccgcggccttgtgtaaccctcgtggcccaccacttcagagatcaatttcttcctccgttagagcgggcaatgtcctgcgctccctcttagaggcccctcttccacgtctccgctcacccatggtgccggcccacaccgctgctttccttcttggagagggctacccctacttctccgctatcatctcgcggcgcggctatcattgccggtgaggcatcagtcgggtccgtccctcctatccgccccgccgggttatccccacggcccaaattcgggttctgccccacccaaggggcccccactcggctcgctccctgccaacagccgcgcaactgcgctccggtgataggccacacacgcggcgctgcggacaaacaaatactggccgccaccctcctccccggagcagtacgaagaccttctgcgagcacgctggcaaacacctgcggggagtggcacgccgcctccgcgggtaaaaccccccgcggctcttctacgcgctggcccccaccagcgatgcgatttgtgcagagaatctttgacgcatgtcaggcggcaggtctgggctccgccccggattctttgggtgctctcccggctcttgccacccgcgcttcggcctcccgcccccggctttctctcctgaagtgcgggccagcaggaatgcgctgccgctcctggcgggcgccctcgggcatagtgcggaggctccctcccggctgccctgtcgtgccctccgtggcgccttaggagagggcgttcttggcgcccccggggctctgaaaaacagccccccccaacgccaacataaca

SEQ ID NO: 709883 - DNA, 162 bp, Homo sapiens
tctgaggatccccggtagcgcggacttatcggcataggccggagactacagctccgatttgagcctagcctgggaacctccgtgtgccgcggagcggccaagaaatagcgacaacaacaacaacagacaaaataataataataataataacaacaaaagtgg

SEQ ID NO: 709884 - DNA, 560 bp, Homo sapiens
  misc_feature (419)..(419): n is a, c, g, or t
  misc_feature (422)..(422): n is a, c, g, or t
  misc_feature (429)..(429): n is a, c, g, or t
  misc_feature (442)..(442): n is a, c, g, or t
  misc_feature (445)..(445): n is a, c, g, or t
  misc_feature (480)..(480): n is a, c, g, or t
  misc_feature (482)..(482): n is a, c, g, or t
  misc_feature (485)..(485): n is a, c, g, or t
  misc_feature (491)..(491): n is a, c, g, or t
  misc_feature (493)..(493): n is a, c, g, or t
  misc_feature (551)..(552): n is a, c, g, or t
caagtgaacaacacagcgaaacgaagtaccccctacacgagaaacacctatgacccccatgccgacagaaatgttcatgcgttcgatgagtgatagcgaacttgtgaatgtcctagcagccgcgcaagccgtggagcgttttacgcctgtagaaagcgagttgttgtttcgtcttaccgccctagtagaagactacgagcacgtatgtgaggcactggagcagcgcagcgatgagcagtgatgacaacggacaacgcaccagcaccagctaacccacacacgagagaaaaacccatgttccctatgaccgtcaccattaccgaccaggcccaattaaacgctgtttggcggtgcttaagccgccagcaggtgcagccccgcgcaacctgtgcttgacgatcaccggggtccgactcgantcnatatggntagctgttcctgnggnaaatggtatccgtcacattcacacactacaccgantnaantgtaantngggtgctaatggggactactactaattgggtggctatgccgtttcagcggacctgttnngcactgat

SEQ ID NO: 709885 - DNA, 1023 bp, Homo sapiens
gcagagagggacactaccttcgcatttcctggtggctgcggtcttctccctgtcttgctctgagcccccataacttagctttgttttggagtgttctgtctgggtgcctcgagtaccggaatctgtgaccgtcgtggtggatgccttctacgtggaggatggccgatctgcctgcgggttgacacagtcgctatacgaggtgatctagctaccgtagccacgattcgttgctggaggaactcgagagttgcggaggcgtattcatagtagacatcatcaaggtcccatccccgtggaatagacgatgtgcaagttcgctcgaaggttacttcttcaaggcccctgcagctggtgctcatggaatcaaggatgagtggagcctcgatctacgagccagccacggtgaaggagaactggatcgacccccgtgatgaggtccccgcaggagcacctaccatgcgcattccaaggagcagccattcatgctggagacagtcagggaggtacaaccgcgaaatggccggaggagctgctgctgagggcaaacgtcgaggacctgcgctgcgccatgcccaggtcctggctttggagcgagtgcaggtaccgccaggctctctcaaagaccaatctctcgatgtgcatcattctcaagccatcagaaaagttctccaagccatcgcagtgagcactaattgtagcctttccactgatggcgtggaggggccgatacccagtcgcactgcgcaagtgtgccttaggcccaatcaatatggccctaaacagcggagtaagcgaacaaattccgaggaaaacaggaaaacactgtaagtgtgacccaggaatccaagtcgggcagcgttaagtacctgaggaaaacaccggattggcgcaacaccgtggtaaaacaactgcttagtgcaagaaaagagggcagcaccacttatgactgccatagtataacacacacataaaagcacgacacatcacttcacgttctgatcgcatacctctttcctgttaaag

SEQ ID NO: 709886 - DNA, 418 bp, Homo sapiens
tcccctcggcaaccttaatatcgattgctcaaattcttgggccaggatgagcacagtggctcatgcctgtaatcccagcactctgcgaggccgaggtgggtagatcacttgaggtcaggagtttgagaccagccagaccgacatggtgaaaccctgtctctactaaaagtacaaaaattagccaggggtggtggcaggctcctagtaatcccagaactttgggaggccgaagggtggattatttgacatcaggaattcgagaacagccgtgccaacatggcgaaactccgtctctactaaaatacaaaaattagccaggtatggtggcatgcgcctgtagtcccagctacttgagaggctgagggagaatcgcttgaacccgggaggtagaatgcagtaagccaagattgcttcactg

SEQ ID NO: 709887 - DNA, 601 bp, Homo sapiens
gatttatcctgtgtataaaagacacggtgacacaccacgcacacgagagggttctcgtctctcagaggctctctttggccagcacttccctccacaaaagttcccgggagaagcttgagaaatgccccccgaatatggggtgtgagatatacaccgtgccaaagctgtggcgccaacgcgccaccaaagaagctttgcgtcccttacacgatgtgagaactcggtttctaacaccgccgaagctgctttccaccacgcgccggcaccctgtaacctcccgcgggtggcgcctcggggttggctcccactgagacccagagttctaatgggggaccgctccacgaagagaaccgcgcgttcatgcccagaccccttcagaccgcaggctccccagaagtgttggcccgcccgcggtcctcccagaccctcgggaggggcctgtaaaatggtgtgaaaagagacccagaatggcgcgcccccaactgacccctccagggaccaagagatttggaccagaatcccccggaccggtggcccgctgccccaccagaagccattagaaaccaaccctgctgggttaataaattgcctccattctcgt

SEQ ID NO: 709888 - DNA, 747 bp, Homo sapiens
aggaaaactatatttagtgggcaacaactatttttatgactgggatgggggagtatatacacgtatagcaatctgtacgcattgaacaacttggttcaacgatcggtggcgggcattcccagagcgtgccataatctgaccagaacaaggccgaactctgccttgcgagcaggctagcatcgatgaagcacaattcaacaaaggtgttctagtaaccgtattctccggtcattcatacacgcgatggcgaccttccgcagattacggacacgcacagcacatgatggcatatccctttaggaatcagatcacgaaaggaacacacgacaagaacaacgttcacggaccgcgtcggcggcagagcacaacaacgggcacggcgaacggcacgaaacagacacttggcgccactacacaactaagcggagcgttcaagacgatacctcactttcctggcttgacgccaaccccaagttgctgctttctcccgcggaatgaataccgacaaaggcagaagacccgtgtattaaggcaacattcaagggaaaacaatcacaaaggcgtcgccaagtggcctttgggcgaaattcccaggctttacccaacagattccccttgacacaggaatcggggaggtggcacgttcgcgtcgtggaacttggattgttagtcgatcggaacgggtggtcggttcagtcaaccgcaacgccacgacttggttcgaacggacacgtgcggcaacacaca

SEQ ID NO: 709889 - DNA, 316 bp, Homo sapiens
  misc_feature (13)..(13): n is a, c, g, or t
atctcgctttggnttgcccagcgagtgcagtggtgtgatccctgcttactgcaacctccgcctcccaggttcaaatgattctcctacttcagcctcctgagtagctgggattacaggcgtataccaccgtgcccagctaatttttgtatttttagtagagatgaatcttcaccatgttggccaggctggtctcaaacccctgacctccaatgatccacccgcctcagcctccccaagtgttgggattacaggtgtaagccaccgcgcccggccagtgtatagcttcttgagtataggttaggcagtggctccagta

SEQ ID NO: 709890 - DNA, 100 bp, Homo sapiens
tttgaattaaattaactgttttaattctaattaaaagggatataaataagtaccgtatataaacacttctctttctctcctccacaatggcacgtggatc

SEQ ID NO: 709891 - DNA, 1190 bp, Homo sapiens
gggcgaaatgagacagcaaacaccactcttcctaaaatgttcaaaagctgctcttcgcttcaccttggggcctttgcatttgggagctgttgtttcacatcaaagaatatgtgctgaatggaatcccagtattttgctgtcgtttaaagtattattcgtctggatcttcctcagttaacttccagacgctttctgagagaatgggggcaggagctctagccatctcgtcaaagtaaacgcagcggttcggctgtagcgaagactatgaaagaaggatagtggcagtcgccattacatgaacagaacggatcttacctatcagaagtctatttggagtcagtctccaagaacttgaacggcaggtgctcaccgagcaatgggataacaagcagtagtgtggaatatacgtggaatatctgacatcagcgatgtatttacccaggaaggtcttgaccagcgggtgactcggtaacgtgcacggtggctggaacacaacgtgtccgagtgaagctcgagaggtggcagtgcccgggagaaaacatgagggacaaggacgggctcgattgtcgggctcaagacaggagcagactgattgaaaccgtgggacatcgaaaggcagacagccctcaagagagctctggatagaagccaattaagacggaatagccgtggaccttagaatcccttattcaagcactacatcttcacagcgactaggccacgcaatatagcctagtgccatccgcacgaggtaaagtttcactacagaactaaaatgatagcagaaggtatgaccctgaaagaacacgactaaggtggccatcccgatgatcatacaacaataggcgaggtctttacaagaaaaacggttagcatcgagaccaatggactggtgcacagaaaattcgcaaaccatgcaaatggtccgcaggccattcataggaccccccgagacgaatagggcgcgcctaacccctgcacttaaacaaaatgcacaatgccaggggacctagcaaagagcgacctcaaagggccaggagtgcacgagggagacaaacaacgtacatccaacgaacacacaaatgtcacgacagcaagacaacaaacccagtacagcatgaaaatgcacaaaacgacaatgaacaaccgacagaagtgaccacacgaacaaataccctagataccgagac

SEQ ID NO: 709892 - DNA, 316 bp, Homo sapiens
aggtataagatccgatcagttcatggtggtgttgggtacggaatgtggtggtatgggtgttatgttggggttgtgttcggtggtgttgggtttgtgtacgtggttgttgtggtaatggtgtaaggtttactcttgttcagtgggtgttggggttggggtcacgtggtggtagtggtgattggtgttgtggatggggtctgtgttgcggtgggttgttggggttgggggtcaccgtagtggtagtggtgaatggtgtcgaagtaggggtcttggttgcggtgggttgttggggtcggggtcacaatggcacgtagat

SEQ ID NO: 709893 - DNA, 482 bp, Homo sapiens
gatggatgaatggaataggtggaatagaattgaatggagtggagtggagtgaatggaatggaatggtaattggaagaatggaattgaatggagtgagtgagtgaaggattgaaggaagtggcagaagcgcaatgcgaattggatggactgcggtgcaatggagtgaagtgcaatgcaatgcaatgcagtggcgtgcagtggaatgcaatggaatggaatgcaatggattcgaatggaatggattcgaaacgaatggactgcaatggaatggactcaaatggaatctactagaacggaatgaattcgtatggaatggaatggaatggactggaatggaattgactctaatggaatggatcagaatggaatggactagaaacgaacgaactcgaatggaacggactcaaatggaatggaattgaatggaatggacttgcaaggaatggactcaaaaggaatagactcgaatggcatgaaatcaa

SEQ ID NO: 709894 - DNA, 524 bp, Homo sapiens
ggcccctacccacatcctgccaccacccgaggggaccgcaagcaaaagaagagagacagaacaagtcggcggctctgaggtaccgcagcggaagcgggcagagggtgaggcctggagggcgagtgccaggggctggaggcacggaatcgcgagctgaaggatcgggcagagtccgtggagcgcgagatccagtacgctcaagggacctgctcatcgaggtttacaaggcccggagccagaggacccgtagctgctagaagggcaggggtgtggcttctagcgggctggtcttcagctctggcagccttcatcccacctgacatctaccattacattccaaaccccatctcggcacgggtgcagtggcttaatgcattgtcaatcaccagccaacttttcggcgaagcgcccaaagggcccacgcgcaccgggcattctgccttcgagcgccaccgaggtcaataccagcctgggcaacatagtaagagcctgtctctattaaaacacacacactcaacccttct

SEQ ID NO: 709895 - DNA, 455 bp, Homo sapiens
gccggttcagagggcaaaacacgatatcttactagacacatttatatctcagtgtagtgtaaatattagactagcaaatctaaatgtttaaatttagggaggtttttttttttttggctcaaagggttaatttaataacaacgggtgaaaaacaagcatccggtattaagcaaccaataaattaataatttccccaggccatcccattaatacccatccctttagattctccaaaaccaaaaagttaaaatctttaaaagagcaatacttacttctcatatccaggtccataatctagtgctgaactatgtgtcctatggagtgccacctctgggtctgctgtaaagaagggcaaaccaagagcgactcgtgaatgggacaaattggcaatgtccctcccgggaggttacaaaaaccgttccatatatcatgacgcacctctttccaaataaagc

SEQ ID NO: 709896 - DNA, 360 bp, Homo sapiens
ccggtaggactggggagccagactgtactcggtagctgaactggaccagtctggtaagggacgttggagctaaagtatagcagacaggtcgagctgggtctgacatgttacgggctgtacaatctgtgattgtggtccaggttggagctgtgtccttaggcaatgtctgaacagctcatggtgcttgagcctgggtcccctgggaagagaccagacaaagggatcgggtcagacaaagggatgacgaaccgcattcatcagaaaggtggataaagcctgggtctggtcgaggtacgttgagcagatctagcaggcgaggtttcaggcgttacggtgagacacaggtatgtatttttgggt

SEQ ID NO: 709897 - DNA, 164 bp, Homo sapiens
ataataatctgtgatgatcttttgtatttctgtggtatcagttgtaatgtcaccttttcatttctgattgtgctcatgtgaatctccttggttcttaggtaaacttgctagctatcaatttaattatccttcaagaccactgttgattcattgctcctctgggg

SEQ ID NO: 709898 - DNA, 1136 bp, Homo sapiens
cttgggaccaccgctccctcagctccgagtccatggctgatgtgctgagcatgagcgggcggaggacccgggcgcgggcgccgggacgcacgctggggcatacctggagtggcggcggcgaggcgagagttcggcatagcgcggtgagctgtggcaacgggaagctcctgccagtggctgatcgaccagatcgacatgcggcaagtacccctggtgctggtgtgggaggaactgaggcattcgaagacgcatcttcctgcatccccttgtgaacgcaccgctggtcaagcaggactacaaccgcgaggaggacgccgcgctcttcaagggcatttggtgcacttgtttacacggaacagttccgatgaagggcatcgcactcacgcctggaccacatcccaccgtggcaaggaccgcggacctgctgggattgcgcctattgaaacaaggacgcaactgacctttgagggaaacctgggttgagccgtggacgacccacgtcattggtcacgattcgttccagacccccggttacgccacaggtgctacccagggcagttgctaaccccttgagggggcatgcccaacagacacaagtgaagtcccgaatgcgcaagccattcgaccacgtggcaagggaaacccagccagacattgtttcgcaatggaaggccacaacccgcattgactaacgccgagtgcaagcacaaacgcccccttttagccccgtatatacggattcccgcccaaggatgcccaaagtcgaagggattcccaacgacaaccgtttagcaagatcgaattggcgccaacgcccgtacctccgggacccgggaagaggtcctaggccagcgggtgaaacttagcggttagccccgtggagactacaaggcacgcactagacccacggcgtaaaacaattctcacccagtaacacccagagttgatattccccccaaacttgaaacgtcattaatggggacacccccgcccgccgaggcgcgcagctccaccctaggggaccactatgggtacgcaaaggcactttacgggctaaaaaatgaccattgtgtacttaggcaccacaggcaggcgacacccagccgaaacccaccatcattgtcataatatgccct

SEQ ID NO: 709899 - DNA, 111 bp, Homo sapiens
accaagaccacacgtactaaaggttgaactcaaagatatgtacagggtataaaacaattaccaaggggaccagttaccttcactacaagttcaaaactcagcaacaagttc

SEQ ID NO: 709900 - DNA, 244 bp, Homo sapiens
gatgacaggggcggagctcacacagtaatgatacatgtgggcatgatgctcacagtaatgctctggcagtgtggctggagctcacacagtaatgctctggcagcgtggcggagctcacacagtaatgctgacgggtgtggagctcacacagtaatgctctggcagggggtggagctcacacagtaatgctctggcagggtgcggagctcacacagtaatgctcactggccgactgtcatctcag

SEQ ID NO: 709901 - DNA, 1013 bp, Homo sapiens
ctttcttgtgcatattcaatacttgctgaactggatatcatgaaaatatttactatgaacaggaaaatctgacatatagcccttattgatatggtatctattaatgaatgattcttaatggggctcattaataagtttaagtatgcacaagcgatctttagaacagtttaacctgcaaacacttttaaaagataatgcctacttgatttatatctataaaaagactgacaaggtaattaatatttggaaaacatttaatgcactaactttaaagaacattgaaaattcaggtggatgaatagtcttacaaaagacaagtgtgctttatgttatacctatagctttggtcccatcttgtaatgtgatcaaacatgttatctgtgataagaacatattttcggataagagtatatgatatatatatttgtagtcgctatagaaagggtctaaagaagcatttgaggaacaaatatttggtgtaccctttatctagtaatcagtcctttagagtattcttagtagctacatttggttgattcatcatatttagcagtatatatattgttctattcagtgttcacatcttgtgccccatttctcacttgtgtcaccagctgtttgtgccattctcaagtgtaaagttgcgacctattaaatcttgcagtttaaggtcggcatgctgctaagaaaattggcctttttctgttttagctagttaagccctactttcccttgcgaagaaaagtttatttggcctccttgtatgcatttatggaggtttcgggggacccaaagtttttggcactggaaaccggttttaccggacaattacttggacatccaccaacccaaatgttctttccaaaaagagaaacaaaacccacagatagaaaaacaaaagggggggaagaaatacgagggggctagaagcccgattttaaaagcgctaagagtaaaaaacagagcggaaaaggaaacgtattgacggacttgtagtaaacaccaccaatttg

SEQ ID NO: 709902 - DNA, 222 bp, Homo sapiens
ggaccggacatgctgatctcacgggcaaaagcagcactttagtcttcagctccaatcttttgttcatttcttattgcttgaaaaaaaaagcaaacaggacacatttgagaatctgtccttcctatgtctatctttatctctgtctacagactctttggctaatggctttcccactgtcttcatggcccaggttaagagcgttcgcgttgagatcaggcatgt

SEQ ID NO: 709903 - DNA, 435 bp, Homo sapiens
cttctgattcccaggctggtcttaaactcctgggttcaagcagtcctcccacctatgcctcccaaagtgctgggattacaggcgtgaaccacccacctcacctggctctttcttctttcttaaaattgaccattcttagtagaggtttgtcaatctttccaatcttttagggaaaaaatcagcttttgatattgttaagtttctccatttttctcatgctttctatgccactgatttctgtatttgtctttatttcccttttttggctttgttcttttttccctggcttctgggagtgaatcttaggtctctgctttcatgcctttacacgcacttagttacagagttctaagtattgctttagctacaccaacaattttgatgttatattttcattattattcagttggaaatattttttcttcttcgtcgagc

SEQ ID NO: 709904 - DNA, 232 bp, Homo sapiens
  misc_feature (96)..(96): n is a, c, g, or t
  misc_feature (138)..(138): n is a, c, g, or t
  misc_feature (144)..(144): n is a, c, g, or t
  misc_feature (173)..(173): n is a, c, g, or t
  misc_feature (189)..(189): n is a, c, g, or t
ccaactcagctcctgagtagctatgactacaggtatgtgccaccacgtctggctaatctttttattatttgtaaagtcgaggtttccctgtgttgnccaggctggtcttgaactcttggctccaagtgatacttctgncttggnctcccaaagtgctgaattaagcagctcancatccacacgggtganctcatacatcaagccaataccgtgtggcccaagaaccccaaca

SEQ ID NO: 709905 - DNA, 477 bp, Homo sapiens
  misc_feature (13)..(13): n is a, c, g, or t
  misc_feature (19)..(19): n is a, c, g, or t
ccaggccaggccntctggntccagaataaactggagtctgatggttttcaactgcaacactcaacaaatatgttcagtatgtctggccaactaccgtaaaagtttatagaaattttcaatttaagaagtaaaggccaggagcagtggctctttcttctttcttaaaattgaccattcttagtagaggtttgtcaatctttccaatcttttagggaaaaaatcagcttttgatattgttaagtttctccatttttctcatgctttctatgccactgatttctgtatttgtctttatttcccttttttggctttgttcttttttccctggcttctgggagtgaatcttaggtctctgctttcatgcctttacacgcacttagttacagagttctaagtattgctttagctacaccaacaattttgatgttatattttcattattattcagttggaaatattttttcttcttcgtcgagc

SEQ ID NO: 709906 - DNA, 167 bp, Homo sapiens
gtggtatggggtactggactcattgatggtgacgacgatgtgggcaggctgctgagtggctgagcagctgaccaccatgttgccatctgagttctcgctggctccgagtgtcgctctgggatgttggcgaatggggctggttgtggccggtcagcagacgaggtgcc

SEQ ID NO: 709907 - DNA, 210 bp, Homo sapiens
ggcttttctccaaaacaagaagttttattttccccaaacccaatattgttgctttaaataatgtgggttttggggctcttccaaattaaaagaatgtacccccccatataatgtttttttttgtttttgaaagccccacccagcttagggagggtaatgctaaaaaattggtttaaggaaataatctttttttatcccctcttttcccca

SEQ ID NO: 709908 - DNA, 421 bp, Homo sapiens
acagttttctttatccaagtccaccagttgatggacaccgtaggtagattccacggtttctgctatcgtgaatagtgctgtgattagcatacaagtgcatgtctctttagtgtaaaattatttattgtcctttgggtatatacccagtcatgagattgccgggtcaaatggtagttccattttaaattctttgagaaatctccaaatggctttccacagtggctgaactagtccacattcctacgaacagtatataagtattcccttttctcgtgcagccttgcaaacatctgttatttgtggactttgtaataatagccattctgattggtgtgagatggcatcttattgtggttttgatttgcatttctttgatgttgacataatcaccaaaaacgtaaacatttcagttgctattggt

SEQ ID NO: 709909 - DNA, 870 bp, Homo sapiens
tcggcacgaggttgaaactgagctggccacgatgggaagaggggaaagcccagggttacaggaggcctcgtgggtgaaggcagaggctaacatggggttcggagcgaccttggccgttggcctgaccatctttgtgctgtctgtcgtcacgtatcagtcatctgcttcaccatgtctcctgctgctgcctttacaatgactgtgccgtcggaccacgctcgcggttgtcaccaccaccacagtccactcactgctgtgctgcatgccccttatcctcaggcctccaaggtgttgccggtccagctaccctggaccaagctaccagggctaccacaacctatgccgtctcagaccagtgtatgccagcgagtcagcggcgctacgccaatgcgagtacccagcatcttaaccaggccagtcccatgggtcccaggctggtctattcaacgagaactctggactggcagtgacgcagcacgagcctctatccccgtccgagttcacgcactctcgttagcaacccgtctcatatcaatggatgccccgcaaggtgggtctctgggcattccctggttctctctggactgcctggttgggttagtgagtgtggtgtgtgcgatgacgtggatgtttctggtcgctggctctccgtatgcgtccccactgctgctgcctgttgtgttgttcatggcatggggtgtaccgttaggcccccaatgtgtgctgtggtgttttcctgcctgtatattgtgggttccttctgtttccgacatggtgggggcaacttccttgcctgagatgttctggccccggttttgtacgcgcaccgggatctggtgctcgattcgcgcctctaaacggggggggggc

SEQ ID NO: 709910 - DNA, 929 bp, Homo sapiens
tccgcctctttttgaacaacacagaggtttacaggaccaaaaattcacccattggaactttcttccaacatcatgactggtttttataaaacacctccccctccttctttcctctcccccaaaccaaacaaagttctttatatcgccccgcccttttccccggaaattgtcctatctgaacagcacaaacaaactgttttcacacgggcgccaagtacaccccctttcaaaggggttacataacccccctcgaaccgagttgtccccccgacttctgtgatagacacgctaaccccttgctacataaccccacacgtgtcctccagacaacttgttcataaaccccacctatagattagctaattattgcttactacctaaccctcctccaggatatttctgatctgactcatcccctcgaatattttcgtaaacactacaccccccctgcggcccccttccaaaccgccgctcctccccccctcaccccctcacaaggcagtgttataactctgtcgttgagccctcccacttttgagtacagatagtaatgaccaagtgtcaatggcaccatggtgtctcctcaagctctctctgactacagaaagttatctcacccgacaagcccacgtggtatccacgtctgggtgtatcaacaaaggagacataaacccttctctcccggtggggcaacctggagaaaaaatatattgttcttgcgctacgcgcattttcatagtcaaatcccgcttaatatcccgcgccgcagtattgcataacgactcctcgcgagatcaccctccctcctttgtgggaagcctacggaaccagcggtggaagtttactacaggtgccccgacgtaatgagtgcccgctactcctggcgtgccccggggcaacccctttttcccaaaaacgcccacaaaaca

SEQ ID NO: 709911 - DNA, 362 bp, Homo sapiens
  misc_feature (6)..(6): n is a, c, g, or t
  misc_feature (38)..(38): n is a, c, g, or t
  misc_feature (335)..(335): n is a, c, g, or t
tatttnacacactcacaccactttttttgagaacagantttcactcttgtccacccaggctggagtgccaatggtgtgatcttggctcactgcaacctccacctcccgggttcaagagattctcctgcctcagcctcccgagtagctgggattacaggtgcctgccaccttgcctggctaattttttgtatttttagtagagacggggtttcaccacattggtcaggctggtctcaaactcctgacctcaggtgatccgcctgccttggcctcccaaagtgctgggattacaggcgtgagccactgcgcccggccattcatcttaatttttaaanaatctaaccatgaagccttggttatct

SEQ ID NO: 709912 - DNA, 1060 bp, Homo sapiens
ataagggtgtctttggggaactaagatgctatgcacagtgcattacatggcacaaagggcgtgtatctgagatgtgcttagtccagggcaatggtgcactataggccctcgtggactctgaaatgtgtgtcgacgttgtcgtgaatcctaggtgtcttacgcaggttccacaggggtccactaggaattcgtatctgctcgttctctaaatagtgaagatagtagattcacggtttgcctcgaatgtaatactacagggttagctcgtacactactggttgtccactggatgcgttacgaacacgtacatccactctcgttgaaagcactagtactagcatgtctgtgaacatttccactggcaatctcaggagtatctactggctggttctttggtcagaagacgccacgatttatcctaacgcacacgtggcattgttgtgatcattcatttatcctccgggtggtctgtcctggaggctcgggtcgcctccactggtcctctcactcttacgtgttggccctactggtctcgcacttgatgcatctcttgtctcgatctgtggtgtagtcttggcggacttcatggtccccactgtctgttggttgcctctttttgtgcccctgtttcctggtggcccaggtatagaggctgggaaagcgcccaggtagtgacctttccccagtgtgtggcggagggtgcctgatcagctggccatctgactgactactgatgaagtgcaggatggacactgctgacattcctggtgcgatcttgtgaccagggggcagctttgcatggacgatccgtcaggccgacaagagagcttttgtgcaaattgtaaaccggagttaccggttaggcctgaggggaagtgaagtaattcagttcaccgtgccaggttgggggccaacgcggcgtgaacagctggggagagagcacgccaaatagtcattcgcgttggaggggaaccagacacgggagggaaccgtttaaaaccaccgttggaggaacacatgggggcgagcggcggattttcgccaaaagagcggcaccagc

SEQ ID NO: 709913 - DNA, 461 bp, Homo sapiens
  misc_feature (1)..(1): n is a, c, g, or t
ntagaggatcccggcccggtaaatgtcaggaaatgtgcgctgtacgtggtccaggatatcagtggaagaatgagtaggaagggaatgaggatacgggtgagtaaggatgcttgggttgaagggaagcacttctggtaacactgaatttgggattttttataaagagggcattgagttattggattctggaaaggagagaaggggagcttagtgcttgggaggagaggagatcttgtagattatgagaactgtggacggtggtattctggctgaaagttagtttcctgctttctagagctaagctggctaccacttctagtgctttaaagcaggctggccaccctttgactgtgttatctagttgtttagagaggtaagctacaggggcaaaggaaggaggatttcctttctgttgtcctaagacaccgagggctattcctcagctttcagcagtatagaga

SEQ ID NO: 709914 - DNA, 318 bp, Homo sapiens
tccaaattggaaaagcacccatttattaaaaccagtacaagagtatgaaaagggggaaaagaggagggtaaaagagggggagaaaatggggccggcatcaaatgtcagttagggaaacacaaaaaggcttactttttaaacatttacatttaaagggggaacatatagatagaccacttaccctttaaaaaaaaaaactcaagagcagccatgttgggcggaaataaacccaagaaacacagggaaaacccccccaaaaacctaaaagcccagggagaattcaatttcgcatttccattcaaaaatcgggctacaaag

SEQ ID NO: 709915 - DNA, 546 bp, Homo sapiens
ctgtaaatcactggacatcttcaccgtgggaggttcaggagatggggtggtcaccaacagtgcctgggaaacctttgcagagataccgatgtctagagaacagcagaagcgttgtgaaaacaccgatgacagatgtttgcagaaacatcatctttagcatttctgcccgtgttacgaccagacaggcctggcttgtgaatgcgagcctcgagggattcgttaagttccgtgtgtgatcccaacggaggccagtgccaggtgccgggccaatcgtggttggaagaacctgcaacagatgtgcacctggaactattcggctatggcgcccaggtggagtggcaaaccgtgggtgagtgccatctgcagaggaatctgatcgaatgccttcatgcaatcaccggtcaactaggccagatgcacacatgtttccaggtgagtgtatgctcggacagtgtgatcggtgcttacctgggcacatggggctttaccaacttgccagccctgacagtgcaatggacatgccgatgactgctacccagtgactgg

SEQ ID NO: 709916 - DNA, 172 bp, Homo sapiens
tactctcacctggacacagtccgtcccgtggtttcctagctctccaagctcgatacaagacttgcatatacaggactggctgggcaggtacaggggctggagggcctggagcttggcggtccccaggactgcagggtacatggtatgtcgtgtctttctcctgacagaaagt

SEQ ID NO: 709917 - DNA, 926 bp, Homo sapiens
ccagattgtgttaaatatagctttagcttgtgtttttacatgtgcctagtatactggtggaggcccttacttttaacgacaaagttacgggtactgtgtgtaatttgattcaggtatggagtgtatttgtggattcccatccatgttatctgtatgtcctcctcatagcaacagagtagtcttcaacatgatggtaataggatccatactatgaatggccaattgtctagaaatgttttatcacctattattatgctaattaatttttctgtttttcgaaaagagatcatttggatagcagctatgtatgcaaatggtttattggagatatgattgctatgtatgcatgacatagttcaggactttcccataccacaggccaagcagtaacttaaattaggatctttaatttgtcaatgatacaaaggctctaaggtgtcatgtaatttaatgctgcctgtgaaacactgtctgttctagatttttcacccagtaattttcgaaatttgggtaatgtaaacctattgatatatttattgtatgttggctagcagttcatccttctgcaaaatatgcattcagagacaatgtgaagcttgttttaatgaagacttaaaccatttgtgtgcatttgtgtttttcatagtcaaatacacccaattaaaattcgtgaacctatatgttttcatcattaacttccgctaatataccagaacatatacctttttcatgtaaagttggcaatgggatatggcagttttatttttgaaaaatatgtaacatgactttaatatttttatagtctttcagaattagaaacataggaagggataatgtgtttaattagataagtcaactttttatgtgtctgtagtggtgtactataatagcagattataaagcattattaaatgtttctactattt

SEQ ID NO: 709918 - DNA, 315 bp, Homo sapiens
attcctgaatgcagtccggcggagagcttgcagtccactcatttgctaccatctacggctttattccaccacgcccagctaatatttgaggggaagacagggacagggcttcgccattttgaccaggctggactcgaactcctgacgttaggcgatttgcccactgcagcctcccaaagtgctgggattatagctgtgagccaccacgaccagccccagtggtgacattattaatacttggtgagccccttgccctgcaatagtttaatagttagagaggcagtctcaggagtcatattgccaggatttgaatcc

SEQ ID NO: 709919 - DNA, 973 bp, Homo sapiens
  misc_feature (754)..(754): n is a, c, g, or t
gagagaaggccggaggggtctggtctgtagtggcgctgttgggcccttggggattgtaagctgtgttttggggtggaagagcgggagagggtcggattcgtcgggatccccgcaaggcatgagtgctgccagagagtctcacccgcatggggtgaagcgtttcagcctccccagacgagatctggatctagcacatgtgggaggcagcagacttggctaatgaacgagagaaacacaaaagttctggagactttatgggtgcggaacagaaagaacatactgtcggtcttgtataggagatcacaaaatcaaatctcacttccgaaacgggggaagcaacgaccacgaacacattacggaagaacttgagtctcaatatcagcaacagtatgcgacccgtaacattcatcaggaacgatatcgggggacatttgtggacctggcgtcagtgacggtaagaagacccttgatcgcagaagggttgattgtgctggagcctgctggcatgcatgaccgatgatgatcaccctgatcctgaaaggtcccaagatgattcctgacaggcgattcagaggtccagagccaaggacgactctggtgaaagaacttccaaggctgtgagcacccctgatgaagtggggggatccccaaaaagccaacaaagttgccacaagccagtttcaactgcttgcttgggtcaactccgtggtgtcaataagtccccaaagcctcagctctggttgaacagtgaacncttaattgaacaggccaggggagcaggtactaaccacgaccgtgtttataactaaagagggcgtttaatattacaagagtgtcgcggccacgcagggcagacgttggggcaatccactgggagagacgtgtaataaaaaaaggcgttaatagcccacaccgggggcagtggcaccacatactaacaacagcgagagtatttgatgtggccattgtgata

SEQ ID NO: 709920 - DNA, 614 bp, Homo sapiens
aacctagaactaaaaacattgaatattcaggaaaactgaggaatgagattaaatggaggtcagaataaaagaatgttaaaggttttgtgggaggaagagagtggagagaagtgaaattattatggtagtctcatctggtgttcaaaaagtagtaaggtaaaaataattatcttgaggtgaaaaccatgggttttagtgagggaaatagttaataccttgtttacaggtaatggtagagaagtatgtatctgattatgagaaggaactaggagttctgtatctccccagacttcttgtgcaaaatttagttaaaacttgtgctagtaaactcgttctggtcctgtttagaaaggaagaggcaattataagtactagggcttcaggagagtgcagctgctatacataaaacctgtaacagtgtatgaggcctgtatctggcaaaccctaggctttcttggaagaaaactttcttctatttgagtatattcatgtccaggatacagaagatactttcgatgtgtaaactttctttttctcgctcattctctctctttcccttttttttttaatggagtcttgcactccagcctcagcgacaagagcaaaacatctca

SEQ ID NO: 709921 - DNA, 1238 bp, Homo sapiens
tgagctggggtgagagaggaggtggcgagcaggtgtgctgctgggcagctcctgtcacctgctggggccggggcctgggcgggagtgcatggggacgtgagtggcgcaaggtgccgggacatggggcccgccagccccgctgctcgcggtctaagtcgcctgccctgggccagccgcctgctgccgctgtagctgccactatatgctgctgcttctgcgcgcgcagcccgccatcggtgagcctggccggtgggagccccgtgcgctggccgagtgccccggggtctgtgcccatggtggctaggactactgccgggcgcctaaagcccttcacctggtgaccttgcggcacacggcctggtggagaaccagatcccacagcagcctctcgacgctgtctaccagggaacacgcaagcagacgtgcattggcgttactggcaggaccacgaatttgtaaccccctggcaagctttgccaagaactacggcaacaggttgattaacgccgatagcataccagcaaagggccaaatccccacaatgggaagcagccatgggtagccgtggagggtttcccacagggaaggccgggcaagattggtggcccaaacacccacaagcaacaccaaagcgtaacgtagaccccctttcccggattgaccttgacaccatggctgcaataccagacggaagtgcaggcccataggctgggtgccttgaacggcgcctgccggagcctctatgcaaccgcgagacgagcacattgtaaccaaaatggtcgaacaggattcgcaccacggatgggcactcagagacgaggcccagagaagggacatggcgcaatacaccacggagacccgaataccatggccaccgcgcacagcacccaagcgacgaacgcctagtagagaatcagagacaacggacacaggacgaggtaagaagaatagagcaagccagacccgcacaacaaacgcaaaccacacagcccaacctgcgaacacagagcaagaggaaagaccgtcacggccgacgcatggaccgcccggagaaccacgatgaacagaggaggcaagggtggctaatagaaaaagcggaggggatcagtcaagggtgggcagcgaccaagacgcggcgcgcgggcgggacggggcgtagagagaggccacagcacagcgacaacacgcagcgacggcagccacctactcgcaggaggggtccgtgacacacacaagag

SEQ ID NO: 709922 - DNA, 149 bp, Homo sapiens
cgggtccttccagctaaatctcctgacaaagacgtggccctaaggaccgctaacatacccagagaagcgggcctagacctgatggaaagacttctatttgtatatcttttatttattatttttgtgtttttgtttttttgtatttttta

SEQ ID NO: 709923 - DNA, 370 bp, Homo sapiens
aaaaaaaaaccctgttgtagattctgggattcattgatgttcctgtggctcattcattgacactgctctataatattccattgtccattctgtagtttatgctcctttagaaatacttccatgatgtgatttttatgagtaatgctgccatgaaaatttctgtacatgtctcctgatgcatgtgtacaaagctttcctaggagtcggattgctgggctgtaggagatgtgcatgtttgacattaaaaggtagcaccacaaaccttttcaaagtatttgttctgttttgccttcctgccagtgaggtataagaagtggttgttgagggccgggcgcagtggctatgcctgtaatcccagcactttaggagg

SEQ ID NO: 709924 - DNA, 319 bp, Homo sapiens
  misc_feature (163)..(164): n is a, c, g, or t
  misc_feature (184)..(186): n is a, c, g, or t
attgaggcctatacccttccccgtgccagtttggtatctgaaagtaagataccaacctggtaaattgcttctctccaccagggtcaaaaagccaaatagattatgtatgtaaaattgtaaagtcctcccacagatgcacttgccacattacagagaacttgannaccccccccccccccccccnnnattgtcaatttccacatgcagatctggagtccaggtgtcctggctcctggccctgaactttttggctgggccaaggggcttttcggtaaagtgctttggtgctttggaataaaacaggatgaacatgaatcat

SEQ ID NO: 709925 - DNA, 464 bp, Homo sapiens
gggaacgtcactcattaactgatgtttatttgagctgtcatgtgataattcccactgagatagagttatctaccatcatcaatcctcaatatttatgaagaatctcagctgtttgtacttcactgtaaatatgggtatctttgtcatgacttgcctgatgttccagaatctttttatcttctcccttgacactgacacatagaggcaaagagaaggaaattttaaaggccctagctaacttgggtaacttggtataatggaattgtgtttttgcatcctagcatctattctgttaaaggtatctcagtttttcctttggacacctatttctgtcccattctatagacaacaagattaggtgggccaagggacccaggcctgattaacaagcatgtccctcgtagtcccagctactcgggaggctgaagcaggagaattgcttgaacccggagctggaggctgcg

SEQ ID NO: 709926 - DNA, 158 bp, Homo sapiens
cgggcctcgtagtagacatttgcagttgtttaataacaactgcaaaatgtctactccgaagatgcaaatgtttttccttggcagatcctctctgcgcttgggattgacacaaaggctcaaaactgcaaaatacaaagatcaagtgattgttccccgct

SEQ ID NO: 709927 - DNA, 327 bp, Homo sapiens
  misc_feature (24)..(24): n is a, c, g, or t
  misc_feature (31)..(31): n is a, c, g, or t
  misc_feature (64)..(64): n is a, c, g, or t
ccggtccacagaatatttgaaaanatagagngccttgccttgggccagcatgtatgcctaaaancggaagggataccagagaagattagcatgggcccctgtgcaaggatgacatgcaaatttgtgaagtgttcccatatttttgaatagataatgaatggatgctgggctaaatacctaggtgatgggatgatctgtgcagcaaatcacccagggcacacgtttacctatataataaacctgcatatcctgcacaggtacccctgaacttaaaataaaagttgaagaaaaacctaaaagaaggatggaggagggactttatcattc

SEQ ID NO: 709928 - DNA, 152 bp, Homo sapiens
cgcccagagttatccctcttttccaactatcacggctgcctaaaaattgtctgctagatggattatttagatcaagtgtagagaagatggaaatattgagcaactggtaccgaataaagattgtaggatggtttcatacaggcaaacatcag

SEQ ID NO: 709929 - DNA, 122 bp, Homo sapiens
ttgccgggctcccccgtcctccgtctcggttccaagctaccgtagccgggccctcctcgcgtcgctctccgcttcccacgatcctccctatgcctcctttaccctcctccccgtgccttcct

SEQ ID NO: 709930 - DNA, 424 bp, Homo sapiens
  misc_feature (6)..(6): n is a, c, g, or t
  misc_feature (12)..(12): n is a, c, g, or t
  misc_feature (39)..(39): n is a, c, g, or t
  misc_feature (95)..(95): n is a, c, g, or t
  misc_feature (205)..(205): n is a, c, g, or t
  misc_feature (236)..(236): n is a, c, g, or t
  misc_feature (306)..(306): n is a, c, g, or t
  misc_feature (394)..(394): n is a, c, g, or t
ttttanccccantaaatttgattccccttcgatgaaaancaaatccccgggaaaaatgccacctttccccaaaactgaccacaaaattaaatttnaaaactgaatagtccttggccctggcacggtggctcacacctgtaatcccaacactttgggaggctgaggagggtggatcacaaggtcagaagttcaagaccagcctggnccaacatggtgaaaccccccatctctactanaaatacaaaaataagccaggtatggtggtgcatgcctgtaatcccagctactcgggaggctgaggcaggngaattgcttcaatctgggaggtggaggttgcagtgagccgaggtcgtacccctgcactccatcctgggttgcagcgcgagactgtctnaaagagaaagggggatataggtaactggca

SEQ ID NO: 709931 - DNA, 113 bp, Homo sapiens
gttttaaagagcttcaaagagactggcctggatacagtgaaatagacagacggtaatacgagtcaagtccttctcttagaaaactaaataccggttcagaatgcctacaggca

SEQ ID NO: 709932 - DNA, 875 bp, Homo sapiens
cacccaggccacactcacctcatctccggcggccacgcggtattactccagggagtactcaggtctcaatcacatcgaaagccttttggatactaatgaacaccgcattttatgaacagcatacactgcatccgagccttgcgggaagaagccattaagttatcacgaagagcagcggctttaacaacttgctgaaagcccttcaagagaaaggggaaattcaacaactaacagctctctgggaaagtgctgtccaggatggaatcactctcatcaccagcgaggaaggctttgcacctcctgccccacccgacgaacccaactaacgcgctcgaccccccacacaacccgctgcggagacacccggccccgtacctccaacaacggcgggtgaggcggaacgagctactgtagattatatacgacgcgattaccgccgtgaacttctatcacaactgccggcagctccgccggtgcgatccctgcgcactaaacggagccccccggctcattccggatggcgtaccagtgcccgtagcttcggatagtcggtagccggtgggcggatcaagtcacccttctgccggatcgccccgcccattcccctctcccccgcggagcggggtcggcctgcgtaacacccttaccgagatcgtggggctagcacaccaactagttaaccaacagatccggtagcagcactaatcctggcgcctccctgcgaccccgcggtacccccgccgcccggctcgccgcccgacaccgcccacgccacccgcagcctacacccgcgaatccggacgcctaactaccccccacaactgtcctcacccaaccgcgcagacgaggacggcggctcgcccgcctcccgtgcg

SEQ ID NO: 709933 - DNA, 236 bp, Homo sapiens
  misc_feature (89)..(89): n is a, c, g, or t
  misc_feature (117)..(117): n is a, c, g, or t
  misc_feature (165)..(165): n is a, c, g, or t
  misc_feature (169)..(169): n is a, c, g, or t
  misc_feature (180)..(180): n is a, c, g, or t
  misc_feature (183)..(183): n is a, c, g, or t
  misc_feature (221)..(221): n is a, c, g, or t
tcgggctcgctaggctccgggcccagctcctggagcacatggcctggcaaatggcgtgcaccgaagcgggcagctcgagccccaccgtngcgtcgaggacggcaaacaaaggcccanccgggggcagaccaggtaacgaaagccaagtgcagtgagcatcctccnatgngccgccagccnttngtcgctcgccccgaagcgcaggcccccagacgcctcgnacccccgtcggtcgc

SEQ ID NO: 709934 - DNA, 223 bp, Homo sapiens
  misc_feature (50)..(50): n is a, c, g, or t
  misc_feature (52)..(52): n is a, c, g, or t
  misc_feature (56)..(56): n is a, c, g, or t
  misc_feature (152)..(152): n is a, c, g, or t
tacggagcataccggagccttacctcggagccttaacctacgggagcctnancctncggagccttaaccctccgggagccttaacctccgggagccttaaccctccgggagccttaaccctccgggagccttaaccctccgggagccttaancctttatactgatagttagtcatcttcttgatgcgagccacagcctgagccaactgttccttctctccagt

SEQ ID NO: 709935 - DNA, 145 bp, Homo sapiens
accgtgcgttcagttcagtatcactctttgatgttgtcatccttcatcttttgcattttctgttttcttctgcctttaagaatctctgtaagcccagcttctggcccatgttgaggattgtgggccacaaacagcactttgacag

SEQ ID NO: 709936 - DNA, 259 bp, Homo sapiens
gagacactgactactgttcagggcattccagatggattatgacaaaaggaaactcgtgaaagctttcacagagagatttgcctgtaatcggtctgtggattgaacatcctgaatacggagagggttatccagcttccaggtgaccaaggaaaaacatctgccagttctctggaggttggcatgtaaggaggacagcttaaggttcatggatctaaatgacctaatacgtgggattcttgatagttcgtctctaacccgg

SEQ ID NO: 709937 - DNA, 1015 bp, Homo sapiens
gcttctcttctgttttgggcgtgctcgcgccttctgcagagatgtgggcagctggctcaggatggccattcgtggctcagcacagcaacgcagcccagactcagactgggtgaagcaacacagtggtgctggacagtgccagtgagatgcctgtctggacacgtgatcctgagatgtgggagttgctgcagagtggagaaggacaggcatgtgtcgtggcctggagctcattgcctcagagatactatgggtgtgagccagagctgtggtggatgactattcgagctgctgatgccatgactgccagggacttggaacagccatttcgaccgtggcatccgtgagacacgcggggcagtcaattgctccagcccatacatccgtggctcccagagaccaaacctgagccagtcgtacgacgagagccgtatcttggagatcattcaagcgaccgggatcgatgggagctgggcacgcatgaccggatagactggtgccaatcctgcgacgccaaacgagactgaccacttgtactcgaaccgttgcgacagcgggcactatcacgccaacggtccccaatccatttcgctttgccgaacagtcgtatatggccgccctaagtaaaggcattcgcaaacagaggacatagtgcatggcatatgttcgaaaggttgatacggtcaatggatacgcaaaggcacacaagaaacacattggggccgttgcagactatctcggaagtgtacagcgcgacgtcgcaacacatgtggtcgaccgacgctttgaacccgttggggccatcgcgtaaccgtgttcgcgtgcagacaggcgagcccccagcaaggtggcgcgtccatagttacagaacttcacgccgatgggagacagccccgaaggagcgggaccaatgaattgcgtcctagcgggcgcacctcaatgtattggaccgttacacagcagcaccggtacgagctggaatcaacagaatgggatcgttgggctgaactttgaaaag

SEQ ID NO: 709938 - DNA, 219 bp, Homo sapiens
  misc_feature (107)..(107): n is a, c, g, or t
gaagattccctatgttaggaataacatgttagggaaccctggaggcaggcagatcacctgaggtcaggagttcaagaccagcctggccaacacgacgaaaccctttntctactaaaaaatacaaaataaaaatacaaaaatattagccgggcatggtggtgtgtgcctgtaatcccagctattcgggaggctgagtcaagagaatcactttgaacctgg

SEQ ID NO: 709939 - DNA, 1060 bp, Homo sapiens
caattgggtgcgccagaggcccaatatcgcagtttgggatgggaagttagaagtaacttccggaatgtggcagggctgtgaggtgcaggaagattgtttagcccgtattacacagagtgtaagcttccctacttttttggctattgactccagggcaacaatgtgggaaggaaggcctacaaagactgtgccatgtgagccaagcttaaagttccgatttaaaatgccccgccagttttggaagagcggagtgccgagatgagatgaatggttgtagcgtgtaagatgaagattttgggaaggcaccagagaccccccgaagtatgggtttaccgggtgatgatcatatggcataccagcaccgggagcgttttattgtcgtcagaggacccaggtgggcacacttacgccaagccttcttgggaaggaacggggccgaatgataccaggttattgtccccaaagaagagtcgtaaaatgttgtggacgaacccaatgaattttgcaagggaagaagaattctttaggacttatgtttattagcccggacagggcatagtttgataggtcctcccaatactgtctggctttgcgcccagtttgagacccagattcccaccaggagttattatcaagggtctatccaccaggaccctattgagagagtactaggagtaaagcgcggggaaaatagtgagccttttaacggttcacagcaagagtactttggtggaaatggtgtggtatctttgtaaataagtataaaagagttgatggtttgctgattgagcccgagttcacgagagaatttaatcgatgatgcaacccacattggtccagctgtatcacagtgctccatcccagatggcccagtcggctcaaggggccaaggatcaggctgctgagggaataaatattcaatcaaggtctttgccgaaacaccagaagctcccagaaggggagcctatattagaactaaccctgcagacttttcaagaagcactccgtcgcccttttgcagcttccttaaaatattttaaaaaaacactgtattttacta

SEQ ID NO: 709940 - DNA, 1020 bp, Homo sapiens
gatcgattgcttagcttgtcggggacggtgaaccgggacccggtgtctgctccggtcgccttcgtgctccgtaatgcctaggccagtatgcgtggagtgcatctccatccacgtaggccatggggtggctgtccagatggacgatgcctggtggttgagctctactggctggaacacggcatcgagcccgatggacagaggtgccaatgatgacaagaacattgggggaggagagtgactcctatcaaacaccttgtttaggctggaggaccgggcgctgggctggacatgtgccctcgggcgtgtgctcagtatgactgtggatgcccaacagtcatatgactgaagtgtgcgcacggtggggaccctaggcgacagtgtcgtctccagcccctgaggaagctcaatcacaggtcaaggaaggaatgcatggcgcaatactcttatgtcggcccgagggcgagctaccaacctcactgggcagggggagatcaattggagccttgtcgtaggaccagtaattcgacgaagtgtggcctgaagcgaggtgcacctgggtcattcagtggcttgctagggtaaccatcgagctatggtgggggagaatggttcccggggtcagcgtccctggtcctggacacgtctctcgaggtgaattagtggctacgaaagtccagtgctggaggtcgtccatggtatcgcaagcacccacaggtatccacaagggaagtgagccctacagcgtccaatgctcaccagccacggcaacctggaactactccgaggtgcctgaatggtcacacaatggggcgctgatgagcattggcgggaaacgtggaatcgagggccaaggaactaacttagacggactatgagccagatgggctgcacaacaggtgccggatcagaggctcgcagggcgggagatcaacacgggccacccggacatccggggaaagccggttggggagccgacggcggacaacacctgggcccacgaggccgcgcaagcggcgcgcg

SEQ ID NO: 709941 - DNA, 1223 bp, Homo sapiens
caagctaatcagccagggtgaggccgcagacactgcacggagttcgaaggagactgcccctgaagcagggccattcgtagatcgtgagtgccattcaggtctccgatgtggtgcatcatgtggtcctggtaagagtccagatccaacgctcggacaaaatcacagagcggatgtggatttgattcattcgcttgccgcgcatctctcccatgttggaaccaatagtcaaaagcattctgcggatggaagaggtggcttgcacgattgtgcctcaggggctccattagagagagtctggccgtggggtcgtgacgaaagaacgccggggacacttcctcgagcaagtagagctgggtggggaattcgaggggcatctgaataggtcctctgggttgttgcccatggtgtcagaggtatccaccgcaagggtgaactacttgtgtcgaccccatttcagtttggaatggtccccgcgtgggcctctaaactggagaagtttcttctattaacaagaaccatatcctgcttcgattagactcaaaccgcgacaaggctcaatgctagggggcttgcgccacatagatcggcatttgagtcacttcagaatctcatggtccggacatagacatgtagcagactcgattccctgccggtgcggacagatcaccgcgaatacgcgctggcgctacctcgataccacacacccgcatcacttggagcagccaacgccaagcccgccggcagtgaaggcagatctgcgccccgccgtatcacctcggcgagcgtagtaagaccacacacctgggggcgcacgtgtcgggcagccgccccaaaccgctacacccacggcacccgcacacggatacaaccccaccacgaggcacctgcagccatcgtcaccacaacacctatggcaggacgccgagaccccactcaaccctaagacccccacgcgacaaagcaaagcaacgcaacgtcgcacgggggcaaggacccatccgcccgccaacagcgctgcgaccggcttccaggccgcaccgcaccttcaccgcactggccaagcgggacaacacattccagggggcgtatcacaacacagcacgcggaggcgcaccagccatcaagccccagtgagcggcgttcgtcccacacacaggcgcgcactgcgcgcccccggcaacacatcggctagaaccacgccatcgccgccgctcggcaggcgc

SEQ ID NO: 709942 - DNA, 244 bp, Homo sapiens
tgtcctgtacaaaactgtgctgtgactgtgcggtaggcctggacatggcaaagagaatacagcgaccccttctcttcctaccaaacaactctgtagagctctctgcaccctgtacccttttcacccttttgtatttaattttaaagtcagtgtactgcaaggaggctggatgcaagatagatactatattaaactgtactgttatttaagatgtaataaagcagtttgacatgaaaaaaaaaaa

SEQ ID NO: 709943 - DNA, 112 bp, Homo sapiens
tagacagtaaagtaggtttgaggatggggggcccgcgcgggttgctgcccccagtcgtgggccttagccggggattggtccctttttccccttttttgttaatattttttta

SEQ ID NO: 709944 - DNA, 909 bp, Homo sapiens
aaccgatgcatagtcgcaggagaattcctctcgtccataggatgacaagatgctcctgcatatggcaagatatattgactgccctcacgataattaagtcgcgttgggtgtcagaccaaacgatatgccaaagtcgcccaagagctatcacgggaagatctgcatcaccgccatctcatcccaatcaatcactcggacttacagcggaactcatggtgcgtatagcctgcttctctctattcgaatcatctcttcattcaatagaaacaacccatctattcacattagctcatggcatggcaagattaaataatacaatcttgatgattttactgatctgaaagatcaatgggcaacatgaacacataaaagctccctcctctgatgcgacaggataagcagtttggtacttggagactgacagtcacagcctgtcgacttaccttctgggagtggctgacttaatctggagaactctgatgcggaatgtgtattaacagtagtgaggggaactggggacattcgattaccccctttgaacgctgagtccacgtttttacgatcaggttctaatgatgggttgcccttcatgaggcaatcactggaaccttacgaggtttctcaagaagctgtataccttgaaacaacagtttgggcccatagtggagaatgcttgtgatgccttgcacaagtcagagggttcagaaaaattccccaaaacatattgttggccgactgtgtttccccaggtctaacacacggcacttgatagaatccacgaacggacgcggccttttccttaaaaacccaaaacgttaactccacatacactaactaccttcttgggacaacctccctagcaacccccatcttggtacggcctcacacacagccattccaattaacttc

SEQ ID NO: 709945 - DNA, 158 bp, Homo sapiens
ggacagagttttgctcttgttgcccaggctggagtgaaatggcacgctctcagctcaccacaacctccgcctcccagtgatcgagtttcatgcctgctgcttcagcgagagatgcctggccacactgagcctgcacccgtcccttctgtcgtcttctc

SEQ ID NO: 709946 - DNA, 213 bp, Homo sapiens
tagccggtacgcgctagcggcattagtgaacggaggacttgagttcatctctggccctgctcagagggttaaggatccggtgttggctgtgagctatggtgtaggtcacagaggtggctcaggtctggcgttgctgtggctgtgatacaggccagcagctatagctcctaggctggaaacttccatatgtctagaatgcattcctaaaaagac

SEQ ID NO: 709947 - DNA, 364 bp, Homo sapiens
gctaccgctcccgctctgccacccccgccaaccgcgcgctcgggcctaccgtcgctgccgcgatcgctatatctcgactccttggatcgccacatcctacccagatgcagacgccgggacgaccccgaccgcgcgcatgagccggtcttacgaggccagtaagacggcatccaatgggaccacccacttccgagttgcaccatacccatcgagatgcagatcagaacgccctgtctccgagcacgcctgacacgcttagccttccacccgagtacctggaggaatagcagaaggagggactcacccgacacgtgtggcagaccccaggggcccttcgccccggccccacggcacgcacccgacc

SEQ ID NO: 709948 - DNA, 572 bp, Homo sapiens
  misc_feature (442)..(442): n is a, c, g, or t
  misc_feature (572)..(572): n is a, c, g, or t
gtatttttagtagagacggggcttcaccttgttagccaggatggcctctatctcctgacctcgtgatctgcctgccttggctcccacagtgctgggattacaggcgtgagccaccatgccggcccatcttttttctgatgtgtaaaattagtatatgctaattattaaactttacataatggcaaaaaaaaaaaaaaacgtagacaaaaaaacaaaaaaattgtgtgggggcgcgcaggcgggccctgggaaaaaggatttttaacaacccactttggggtggggcggcggggagcgccccagagataggggttaggtgagacaccaggatgaccaaacgggtggtcccacaaaggggacacctcgcggcgacagcgggacacaggggcggctgtgggttttctcaccaaaataaaaacgaacggcggcgggcggaacaacncggagcgtgcgtttgtggcaccacaactcccagagtggggggtccgagaagggcacagacggcgccctcatcacacagaggggcgcacaagggcaggccagaattaaaactcgcacggcggggggaggtn

SEQ ID NO: 709949 - DNA, 191 bp, Homo sapiens
tagaggattaccacggcgggtgtactcccagctacactacctcaatcaccaccaccgagaccccctcacacagtactcccagctacactacctcaatcaccaccactgagatcccatcacacagtactcccagcttcacttcttcaatcaccaccaccaagaccacatcccacagtacaacctgccggtgg

SEQ ID NO: 709950 - DNA, 193 bp, Homo sapiens
gactggggaggtcgaggctgcgtagagatcatgccactgcattccagcctgagaaacagttatcttaaaaaaaaaaaaaaaaaaaaaatggtttaccattacgaggaggcttcaaacaaactggcacagttcagtaatttggggcagtttaaatttcccaggtctaattggacagaaacctcaaattttcata

SEQ ID NO: 709951 - DNA, 107 bp, Homo sapiens
tagggtggaaagcgacggaagtaggccttatttctcttgtccattcgtacaggtaggaattcgaatgtagatagaaaccgacctggattactccggtctgaactcag

SEQ ID NO: 709952 - DNA, 103 bp, Homo sapiens
gcattaaatacatagacatcctctaaaatacctctaagtaaaaacaaagctcttatggggggggacacagagttcctcaaagacgacggtaacatctttttac

SEQ ID NO: 709953 - DNA, 215 bp, Homo sapiens
tagggtcgatctctagcaggatcccctcttctcccctgacatgtgcagtattagcaatctgaggctgtcctactaatctgctgattacctgatacttcctgaagttcaaggagaatttgtcccagttagaacctcagtcactggaatagttacactgttggagatgataaaggctggactgggtacataatcagtctgttgctgccgatgggtgg

SEQ ID NO: 709954 - DNA, 1161 bp, Homo sapiens
cactctctgcaaggatcacgtatctgaaggatggtcaacagcattagacatgctgacaaggaaccgtgtgcagcccagtgtcacctacagtcctggacatgtgggggcaagaaggtacacactgagctgtgtggttactgagctcagcgagcaccacgggactgaccttcagcatcaggcactgacaaggctcctgcttagcagcgacggtctggcgcttgtgtacctttatccggcagggacctacccagctggactcgacctcactcatgccctctggtttccctgcaggagccagagcctgcagggtgggatgtcgggacatgctgactcttccctcaagcacaggctgagctggcctggcgttcagacttgtgcggacactcctctcccacactaggacagcagagcagcttctggctgggcctggccgcggctggcggctgacacgggcactggacatggaccctgcgcacacatgctgtgcctccctggctcccttcatcaccccataggggctacgcgcacccagcccccccatgggcagccctgcggcaccagaggcagcgactagctgacggcgccctacccatgcccaccccagcctacgcggcagctccacggtcaccctgggcccatcgcaacactacttgcgggccaaagcccaagaccccaaccacatggggcatactcgaacaggcctccatgggcccatactacacgcggcgaaccaaacacgccactagcacaccgcgcagacgccatgtcgcctcggaaccgcaagaggcacaaggccagggcgctccaaccaggcaaccgacgcaccaacagggcaaccccaccaatacccaacacatggggccgaacactggagccataccctcaacacacccccaatggtcacccctggcaaacgccacctaccgcggacaaacagcccccaaacggtcgaccagggccaacagcgtggcgagcacaactcccgacgaggcaccacatccggcgggccgcacccacaagggacacatagtgctcaggggaggccccccaaaagcgggcgcaacagcaaccacggcacatacggcaccctcacccccccacagcgccgcccaccctggggcgcggccaccccagcacggacggagcacaaacgaaaagaaa

SEQ ID NO: 709955 - DNA, 152 bp, Homo sapiens
taaaaaactgggtttggccttgtgccccgggtggaggggcaaaaaaaatcccaaaaaaaaaaggcgagagagagagacggagaggacgagcagcgacaggaggagggacacacaaaagaaaacacaacacaagaacaaaggggtcccggggg

SEQ ID NO: 709956 - DNA, 105 bp, Homo sapiens
tgatcgatcgagctcggtaccgctgagctctgcagcaccagccagatggaacgtggtcatcgcctgcctggtcagtgcttcttcccccaggagccactcagtgtg

SEQ ID NO: 709957 - DNA, 142 bp, Homo sapiens
ggggggcccccccccggggggcccgggggggggggcccggctttttttttccccttaaaaaggggggggggggtggtttttggaaattaaggccccccccccctccgggcccccccccaaaaaacccctttttttgggggga

SEQ ID NO: 709958 - DNA, 132 bp, Homo sapiens
accttagcccaagaaggtcagtctgcagtgagccgtgacacatgactgcactctaggctgggggagacagggcgagattctgtctttaaaaaaaaaaaaggtacatacggtagcctgcttaagatccagggt

SEQ ID NO: 709959 - DNA, 350 bp, Homo sapiens
  misc_feature (5)..(5): n is a, c, g, or t
  misc_feature (35)..(35): n is a, c, g, or t
  misc_feature (129)..(129): n is a, c, g, or t
  misc_feature (197)..(197): n is a, c, g, or t
  misc_feature (295)..(295): n is a, c, g, or t
  misc_feature (301)..(301): n is a, c, g, or t
acatnccattgcaccagactcctacccatgatagngcccatggcttactactgactggaccttaagttacttggacccttgcagattaccctgggggataattaaggaccccaagcgggatctccctgncagccagccagcagacagcccagggtttccgcccgtgccctcatgttgcagtccactttgtgcatggnaagatattgaacacaatttccactgctcttcctgcagggcctcctttccagcagtcacttgctcagactgaggggtgcacctcccctgccattgacangtcctngcgccttcaggatgggctatttcaagcccgttttgtggctcttacacgg

SEQ ID NO: 709960 - DNA, 432 bp, Homo sapiens
tccttttggcgtctttgctactgagggcttggtctctagagggtctgcagagatgctggcacctcttgtgtgggcagcttgaatgctgacctccataagatggggcctgcggggccagtacaggccctgccatcagctgccctccaccagggccctctgcaaaagccttatgctggtgaccagccccctgaggaccaccctcgcccgacgtgtcctcggagatggcgctggccctgaccagctgcctgcagcccctcagattctgctgcgacttccgtccctacttcaccatccatgacagcgagttcaagtagttcaccacacgcacgcagtccccgtaagtgccgcctctgccccgcctcttgcccttgctccgcactgcctgtcgcccttcctgcacctccctggacctctggctctgcctcttctctc

SEQ ID NO: 709961 - DNA, 930 bp, Homo sapiens
agtgacagtgatctcatgcttaagtcatgggtgaatagtaatccataggcggaatcggagtgccatcattccacgtgtagatacgcggtgactagtgctggtagatatggagcacttatggttgcgtgaccaatgtttaggtatgtaagtcgaactaggtgatgagaaaggacagtgtgggaggtgcattattgatgatattttcttactattatgggaattggctggttggttggggaacgtataatacgttcaagtgatgggtttggttggcgggttcagtagttggggttgaactacgtattcgataagttattttatggaaaggaaaaaaggcttgaaaagggaaattccgtattgtgaccaatggaagtggggttgtggtacgggaaattggttaacctatgttggttgggggtgtcagaacacaggatttgattgggaagggggaattaagggtggcggaaggttgatgtgggacgttcccattttcgtaccaagggctatatttggcttaacctatggggggctgggagtgggtggagtgtttggggttttggctttaaatggtaccttataagaaaatcggaaattgtcggtgtaatgtgggtaccataattggattcctggcggaatataaggagaaagttaataaaatggtttttatagggacttattaaataagggtaattgcgtagaaataatttcttaaatacgttttatgaggtgaggataggtcttgaacacggtcggaagatttggacttattggaactaatctcacctgggggacttaaaggttggcgcgcgtgtagttgggaagtggccattgttttccatggtgtaaaaggagtgtttctccaagattgtgggcattgagtctcaattgaagttctactcagagtaaaaattaagaagaaaatggctaatc

SEQ ID NO: 709962 - DNA, 435 bp, Homo sapiens
ctactaatttctcttcctcttctacatcaaactaacctcaaaacatattatattttacacaacactaaattactaaccttatctcttatactattatccttaatcatttttatttccacaactaacctcctcttactccttcctcactcatttacaccaaccacccaactatctataaacctatccatttccatccccttattatctttctcatttattatattctttctctctaatattaaaaattccctatcccacttcttaccacaattcacacctaaacccctaatcccaatactattaattatctaaaccatcatcctactcattcaaccaatatccctttccttactcctaacctctaacattacttcattcaacctactcattcacctaatttaaatttcaacccaatcattttcaaccataaacctc

SEQ ID NO: 709963 - DNA, 108 bp, Homo sapiens
gcttagaaaccacaccgtgaagacgtgctgtctatgcagttatggcacattgtatggaaactctcatgatatgaaaaataaataaatctaggcaagtataaaatgcca

SEQ ID NO: 709964 - DNA, 131 bp, Homo sapiens
  misc_feature (88)..(88): n is a, c, g, or t
tgggaccagtgtgaaggtggaggagtgggtgtcgctgttgaagtcagaggagacacctggtgctcagtgtagccctggatgcccttgnagggggccctccgacgcctgcttcaccaccttctcagacactg

SEQ ID NO: 709965 - DNA, 368 bp, Homo sapiens
tacactctactctcaggaacccgagtaccaaactcatcggaaacatggcactgttgcctatcagaagtcaaaacaaaggacctgcccccagagagacaacacgatacagatatagtagagatgaagccatctattacttcaaggccaatagtctacttcaaaaactatgaaataaagaatgaagctgataggaccttgatatatataactctctacatttctgaatgtctgaagaaactgcacaagtgcaattccaaaagccaaggtgagaaagaaatgtatacgctgggaatcactaataaacccattcctggagagcctggtaaaccacttaacgcaatatatgccaaacctgcaaacaaacagga

SEQ ID NO: 709966 - DNA, 376 bp, Homo sapiens
ttgcttggcaaggccaagatcaaggtgacagcagggtcaatgtctgatgaggactctctccttgatttgcatatggcaaggccaagtagccccaggtgacactcgttttttttgtttgtttgtttttgagacggagtcatgctctgttgcccagcctggagtccaatgccgtcgtctcggctcactgcagtctctgcctcctgggtttaagtgatcctcctgcctcagcctccagaggagctgggactacaggtatgtgccaccacacctggctaatgttcttatttttagtagagacgggatttcactatgttggcccggctggtctcgaactccagacctcatgatccacccgccttggccttgccatatgcaa

SEQ ID NO: 709967 - DNA, 346 bp, Homo sapiens
gccggttaaaaccaagggcccaacccaaaagttggagcctttaaggccccggtttttcccgggtttttttaccttttccccaaatttacccatttccctgaaaattgggggtttttttggatttccccccttttaggagttatccaaaccttttggaatttgggggattcctttaagttttttttccccccaaaggattttttccccccgccaaattttttaatttgggaccccttttttcccccaaaggggggtttaaatttaattttaggcttttttggaccctttttttaattgcccctttttggggggttaaaattggtttttggaatttaaaaaaaaaaaa

SEQ ID NO: 709968 - DNA, 407 bp, Homo sapiens
gcagtgtcttcagaaggacatcagtactctaaaatacttgctataaactattttaagtatcatgaaacgaacaaaactcaagttccgagaagtgaaaaaaatccttgaggtgcagaaagatagtcactttaagtgactgtgaaaatgtacctcatgtttgaaaacaggtgaaaaacagattaaaccagatttaatactacttcaccgaaatcacacaactacttcatttaatctagtcttttcccaccatttccttttgagctctcaagcatatctgcctgtagcaagttctcatctgcacacttcctagaaaagccaaaagcaaattctctactcggaagaactgaggcccagaaggccacatcctgtgataaagccaaggacgcataatttccagtccaaggatc

SEQ ID NO: 709969 - DNA, 924 bp, Homo sapiens
ctctcccaccatgtgcagtctcatggggagaggcttctttcgtttcctcatcaaacatctgattgacgctgtgcgaaactgtctgaatttgccatgcaaggttgtcaacacaattagcatgtttttcagatgctttcaaatcttttttcaaaaaaatagtgtaaaatattttaataagcgcaaagccatgtggaattttcgtttagcatgccttaactgtagccgacacccccacaaccccgctatattattttggttgtctatttctcacagcatattttcagttttttgtccatttgacatcagtctgtggttatattgtagtcagtctagattactgtgtgggtatacctacgcccaaaattgttttctcattcacagcatgagcatattcagcaaatccatctgtggtgggaagttaaaactattatggtattaaagaacatccattcaccccaaaagttgttttacaggattacaattttaatttcaccaatgtccagatttgggctatttctgtatgatccaataacttatttgtcacagggcttaattgccattctggggatttgtcgactcatttgtctgaatttcacaatggtattatgtcactagctacccgactacggtatttcgcttataactcaatagtaccttaacacaaagtataactccgtagagttggcgaatattttagggaaatttcagcaaaatgcatgtacgttaagcacattcttatgacgactgtattcctggcaactttgatttacgcatgcccgttggcagttccacatatgataccctacttgcagaataacttaaaaccgttatgtcctcagggtgatggcttaaacgcttcactttattgtgccccagagagggacctgcacatcatcaagcctacgaagagcgacaagcaggaag

SEQ ID NO: 709970 - DNA, 1717 bp, Homo sapiens
  misc_feature (455)..(455): n is a, c, g, or t
tgttgtagtgagtatattttgtgtgttttatgttgtatagtgtgagttgttgtgtggttttgatatgctacatgatttgtacttgtgtgttgttatatactatactatagtattgtacttaggtgtgtgtgtgaattaggtgtatgaggtgagtatggtgtgtatgttgcagataattgtgtcgaatatgtagttggttatttgtatatatgtattagcatattctgtgtgtatgtcactgataggttctataacttttgtgatgagtggtgtgttactgaaatagtggttaacaattatgttgtgtgtatactttatgtattgtaattgtgattaagtttgttaggttggtggatgtatgtgctacacgattgtttggtatagtgggggctgatataagataatagtgtagtattggtattatgttgtctatctcaatatatttgatagattgngttatattgctgatagcattaatcataatttatgtttctaggttccactgtctagttatgtactctacatagtgggtggtgtggtgaggtgattggattctaaggtccatcttatttgtatgttgggctgaatatagagtgtggtaggtaataggtgtatttcgctgtatgtgtgtggtttatatgggtgttttatatgagggcgtcaagtaggtttggggtgtattgtggagtattgaattgttgtctatagtcaaatattgtttgtaatttgtgtgtgtgttgggtgttgcacaatagttgtgggaggtagtaaggtataaattagatgttgggaagctccaagacgtcaaattgtagggggtcattatttatctggttgtttactattctatgagtgcatactatattggtattggtgataccagttgtgtccacatggttcaatagtcaacgatggcattaggatcacaaatagggtgagttgagtgtgctactagaggtcaatagggtgcctacatgtggtttcacatcaatatggtggtggcaaaagtttcaacataaaggttgagtagttcgtagtcgtgtcacatgtgggatcaagttgggtgttggggtaattattctgtgtgggggttttagtcaattggtgagttcaagtgggtatattctaattattatttttgctatatgttcaaattttttgtgtttgaattcaattattgattggtcatattgtaatttgatttgtataattgtggtgaaattgtcacatggatttgagtaatattctatgttggtggctacatgttgcatcatattgtgtgatctattgatacaatctttggattcatcatttgcattgatacaatttgtttggtatgcaatgagtcagtgtgtatgtcacaatagtggcagcagggggtgcatcacatggctagtggggtgtcacaaagcaggcagtatgagtcacatggtcagttgtcaatgcagttgattgatcatcagtcactacatgcatgtagtcacaggtgtgggatgtcagtgatcagcacacaatgtgtgtataggtgcacagcacagggcacaatggcacagcacagtgcagtggggtggtcagcacagtgtcacacacaggatgcacagtcacagcagtgggcacagtgtcacacaggatcagcaggcagcaggcaggtggcacatcaggcagggcagggatggcaggggcagcacacagcagtggtgagtcatgaagttacaca

SEQ ID NO: 709971 - DNA, 784 bp, Homo sapiens
  misc_feature (406)..(406): n is a, c, g, or t
  misc_feature (426)..(426): n is a, c, g, or t
  misc_feature (658)..(658): n is a, c, g, or t
gggggtactgattattctagcgaaggggcgtggctaacacaatttccttaaatggctatctaactgtccgttcctacctgaagcaagccatgcaaactttttcgataaagatgctttcctggaaccaaaatgagaggatggctctattcagctgagacagctccataggaatctacaaccaggagactatgagtttctaaacatatatttaccttccacaggttttgcctctggaagcctaaaactgctttccttgcgtttgagacactcctctgaactgcatcctttgcggaagatgctatatactccagcagttgtaagccactactcgtgttgaccttaacataagagtttatcctgtgagatgtacgttgcatatataaataaaatgacattgttgtctgtncggatattatatgaccaaangagtcatactttgccggccgctttgtcaaacaaaattctacactggaacaagcttatgcatggggccggtttctgacgcaatttggccattgttgactttagggtagacgtttaaaaggcactgacccgcgttttacaacggggtgactggaaaaacccctggagtccccaaattaattgcgtgggcgcgaataccgatttccccagttggggaacttaagaaaaggccccnacctatagcccttcccaacaagtcggcaacctgaatggagaaagagactggaagcctcaaaatttggggaaattccccttaaatattgtttcactttttttccaagacccctcggggagagccttt

SEQ ID NO: 709972 - DNA, 522 bp, Homo sapiens
  misc_feature (212)..(212): n is a, c, g, or t
  misc_feature (394)..(394): n is a, c, g, or t
  misc_feature (453)..(453): n is a, c, g, or t
  misc_feature (465)..(465): n is a, c, g, or t
  misc_feature (475)..(475): n is a, c, g, or t
  misc_feature (496)..(496): n is a, c, g, or t
gaattcggcacgagaaaaagtctatttcatttgctgaacactaagctaactgaacagggttagaagttagctcagtggccacatatgccagagaatatagacttttttagaaccaatcaaggaaagtaactgaatgaacaggagcaacaacaacaaactgtgttgtggctgtcagaaaatagattgagagagctgccacattatattatttnaaacatctagttttcaatgaaaagttatgagtcacacaaagaaagagaaaagcagtcacagaaaagaagcttaaatagcaagtggaaaacaattcaagatgtaaaggggaccttaataacgttgaccagctgacttctttcagaccctatgaagttcagggggcagtaacttgcataggcanagtgttaacgggaagctctttagccaattctccacttgccaattttctttacctggagnaggatttgggcntctcagttancaaatcagtatttgccatgcngtatccctcaaagaacatttaagaga

SEQ ID NO: 709973 - DNA, 146 bp, Homo sapiens
ccattacccacctcaacaacaacttcatatttaggcagaagctgaatctctctttctccaagcagacagccatcatgcctggacaggcatacggttggaagacgggacattgcagatacaaagacttcagtaaattccggaacaat

SEQ ID NO: 709974 - DNA, 186 bp, Homo sapiens
gcacacggagaacgacaactgctcacaggacgtgcgtccggaggaaagttgcggtgagtgtcagaacagcaggttggcagcgacgaagccgagcagctccgcagcggcctcttccagctcagcagctcgtcggcgtggcagcccagccacagcaccggtccccgagcagccaggttaccgcggccc

SEQ ID NO: 709975 - DNA, 100 bp, Homo sapiens
agaaaaagaagagagagcgagaaaaaaaaaaaggaaaaccgcaataaaaaaaaaagcaaagaaggatgaaacaaaacagacaccaaacaacaacataaga

SEQ ID NO: 709976 - DNA, 573 bp, Homo sapiens
  misc_feature (557)..(557): n is a, c, g, or t
cgttggggctcattcagggtaatacgactaacacaattgtatgggctcattagtctgggggctggggcagtgggacagcaggggccgttgcacagcaggggccgggtatctggtcaaggggcctttggctgtgtcagtccagggcagaagaacaaagagaaggtgagagaagaagaggggtggggcttgtcctttgatggggaagctgctcatgtcataatacccattcgtgagggcagagccctcggggcctaatcacctctccataggccgcctctgatgcatgggggattaagtttccagcacagggtttgcgaggtcacactcagaccagggcagcctcttagggggggcgtagccttagtggagtaactcaccttccggggcccaaattttctcttccaaaggggggcggctagggcctgcctcttagggggtgaaggagccagtatggcatggatatgcccagcagggtggttgcactatggggtacttacccgggggggacccgttaccggtcacaaaagtggggctctgttctgatcgagccaggcggntgagtgagctggctga

SEQ ID NO: 709977 - DNA, 753 bp, Homo sapiens
tatatgtcccctgcttgaaccctgaaggccaggtaatgagccatggccattgttcccagctgaggaccaggtgtctctaaaaacccaaacatcctggagagtatgcgagaacctaccaagaaaaacagtctcattactcatatacagcaggcaaagagacagaaaattaactgaaaagcagtttagagactgggggaggccggatctctagagccatcctgctgagtgccctgtgtgtaagtcctaataaactcacctactcaccaaaaaaaaaaacaataaaaaaaatagtaatctaaattagtgcataatcagtattattaaccatatacggtaattgtttactattaaatgactagttcttaaacactatatatatatgtgcaattcttagctttaattcatcttaatcgctttgtttgcacatatctatttaagtcatctggtttatttcctaatttcccttatctcttcatatttctcaacagttctcgctaatttttgtgcctattggaaattctccactcttattgctacgtttaagcgtggtttcttctttacatatttcgtattcgttaaactcttgtgttatccctgttctcttcttcttattattcttagttctcctcgatgcgttcttactgtattgaatttctctggattctcgcgttctcacattaactggatgtatattatactttctattaatctattcacgtttcattttgtttttcctctcggtcattcttttcg

SEQ ID NO: 709978 - DNA, 802 bp, Homo sapiens
  misc_feature (336)..(336): n is a, c, g, or t
  misc_feature (522)..(522): n is a, c, g, or t
cgcggtgggtcaggcctgtaatcccagctctcaggcaggctaagaggcggaggatagctgagcccaggagtcgagactgcctgggcgcattatagcgagcacccgcttctccacaaaaaaaaatgcattatgaagtcatgaaaaaagcttttttgacgcgtttggtggctgaggagaaaagtgttttagaaaccattgcagttggcgcgcgcgggcccccaaggttgtgcgagtccacagtggccatagggattactccgagaggaaacccgggcgtagtgaaaaagtgggggggttcttcgccgtaatggaaatacccgccgaggggggaccacncggagggggaggtttttgcaacacaacgctccaacaagagggcaagactagagggccgggcacaaacggggactcttagaccgaaggagggccccatggttgatctcttcagctttgcatcattgtaatccccgcgagtgttggagaataatatcgttcaccattgaacggtcagcctggtgaacncggcgcgaaggagtctcctcattttgccacatcatgcctgttgtccgaggagcttaaccagtgtagctggcgcaggatatttgcacacacgaagttcttaacaatggacaaatggttaccttccgactgcatagtgggcggaccagacatgtattttcgggacaccattcgtggtgctgttcccgcacagcgggatgcgtttgccctgggataatggggcacgaaaggagggggtgtgactggcccctgacagttgatttttgaaactcgaaagacccag

SEQ ID NO: 709979 - DNA, 276 bp, Homo sapiens
atctcgatcgagctcggtaccagttctggtccccactgattcagcacctctcctgagtctgacttcagtcctggcattacagtgacatacttgctgcctagaagcccgaggccaatcttgacaatcccctctctcttcttaccaaggtctaccaattcttcctttaaaacattaactttttttccctttttcctatactccaccctggtttagtcctctccatctctctccaggttatttgcgaaagcttccttgagttgagtaccacttcttccc

SEQ ID NO: 709980 - DNA, 841 bp, Homo sapiens
  misc_feature (1)..(1): n is a, c, g, or t
  misc_feature (62)..(62): n is a, c, g, or t
  misc_feature (64)..(64): n is a, c, g, or t
  misc_feature (74)..(74): n is a, c, g, or t
  misc_feature (133)..(135): n is a, c, g, or t
  misc_feature (142)..(142): n is a, c, g, or t
  misc_feature (192)..(192): n is a, c, g, or t
  misc_feature (212)..(212): n is a, c, g, or t
  misc_feature (223)..(223): n is a, c, g, or t
  misc_feature (252)..(252): n is a, c, g, or t
  misc_feature (262)..(262): n is a, c, g, or t
  misc_feature (264)..(264): n is a, c, g, or t
  misc_feature (274)..(274): n is a, c, g, or t
  misc_feature (277)..(277): n is a, c, g, or t
  misc_feature (293)..(293): n is a, c, g, or t
  misc_feature (295)..(295): n is a, c, g, or t
  misc_feature (299)..(299): n is a, c, g, or t
  misc_feature (303)..(303): n is a, c, g, or t
  misc_feature (310)..(310): n is a, c, g, or t
  misc_feature (316)..(317): n is a, c, g, or t
  misc_feature (334)..(334): n is a, c, g, or t
  misc_feature (343)..(343): n is a, c, g, or t
  misc_feature (348)..(348): n is a, c, g, or t
  misc_feature (389)..(389): n is a, c, g, or t
  misc_feature (708)..(708): n is a, c, g, or t
  misc_feature (734)..(734): n is a, c, g, or t
ncacctcattcttcctctctcgctttctttgggctgtgttctgtctttcgtttttcgttttncnctcagttggnactttgcataatacatctcaagacatccccccttaagtgggccgcctgtgcgggggggnnngggggtngggggatttcccaggtacatacaatatcatgcatttgagtcccccaaagnctgaggggggggcgccctgngcttgcttgcngtcccctcatattgcgcaaggtaaaatanaatgtctggngngcccatgggngancccgttctgttttggngntgcnattnacatgcnttttgnnattgtcatatggcttanccttttgcnatggnctcaaatcttagtcactctgggtgacttcctttactatggngtgtgaagtgactttttctacctttttagtagacactagtttctcctcaaaggtctcttcatgctcttcaaccttttgagtgacggttacagatttagtgatgtatttggtagcaccatctcccccctcactggtgattttttctaccgttttggtcaccaccactttctcctcacttttatcaccccccttcttttcatctgctgggctcaagtctaggccattggtgacaacgcctttctcctcttccctcccactgcctttttccttggtctcctgctctacctcctcttttccttctacctccccattgacagcnatgtcttccttcctggatcccttggnacctttatcactcccttcctcctcacttcctccctctcctcccgctttctccttctctttctcctgctgcagtggcttccctcttctttggtctctttctccaagtg

SEQ ID NO: 709981 - DNA, 228 bp, Homo sapiens
tgagcgtgacttaacccttgacggccgtggcctttgatcctgatagagatctgccatctaatcgccaacaagagtctgttctgtaagtcttatgacctctattataacattgatcttgctcagattttgtgtctactcaactggatacatttgagttaccacaaaagagggagggtataatgaggtgtgtctgacctcccatcctgtcctgaccaggaactcagtttt

SEQ ID NO: 709982 - DNA, 822 bp, Homo sapiens
agcggagcttctccctcccgcagctccagtgcccgagcttcggctctcccagttccccaacccaccccttcccctccccgacaagccccgctagagcccagtggagaccctcgatctgacccacaaccaaacgtcgtttctcctccccccaggtccccctagcattggggtccacgacagcccgagtggacccaggcgcctgagcacggagggtaacgccaaggccacacccggggcccgtttcgggcacccatcactccggggcgacaaacgaccggcttgagaggaccggaaggcgccggaggcagaacagcgtgacagaaacaaaaaagaaggaaccgccggagacagcgagggacacgaaaggcaggagcatggagaccgaaagggcgaggctgtacggacacacacaagggcagcgaccccaacggaaagccaccgcaaacatcctggcgcagcccgatcccagattcccccacgagaggaggccagcagaagacatgaggggacataagagccggaggagacacgaacagacacaaaagacagcaagggcaaaagaacaaaagggaaacagcacaacgcgacagaaatacgcacacacaccaaaacacagcagactagcgaatacaacagagagacacacagaacactcacggcacacacagacatcaacaacaaaaacaagaaacacgacaggacacagcaagagacaccagacgaccgacagcagcagaaccacaccacaatacacacacgcaggacgcaaggtacacaccagaaccccaaacagacaagacagctcctatagacgtgcgcgtc

SEQ ID NO: 709983 - DNA, 326 bp, Homo sapiens
ctcccccctttattattcatgcattggaagttaatttctggctgggcgtggtggctcacgtctgtaatcccagcactttgggaggctgaggcaggcagatcacttcagccaggagttcaagaccagcctggccaacatggccaaacgccatctctactaaaaatataaaaattagccaggcctgggggcacccgcctgtagtcccagctacttgagaagctaaggcatgaaaatcgcttgaacccaggaggtggaggttgtagtgagccaagattgcgccactgtacttcattcagcctgtgtgacagagcaagatcctgtttcaa

SEQ ID NO: 709984 - DNA, 649 bp, Homo sapiens
caggaggctgaggcacaggaattgcttgaacccaagaggcagaggatgcaatgagccaagatcacaccactgcactccagccttggcgacagagggagactctgtctcaaaaaaaaaaaaaaaagggtgtgcccaggccccttagccattggccagtggtgcccagccagagagccaaatttagagggcgggctttcccttattcacacagaattaaagtgctagtgtgctagccaagtgattccctttgggctttaaaggatactcgaaaaatactggtggctcccttttggctcattctccaggtgacattcgtgtttctcataagcaggctccttttctaggggagggaacccaaagggggctagggttaaagaccctaattagaacatggtttttctctaatcctcagggatagagtctgggaagtggtcaccatttcacaggtcacacccttgggggagtggcgctgggtggagacgctgggggacaagggttcgggttaactacattagggcccattgataacgtggccttaaacgggtgatccttcggggtaggataagttaataataaagggaccctaaagaattgcaaggggctttaaaactggcagtaacgtggtgtccttaatggaagcaatacccaa

SEQ ID NO: 709985 - DNA, 186 bp, Homo sapiens
  misc_feature (21)..(21): n is a, c, g, or t
  misc_feature (39)..(39): n is a, c, g, or t
  misc_feature (43)..(43): n is a, c, g, or t
  misc_feature (155)..(155): n is a, c, g, or t
aaaggagcaagccaaaacctnaaaccggcgccccttggncggncgagcactacagccagggcgccgggagccagctagctgcccttcccccagcccgaggactctggggccacagggtgtcttccttcagcccatgcgcacctggtccagcaggngcagcagcagggtctctgatggcagccggtg

SEQ ID NO: 709986 - DNA, 789 bp, Homo sapiens
atgatacccactacagaggtatgtggcggtcccctgtgtctaaagtggctcgtaggggctatccaagggtcaacacaggcaacctgtggacttcagtaggtacatagattgctctgtccttccaggactgtcacaaggcgtcccagagagactcgcctaataccatgcagctcacagtcacaccaattcctgcggttaagtaatggatcagagcataatcgttccgttcagcttcaggaggtgtgggtgaggagagtgagtgttgtcaagggggccagactttccaggctgatttgccaaagtgccgaaatgaaactctagcataagaacttacggctaacatacgaggacattaaaagtagcgagcacctcagtgtctctggggtacatggttcaaggagcttccaactctagcccagccatagtgagtgggcacgccataagccatcaactaggaactccgaacaccacagaggtccaggagtgatctcgtgagtgactctaacaaatagatcaggacacatggggtacaaagactaggcttgatctgcttcaaagcttccctggacctgaagccagacagggcagaggcgtccggctgacaaatcactctccgactgatgagatccctggaggatctccgaaatcctcgctgctgtacaggactggacggttgcgcacatacaatcgctgccaccctccacttcccaacccagactcggaaagacacttagcacaactagcgcattggggaattgtgtgtattttctagcacttgtgtactggtta

SEQ ID NO: 709987 - DNA, 208 bp, Homo sapiens
gccatgctaacattgcagaggcgtgggcactttgttcatggcaggcacctcacgctttctgtgttcaatacaccataatataccctgacaaggagactccaaatgcatgttttaaaacaagttattacatttgatataccatttcttatatttaggtaaaacattggtctatagatgggggctgccagctgatagctattgaaatgtg

SEQ ID NO: 709988 - DNA, 1738 bp, Homo sapiens
  misc_feature (1371)..(1371): n is a, c, g, or t
tgcaaaaaaaaactcatccgcctgaatacccagcactgttaatccttacagttcttctgtgttccccacagaagtcgtgcttaaactcttctccttctttctgtgagttcactcctctttctttccctccctcgtgggtgcgtgacagaacgtggaggtgtggcgcccttgtgcacggttttcacagggtgcgggggtgtgaagatgtggatatttagtggtataagaataacgcctcttgtgctccatttttctcacacaagaacatataatctcccggtttctccttctcatgtagaacaatctgtagagacatatcgcctctcttaactacacgcgagacacttgggtctctctccacagacacacgagactcttttatcacacacactgtgtagggacaacacactatgtgaaactctgtggaggtgtctcttgtgagagtagtgtgtgtaatattggagacccagagtgttgcgtgacttgatgagagagtctcacgtgacgctctcgcgcacaatattacacaccaagcactgttgtgtgtacacacagagagtaaacaactcctcaccacaactgtcttaaaggattatctctatatctacatcacccgcaggagagctgtgttgagcaaattcacaacccacagtgtggtgggagacactactcagcgaagtagtgtgagacgaccattatctgtgcgacgtgtgaaacagagacaacgtgtgtggtccaacccaacccacgcagggggtaatcacccaaccgctgttgatataaaggactagtcaaattatactagtgaaacaacagtagtgacaatagtgacatcacatccctagtagaaaagaggagttggaagtgtaaatcccccgacaagaaggaggagtttatgacccgctgggcacagaagctcaccactatataagacaaagcagcccaccttctggatcctataaccagacaagaaacagaatttcacacacacacctgttgttgtggaagcagaacagggccattaatagagaattacaccacccaaacagttgttgatgaacaccgcccccaactaataacaaaagcggcgtgcggggcaccccctctctagacaacacgcttcttatgtggcgagaacataccggtagggatcagtatcacgcacactaatactaaacaaacacgccataatagagagaaggcggtgacaaacaaaataatctgagaacgacacacactaagtcgcaacacatatcacaccaaattaacagtaataatcgagacaacagtgacatagatacacgatatagcagcaccccccaaagatgtagttggtgtgtacacaggaaaaatcaaatattagtaactccncaccctggtggcacgacataagacgaacacacaaagaaggttcataacataaaggagaatcaactgatgaggccacaaagcacacagcaagaacaattggggccactaatagccacaaacccccacgtacgatctacacagacaactgctgagccagatccagctcacgttagaaccaaccgaccgtctaaccaacacgcagcgacagtacagcaaacatatactgcagcgcagaatgtaacctcaaggacaaacaaccaacaccaaaccagatgatatgagcaagaaaacaacgcgccgaggataaactaccacacaaacacgacgacaccacaacactgaaacaagagcaggagaacaactatca

SEQ ID NO: 709989 - DNA, 491 bp, Homo sapiens
gaattaaccaggataaatacatgaaagatatgactcttaataattcagaaagctgaaaactaaactgctttccatggtaaggttgcacaggttaattaaaaaccgcagttacctgctgttgtgattatcgcacccttggcctcttgttgatttggggccatacgcatctgattattaaaattgaaacatcacaataatttttacttcatgcaatttggaagattaaaaatactggaagatggccgggcacagtggctcatgcctgtaatcccagcactttgggaggctgaggcggtcagatcacaaggtcaggagatggagaccatcctggctaacacagtgaaaccccgtatctactaaaaatacaaaaaattagccaggcgtggtggcacgcccctataatcccagctactcggaaggctgaggcaggagaatcgcttgaacccaggcggtggaggttgcagtgagctgagatcgcgccactgtactcc

SEQ ID NO: 709990 - DNA, 224 bp, Homo sapiens
tcgagctcggtacctatttgggaggctgaggcaatgaattgctgaaccagcaggtggaggttgcagctagccgagacatgccctgctaattttttgcaggtttcaccatattggcaggctgatctacaaactcctgaccttgtgatcttggtcgcctccggctcccaaggttgtaggattacaggagtgagccacaggctgggcggaaaggaaaggggattctc

SEQ ID NO: 709991 - DNA, 545 bp, Homo sapiens
  misc_feature (320)..(320): n is a, c, g, or t
  misc_feature (434)..(434): n is a, c, g, or t
  misc_feature (455)..(455): n is a, c, g, or t
  misc_feature (466)..(466): n is a, c, g, or t
  misc_feature (481)..(481): n is a, c, g, or t
  misc_feature (512)..(512): n is a, c, g, or t
  misc_feature (538)..(538): n is a, c, g, or t
tcgtgcccttgcactccagcctgggtgagagagtgtctcaaaaactaaacaaacaaaacaaaaaactacacataaaataatttgaataaatcgtttagcatatttactttgcttttgtatctgataaatttatagcatataaatcagtgcactgacaggagagctgttataaatttatgagtattggccatatgcactgttaggggtttagcatgccctgtatttccttgtacgatgtgaagctactgtggcataattaatttctctactgtgctggatgaggacccagataatgggactccatgcaccaaaatctatgnttcacatgtgattttattggacctttgaaggccaacttgttcccctttggggaatggtgtgtgaccgtgcaagtaacatagcacgaagtggagaatccttccacttggcctctnaattccataacttctaacttntgccaagggcnttggtccattctggnaagtttcccccttttttggactccggggganacctgggggggaacctttaaaagccnccttgga

SEQ ID NO: 709992 - DNA, 636 bp, Homo sapiens
ggcgtagggcgctgtgcttgaggttgggggttgcgtcgctctctggtaaaggcgtgcaggtgttggccgcggcctctgagctgggatgagccgtgctcccggtggaagcaagggagcccagcctggagccatggccagtacagtggtagcagttgtggactgaccattgctgctgcaggggattggcaggccgttaacgtttgtgcaaagccatgaaagcatatggagcctcaagtaaaaacaagttttttcaaagccttaccaaaaatctggccttcaggtggtggctatatataggaggtggggttgtgaaaccccagaaatgacaaaagtggggaaggcaggcattaaatacctagggttgtaaagcccttatttgccaaataacgggggaaccactaagagatgctcatcgacgaattatgcttttaaatcatccttgacaaagcgaggatctcctttatatagcagcaaaattcaatgaaggctaaagatttactagaaggtcaagctaaaaaatgagtacactgtttgatgaatttaaggtcgaataagtcatgtatatgagtactaagttttataataaaatggctcagaagctacaattttaaacaactgattttaggcacaagctaa

SEQ ID NO: 709993 - DNA, 331 bp, Homo sapiens
ccccctccccgggtatcttatacacacgcaggcttattgttcagaatagataatttacgaactgtagctcctctggggtcaacgaagggtttaaatttaaaggaacagggtcagtgacaagacttaactgtaacgcttctcggacttcaaattgattacatcacggcccacttcggaaaccgcgcatcagtcagaattggtagttccacaaccttttaagttgaattttcactccctttcagcaataccttcctagctcgttaatacacaataataaggtttacacggacgaacactaattgaaattatgcaactagaagcatctcgttga

SEQ ID NO: 709994 - DNA, 220 bp, Homo sapiens
  misc_feature (31)..(31): n is a, c, g, or t
  misc_feature (100)..(100): n is a, c, g, or t
  misc_feature (114)..(114): n is a, c, g, or t
  misc_feature (149)..(149): n is a, c, g, or t
  misc_feature (196)..(196): n is a, c, g, or t
  misc_feature (198)..(198): n is a, c, g, or t
ccaccacacccagctaattttttgtattttnagtaaagacacggtttcaccatgttaggtggtcctaacaaactcatctacaagaaaggtaaggaatggngtgcacatttcaanttttaagtttgaaaaagcacaagagaatctgcttntttttgcaatgtctaatctgtttaaaaggcatctttcacagagagtntnatttgggaatatttgcagagtt

SEQ ID NO: 709995 - DNA, 214 bp, Homo sapiens
  misc_feature (12)..(12): n is a, c, g, or t
  misc_feature (33)..(33): n is a, c, g, or t
actcagctaacnaggctggtcctgtgctctcgnacttcatctcaggtcaggagagagcacttgacccaactctgccagcgacgcacagtaatggtgattcacgtagtgtggttccaggagggaaggtagggggcagacaagagtgagtgcgctatagagtactgggcagcgtctgctgtggtcccaggcactgggcccagcttatgaatgggtt

SEQ ID NO: 709996 - DNA, 287 bp, Homo sapiens
  misc_feature (10)..(10): n is a, c, g, or t
  misc_feature (48)..(48): n is a, c, g, or t
  misc_feature (58)..(59): n is a, c, g, or t
  misc_feature (144)..(145): n is a, c, g, or t
  misc_feature (205)..(205): n is a, c, g, or t
  misc_feature (207)..(207): n is a, c, g, or t
  misc_feature (214)..(214): n is a, c, g, or t
  misc_feature (227)..(227): n is a, c, g, or t
  misc_feature (229)..(229): n is a, c, g, or t
  misc_feature (235)..(235): n is a, c, g, or t
  misc_feature (247)..(247): n is a, c, g, or t
  misc_feature (265)..(265): n is a, c, g, or t
  misc_feature (285)..(285): n is a, c, g, or t
acagatttcnccccctagcatgaaattccaaaaactttaacaattacncataagtggnncttgagatgacattttcatcttggacagtttgaattctaaatctctagttcacagtgaatcgttttttaaatttttactgatggnncgttatttttcacaaggtactacattcttacaatgtaagactagatgggccaaaattttnanaaaaacntcttgccttgttntnttaaanaacatatatatnctatttgttgtatatacncattagactattttaaaatnac

SEQ ID NO: 709997 - DNA, 876 bp, Homo sapiens
  misc_feature (737)..(737): n is a, c, g, or t
ttggggtctccctatgtcacccaggctggagtgcagagatgcaatcacggttcactgcagcctcaaattcctgagcttaagtggtcctccctcctcagcctcccaagttgttgggattacaagcatgactaattatgcccagcaatggtcttgttacatttcctgaagataaaagagaagcatgaaactagagcttggtacactcaaaggctatgttctccctcaggactcaagatgaattactggcagaattcctcactacatcctttaatggaaacctaagtaaacaaacaaaaaagggtttggccaggttactgtagcatttctaattactatcattatttttataaagaaagtgaagttcacagaggttaagttattagtccgcagttaacactcaacaagttaaagtaaccatctatcaggcactgcctggttccttaattgtctctttttaagaagatagtgtattcactcccattttatagtttcaggcccacctatgctttgattttaactctttccttagaaagataattaacttgacagtgtaccacttcttgggtggacactgactcagtgaaatgcggatattttgatatgttgctataagtctgtgtggttctgcttatgccattcatcaacttctatatccacttgcaccggagaaggcactaagattctgtgcctgtccattaagatcttgaactgggaggacactcccacgcgatgaccanatcaggtattgactttttattaataagtgttatttcaatagcgcaccaaatttatagtttatctcctttcttctctctagtcacaggcgaaatagttttctacctcagtcccgtcgctatctaatgtgaattttacttg

SEQ ID NO: 709998 - DNA, 293 bp, Homo sapiens
agattttatggttccaatgaaatatgtggggttatataagatagtaaaaataatcagttacgggtatctgtcacatgacctttgtttccttattcaggaagataaaagtcagtaacctaccccatgaagatattgggggggagtaatatcagtgaagcagttgggtttatattcttatgttatcaccttccaaacaaaagcacttacttttaaagggaagttatttaatttatattagactcagagaatataatcttgcactactcagttattacggtgagttctcttattcc

SEQ ID NO: 709999 - DNA, 101 bp, Homo sapiens
ccctgtggggccctttacttttgggattttttttcttaaaattttgaattaaggctttttttaaagttttaattaagttgtgaagttgcctttcccctcca

SEQ ID NO: 710000 - DNA, 189 bp, Homo sapiens
tttagtcaaaggccccccccccaggaagcatggatggggatgaaggcacaggggtttccaacctcaaaggccctttgtggggtcaggacacaaagtgggagggagacttatgcaggcctaccagtccctggctttttgtttggggctggaataaaaaggtgccttcagctggtgggccgaaaggcagga

SEQ ID NO: 710001 - DNA, 409 bp, Homo sapiens
agcggaggctaggatgttgaagagagctgggaggagatgccaagaacactaggctgcttcctaccatctagctttacaggtccaacatgtggagtaaccaccaagtacaaatgaaaaaagcccatcaaatgtgtccaaattagtggaatatcctcggtctactgagaatcgaagttttctgttaaagacagaacagcgaatatgcatattgactattctgaaccttgatagctgattttctcgtatcacacgaattcttacgacggacaggggtcggtgatattcacgaagcgagagacatcagtcatcgtgggtgatacaggttcgaatcaagcaggaaccggtcgatacttgaaattaaatgagaatcaataaatgctccccagatgcgtatctctggtatatgata

SEQ ID NO: 710002 - DNA, 1015 bp, Homo sapiens
gcttttataaaattaagtaaccacataattaagtagtcgtagcccgttgtcccttcaagcagatctagtctttactttcagtggtctgttaggtccattctgtgtactagacggatgttaataaaaagctatgacgagcctgacatgacattctcagccaacactttaggtcttgtctctcagtcttgcattggacttatgttcctaatattcttattagaagtggattcatgtctcacaatacgctctacggggatgagagaatttgcacttactttgcgccagttcgctatagactgtgatgtagtcaacatccctatagctgttaagctcttcaaggcagccacagaggccgccattatctccgtgctgcgatgtaatttttctaatggttgcttgcgcagcactctgtaccctgtggagatactcgagtacctttagtcttgatgttggctgacaagacctgagcatcaatcctcttactctcaaagggccctatttaaatcgtgttgcacaaatccgtatggtatttatgattgacttcttattcttcgatataagcctataacgactactcgtttactccacacaattgattaaatccttaatatggagaagcaatctcgtcctagtcctttcatatacagtgatcgtctctagtatgaaactatcaaatcatcctttctatcaagcgaatttacaagaattcttagatattgagacccatatactccacagtgggacgtactggtaccaaaatactcactgggggggtcgcctcaagctacagattacccaagtttattaggctcaattcggggccgagaaaaagagccgtcagtagttcaataagacacatagtcccggcgatggctcgttcctaattccgttcaaaccccgggagaatcattgacgcgggttgggcccatctttcggagaaaggaaccctaaatccctcggggtgtaaccttatggggaccaactacctagaggagattaaacgccaagggaactg

SEQ ID NO: 710003 - DNA, 308 bp, Homo sapiens
  misc_feature (64)..(64): n is a, c, g, or t
  misc_feature (66)..(66): n is a, c, g, or t
aagaacacagcttccacagtgtgaaggcggacccgagtgggtttccaatgctggctggggcaangnagtgggtaactaacccacttgggtccttttccgtgcgggggaggctttgttcttttgccctttgaaacaaatgttgctgcttactccatgagtccactgcttttatgagctgtaacactggctgcaaaggtctgcagtttttctcttgaggctggcgcagaccacgaacccattgggaggaatgaacaattccaggcggtaggagcgaacaacttcagacacgctgccttaagagctgtaac

SEQ ID NO: 710004 - DNA, 112 bp, Homo sapiens
agctcctcagcactcgcatgtgcctgactcttccatgtgacatagtggcgtcacgggttccttcctcagcagtcgcatgttgcctggctcttaccatgtgacatggtggcgt

SEQ ID NO: 710005 - DNA, 460 bp, Homo sapiens
  misc_feature (400)..(400): n is a, c, g, or t
  misc_feature (430)..(430): n is a, c, g, or t
tggatgtgtgggtacttggggggacggaggagctagggactaactgtgctcttggtgggcttggagggactaggctgaagatgtgtcttctccccgccacctagctgtatgacaccacattcttcactagagcagcgtggggttgtgacggacatatgagaaagcagcgctattcgagtagctagaagggaatatgaaaggtagaagtgacttcaaggtcacgaggttcccctcccacctctgtcacaggcttcttgactacgtagttggagctatttcttccgcccaagctaaagcgcagagacgctttgtcgcccgtgccattcctgtgagcacatagcgccatgttatcctgggtagttccttggggctttgggcatcgttttacgctcagcgaagngtagaagagatctgtgcccatgggtctccngcttcaatcccttctggtttcagtgacata

SEQ ID NO: 710006 - DNA, 362 bp, Homo sapiens
atagtagtagtagtaaagatattcattaagcagctgcttatcgcatagctgaaccagctccggcgaaaagtactgcatcgccgtcttgcgatacaggtccggactggcgatcaggcgctcggtgacatcctcgccgcgtacggtgaagtgggtaaaccaggagaagtggttcagcccgtagcactcgacgccgagatcgcgctcgtcgcagccgaggatctcgggcagctcgcgaatcagctccgacggggcatcgcagatgccgtacacccgacgcttaaagccggatttgataatcgcctcggtgaccagccctgacggattggtgaagttaaacagaatggcatcttcggcgggtaccg

SEQ ID NO: 710007 - DNA, 460 bp, Homo sapiens
  misc_feature (18)..(18): n is a, c, g, or t
  misc_feature (45)..(45): n is a, c, g, or t
cgagcccgggagtcagangtgggtggtgccggcggtgaggcttcntggacccccaacccccaccccagctgcggctgctccctggtgtgcacctgaggctgggctgatctcagctgtacatccgcaaacttcccggtgaccttgggctaccccaacgtccacctctgggcctcagtttccccatttgttctgggtgtcagccgggccacgtcctcatcggcctgaaggaggaagccacaggcggttgtggagggggtaaacctgacacggggaggcttaagctggagttgaggggggtcataggtgtgacccctccggccccgcgtccgtgctgacgtggcccagccaatggcagagcagggcagagccgggtggcgcctggcccggcatccacactcctggtgagctctgtttgttttcataaccaattcaatatttaagacccggccagccgcggccg

SEQ ID NO: 710008 - DNA, 233 bp, Homo sapiens
aaagagcggatcatatcaactgaccccagatctccccatctcatatcatcagacacactgcgaagtacaaagatgccattctctacagtcccccaaagtcatataacactcctttcagcactttactgaagtatccaaagcccacagtcttatctgacacaaggctgcagtcccttctgcccctgagcctctgacatacacagtacgttaactactttcaaggtacaatgagc

SEQ ID NO: 710009 - DNA, 108 bp, Homo sapiens
ccttaagcatcctaacagagagacatcttgtgtctgtgcgtcactcgggtggaaagtcgacccagagtgcactgtgtgcattgagagaggcttggctgcgatccgcgt

SEQ ID NO: 710010 - DNA, 121 bp, Homo sapiens
agcggcatctttactaatagacgcggcatctttactaactgtgcggcatctttacctaatgagcggcatctttactacatgctctttactacatgaaccggcatctttactacatgacgcg

SEQ ID NO: 710011 - DNA, 107 bp, Homo sapiens
tgtgagaagctccttcaagacgcctataatgctctgagagcttggagtgtgtgcttctgttactcagctggtgaatgaagttgcttattatcatctcacgccctgtg

SEQ ID NO: 710012 - DNA, 316 bp, Homo sapiens
tctttctttaatagagaacccctggggcccttaagagtgacatgggtcccctgggcacaaaagaaggatgggatctccaggcacggggccctttataagccctagagaaaaaaaatggaactatttcctctttggacctttccataccattggagtgaattttttctttctaaacagggaaaataatggtacaaaagcattttttttggtatttggttggatccctcccccacaccctggtgttttaaaatgaagaaaaaaaaccatccccttttgtacaaaaactcttaatgattaaaaaacaaacaaaacataa

SEQ ID NO: 710013 - DNA, 702 bp, Homo sapiens
  misc_feature (5)..(5): n is a, c, g, or t
  misc_feature (107)..(108): n is a, c, g, or t
  misc_feature (111)..(111): n is a, c, g, or t
  misc_feature (124)..(124): n is a, c, g, or t
  misc_feature (133)..(133): n is a, c, g, or t
  misc_feature (139)..(139): n is a, c, g, or t
  misc_feature (187)..(187): n is a, c, g, or t
  misc_feature (189)..(189): n is a, c, g, or t
  misc_feature (223)..(223): n is a, c, g, or t
  misc_feature (266)..(267): n is a, c, g, or t
  misc_feature (305)..(305): n is a, c, g, or t
  misc_feature (310)..(310): n is a, c, g, or t
  misc_feature (320)..(320): n is a, c, g, or t
  misc_feature (333)..(334): n is a, c, g, or t
  misc_feature (336)..(336): n is a, c, g, or t
  misc_feature (340)..(340): n is a, c, g, or t
  misc_feature (347)..(348): n is a, c, g, or t
  misc_feature (356)..(357): n is a, c, g, or t
  misc_feature (372)..(372): n is a, c, g, or t
  misc_feature (384)..(384): n is a, c, g, or t
  misc_feature (390)..(390): n is a, c, g, or t
  misc_feature (393)..(393): n is a, c, g, or t
  misc_feature (428)..(428): n is a, c, g, or t
  misc_feature (579)..(579): n is a, c, g, or t
  misc_feature (601)..(601): n is a, c, g, or t
  misc_feature (612)..(612): n is a, c, g, or t
  misc_feature (625)..(626): n is a, c, g, or t
  misc_feature (701)..(701): n is a, c, g, or t
ggggngcagaacaggaacgaaaaggaccggggggacaggggggcgggggggggggccgcgccgggggcccccagacacaggaggagggggcgaaaacacggcggcgnnggngcagcgaggcccngccaccacngggcgnggcggagggcacaaagcggggggaaccgggagcggcccgggcacggcncnggcgcgccgcgccggcgaagcgggggggccgaangaaaagcggcggccacggccagagcgacggcggcggcgggggnngccagagccaccgggggggcgggggggggcaaaggagnggccnccaccgccanaggggccagagcnncngccnccaaaanngccgcccnncagggggccaaaagnggaagacggagngggggnagncccaaaagcaggggagcggccaccaccgccaaaanggcggccagcaggaccaaagccaggagagccagccccacggccaccagagccaccaccaccacggcggccaccaaagccaccacgaccacggaaggggccgcgcgacgaccgaagggggcagtgtcccaaccgaaaaccaccgtccacganccaccaccaaaggtttccaganaccacgttcgnacctcgtttggcnnggatgaagcactagccaatctcgttgcgtttgacaggcgcgttttctaacttcacaggttgtggccattcacagna

SEQ ID NO: 710014 - DNA, 109 bp, Homo sapiens
ctcgcagcggcctgccagtgtgcatggcatcatctgccagcacattcgtgcttcagccggcacattcccagccacactgtgcggctgttcactcagtggcatcctgcag

SEQ ID NO: 710015 - DNA, 438 bp, Homo sapiens
cagacagggtcttgtccttgtcacccacgctggagggcagtggtgtgatcatggctcactacagccttttaatctacccaggctcaagcgatcttcccacctcagcctcccaactgggactatagtagtgcatccccatgcccagctaatttttttaaatatttggtagagattgaatcccactatgttgccctggctgatctcgaactcctcctgggtcaagcaatcctcctggcttgggttcggaaaggggtaagggattataggcgtgagccactggggcatgacctgctgtcaggtctttatggagcaacggggggcttaggataagtatgcacaggcccccagtgggggctggggcaaaattccttttatgagggccctaacagggggggtacactgtttttggacatgtttctcattcaattccaaaaatcc

SEQ ID NO: 710016 - DNA, 546 bp, Homo sapiens
  misc_feature (468)..(469): n is a, c, g, or t
gtctttcctctcaggataccaagggtggggactctaggaagggtgggggagcaaattggggtattggtccctgggcccagcccccttcaaaaggttcaggcttgccaggctccctttttttttttccccgggtccttcctttgggtggggttgttgcaccatttgtttggttggctggccctttaaagcccttctgtgggagagcgaagggggtcaaaggaaacttttaagcacaaagggctaggggggtggggtccttttttttgagcggtcggggtgggaaaaaagaatgcaagagtggtttgaatgtgcctaatggagaagccccccgtgttaggggatggggggtttcctgggtcttgttccctcccccatttggggttccagccatgaggtccccgggatgaccctttccttccaggggctcgctcccggggggttggcccccctttcaaattttccttcccnnacccctccctccccccccctccctattcccttggggtttttttgggttggttggatggaggggggtttggggcccta

SEQ ID NO: 710017 - DNA, 293 bp, Homo sapiens
cacctacagactaagtcgatacataggtgttctcgtgtgatgagggttatgttgtatgtgtggtgagtgagcccattgtgttgtgtaatatgtagaggcagtatagggctgtgatagtatgttgatctgtaagtaggagagtgatatatgatcaggaaacgtggtactagcacagagagtctcccagtaggtcaatagtcggggggtaggcgaggttagcgaggctgctagaagtcatctaaaagctataagtgggagtagagttgacagtcttgagagaggattatgatgac

SEQ ID NO: 710018 - DNA, 108 bp, Homo sapiens
taaaagagcacacccgtctatgtagcaaatagtgggaggatttataggtggaggcgacaacctacccagcctggtatagctggttgtccagatagatcttagttcaac

SEQ ID NO: 710019 - DNA, 818 bp, Homo sapiens
cgtgcacgaggcgcagcttctgagtatccaggttgctccgtccgtgctccgtctcaccatgacttcctacatgctatctgccagtctgtctggccacgtcgtccttctggagtgcctggtggctgtgctgtgctcctgtgcgttttgtggcctgtgtggtgtctgcttttctgcgctgcccagcattcactgtgtggtgctcctgtgctgtgcctgcttgctgtatcctgtgtcctcctgcccgctttgtgtcctcgtcctcctctggggtgtgctactgtgctgtgctgtgcatactgtgctgtgcagtcactgaccttgctgtcctgactgggctgctggctgggcaactgatgaatgctaaccatgcagaacctcaactgacctgcctggcttcctacctgtaacaatgtgtgctgcgccctggaggctggccaactggcgagctagagtgttgaaagatccgcgacttggtaccatgaagcatgtgggcctgggccctccctgcgactacagccactactacacgaccatccatggacctgcgggacaagattcttggtgccaccattgagaactccagtgatttgtcctgcagatcgacaacgccctgtctggctgcagatgacttcctgaaccaagtttgagacggacacaggctctgctgcattgagcagttgaatgccgacatcaactggactgcgcaaaggtgctggatgagctgacctggcaggaccgacctggaaatgcgatcgaggcctgaaggaagagctggctacctgagaaaacctaggatgaaacagacatgagggcaatga

SEQ ID NO: 710020 - DNA, 620 bp, Homo sapiens
  misc_feature (267)..(267): n is a, c, g, or t
cacgagggggacccgggccgcgtgggcgccgggatggagggcgccaaggggcggggagcgggcgtgcgtgtgtgtgcgagtgcgaatgcgagggaggccggccttgagtgaaaccggagctacaaagaaggggagagtccgggagcgggagggcgcgagggaggagcggcggcgccggggcagctccgacgccctcccgcggggaaggagcccccgcggtgccgccgaggccccgacgcggggccgaccctcggctcgccgcccgcncccgcgcccgctgggaatgatgaagaagaacaattccgccaagcggggacctcaggatggaaaccagcagcatgcaccgccagagaaggtcggctgggtccggaaattctgaagggaaagggattttcagggagattttggaaacattccgagatatgtggtgactgaaagggggaccagattctagagtcgtatggagaagagagggtaacacgactgagacaagaagtagttcaaacagagggtaataagagaaccagatgaagatgagataatgaagaagagatggtgaaagaagacacaaggaaaagagagaggagagaggaagagaagtcaaaaggaaaagaagaagt

SEQ ID NO: 710021 - DNA, 1594 bp, Homo sapiens
taaaaaaaagactatttatccaggggtcccgatcagatcggtgtcctcttaagcaatccaaccagctagggggtgtgccaaaaaaaaaaactctattttaaacacccttgtgtgtgtgggagagtgctttataccactttctcccacgagaaacaagaaacacttaacaatacccgtgtgttttcaccaatgtgagtctccacaaaatcacgagctccctcgagagtttttgtggcgcccaacaccacgagtgagagtattatgtgtgcctctctcaacacacagtgtgtgtcttctctgtgtgtgtgtgagccagagactaagagacgcccctgatgagccaccacacccagtgtgtgtgtctgtgtgggcgtgtgagagttctcacaccacaaaccactctgtgtgtgtgtgtcacacctgtgtgttagcctttctccgctgtggtgtccacttctctctgctgtggagctctctctctctctctctcgctgtgagctataagagcctctttgtgtgttctcctcatatatctataaaaatctcttctgctgtggccacgtgtgcgcacatataggcctatagccgtggggtgtgtgtgtgctgtgggcaacccgccgccacatatagtcgcccaccctgtgtgtgtgtatccgccgagagagagtgttagcgggcgaaagagtatatgtgtgcgcgctctcccacgcgcggcgcatataggggggcgcacagagagcgctatctcggggcgctctccgaagaatatttctctctcctcttctctaggggggggctccaaaaattgtgtgagaagagccgtggtgtgtgtggtggtaacattctccccaaagatattttcctgtgtgtgtgagtttctcacaccaccgacctctctacaaagagatgtgtggggtctccccacttctgattatatcaccccaaaagatctccccattaatattaggggcgcaaatccccccgatggggtggccacccaaaataaattccgacgacaacacaacccgcagggggggtggggtccccacccgaaagagaccacccacgagggaacaccagctgagagagaggttttcccccccaccgagggaacacggaaaaggtgtgtatcagaattccccccagcagggaaaaaacccgacccctccaagaggaagagcacacccaacccaaaaagtgttccccaagagaacccccacatttgcgccgatccttcccttgggggggtcgggtgttgtgaagagcgcctatgaggccacattcttctgtcgtctgtggcacaggggacttttcttctaaagctctcccccaggtggtggtgcgccatctcacgcggagtgggcgattctttcgggagatggcgaccactctttctccccgggggagatccagtgtgcgttccaagagtgttcgacaagggacaaagcctctattatgtgcaccagggcctccggcggacgacgttgtatcaccaaccagctcgacgattttcccccctgcggttgcaacaaatatccctcggcagtaggagtatcaccacgcgtgttttaagtgccccacacagcatcttttc

SEQ ID NO: 710022 - DNA, 1168 bp, Homo sapiens
aacactggtgctagtatacatcaccctggtgcccaagaacaggcatactcagcccactgcagccactgctgggacccgaaggactggcccatgtagtatcccagttcctagcaaagcttcatcactacttttcactaagcacatcctaagccacgtgagaaaatcaccagacaacaatgatgctgtaatacagttgaagaaatcatagcaggtgattacactagctgcactagcagcgccaggaatcagcagccaagagcatcctacccatagtgaagcagcgtacgacatacattttcaggcaagagctcctcccctagtgatacgcaaaattcaaatagacattagcaagaagcaacctgttcacacaagatgcaccaaatagcacatgttacagaacagcaggacaccactgagcacagcaacggcaacagaacaccatgtaacttctctagcaacacagattcccacatcgacacaactcacacttctcaccgacaagtacctggaccaccagcacctctcccaccttatttgcagccccttaacagaacgcatgcgctcgacggccggcgccgttggctgcctcacgcccctgtaattcccagccatcccggggcaacggcagccgtgcacgcgcttctcccctggcaggtccggcgccttcccgcacgaccacgcactgggccaaccattgggtgcacccccctggtctcttacttcaccccttcgaccccacttacgcccggcatgtctggtgggcactgttgcgcctggcgcttccccaggcttactcggaaacgctcttgaagccacgggacacttccgcttgcaccccgcggaaggtgacgactgccctcgccgccgcggcattcaacacccaattcgtcccccgcacttggccgtttccagagcactgtgtgccaaccaaagggcgccaagagaacttcccacttgaacgcaccacagattacgcggccaagccctggaccgagccgtcttctacggacagaatggttcttgcatcatacacagtgtcacacgctacaaattccgacaccgacaaactcccgggatacgccacgcaggaaaaatcccccgcgacaaccgagcctgtgctcaacaacaaatgtccccacaccgttgtaacccaccgacatttacagcg

SEQ ID NO: 710023 - DNA, 576 bp, Homo sapiens
ggagtctggagacgacgtgcagaaatggcacctcgcaaaggggaaggaagaagaaggaagaacaggtcatcagcgctcggaccgcaggtggctgaaggagagaatgtagttgtggtgtctgcacaatatctttgcatccttcaatgacacttttgtgcacactgtcactgatcttgctggcaaggaaagcatctgccgtgtgactggtgggatgaaggtaaaggcagaccgatgatgaatcctcgaccatatgcgtgcatatgtgggcttgtccaaggatgtggcccagaggtgcaagggagctggggtatgcaccgacctacacatcaaactccgggccacaggaggaaataggagcaagacccgcggagcctggggacccagtcggaccgtcagaggcccttgcccgctcgggatatgaagaatcggggcggactgaggaggtgcatccccatgcacctctgacagtactcgcaggaaggggggtcgccgtggtcgccgtctggtgaacaagattcctcaaaatatctggctgtcaataaattgccttcatgtataacaagaatgagatcaata

SEQ ID NO: 710024 - DNA, 383 bp, Homo sapiens
  misc_feature (346)..(346): n is a, c, g, or t
  misc_feature (375)..(375): n is a, c, g, or t
tctcctgcctcgctgcagtgttcctaatctatatgctcacaaagcttatacccatgtggatgtagtatctacttatgtttgcatcttatcctccgtctaggaaaatctgctcccccttagccaatcttggacacaattatttaatagaactgtttgatcaccgatttgttcaatttagtcccatggcttagtaatgaaaatgtgctttaagcttatccttaaaaaccaaagagctttgtatcttgcaccaaacacagaagcacaagacctctctcctttgactcactttgatttcagataagagatgctgaattcatggagtgatacccctgctttgctttctacnaaagtagaacttccttcagtaattaatcnaatttccg

SEQ ID NO: 710025 - DNA, 734 bp, Homo sapiens
  misc_feature (306)..(306): n is a, c, g, or t
gttatacccatactgagatctggtgtggtcacctgcctccgctgttcaaggcgtagggcagacaggtaactcttcccagaggcctgaggccaggccgttcccaagttggaggcgggacaaaaaaatatagtgggcctcccgtgtgctgggggctgggacacgtggagcgcgaatgcaccattggggctggatataggccctggatgaatgtgtcagtaggtaactcgttgtgctctggatagcacctggctgtctccttacaagcatgaaacacgtgcatgtatggagctctcaccacgtagaggncagcgcaatgaggcatttctccaccatttctggggatctttggggcaaacaacaagctttgtccttgaatatcgcgaactcccttgggtgggtctctttccctacctcccttagacctaatcctatttaattctggggtaaacactactacaatgtactaaattactgtattgatagaagactttagccagagggacgtttcccctccttctctctggtgaaggttcgacttaggcaaagatttctcttgacgttcctccattttgtttcgcagaagaggtaacgaagaaccttcccaaggcgatggtccctatcctggtatagtggcgccccgggcaagggttaagaggttaaacttttcccaaattacttaacaaactggggttacttttttgacaacacgcttggaagaaggttcccaagtggga

SEQ ID NO: 710026 - DNA, 1014 bp, Homo sapiens
ggatacgggagttcctccttgctctcgcccctactctttctggtgttagatcgagctaccctctaaaagcagtttagagtggtaaaaaaaaaaaaaaaacacaccaaaggctcgcagccacaaaggggatgaaatttcttcgggacatcctccgggttctcccggttacgtgatcgtcgtggctccctagaagttccttcggtgaaagccttttatattcctaaggaggagcaaaattcaggtcacggggcgaaaatcggtgcgtgattacaggaagcgtgggcattggaaatggggagaacgtgacgtgccttattgaaattgtgcttaaaccttaaagagccaagcgtgggtccatcgtggggatactaacataaggcatgtggacgtggaggcaaacgagctgtgccaaagtgcaagggacacggggggtgccaagggttcatacctatgtgtggtgcgttagaaacgtggggagggaaacgcggagaagagaattatttttaagagagccgatcgtggacaagagacaaggtggcaaagggcgagaaaaatctgtggcaagaagtgttagagggtatgtttaaagggtacaacctaatgtgggcgtgggagtgggataaggctctatatataccatgctcgaggaaatgtgtgggtataggggggatagacagcgcaaagaaagctccgttcaggaagttgtggaagaggaggaaccgtttgttgagggaaaagattatacaattggtataacccttgtggagacaagccaatattatatccggttgggggaagtcgtttaaccagaaaaggggggcccaattttgtgtgtcgttgtaccacggtgtggacaatcaggtgcgacgcggcacaggaaagcaaattaaataaacaccccatgtgtggcggccccacatataatgttggggctagccccaccttgtggtgggcatcttcgagcggaaaaggtctcgtgggggacaccaacttgggtttccacgagagacgtcc

SEQ ID NO: 710027 - DNA, 105 bp, Homo sapiens
aagacacatccttctaataacactagcttcaaagagctcaacaaggtttaacaacctttgggtgtgtgtgtgtgtgtgttttggtggagtggtaggaggagggtt

SEQ ID NO: 710028 - DNA, 2772 bp, Homo sapiens
acacttcccccagagaagcctccgagcgcggccgccattccgggcctcaagcccataaagaaaaaataccggagaggttctggcaccatttcggggtgccaaagcagccatggaagagcctgcagctccctcagaagcccacgaggcagccggggcccaggcaggtgctgaggcagcaagggagggtgtgtctgggccggaccttcccgtctgtgagccctccggggaatctgctgctccagattcagccctgccacatgcggcaaggggctgggcccccttccctgtagctccagtccctgcccacctccgcagaggaggcctgaggcctgccccagcctcaggaggaggagcctggcccagtccgttgccaagccgaagcagcggcatttggacaaagcagatcatctgcaggtattatatacatgggcagtgcaaggagggggagaactgtcgctattcgcacgacctttctggtcggaagatggccactgagggtggcgtttcgccgcctggggcctctgcaggtggaggccctagcacggctgcgcacatcgagcccccgactcaggaagtggcggaagcccccccggctgcatcctccctttccttgcctgtgattggctcggctgctgaaaggggtttctttgaagccgagagagacaatgcagaccgtggagctgctggaggagcaggtgtagaaagctgggcggatgccattgagtttgttccagggcagccctaccggggccgctgggttgcatctgcccccgaggctcctctacagagctcagagactgagaggaagcagatggctgtgggcagtgggttgcggttttgctattatgcttccaggggagtttgctttcgtggggagagctgtatgtacctccatggagacatatgcgacatgtgtgggctgcagaccttgcaccccatggatgctgcccagagggaagaacatatgagggcctgcattgaagcacacgagaaagatatggaactctcgtttgctgtgcagcgtggtatggacaaggtgtgtggcatctgcatggaggttgtctatgagaaggccaaccccaatgaccgccgctttggcattctttccaattgcaaccattccttctgtattaggtgtatccgcaggtggagaagtgccagacagtttgagaacaggatcgtcaagtcttgcccacagtgcagggtcacctctgaattggtcattcccagtgagttctgggtggaggaggaggaagagaagcagaaacttattcagcaatacaaggaggcaatgagcaacaaggcctgcaggtattttgcggaaggcaggggtaactgcccatttggagacacatgcttttacaagcatgaataccctgagggctggggagatgagcctcctgggccaggtggtgggtcattcagcgcatactggcatcaacttgtggagcctgtgcgaatgggagagggcaacatgctctataaaagcattaagaaggagcttgtcgtgcttcggctggccagtctgttgtttaagcggtttctttcactgagagatgagttacccttctctgaggaccagtgggacttgcttcattatgagctggaagaatatttcaatttgattctgtagcatcgtgctgtggcatgtggtctagtctgctgaggttctgtcgtctgctattgcctgttttccctgtgttgacactcttactgctttcaggggctgttgaggcagtgcttctgttttcttgtctattctgcatatctttccccctaggattatggtgattatctgtgttaaaaaataagtccttaaagttactgttttggtgaaattaatattaatgtcagcttatggcttttttttgtcatctctgttgtcaacaggattaactcagttctagtgtagtgtttactgaatttccacacttattttgaagaccctcaagagtaaatgtggcagagtgaaaggagaagttttaattgaactagtagctttgtgctataatagccttaacaaatggacccttgcagggctttgcagctgctcatctgtttgtttacagtttgttctttccctccttccccttcaagtgcacttgttaaactgtgatgaacttgtgattttgtgttttacttgaccaaaaccaagtgtatatgtttacatgtttttatcctgtttagcttgacatgaaataatttatatttggaaatatatatttaagaattatatatataaaaatatatatgtataagagttatgtatttgaaaaaaatatataaaagaatatacatcacaatataatatttatgtttatgtaataaagtaaatacagagctgaaagctgaaggtcaaagcctaacaggactggctgttgtgtggatgtgagttgtgtgaataatctttctgtccctcgcacagaagccagtaattagcatctaatgaaaaggactgttcaagtgggtctggccaaatgtgacagatgcagatcttagaggacttacaaagcactatattggtaattcttacaatggcattagtagcttactctataaatacagagatggttttcctatgcagtttagccaccttctcattaattctttgtaacagcaaatcctaggctcagaggcacagtgctttgtatttgatatacaaagtctctagactttcccaacaaggggcttttgacaaaagagttcaacataaaagtaacaagattataaaagggaaaatagaacaaaaatattaaaaccaatgagaataaa

SEQ ID NO: 710029 - DNA, 171 bp, Homo sapiens
  misc_feature (73)..(73): n is a, c, g, or t
  misc_feature (77)..(77): n is a, c, g, or t
  misc_feature (105)..(105): n is a, c, g, or t
caaccaggtgcatgctgatatcttgagatggcatgctgttagctatgagagtgcatgctgatagcttgagagnccanggtgcatgctgatagcttgagaggccanggtgcatgctgatagcttgagagggcatgctgatagcttgagagggcatgctgatagcttgagagg

SEQ ID NO: 710030 - DNA, 1193 bp, Homo sapiens
ggatgagctactttgccagctagaggccgccacgcaagtgaagccagcagagcaattcgtgctgtggcatgtggtctagtctgctgaggttctgtcgtctgctattgcctgttttccctgtgttgacactcttactgctttcaggggctgttgaggcagtgcttctgttttcttgtctattctgcatatctttccccctaggattatggtgattatctgtgttaaaaaataagtccttaaagttactgttttggtgaaattaatattaatgtcagcttatggcttttttttgtcatctctgttgtcaacaggattaactcagttctagtgtagtgtttactgaatttccacacttattttgaagaccctcaagagtaaatgtggcagagtgaaaggagaagttttaattgaactagtagctttgtgctataatagccttaacaaatggacccttgcagggctttgcagctgctcatctgtttgtttacagtttgttctttccctccttccccttcaagtgcacttgttaaactgtgatgaacttgtgattttgtgttttacttgaccaaaaccaagtgtatatgtttacatgtttttatcctgtttagcttgacatgaaataatttatatttggaaatatatatttaagaattatatatataaaaatatatatgtataagagttatgtatttgaaaaaaatatataaaagaatatacatcacaatataatatttatgtttatgtaataaagtaaatacagagctgaaagctgaaggtcaaagcctaacaggactggctgttgtgtggatgtgagttgtgtgaataatctttctgtccctcgcacagaagccagtaattagcatctaatgaaaaggactgttcaagtgggtctggccaaatgtgacagatgcagatcttagaggacttacaaagcactatattggtaattcttacaatggcattagtagcttactctataaatacagagatggttttcctatgcagtttagccaccttctcattaattctttgtaacagcaaatcctaggctcagaggcacagtgctttgtatttgatatacaaagtctctagactttcccaacaaggggcttttgacaaaagagttcaacataaaagtaacaagattataaaagggaaaatagaacaaaaatattaaaaccaatgagaataaa

SEQ ID NO: 710031 - DNA, 703 bp, Homo sapiens
acacttcccccagagaagcctccgagcgcggccgccattccgggcctcaagcccataaagaaaaaataccggagaggttctggcaccatttcggggtgccaaagcagccatggaagagcctgcagctccctcagaagcccacgaggcagccggggcccaggcaggtgctgaggcagcaagggagggtgtgtctgggccggaccttcccgtctgtgagccctccggggaatctgctgctccagattcagccctgccacatgcggcaaggggctgggcccccttccctgtagctccagtccctgcccacctccgcagaggaggcctgaggcctgccccagcctcaggaggaggagcctggcccagtccgttgccaagccgaagcagcggcatttggacaaagcagatcatctgcagagatatttgttgagtgatgtttcaggctggaagcggtgagccactgacagggatcagagaattccccacagaattgggcagtcacatgcatggatttagaaagacaaagttggaaatgaatcgttgcagctaatttctccctcaagacatgtctacattctgaagctagatctggtggcagaggagactaaggagctcagtatttccacatagtaacaacaaacattctaaaaagaaacaagagaacaatcttacttacaaacagcttcaaaaaataaaatatttagaa

SEQ ID NO: 710032 - DNA, 218 bp, Homo sapiens
tactcaagcacggtcacacggtcacccacaaaccacggtgcgtgcttgtgggttgacgtgttaccgtgctgtgggtgacgtgcttggtagaattacttaggcatagttgagcctttagaatttccttctggcatggacaaaaagcgtcattaacttattgaatattgaattccgtttgcaaaattgaggtgggatccctctaggagtcgaacctgcag

SEQ ID NO: 710033 - DNA, 558 bp, Homo sapiens
  misc_feature (42)..(42): n is a, c, g, or t
  misc_feature (70)..(70): n is a, c, g, or t
  misc_feature (370)..(370): n is a, c, g, or t
  misc_feature (372)..(372): n is a, c, g, or t
  misc_feature (379)..(379): n is a, c, g, or t
  misc_feature (382)..(382): n is a, c, g, or t
  misc_feature (386)..(386): n is a, c, g, or t
  misc_feature (397)..(397): n is a, c, g, or t
  misc_feature (408)..(408): n is a, c, g, or t
  misc_feature (449)..(449): n is a, c, g, or t
  misc_feature (467)..(467): n is a, c, g, or t
accagacctagggacccccggctgcagcggcccctgggccancgagaagatgcaggggtgtaaaaaagcncccccatttcccggctaatggatgggagcgctctgatggacaaaaaagtaaaggccacccatttatcccctcccataagaggacgagaagatggttaggaattttggatggatggaatttaccctcagaagcaccctatcctgactccaccctcgagaacccaaggatactttcggaagaggagcaggaaatgttcagagattttgactacattgctgattggtgttaagttgctagacactgcgaacccaagctgactcacaagaagacctcttaaaaatagcaaccccttcatttgcncnttgtggncancaanaacctccaganttttgtggtgntgttgtttttattgaaacacgtgaagatttgtttaaaagtnccattctaatacttcttnaaaagtggtcctcattgtacttcagcgtaaatatgagcactggaaacagtttcatggagtttaagttgagtggaacatcggccatgaaaat

SEQ ID NO: 710034 - DNA, 640 bp, Homo sapiens
  misc_feature (304)..(304): n is a, c, g, or t
ccccgggctgcaggaatccggaccaggaggaggccatgtttgtgctctcagcactctgagaggctgaggctggtggatcactcgaggccaggaattcaataccagccttgccaacatgaaaccctgcctactttgcaaacacagaaccagctacgaatagcggcgcacgcctgtgagcccagttactcaagacgctgatgcaggagaatctatagaacctgggaggtggaggttgcaaggagccaagatcgtgccagtgcactccagactgggtgacagagtaagactccatctcgaaacatgnataaattaatacacccgattgtctatgtgaaattgatagaatagtgcctgctatataagtagcagaatctaagaatatgctaccactgctttagacttattattgaaacaatgatcatccatgtaggtcagtcatcatctactaagtaggcaacaagctgagcatggtggctgatgcctgcagtcccagagctgtgtgagactgctgttggagaactggctgacgtcagtagattgagaccacggctgccatcatagcaagaccctgtctctaccctgtgggaggatcacttggctgggagcttatgactgcagtgagctgtgacggcgccctgcc

SEQ ID NO: 710035 - DNA, 918 bp, Homo sapiens
  misc_feature (753)..(753): n is a, c, g, or t
  misc_feature (760)..(760): n is a, c, g, or t
  misc_feature (765)..(765): n is a, c, g, or t
agcgggcgcagctcttagtcgcgggccgactggtgtttatccgtcactcgccgaggttccttgggtcatggtgccagcctgactgagaagaggacgctcccgggagacgaatgaggaaccacctcctcctactgttcaagtacaggggcctggtccgcaaagggaagaaaagcaaatagacgaaaatggctaaattcgtgatccgcccagccactgccgccgactgcagtgacatactgcggctgatcaaggagctggctaaatatgaatacatggaagaacaagtaatcttaactgaaaaagatctgctagaagatggttttggagagcaccccttttaccactgcctggttgcagaagtgccgaaagagcactggactccggaaggacacagcattgttgggtctggccatgtactattttacctatgacccgtggattggcaagttattgtatcttgaggacttcttcgtgatgagtgattatagaggctttggcataggatcagaaattctgaagaatctaagccaggttgcaatgaggtgtcgctgcagcagcatgcacttcttggtagcagaatggaatgaaccatccatcaacttctataaaagaagaggtgcttctgatctgtccagtgaagagggttggagactgttcaagatcgacaaggagtacttgctaaaaatggcaacagaggagtgaggagtgctgctgtagatgacaacctccattctattttagaataaattcccnacttctnttgcnttctatgctgtttgtagtgacaactaattagaatgaggcacccatttccaaagggtttataccaagtggcgttgttgcaggtttggaactgagggctgtttaaaggtggaatctcggatgcagggtggggcagtcggatctttcccttaaatt

SEQ ID NO: 710036 - DNA, 533 bp, Homo sapiens
agcgggcgcagctcttagtcgcgggccgactggtgtttatccgtcactcgccgaggttccttgggtcatggtgccagcctgactgagaagaggacgctcccgggagacgaatgaggaaccacctcctcctactgttcaagtacaggggcctggtccgcaaagggaagaaaagcaaatagacgaaaatggctaaattcgtgatccgcccagccactgccgccgactgcagtgacatactgcggctgatcaaggagctggctaaatatgaatacatggaagaacaagtaatcttaactgaaaaagatctgctagaagatggttttggagagcaccccttttaccactgcctggttgcagaagtgccgaaagagcactggactccggaaggtaaccctcgcccctttccagaagccagaggacccagtgttatgtaaaaagtaagggtcgggtgggtagaacccctgcctacccaggccgaagtttctgagaacttggacaaaaaaaatagccagctagtgttctaactactgagg

SEQ ID NO: 710037 - DNA, 462 bp, Homo sapiens
  misc_feature (400)..(400): n is a, c, g, or t
  misc_feature (422)..(422): n is a, c, g, or t
  misc_feature (426)..(426): n is a, c, g, or t
agcgggcgcagctcttagtcgcgggccgactggtgtttatccgtcactcgccgaggttccttgggtcatggtgccagcctgactgagaagaggacgctcccgggagacgaatgaggaaccacctcctcctactgttcaagtacaggggcctggtccgcaaagggaagaaaagcaaatagacgaaaatggctaaattcgtgatccgcccagccactgccgccgactgcagtgacatactgcggctgatcaaggagctggctaaatatgaatacatggaagaacaagtaatcttaactgaaaaagatctgctagaagatggttttggagagcaccccttttaccactgcctggttgcagaagtgccgaaagagcactggactccggaaggttacagtctctngcttcgccatgtacatggcccntccntgtacatggatgggcggggaggtaactaaaagatcc

SEQ ID NO: 710038 - DNA, 181 bp, Homo sapiens
tccgctggagtgtcgctggaaggagcacaagccccctcactcgtgcctttgtactaccactgacgacatggttgctcacatactctaagagcatattcttgataccggaagcagggcttgtggggcaagcggtgacttggtatcgggcaagagccccgttaagccttcatgagggcagcca

SEQ ID NO: 710039 - DNA, 849 bp, Homo sapiens
  misc_feature (753)..(753): n is a, c, g, or t
  misc_feature (760)..(760): n is a, c, g, or t
  misc_feature (765)..(765): n is a, c, g, or t
agcgggcgcagctcttagtcgcgggccgactggtgtttatccgtcactcgccgaggttccttgggtcatggtgccagcctgactgagaagaggacgctcccgggagacgaatgaggaaccacctcctcctactgttcaagtacaggggcctggtccgcaaagggaagaaaagcaaatagacgaaaatggctaaattcgtgatccgcccagccactgccgccgactgcagtgacatactgcggctgatcaaggagctggctaaatatgaatacatggaagaacaagtaatcttaactgaaaaagatctgctagaagatggttttggagagcaccccttttaccactgcctggttgcagaagtgccgaaagagcactggactccggaaggacacagcattgttgggtctggccatgtactattttacctatgacccgtggattggcaagttattgtatcttgaggacttcttcgtgatgagtgattatagaggctttggcataggatcagaaattctgaagaatctaagccaggttgcaatgaggtgtcgctgcagcagcatgcacttcttggtagcagaatggaatgaaccatccatcaacttctataaaagaagaggtgcttctgatctgtccagtgaagagggttggagactgttcaagatcgacaaggagtacttgctaaaaatggcaacagaggagtgaggagtgctgctgtagatgacaacctccattctattttagaataaattcccnacttctnttgcnttctatcacttatagtagtgtaactagatatgaatgagcacgcactagtaaacatgattacccggagtgatattatctgacacc

SEQ ID NO: 710040 - DNA, 424 bp, Homo sapiens
acacaataatgggcgagtaccgtaaaaaagatccgagttgtgagcataaagcctcaggtcaaacataatgtgggaactgcaagatatatgtcccgagagcaaggtcaggaagtagaaagtatagagtcgacatgaatggagaaggcaagagacacttgcgaggccagcaagcaaggactttcacaaaggctcaggctaggacaaaaaggcggagaggagatcggtgacaaaccagttcgtaaatgacaggtggagatgagaccttgaagagtcggatacgatccgaacagggaggaaccgaatggcacagaagcagcatcaacatcagtctgtatctctgtgtgtctctctctctctctctctctctctctctatctctctctctctctctctctctctctctcactctctctctctctctcac

SEQ ID NO: 710041 - DNA, 1018 bp, Homo sapiens
agcgggcgcagctcttagtcgcgggccgactggtgtttatccgtcactcgccgaggttccttgggtcatggtgccagcctgactgagaagaggacgctcccgggagacgaatgaggaaccacctcctcctactgttcaagtacaggggcctggtccgcaaagggaagaaaagcaaatagacgaaaatggctaaattcgtgatccgcccagccactgccgccgactgcagtgacatactgcggctgatcaaggagctggctaaatatgaatacatggaagaacaagtaatcttaactgaaaaagatctgctagaagatggttttggagagcaccccttttaccactgcctggttgcagaagtgccgaaagagcactggactccggaaggacacagcattgttgggtctggccatgtactattttacctatgacccgtggattggcaagttattgtatcttgaggacttcttcgtgatgagtgattatagaggctttggcataggatcagaaattctgaagaatctaagccaggttgcaatgaggtgtcgctgcagcagcatgcacttcttggtagcagaatggaatgaaccatccatcaacttctataaaagaagaggtgcttctgatctgtccagtgaagagggttggagactgttcaagatcgacaaggagtacttgctattttagaataaattcccaacttttcttgctttctatgctgtttgttgttaaataatttgattgtgcacccattcccaaagccttatcaccacccgcccttgctccatgtttgaaaccgaggccttgttaatgcgccattctctgatctcagttgccgaagtagttttttcccgttgattcccttccgtaaacatcacggtgttgggaccttatacatcttgtaacacccttattgtcgtaatccccctctaggcgccatctctccacctggcccttctctctaccctcgcctccgtctcttccccctctttcttcttcatacctaaataggtataat

SEQ ID NO: 710042 - DNA, 745 bp, Homo sapiens
agcgggcgcagctcttagtcgcgggccgactggtgtttatccgtcactcgccgaggttccttgggtcatggtgccagcctgactgagaagaggacgctcccgggagacgaatgaggaaccacctcctcctactgttcaagtacaggggcctggtccgcaaagggaagaaaagcaaatagacgaaaatggctaaattcgtgatccgcccagccactgccgccgactgcagtgacatactgcggctgatcaaggagctggctaaatatgaatacatggaagaacaagtaatcttaactgaaaaagatctgctagaagatggttttggagagcaccccttttaccactgcctggttgcagaagtgccgaaagagcactggactccggaaggacacagcattgttgggtctggccatgtactattttacctatgacccgtggattggcaagttattgtatcttgaggacttcttcgtgatgagtgattatagaggctttggcataggatcagaaattctgaagaatctaagccaggttgcaatgaggtgtcgctgcagcagcatgcacttcttggtagcagaatggaatgaaccatccatcaacttctataaaagaagaggtgcttctgatctgtccagtgaagagggttggagactgttcaagatcgacaaggagtacttgctaaaaatggctaccaagaagtgcatgctgctgcagcgacacctcattgccgttgttcttcgacgaa

SEQ ID NO: 710043 - DNA, 963 bp, Homo sapiens
gcatgtgagccaattcatgttccgttcagggaggagtatactcgatcgcaggtaactcccacactatcaagaatacactactagtctgtggatcttgctttttctagtgaaaggcttcctaatgaataaagattgggagcagtaaaggattttgtggtgtacattaggctactgttagactgtctactggtcccagttttgagtagacttgttccacgaggcatggtcgcgagtagtcagaatatgcatacgtacagagcagtgagtgcaaagtgacatgggtaacctgggatgtagaagggagtgagtaattgaggatgatgtgaatgtagtgatagctagtagtgggacaagtgcgtttatacatggagctttgatgcctctaattcaaatgtccgaggaagcagtacgtcgtttactgtgggatgaagatggccaatcgagacccatgtgatacgaataaaggaagggtatgtagatataatagtcgatcttgtggcaagcaagattgatatcacgggaagagtggtaaagaaccaaggaaatggttgagtttaacaagaagaggaatgtgcgcgccatttgtggtagccattgaagccatgttacaatatttagggcacccaaaagagctatttgtcgccattggattttacaattttggaagggtagattgagctaaatatgggaattctgattaagttctctgtgtgtgacactagattcacaaatagcttctatttgaaaccacgagctgaagattgtgttgtggaaggtgtgcaattatagctttcaagtgtgtgtcccaagagcgcatggtattgaatgcaattcgatggcgaacaggaggtggacagattggtctttgagagatggcaagtggctggacatgaattggtctaccccttgattggaacggtacaaaggggggaacgggggctttttaataggaagacaaaaaaa

SEQ ID NO: 710044 - DNA, 762 bp, Homo sapiens
ggcccattattcaacaggcccaaaaggttgtcggttggaggcacaccacgccctccgggtgccccacgcttttgagatgggaagctccccgcgtctgcttggtcaaaccgtttgtacgctacctaattgagtgcgggccacaggactaccccgatgttgtcggccaaaaagcgacgcctattcgggagtagacagactatggcccttgtcctccctagagaggattccccgaccgctaaacaaatagagaggttgtcacgcctggtgccaccccgctgcgtgaatatccaactctttgaactcgccccgtacgagactgataagacatgcgatcacacgagctccctagtcggctacgctgagataataagggtcctacgctccccccacgcctcccaatgggggacctccaaaagtgtcccacttgtttttgaataaaaatataattttgctccccgaaccccccccgttttataacttgggagggtcttgtcaacaattgttgctattatgatatcttatagcgagggatcatcccgtgtgcaaaatacaagtaacaaaggattgtctgcgcccccaccatgtttgttccgtctcgcgaattctgacgacccaccagtgtgtcttctgttcgtataccgagaacccctgggtcgaatctttcctagaaagagaaggtttgtcgcccccctccctgtaacaacatgatgtgcagccccgaaaaccgcccccgagggcttttcgaaaggaaacacggggccc

SEQ ID NO: 710045 - DNA, 520 bp, Homo sapiens
  misc_feature (424)..(424): n is a, c, g, or t
  misc_feature (431)..(431): n is a, c, g, or t
  misc_feature (436)..(436): n is a, c, g, or t
gagctcggtacccagttcgacggagactctcacatctcatgtgatgctcttattacaggacacagcattgttgggtctggccatgtactattttacctatgacccgtggattggcaagttattgtatcttgaggacttcttcgtgatgagtgattatagaggctttggcataggatcagaaattctgaagaatctaagccaggttgcaatgaggtgtcgctgcagcagcatgcacttcttggtagcagaatggaatgaaccatccatcaacttctataaaagaagaggtgcttctgatctgtccagtgaagagggttggagactgttcaagatcgacaaggagtacttgctaaaaatggcaacagaggagtgaggagtgctgctgtagatgacaacctccattctattttagaataaattcccnacttctnttgcnttctatcacttatagtagtgtaactagatatgaatgagcacgcactagtaaacatgattacccggagtgatattatctgacacc

SEQ ID NO: 710046 - DNA, 573 bp, Homo sapiens
gtgatctagaggatccctgcttgatgtactgcctcaaccccaaaagtgtgggattacaggtgtgagccaccacgcctggcctcctttgcccatttttaaattgagttgttttttgcctgttactttgtttaagttccttatagattctggatattaaacctttgtcagataacatagttggggaatatcttctcccatttcgtaagttatctgtttactctgtttatagtttctttggctgtgcagaagctctttagtttaattaggtctcaagtgattctccaagcttggcctctcaaagtgctgggattataggcgtgagcctaggcgcccaatctagagcatcttttcttgtgcttgctgctgtctgtatgtcttctgtggtgaagcatctgtttaaaccatgtgcctattttgaataagggtggttaatcgtcttactatggaacagtaagagctcttgtatatttgggctacagatctatggttggatgtatgtgtggcaagtgtattcttccaggtgagcactggcacttcatttcattaacaatgatgtcgacataggacagtgtg

SEQ ID NO: 710047 - DNA, 1296 bp, Homo sapiens
  misc_feature (1264)..(1264): n is a, c, g, or t
agcggagctggaagagcctggggccacctgtctggttcagtagtctctctgtctgtgggcctcttgagagccaggcttggtttcgtggtctgacctgaactgagcaattgacaacttccgtagggatcctgactggctgttgactgaggccagttctccctgctggtctcctggacaggagatgagagacggaaatgggcgttaggatgcctaggtaggcctttcgaaactctacacagcagcggaccacgtctagaacaatgcgttcaccccactcagcatggagcaagcaagaccagactatctagaacatcgagagattttgctgcacatggccagaggctccctggagagcataaagttattaattgtgagagcatagaaagttacacgattcggtgcaacgcattgatagggcaacgtaagaaatcagcccaatgacggcattaatactatggcaaagatagtccgccgtaggaaggtctccgggagcagacagttggtctccgtgcccgttccttgacttgcacaggatcgcaagcaagcgcagggcagagaggccgttgccggattccacctaaatcttgggaagggggaccagatacaaacggaaagaaccgggtaactgcacacagacatagagggtttgcagcgttccggccctgcacacaaggaccccctgcaaatggagttggacgtagtccgatgagaccctttgggcaaggaatggcattcaactgggaaacaccaagggccacatggttgggaaagtccttatccaagaagaaacgcatgctgtgtggaacttgtccctccgggttggcggggccaacgaacgggcaaagtgcccccatggaaaggaaccgttgccacttggttaaagaattctccttccaaggccatgaatgacaagattgcgaccatgcctggaatcgacctatctgaacagggcgccaattgtattcgtgcccctaggaaccaattgcctttggaaagcgtcacccccacgtcaccttggaaaagtggcggttgccccataaggcgctcccccgtgcatgcgtaaaaggcgaagacatcggtgtccctgtagagaatagaggcttgggggtgagcacaggattccccagaggcgaaccatccacacgggcgcaagccgttgggacgcaacggattatttacggaaagctcgagttcctcccggtgagagtcgggctgagaacttgcccctttgggtgagaaaagtgtgcccttcggcctcttgcgngcacttttggacccccacagagaggtcctacc

SEQ ID NO: 710048 - DNA, 485 bp, Homo sapiens
  misc_feature (165)..(165): n is a, c, g, or t
gcgctccgaggagatgccggacggatgagattggctcttgctccgcactgagtgtgacagaggtctccagagccttctctctcctgtgcaagatggcaactcttaaggaacaaactcagttgcaccaggtatgcgcgaacgaagcaggcaagcagcttccaaacnaataatgatcactgtagctggagtgttcggacaagttggctatggctgtgtgctatcaggcattctgggaaagtctcatggcttgaatgaacgttgcttcttgatgggatgtttctggacacgcagtagagcattaagaggcaagaaatggaatggcatcgtgtgagccagtgcggaagcgtacagtatgtgcatttcagcaaccagcctatagaattctgtgggatacgactatacaggacttcatttcctgttcgaccgaccagattctagagaatttgtagtggctaaacgtgcagggagtccgatcacgcaacgaa

SEQ ID NO: 710049 - DNA, 933 bp, Homo sapiens
gggtagctgaggggttgaacgatagacccagatgacggcctttacgaagtgaaagaggtcgggagtcgccccctagccgcttctcgtagtcctgggagcacagtagaagtgttgtcttttttaatgaacaagtaaagcatagaaatgtcaacatgggacggagatctacgtcatccaccagagagtggaaggaatttcatgaatccccacagaccaagcccgaaaggaagcccggaggagagacttgacatgaagaacaaagaatacggcgctatgatggttcgagctgcggtttgtaacgatgatggatccaaaacgaagataatccgagacatggcgcaaagttggtatgatcttggagtttaagccagtgcaacagtccgacaattaaatgaggaaagtactgaaagacaagcgtaaaaagctgcgtgaaacctttgaacgtattctacaggactctatgaaaaacgagaatccagatagtttacaaagaattgagaaagctagaagtagaatatgaacagaagagggctcaacttagccaatattttgatgctgtcaagagatgctcagcatgtggaacgtggagagtgattcctttgccagatatgccaacatgctccttccaacattttgatccaggacattccacgttcctggtgccagcaacctctatccgtaaagaaaaacttcagctatgggactccaatcgggcagttctatccttcctcttcttggacatggtgttcccggtttgcccctgagaaaactctggcttcccctggttcacttctcctcagtcggcgattgattggcgaaggggttggctaacttccctctgtaggatgaagctctatagtgctccccccgctaaggtgtacgcgacttggcgcgcgcaattaaaggacacatgaagcggtttgttagcacagg

SEQ ID NO: 710050 - DNA, 279 bp, Homo sapiens
agttttccaaagaaacaccacaatgaccctctccaggaggcaccactcccggccctccgacagcgaccaccaccaccgcctccaccaaggcagcactcccagcccgtccaacgactacacccatcactccacctgtgcatagtatctggaggcccgaaggctgcggagcctctgtgtgctgtgaccattcctgctttgcaagtaggctgacatcccttcattatgccctcaaagcggatagagggcaaatggagagatgcggagagtcctcctctttct

SEQ ID NO: 710051 - DNA, 926 bp, Homo sapiens
  misc_feature (477)..(477): n is a, c, g, or t
  misc_feature (484)..(484): n is a, c, g, or t
ggccccgactgcgggtttctagccctcgcgtggcgtggggacaattaggcgccacgccctgtcgcttcactgcgcgacgctcgcgaggccggggacgccactcccagaccgggcgggacgcgcacgctcacagtgaggtctcaaaagatccccacctcagttttctcatctggaaagtggggcctcgtaatcctgtccgacccggcgcgggacagtaggtgtcagggattgtggtgaccccacgctcgaggcctctgcaaaagggggctgtccagtggcccagagacgcagccggcggggcttttgtctagcgggggagtcttaactgagaggccacgcaggccggcaggaagccgctccacaggagggggctcaaggagaggggatctcctccctccagactccggccccgccagagtagctctagggtatcttcccagaaactgccccggacgcactggcgagctgggagcgccnacacggntttcaaaaagaccgcacacaccaagataataatgtgtcgttcgctcgtttcgcgcaagcggagtcgcgtccgccttcccggagcctgggagacgatgcatcactgtaagcgataccgtcccccacgaagatctcggtccagaagccatggacgtctgcctaccagaggaggtaccgggagcgccgtgacagcgatacataccggtgtgaagagcggagcccatccttgggagaggactactatggaccttcacgtctcgtcatcgtcggcgatcgcgggagaaggggcataccggaaccgcaagcatgcccacagtgccacaaacgcgaaccaggtcttgtagcaggcctcctcgagaaagcaaagagcagtaagcgcagcagcggagtgtgggcagatgacaaggagggtcacctggggggccggatcggcgaatgctcca

SEQ ID NO: 710052 - DNA, 136 bp, Homo sapiens
cctagggcatccttattaaaatactgagagggactcatctgcagaattctgattctatttatctataatttggcacatgctacaattttatttacaaaacaattaggcaaaaaccaatactagatatatgaatcag

SEQ ID NO: 710053 - DNA, 165 bp, Homo sapiens
tattcgtgttgccttatgttggtgagcatcttttttcagttttttttacttacacatagtacaaatgtcctgtccatatacatatcattttgtagaataccctagagtgacacattgcagaagtaggatagtatggtcaaagggataatgagcatatttacttgt

SEQ ID NO: 710054 - DNA, 226 bp, Homo sapiens
gacaagtccttgccctaaagttcctgtagatttgttccccttcacttggctgtgcttcatgatgtaactgctttattcgtttagctaaagaactcagaaaagttcaggggcacaactgacttatgaattttcacagatacatcaaccatgagaagctgacacgtgcgtgagtatatactaacttatgacgaatgtcagaatgggccagaacttcttctagcttaaa

SEQ ID NO: 710055 - DNA, 918 bp, Homo sapiens
gatcatctcgggtcagacattgccccgttatgtttgccaatgccccagtcctagagacttgtcctgacagtgccgcacacctagctttgtgatactgctcagatgcaggtggctccatccccagactagcctggctgctctccgaggcccctccaccatgcatccccttattgccccattcttgtggcttgccggtgtccacattggactcccttcttgccggtgacagcagttccatcatctcacccgcgtccccaatggagccaagctgcgttctcactcaggctggtgtcatttcaggaggaccaaagcctgcgtgagccgttttatattcttcagtaaaatggtgctttctttccttacttcgagatactatatataaataataatgtacactgacaccttttcgtacggagctgtatgagtattgctttacacgagctcactaaatcagcttcagcaatcttgagctctgtggctcctcaccctgtctgcatggaagaccttgctggacgctctcgggagagcagacatacgcaccagaagccactgggagaagtgtacgcgatcctgtgtctgggccacgagtagtatgcactgtatagtctattgagttccgtaaagcagtctcttcataccatttcttacagactggagtgtactggactaaaatctgtgtaagcaacattgacatactctttctaatgagggtagcgtcaccagcggggtataagagtagtccctcagcgactatgttgcgtaatacgagataccattacctggtcagacggggacccagactcgtttgccctcaattgtggcaacggagaccgtgccagggctgggataaacgggaagacgtctgggtaaccctggaaatttacctgtatcccagcgttgactccaacagctacagcc

SEQ ID NO: 710056 - DNA, 270 bp, Homo sapiens
aaaatttttttcccttttttttttttcccttgggcccccggggccaaattttaattttttttgggggggggcccgtttaaaggttttttgtttttgggggggttttccttgggcccccccccgcccgggggtgttaaccgttttaaaagggttttttttttgttggggggtggggggaaaaaaaaaggttttttcttaaggggccttttaccggtttgttttcccttaaatttttaaaggaattgaattaaattttttttttccggttta

SEQ ID NO: 710057 - DNA, 106 bp, Homo sapiens
gtgctgtccacctcctctgtggcacagaggaggtggacagcagaggagggaaccagctactagatggttcgattagcctttcgccccctcccctcctctgtgctgt

SEQ ID NO: 710058 - DNA, 326 bp, Homo sapiens
ctcttgtatatacattcattttggagggtaagtctctcaaaataggcctttcactgggggaaaatggtaaaaatactccctggtaattcaagaattggagactcctgagatgctgctcatattagctgagcacttatcaatacttcacttttttccatatatactcaaggaacaagtgctatttaaagtgtttcactccactgtgctaggtgcaagactataaagaggtgtgaggatcaacacttttatgaaaaccagtgtcattctggatatagtttcagatgctagtgcaaaggaagctcttggtatacggaaaaagtattcaa

SEQ ID NO: 710059 - DNA, 109 bp, Homo sapiens
gtttgcagtgctccatttccattggtggccccagctcagtaactaaacctggtacatttcctgtgtgcaatcagtcccttgaaggcagaacattttgaataaagttgga

SEQ ID NO: 710060 - DNA, 127 bp, Homo sapiens
  misc_feature (110)..(110): n is a, c, g, or t
ttctgcctgccccacctttgaccctattctaattgcttatagtttctcaatccactatacaaaaactatgaggaactggggtgaagagcagttaacccattgggcaggtntaaatgggcaaatgggt

SEQ ID NO: 710061 - DNA, 970 bp, Homo sapiens
ggtttggggctataatagcaatagggtgccctaggagtcgagcgctcgtgagttggaccacttctatttggtggcatgatagtagattgtattaggcgcgattcagtattccacggtccgctgaccattaattgtgctggttatcacaaactggagtgtagagtatataatgcttgactgcttgcactattcggaaggataggaagtgatcggggtggttctgggtgcagttgttcatagagcgcttagagatatcatcattttttgtttctccagtaaaggtgtgggggaattgccttttgtagttagtataaatcattatttaagacattgggattaaaaagattaggtgaggagttggtaactgtggttgcacaattatagtgcttatcattgggaggtgggagtgagcgagcataggagggtcaagttcagtgattggctgatattctcagggtagcagcggtagagaagtgccgtgaagttgaaatattgaatatgaagtatcatgggttcgtcgtgggtaattcataactatgtatccttattaagactttggtcgaggcatattgcggaatggcggagagtttgttgaactgctgggaatggcataaaccatcttgagggaatttttatctatttggatgggctcacttcatttgaacgtgagggaagggtggtccgataaattgtatgcttggagggtagtttgagggagagtcctattgaagacgtagttccggaaaagcggagtgcatattaattcggggaaaaactctaatcggtgtctaggctgaaaagaggcggcttttcgggcaggaattaaaaagaatttaaaaagatggggaggggggcgagaaaaataccaggggagaaatggaggaccagtggtagagaggcggagggggtccaaagggaggcgggatatattggttttaacaaattgcggggtgatttgtttcatagtttc

SEQ ID NO: 710062 - DNA, 440 bp, Homo sapiens
ggggctcattcaggcgcagagaagttgtgagggaggagacaattgtggctaatggaggcgatggaggtgggggtagggtggggcgctcgatgtctaggtggggggggcagatgtcatagatggcttcgttgtccaccatgaaggcacagtctgagtgctccaggtgggtgtgggtggtcaggatagagtggtagggctcgaccagggttgtagacacggggggggctgggtagatggagaatcccagctgggatttcttgccatagtcaacagagagccgctccatcaggagtgaggtgaagccagagccagtgcccccaccaaggctgtggaacaccaggaagccctgaagtcctgtgcacgggtcagacggaacggtacgaccgagaccgaccagtttagggaggggaggggccggagggactctatcaactgggtcc

SEQ ID NO: 710063 - DNA, 309 bp, Homo sapiens
agaacaactacctgtaaatcacatatgcctaagccctagtatcctttttcattaccacaaaaattgaaggaggacaaagaagtcgtataagtctattcctcctcctctgagaaagatacagaagccaccttcagaaggcagcagtctaagaagctcttagctcagtgcccatatacatgttcataacagattcatatgccaataaaagcaaaacccttctgataactcaaatcttgtatagatcaacagtgctgtataaaaacaatgcataagctctctctaaccctcatctagatagtctaaaattga

SEQ ID NO: 710064 - DNA, 196 bp, Homo sapiens
ctctagaggatctcttgtgaaggacctgtgctcactctgcactgcccctcagcaactgcagctttctgccgaggccttggcccggatcattctctgtccacgttggatatggttcaggaaatacgtggtacagttccacctccgtctccggcttaagtgcataacgtgcaatcgtctggaacgcctgctccacgtt

SEQ ID NO: 710065 - DNA, 346 bp, Homo sapiens
ctatggaaaactctttgcgttgttgtataatttgaaaatccctcctgtgtctgtctgtgttcagatgtccccttaacatgataacagcagtctatactagactgtgggcacaactttatgaactacatcttaatgtgataatctacctaaggactatttccaaataatgtcacactcatgggtactgaaggttaggagcttcaccatctaatagggaggacacaaattcaatcaaaaacatataccatgttagtaacaatatgcaacatgtacccatatggcagaagattttgaaagaacaggcagaaataacagtagcattgttagggtagggtcagaacatatg

SEQ ID NO: 710066 - DNA, 235 bp, Homo sapiens
attcgcggccgcgtcgacccatatctactgtaaaagatgctgtggtgtatagcacaaattcccacgcacaccattgtgttactaacatgtacaggatcaccccattattcctgtaggatgggaaccaagaccctccgtgaagggctaaaaccggaattagttccaaaccctaatatactgcgctgttctttacatgtatatctgtgataaggctcaatttgaaagttaggcccag

SEQ ID NO: 710067 - DNA, 659 bp, Homo sapiens
agcggggtgctggtgcctgcccggggactctggagcattgggatttgtagcgctgccctctgtgtgtagtgctgtgctgtagcggagaggcgtgcgggatcgggatgtcgtgtggctgctcactgtgaccctgtgagcaggagagcgcagtgagccgcggtaccccggcttcgtgcatggggctggatgtggtgcagttctgtgatccgcatgccacgtctatgacctgggcggcgcgggtctgcgggctccagctgtggcagaaggtaggaacacagtcttgagtcctcagaagtttggcttgggtcagaacatttgatcctgattgttacgtttgagacttcaaaggtttggtttgccggttacagtcgcacgcgaaaggcgtgtcaaagatgacttgcgaggtgagataagcagaattgacattcaaagagttgcttgggatcatatgggccgaatttgtctatagcagcaggagtgaaggcaaagcgtgtgttaattaagcgtgtgggaaaagcagagggagagagatcgacggggagaaagtgcaatatggaggcaggcaaggcgtgttgtaagtaggagggtatgggcaggagatgaacgttgtagagggaaggcctgtgttgtggacagcgtttgtggtaagggagttctac

SEQ ID NO: 710068 - DNA, 122 bp, Homo sapiens
atgacgaccatctggacagccaggacttccattgacttggcacgactctgcatgatgtagatgacactgatgattctcaccagtctgatgagtctcaccattctgatgattctgatgacctg

SEQ ID NO: 710069 - DNA, 257 bp, Homo sapiens
ggatataatttattaggtgttttactggggctaactatattttcgatacgtgatccagaagtttttcaaaacttggtactttatttacaacaaccgcaatttatcagcatcattttaatcatgtttttggtgctggcgattcctttgtatctgagtacttattgcttttatgcaaacaagcccagcgattggaggcaaaatggttggatctaaataatcctggagcttcccttttttggcggttaagccatggacaa

SEQ ID NO: 710070 - DNA, 498 bp, Homo sapiens
cctatactacccagcgaacctctaaaggcacagaatctctcttcagctctatactcctaacgtccggccaccaaaatcggggaacaatcacaaaagatataaagtccttcatatggggttctggaaaaaagggtctagtattctacaaattaattctaaacaaaatagtaaaccacactgggaagccccgatttggcattctattacaagtcagaagtacttaaatggtggttatctctcaggagggggaccggagtggggaagggtgtggttttttggccatggcagtactcggatgaaaaagtaacagaagacaaaaacatgatttggaagaagagggagaaaaattcagtggaattacccagtttctcattattccctagggcaggtgacttaccaatctccaactaacaaaaggttggtcctctcataaatctagggcaaaggcaagggatggacaagaatctggaatgtgaatcagacctcctttgttggttt

SEQ ID NO: 710071 - DNA, 782 bp, Homo sapiens
  misc_feature (47)..(47): n is a, c, g, or t
  misc_feature (83)..(85): n is a, c, g, or t
  misc_feature (116)..(116): n is a, c, g, or t
  misc_feature (119)..(119): n is a, c, g, or t
  misc_feature (132)..(133): n is a, c, g, or t
  misc_feature (146)..(147): n is a, c, g, or t
  misc_feature (188)..(189): n is a, c, g, or t
  misc_feature (210)..(210): n is a, c, g, or t
  misc_feature (367)..(367): n is a, c, g, or t
  misc_feature (393)..(394): n is a, c, g, or t
  misc_feature (396)..(396): n is a, c, g, or t
  misc_feature (453)..(453): n is a, c, g, or t
  misc_feature (495)..(495): n is a, c, g, or t
  misc_feature (508)..(508): n is a, c, g, or t
  misc_feature (570)..(570): n is a, c, g, or t
  misc_feature (574)..(574): n is a, c, g, or t
  misc_feature (636)..(636): n is a, c, g, or t
  misc_feature (638)..(638): n is a, c, g, or t
  misc_feature (759)..(759): n is a, c, g, or t
acatggcgacagaagacgagacacaactcctcccccactgcctcccngctcaagaggggggacaaagagggggtgagacagcnnnagggagacctgagcctcagtccagccctacnggntccaggcctgcannaaaggagggtaannaggaggcagggcccagccccccagtgtggggaaacagctgnnggaaggcccccctcaaaaggntccacctcctcaccagcactcctgcccagggacagggagcccacagcagcaaggggaccccggggccatggccacattcatgactgagaagcagctgagtggaggcaggagacacgattttctgggcagaatcagttggggcaggggcctgggaggnccccttgggcaaaccctgaggtcacnngngggggcccaaagcggggctagtgagtgtggtcctgagtgagtgggtcagcggctggncccctttctccagctgcctgtggcccctccaatactgctgcngggggggcccgcntccagggtaatggataagttagcagcctgcccctgctgcagacagagccaggtggctaaggncagnttggttggtccggccaggccttgccacctgcccccagaggcctgtgggaaaaggacaggtcntntagggtggggacaggggctcgaccggctcagatccaagatggtgccacgcttgcttgctgagtcccccatgagctggggtactgcactggggccagcgactagttagacaggaggcagcancttctcaagaaattccttcacag

SEQ ID NO: 710072 - DNA, 484 bp, Homo sapiens
tcacagagcaagacaggtatactatagtacaagcacgtagcccgcctcttagaacctctcatttcctttccatcgtggaaatctatcctcaaggaaataacttctcaggttccatctgctattctactactcctcagggattattcaggtcccctcccttccctacccatcaagctcgaggatttgccccatccaggactggcaaattagctttactcaacatgccctgagtcagataactaaaatacctcttagtctaggtagatactttcactggataggtagaggcctttcctacagggtctgagaaggccaccacagtcatttcttctgttctgtcggacataattcctcagtttagccttcccacctcaatacagtctgaaaacagatgagcctttattagtcaaatcagctaagcagtttttcaggctcttagtattcagtgaaacctttatatcccttacggtcctccatcttcaag

SEQ ID NO: 710073 - DNA, 167 bp, Homo sapiens
tagttggagctgcagtggctggttacaccacagctacagaaatgcagaaccaagctgcatctgtaacctacaccacagctcatggcatgtccaaattccttaacccactgagagaggccagggatcaaacctgtgtcctcatggataggacgcgccatcgtgcgctt

SEQ ID NO: 710074 - DNA, 355 bp, Homo sapiens
cccccccctcaaacccccccaaaaagaaaaaagggggggcggcccccatgaaggaattggaaaactgggggggacccaggtaagggggcccagggcgggcggggcccagccaaactgggggggcctgcccagcaaccaggggggggggggtggggggcaggcaggatgggggccgggcgggtcccctcgctttggacttcccccccaaaccagaagggccgggttgcggccccctctcggcaaggcaggggtggccccggggaaaggggggggggggggggggcgggcggggggggaggggcccgcggtttaaaaggttgaattttggtaaaaaaaacgggattggcaaacccca

SEQ ID NO: 710075 - DNA, 150 bp, Homo sapiens
acagctctctgtggggcttctggctgtggagggctcactccatgtcaaatctccacagtttacctgggctcaataggtttgaaacccagcacattaatatgaccttcccaagcaatgcaccaactgcaatgcaggtcattaacaattatc

SEQ ID NO: 710076 - DNA, 199 bp, Homo sapiens
aggagaccatcaaagaagcggctggagacctattacaaggtcacagaaccctgtcatctgccttctatcagaaactgtggctattgttgcgcacatggtcaactgctgatgggctccggtggacatgtgtcttctcccagggtctgcacccaccatggaggccctataagtagcaacgctggatgcggtgtatcgcttg

SEQ ID NO: 710077 - DNA, 127 bp, Homo sapiens
ggctatcacatatctgaacaactgataacatgtatctccttcacaggttcatggtcaggtgttaattccacccgcgtggattctttcacatctctggtctttatttaattcccgtcccaaactctcc

SEQ ID NO: 710078 - DNA, 248 bp, Homo sapiens
aggattcgtagatccggaacatcggtccaccccagagcaggcagcaagaaccgcatccagcacccagcaacgtgctgcacttcttcaacgcccctgtggaggtgaccggaggagaacttcttttggagattctgcggatgagcttggggagttggaagcgggccatctttctgtgaaaagtattcctcagggctaaaagttggagccgcagttccttctgggaactggctggatgtggggaatccaaa

SEQ ID NO: 710079 - DNA, 734 bp, Homo sapiens
  misc_feature (141)..(141): n is a, c, g, or t
  misc_feature (156)..(156): n is a, c, g, or t
  misc_feature (178)..(178): n is a, c, g, or t
  misc_feature (190)..(190): n is a, c, g, or t
  misc_feature (193)..(193): n is a, c, g, or t
  misc_feature (199)..(199): n is a, c, g, or t
  misc_feature (231)..(231): n is a, c, g, or t
  misc_feature (603)..(603): n is a, c, g, or t
  misc_feature (624)..(624): n is a, c, g, or t
  misc_feature (704)..(704): n is a, c, g, or t
gtagagatggggttttgccatgttggccaggatggtctggaactgacctcaggtgatccacccactggcctcccaaagtgctgggattacaggtgtgagccactgtgcccggcctctttttactttgttaatggtgttttngatagataacagatngtcattttcatgaagcacagcnggtcagtttatngtngctcangtatttggcctcatgttcgagtccctgttttnaatcatgagctggacacagccctctttagagcaactgtgaccacttgtggtgagaagtgcagcccacaccatccacgtgaggctcccacacgccatccacgtgaggctcccatgcagacatttagaaggcgttttcactgcagctcagaaaatggccccaggcccccatgggcacccccatgtcaccagggcctctggttgctgccggtacacagggataggcagccaggcctcgaaggtgctgggcatgggtttgggtgtctgcgttgggtagagacccggagcgcccttgctgggcgtgccctaacatcccggtaccctgtgcccctctgtgggccaggacgcctggtgctgccagctgggcgtaagctncaggagctgagggtggctgtnatttggaggatgagtaggagctcaccaggagggcgtggagccgaggcgtttaatatcatcaggagcaacacttggctcanaaggcaggcacactttccgtccctccagag

SEQ ID NO: 710080 - DNA, 661 bp, Homo sapiens
gtggtagagggaatactaacagatataattacagataaattatacaataatgacttcagcgtaaatctatatgcacaagatattcaagtctcatcttcaggacatttacttgtggattatgaccctctctacttccaaacaggatttgaaatggtgcttcacggttgctcactcccaggacgaaaagctctgggtcatctagatttgggtagagacttttgagtccctctatgatcccaaattataactagcacaaaggtaagctaacaaattccctgacaggcaggcaggaaaaatgctcccgaaagacaagtatctttacaaatgacagaatatttattaacaatacctttaaaaaagattacatatgctagatcactggtaaatatcatttacactggggttgggaactccctgggtgtcattttttttcgttcattttattattttgctgatttattttttgcatgtgattttaaattttatttcaacatagaagtaaccatatcaaactaagaaaggaacacagcttgaaatactgacaatatttttttccggttaccaccctagtttttacacaaatggaatcccgattatgactttatcggataaatataactagaaggttgaaaagttatattttttgtaagcaaaatgacaa

SEQ ID NO: 710081 - DNA, 207 bp, Homo sapiens
ctgaagctatcagtaagcggagcatcagtaagcggagcactgggcagaaatcacagcataacatacccccagcaggtgtgaccgctccgtttactgacgcttactgcccgcttactgtcatcaaaccctatagcgacgtcgctttttgactccttcgatgtcggctcttcctatcatttgtgaagcagaattcaccaagcgttggat

SEQ ID NO: 710082 - DNA, 432 bp, Homo sapiens
gtttatacagaaagctttaatagttagtgtgtgcccctggtttttattcttccccctgctaaaatacctctgtaagcctgatcctttattctttcatatgctgtataataaatgtattgatttcattggccatctaaaatgttgggtgtctgtcaatgaggccgaacggtgggttgcttttttcataaaataatttctattgggggtttctgttcaatgacagcaggtcccctataactgtgaatgtttcgtgtcgtcagtatttgcattcatttcataccagtgtgccagtcctgtgactccctgttttcctgaaaaacatgttatgccaacctaacttgagtacagcaaactggttttaggtttcaatgacattaatgtaaaataatatcccataaataaaaagtatttgtgtttggtttcagaaaaaaa

SEQ ID NO: 710083 - DNA, 121 bp, Homo sapiens
gcccaacgacctacggcactttgaccccgagtttaccgaagagcctgttcccaacttcatttggcaagttcccttgacagcgttcttgttcacaaccagcgtcaagggaagcttcccgagg

SEQ ID NO: 710084 - DNA, 81 bp, Homo sapiens
ctgtatttcgctgggctctctaaatggattcagctccagaggaggaaaaccttgagaccctgagactttcagaaacttctt

SEQ ID NO: 710085 - DNA, 1076 bp, Homo sapiens
atcggagttgctgtcgtgaggtcgccgtgtcctatgcgcgggggctgtgcggcggtttggggtccgggggggctggttgtcggggacaggtctgccgttgctgttgtgcgcgctgaccgtggtgccgggcccggggtgccggcggtggggtctctgggtgtcgcgtacaggggggctagcgcttcgtcgccgcctgggtcccactgtgaccccatgccattccatatgctgtccccgccgtgaatttttgggtattatcccctgctcatggggcccagtcgtttggggccccttccggggttagtcaaccgctgtcgctgagccccctatgtacctctgtcgcccggggcgccctctgtttaccctccgcccagtgtgtccgtgcgcccgtgtacatcgccggccccggcctgtgggttttcaccctcggtctgtctactttggacgccccccctgccccattccccgccccgctgtaggtcaaccctcataccttggccctcctagttgattgctagccaccctctagccctatgccggttactcaatcctctgatcagggtgagcatccgaactccaactaccccctgatcggcgcactgcgagcagtagccccacacacatctcatatgaagtcaccctagcccatcattgctactatccaccttactaataagtggctcctttaacctctcccacccttttccccaccccaggacccctctgattactcctgccatcatgacccttgcccataatatgatttatctccacccttagcagagacccaccggacccccttcgaccttgccgaaggggagtccgaactagtctcaggcttcaacatcgaataccccccaggccccttcgccctattcttcatagccgtataccccaccattattataataacaccctcacccactaccaatcttcctaggaaccaacatatgacgcactctcccctgaactctacaccaacatattttgtccacccagaccctacttctaacctccctgtttttatgaattcgaacagcatacccccgattccgctacgacccactccaacctta

SEQ ID NO: 710086 - DNA, 213 bp, Homo sapiens
cacagagcagatggccgcgtttgtgatggatggattattaataacattaccttactgatggaggcaggattgtaaaaaaaaatgcctttgagacagtttcttagcttttaaactggtggtttcatttctacgtggttcttggtcacagcaggtgtcagcaagccattccattcgttggcatcacatgttcacacattgtgtcacagtttccag

SEQ ID NO: 710087 - DNA, 1040 bp, Homo sapiens
tcagcgagaacccagacctttcccaacagctcaggcattcttcgaacaagttgcagacaaattgatgacttccaacagctgcaagactttccagattgcaagggtcacaatcacgcatccaacctattcaaaatggcaaatggctgtcttagggctgcctttccaacaggcagctcgcacacgcatcattgctcagtcctcttcagcgggctctgggcctggcatgccggcaggctcacacaagcttcctcttcttggcctcctcacacacagcacacacacaggcaactaagaggtccaacacacatcctggtccagatgacaccatcattccagcttcatctccaatatctcttacagggccatgttatgcaccaccgtgggcccacaaatgctcacacctggctgcccccagatttcatctatccagagtcacaatcacaaacagggccttatctagcgagggttttaaaacatcgaccttaggcagagggggttcataatagaacggaaattgcctagggaggggctttcataggcaaacgatcacaacgttgcacggccaggccaaattgcaaaacatgggctcactcgctctgccatcccctcataacgcctcaccgcacaacacctactggcttacatcggttcgcccacttccctcctaaaatccaccctaacccgctccacgcctattccattcacgacacgtcaacacgcggtaacggcgttcggcacactatcaacccccccaacaaagccatcaactcgactacaacggggcgcaaaacctcacctccgccaacccaaacgcaaccgccttacaccccccccacaccagcgccaaccagtagctaccaaaccgccgacggaaccacaaaccacgaccacaccagtagcacaaacaatacctcctccgggacccgcagggcgacacgacccatggcaaggacatcacaacgcgcaccacccacactgcacgggaaagcccccaacctaggcaccagcgacatcatcggaacggcaccggcaatggccca

SEQ ID NO: 710088 - DNA, 1174 bp, Homo sapiens
caggctttcatttgcgcagcaaggcaacgcagcagcaaggcacacattcagtgcatgcatgcaggccagcaggcacagcagcacacaggtgcagcaacagcacagcaggcaagcatcaacagcatgcatgcacagcaccacagccccaagcatcgcacagcatggtggagttccagcatgcaggcaggcatgcaccagcgagtcaagagcatcaagcacacgcaagcacacacactcaagcacagcatccaacagcagcacacatcaccattgcatccagagcaagcacactcaaaccaagcagcccaagacctaatattagagacacccaggcaacaccctgacatgcaccatcccacccccacagaagagcagtcataggcagcacatttcatcacgacaggcagaccgtcccactacacatagcactctggagcacagacacctcacgtattggaccagatccaaagccaccttatattacctaggtcacgcaacgcgtacccagatctggcacacttcgcacgcgagaccatttcgccatcaatctatcatctacccttccagatacggagagaccatccccctttattgcaccctatttcgtatcgcaggcacaaccacaggcacaggcacaaacaaggcaacccacaaccaatccacagacaccttgtctacaatacgttgccctgaaccccgtttggttctgttataccaatatccaaattggggcaccaatgccgtaaggtcgcaatcggcacgtctaagacataaaccccaaagcaatgttacattccttaccaaaatttcactacataccccaggccgagatcgttagaggtaaaagaacataactttagcaggggcattctcggccttagacacaagacgaatattcgaccgcacccggacgaagcaaaaacatagggtcccacaacaggaaggcaaaggaaatcaccatcaccacgcacaacgcgcaacacaaggcacaaagcaagcaccacagaacacacccttaccaacacaacaggacacatcgaccaggcagacaacaaatccacgtaacggatcacacaccgacacaccggaagcaacgtgaagaaagcgccgatcagtcaccagaccatgacaagccatagggcgcgagagacaaaccaacacaacagcgagagac

SEQ ID NO: 710089 - DNA, 841 bp, Homo sapiens
ggagtcccccataacctgagaacgaagagaacaattggctgggcgaactggttgaagaagggtggcgcgcaactggaagggctgattcaagggggcagcaaggaacaactcttggacctggatgccaaggtacaaacagggcaaaggttggcaaattggttatactccttaaacccaagcttctttggattttgcaagggaaagccaaaaatggggaagcttgggaaagcacttgggtgattcaagcccccagccaaggccatggcaggaatatatctgcagtaattaaaaaactagatcccagttgggaatcctccaggataccagcagaaagaaagggaaaagaagcaaatacagggtttgggtgggcccagttattagttctctatatcatgaagaaacccatcagggaagaagaccaaaatatatttgattactggaggggaaaacaacattgaccatattacccaagccatcaaatcgaaaaatgtggatgtgaatgtgaacgatgaacgagggtagggctctacttcactggggccggtgatcgaggaccttaggaactaatcacagtgttggctggcacatagaactggacattaactggtccggaccattaatggcaaaaggtctaacttatgctttggctgtgagttctggatattgataaagtgtggtccagtctgggttgaacccaatttcgagaccagtattgttctgtcaaagaggtaatgcgtcaacagtttttgggctgctggccaatggagggtttaaagcgggactggtgtatacaagggctttagaaaaacattttcccgtgatgtggtcacgtggggggtgc

SEQ ID NO: 710090 - DNA, 964 bp, Homo sapiens
taaggagggggtgaggatgggagagaatgggcgtggttgtgagaaacatgagggatccttgtgatgatggaaatgttctgtatcacagctatcgatgtcagtatcccagttgtgatatgtgctatagtttgcaagatgttaccactgggggaaattgggtgaagggcacatgggaatctctgtattatttcaactgcatgtaaatctacaattatcccaaaaaaaaaaaaaaaacaaaaaaaaacaaacacttgggggggggcgccctggggccccgagaaaagcctttttcaacccccccgttgggggcccgggccccagggtgggaaagggtggcacaaagcactgttcgcccagagagaaaaaaccgggggccagtgaaccgagggtggtgcgggactctctcaccaattaaaaacagggccgcgggggggcacacccgcgagcggttcgtggaacaccaatccaggagaggggcaccgggaggcacctacgaggggcatctcaccaacgatgaagtcccaggcgcacctcgatcgaacaaaatacgcccccccccgtggtccccctgatcctcaccacgcacacacgcacgacagcacacagcacgaagcacggacaccgcacgacggaccgccagagccgaccggaggagcacggcagaccacgcgcgcagcgccgccagcagcgcgacgggcgaccggaagcggaccgagaaggccgacgccggacacccgagcacagcgaaacgcacgagcaccaccgacagagcaaccgaccaaagaagcagagagaaggcgacaggcggacccgggagcgcagaaagacgcaacaggcacgtcataggaaagcgaaccacggacagacaaggaaccgggacaagggagggacgacggcaccggacagggcccagaagcgcccgccgggcgcgacagcacccacgaccacgcccaagcgcaggcgc

SEQ ID NO: 710091 - DNA, 108 bp, Homo sapiens
ctcattgaggtatagtaaaagggagcatgaacttgagaaaatacgctttcaatcacaaggctgtaataatataggtcaaatcagattctgcattggagatagaaaact

SEQ ID NO: 710092 - DNA, 439 bp, Homo sapiens
  misc_feature (430)..(430): n is a, c, g, or t
tacaaggttgtacaaaccatccccactatctagttttagaatattttcgtcacctcagaataaaccccaaaccctattatgtagtcactcctcctttccccctcttctcaaaccctaccaaccactaatctgctttttgactctatggttttgtcaactctgtacatttcatataaaggaaatcatacaatatatggtcttttgtggctggcttctttcacttagcatgatgtttctaagggtcatcatgatatagcatgtatcagtacttcattcctttttattgccaaataatgcacctctgtttttttttaaaggacaagagtttcgctcttgtttccttgggctagagtgcagtgggtgccacctcgggcttcactggcaacttctggcctgctggggtttcaaggcaattcttcctggcctcagncttcccgag

SEQ ID NO: 710093 - DNA, 909 bp, Homo sapiens
ttttttgggttttttttttaacccctccttagtcttaatcgcgctcaaaaaccaatataaaaccccccccccatgtaacgggggggcagggacaaaagcaaaaaggcaaaaaccccagccgggaacaccacaaggttcctgtgccccacgcgcaaatataaactggcccggaaggggcatttgtggggtattatcaaaattcgtgggtcccgtggtgagcagtggaggactgagagtctaaagggggtgagacacccatcgcaggggggcgacagctgtggcacacagtgtgagaccccacgtggtggagagaaagtctcagagagggggagagtgtggagagaagagggccacgtgtggcgcgcgagccgccgggaacatcagcgtggtggacaccaagggagcgtgtgggctccccacgagaagaatctccgtgagagagtgcgcggagagagaggagcggagaatgcaggcgcccgagggggcaccccccacacgaaggggtgtctacaagagagaggggggttgcacaccaccgagaggtgggcacacacaaagaagagaggggtggggcccaccactccgggggagctgtggagcccccgagagagagggcagtgtgacccccgcgatgcaggcgggagaccaagagggggggggctcaaagcacgccgcagtgtggtggtgttctcaaacaaccggagagaggggggggtccacccacaacttgacgaggggccccgaggagaggaccaaccaacggggtgatgtggctgcacgaggagcaaaattctgcggcgggcaccaacacacatcgtgatgagtgaagagggagacacacccctcatccccgcgacgatatacgaacaccacatggcgatgagagaccaccaaactctcaggggcacc

SEQ ID NO: 710094 - DNA, 400 bp, Homo sapiens
tagactaaatgaccatgcaaaagatatagttgaaagagaagaattgttacatataaaagagaagaaagataagtgatagcataacgttcctaagatggaaaagggcatagccgggcgtggtggctcatgcctgtaatcccagcactttgggaggccaaggcggacggatcacctgaggacaggagtttgagaccatcctggccaacatgatgaaaccctgtctctactaaaaatacaaagaagttagccgggcacggtggtgcatgcctgtcatcccagctactcgggaggctgaggcaagagaattgcttgaacttgggaggcggaggttgcagtgagccaagatcacgctactgcactctggcctgggcgacagaatggtactccgtcttaaaaagaa

SEQ ID NO: 710095 - DNA, 144 bp, Homo sapiens
tctacacgatcccccgcggttctcagcatacaacacatgttacagtggacgtgcgatagagcatccgccgggctcaggtagccaggctgaagggggctgcccggctggcccctgctgcagggtggctggcttagtatctggagc

SEQ ID NO: 710096 - DNA, 142 bp, Homo sapiens
gtacaagaggaatagccacctgtgcttcccaataagcatggccgatggcaagaccagacagaaagcagaataagaacaacaaagatcgtgtaaaccatgtagttcatcaagtaatcaattttagttctatttacatctttta

SEQ ID NO: 710097 - DNA, 461 bp, Homo sapiens
ccgcggaccccttatcagctctagcgcatgtatgaaacggagactgcaatttcatcgcttcatgactgagccccacaggatcgaagggccagatctgtaaccgggtgactgtactatcacgaaatggaaaggtttcaatgacgttcattgatgtcgaaatttgggaccagcgctcaagactaacgccatatgtccgttggggacgatcagcaagcatcgtatgcttatcaaggaaggtatcacccacttgagcgtatccatctggatcaaacccactcacatatacatcagctaaacgcggagatgagatgagcgacctaagtacccaccaaggagtagagccgtcattcaacttgtattcggaagccaggtgccgttccagtttttccagcagatcagggtgatttgccataatgagcgtcgagatatcggtcatatcagttttcctcggggatcctcta

SEQ ID NO: 710098 - DNA, 293 bp, Homo sapiens
atttaagggagcccccccggggtttttgtttgggggagggggggggggcgcccccccccccccccccttttggggttgattttttgcgcccccctttttttcccccccggggggggggcggggaaaaagggggggggcccccccctccccccccgggccccttaggggggggggggggggccccctttgttttttttttttcccccccccccccccccccggggggggggggggggggggtttttttccccccgggtggtttttttttttttttttggggtgttttccccaga

SEQ ID NO: 710099 - DNA, 314 bp, Homo sapiens
gtagcacaacctagggtcagttttgcaggtggtaagccatttaccaagatagttgtaggtaagaagggcagatttattagagaaattgtgaaaatatgttgcagtgggcagctcagcagagaaggggctacctgcaaagaggcaagggctggaggaaagttttatagggtcctgctgaagggtgctacgtgtggaatgaggtcattgtgcccgcaggttgtttgtgattagctgtctctaacaattgttcatacaataattgttcattattgttctcaacttggggctctccccaacctggggacccttcctta

SEQ ID NO: 710100 - DNA, 541 bp, Homo sapiens
tgtaatctcgcaatcctagtgacgactgtggtagaaacgtgggtcaagtagattcaccgtctaccagctcctacgctgtgtccatgaggacaaacaggatacgacaacttgtcatatagataaccttatccctgtggtctccttgacaggaacaaggctacctctcaagagtcagtgaagtgttagtacatatgcacaagtctactcaatttaacacatacagttattcaatgatctctgggggcagctggccccagtgagccatgagtccaggtggtgttaaggctcactggtttcgtggagactggtccttctaggaacagcttgagaagttgagctttggacagggattcaaatgtaatgcagaacttcaccacttcagctgtggggctatgtggttcttcagagcaagcacatctccttctgtgagtatcttcaaggaccaatcaacactcatccccagtgtcctgggcaggaaaacatgactgcaaggagtgacccacaggctctgagcctcaattttggcttggagcaggttccc

SEQ ID NO: 710101 - DNA, 1837 bp, Homo sapiens
cacgcgtcgcagctcgtctgatccttctctgagccctcctgagctggaagatttcatcctgatggctgactcaaaaccactcaggaccctggatggggaccccgtggctgtggaggccttgctccaggacgtgtttgggattgttgtagatgaggccattctgaaggggaccagtgcctctgagaaggtctgcgaatggaaggagcctgaagaactcaagcagctgctggacttggagctgcagagccagggcgagtcccgggagcagatcctggagcgctgccggactgtgattcactacagtgtcaagactggtcacccccggttcttcaaccagctcttctcagggttagatccccatgctctggctgggcgcatcatcacggagagcctcaacactagccagtacacatatgagattgcccccgtgtttgtgctcatggaagaggaggtgctgaagaaactccgtgccctggtgggctggaactctggggatggggtcttctgtcctggtggctccatctccaacatgtacgccatgaacctggcccgctttcagcgctacccagactgcaagcagaggggcctccgggccctgccgcccttggctctcttcacttcaaaggagtgtcactactccatcaccaagggagctgcttttctgggacttggcaccgacagtgtccgagtggtcaaggctgatgagagagggaggatgatccctgaggacctggagaggcagatcattctggcagaggctgagggctctgtgccatttctggtcagtgccacctctggtaccaccgtgctaggggcctttgaccccctggatgcaattgccgatgtttgccagcgacacggactgtggttccatgtggatgctgcctggggtgggagcgtcctgctgtctcggacacacaggcatctcctggatgggatccagagggctgactctgtggcctggaaccctcacaagcttctcgccgcagggctgcagtgctccgctcttcttctccgggacacctcgaacctgctcaagcgctgccatggatcccaggccagctacctcttccagcaagacaagttctacgatgtggctctggacaccggagacaaagtggtgcagtgtggccgccgcgtggactgtctgaagctatggctcatgtggaaggcacagggtgggcaggggttggagcggcgcatcgaccaggcctttgctctcacccggtacttggtggaggagattaaaaagcgggaaggatttgagttggtaatggagcccgagttcgtcaacgtgtgcttctggtttgtgcctcccagccttcgggggaagaaggagagtccagattacagccaaaggctgtctcaggtggcccctgtgctcaaggagcgcatggtgaagaaggggaccatgatgattggctaccagccccatgggacccgggccaacttcttccgaatggtggtggccaaccccatactggcccaggccgatatagatttccttctgggcgagctggagctcctgggccaggacctgtgagctgcttctgctctctgccccacccaagctctgcgtagtctcctgggttctcaaaatcgacctttctaggaaacagtggccttgactgtgtgtgctcccacacactcactctcccagctaagtattggctgtcaggaaggtgtctaaacacactacagtatgttcttacgaaatatgcttttattaagttgggcacaggggcacacacctttactaccagcattggggggacagaagcagccagtttgaggccagcctggactacagagctgggctacacagagaaactgtctc

SEQ ID NO: 710102 - DNA, 220 bp, Homo sapiens
taggggaaaccactaactataccaaccagctatatacagcacactaaggtgggctatcagtgctcactcaatgtgtttaggcagataccacttttgaaaaacaatatgaaatgtgtgctcaactagccagtaaattttttaaaaagcactgtcccattggattgatagttagtattataatagagatattctgggtatatctctgttattgatagtattg

SEQ ID NO: 710103 - DNA, 174 bp, Homo sapiens
agataaggcgcttcaggctaccgcaagaagttgcttgaacacaaggagatcgacggccgtttaaggagttaagggacaatttaaagacttaccaagcagtattaaaggcttaaaatactttaggcccgtcagagatttggcagactgtggtaagacttacagttacttagaaaa

SEQ ID NO: 710104 - DNA, 164 bp, Homo sapiens
  misc_feature (154)..(154): n is a, c, g, or t
gtatcccaagtagagatggggtttcaccatgttaaccaggctggtcttgaactcctgacctcgtgatccacccgcctcggcctcccaaagtgctgggattacaggtgtgagccactgcgcctggcctgtttgttctttttaagcaacaccttcncaccccgtcg

SEQ ID NO: 710105 - DNA, 278 bp, Homo sapiens
aaaaaaggggggggggccccccctgccctttttccttggggggtccccccctcccctggtggggttttggggggcccgggcaaatgggccccaaaagggggggcgggggggggcccctttccccccgaagggttttttttttttttttttggggaaaaaagggggaaaaccccgggccctggttttttccccccccgaaagaagggaagggtgtttttttttcccaatggcccccccctttggtttttaattaatttaaggtttttggacgctgggga

SEQ ID NO: 710106 - DNA, 519 bp, Homo sapiens
tccgtgcgtaggcgacggcgctgctgttccgatggtgtctttgatgttgggctgatgaggtctggttcctctagcttcaacatccagaaaccgatgccagagttcaggtacttgcatgtggttgtcaagttctgcatattcatttccaagctagaggttttcgtgttcggatgcacaggcccaagcttgatctgagtatcactattattttcatgttgttgggtactcggaaaccgaaaggatagtggtatgcatgtgccgagtccgtaggaagaaataaagaaacgagaccggttcttgccgcagccccatcaaggctgacgtgtaacgagcgaaacggcgcctcctgctttctctgtcctcgccgtgaaacctggtcctattgtcatgttcgtgcttttcacgtccaactggacttggggtcttggccttcggcagctggtgtccactccacccgcactggggccctgtcttcgtctccagcccgaacgctgcggtcccgatcccggcgccgtcgcc

SEQ ID NO: 710107 - DNA, 211 bp, Homo sapiens
ggctccatacggaaagcccatcctaacacatccgtctctcgcatcaggagtatcatcacaggagctcaccatagtctaatagaaaacaaccgaacccaaataatcaagcacggctactaacaatataccggggtctactattttaccctccttaacaagtactcagagtactatcgagtacaccctatcaccatattccggagcggctatc

SEQ ID NO: 710108 - DNA, 297 bp, Homo sapiens
tagatttcagcatacgcagatacaatacagcaaatcctaaccacccaggtgatttgacaaacgggcccgtccatggacatagatgacttcatcagatgctacctggattcttcgcagcaggtatcatatttcctaggtattaggaaaacagaaattttcaaggtcacgacaagaaatgaattatgtatgcctcgtattttagaagataatgcttttgcttatttttagccattatttacttgactatctccggttcactactactactgtcgtcaccatctatgataccgcgaagga

SEQ ID NO: 710109 - DNA, 407 bp, Homo sapiens
ctcttattggcccctggcctcccctcatgcctgccagactgaaattcccttcccactctgctccatctgccgacatcgccccacatttgagggctccatccagcaacacttcctgggtaaccccttcctgacctcccaaggaatagggacaactcccttcctccgatccccttggggccccctgcctacacctatgtgacctggtcacaagcctgtcttccctaccagacctgggctccatgggatcattccaattccctgcagactgacacagggtctggccccaaagaagagctccatacacactgagttaacaatcaatgctatcttgtactttctaagtacactttccccttgcaagttgcttttatgcatgatttcatttgattctcagaataaacccctca

SEQ ID NO: 710110 - DNA, 560 bp, Homo sapiens
  misc_feature (26)..(26): n is a, c, g, or t
  misc_feature (43)..(43): n is a, c, g, or t
  misc_feature (65)..(65): n is a, c, g, or t
  misc_feature (70)..(70): n is a, c, g, or t
  misc_feature (88)..(88): n is a, c, g, or t
  misc_feature (106)..(106): n is a, c, g, or t
  misc_feature (134)..(134): n is a, c, g, or t
  misc_feature (146)..(146): n is a, c, g, or t
  misc_feature (151)..(151): n is a, c, g, or t
  misc_feature (158)..(158): n is a, c, g, or t
  misc_feature (162)..(162): n is a, c, g, or t
  misc_feature (167)..(167): n is a, c, g, or t
  misc_feature (180)..(180): n is a, c, g, or t
  misc_feature (198)..(198): n is a, c, g, or t
  misc_feature (200)..(200): n is a, c, g, or t
  misc_feature (206)..(206): n is a, c, g, or t
  misc_feature (216)..(216): n is a, c, g, or t
  misc_feature (236)..(236): n is a, c, g, or t
  misc_feature (253)..(253): n is a, c, g, or t
  misc_feature (267)..(267): n is a, c, g, or t
  misc_feature (269)..(269): n is a, c, g, or t
  misc_feature (277)..(277): n is a, c, g, or t
  misc_feature (282)..(282): n is a, c, g, or t
  misc_feature (293)..(293): n is a, c, g, or t
  misc_feature (295)..(295): n is a, c, g, or t
  misc_feature (308)..(309): n is a, c, g, or t
  misc_feature (313)..(313): n is a, c, g, or t
  misc_feature (316)..(316): n is a, c, g, or t
  misc_feature (325)..(325): n is a, c, g, or t
  misc_feature (332)..(332): n is a, c, g, or t
  misc_feature (343)..(343): n is a, c, g, or t
  misc_feature (347)..(347): n is a, c, g, or t
  misc_feature (352)..(352): n is a, c, g, or t
  misc_feature (366)..(366): n is a, c, g, or t
  misc_feature (368)..(368): n is a, c, g, or t
  misc_feature (379)..(379): n is a, c, g, or t
  misc_feature (389)..(389): n is a, c, g, or t
  misc_feature (441)..(441): n is a, c, g, or t
  misc_feature (447)..(447): n is a, c, g, or t
  misc_feature (452)..(452): n is a, c, g, or t
  misc_feature (460)..(460): n is a, c, g, or t
  misc_feature (481)..(481): n is a, c, g, or t
  misc_feature (559)..(559): n is a, c, g, or t
tcagcatcaccttgatttattttccnagtatttttttccccanaaggaaaaaaaatttcatcaanaaaanaaatgcttctgccaaagngaaaaaattttatgtctnaatgcttttctttaaaaaaaaaaaaagncaacattgaacnagganatgcccngctnccccncccccattttgcngacaaaattttaaaaaancnattggnagaaaaaaanaaattttcttcaaaaagagngattatgttttattgcnattttgtttagtananatttttcncaatngggaaaaaaancnaggggaaaaaaannaccnaanaagagaagnagtttanaaagtcaaaanattnaaatngcggcccaaaaaangnaaaaaaaattnaatgtaaaangtcacaaaatttcaaaaaacttaccccaattgtctatcatttatcaggtacnaaaagncaacnccccaaanaagattacagtcctttattanaagcccccccggggactatagtatacatttaaaaaacgccaccacaaaaattttcttttctttttgtttttgcttatng

SEQ ID NO: 710111 - DNA, 201 bp, Homo sapiens
cggcacaaccctcagaccactacactatcatcttcaacacgttcgtcatgatgcagctctttaagctgagatcaacgcccgtcaagatccactgccgagaggaacgtgttcgacggcatcttcagtcaacccccatcttctcgcacctatcgtttcggcgctctttcggagattcatgattgtcatctgtccgagtcggca

SEQ ID NO: 710112 - DNA, 659 bp, Homo sapiens
  misc_feature (343)..(343): n is a, c, g, or t
ggtgatgctgtggtgatctagaggatcccgacgctctctctggtggggtagggtgattaggtttaatgagagggtaaggggtgcaagatcggtcgccaaggagggagtagaggtatcttatactgtgtgggctaaggtggggggatacaagaggaggacgcaaaggaggcttgggatggggaagaagggcggcaatgagatatagatgtagtccaggaatagtcagggaagcagataatttagttaaagtgtctcagcctaataagggaacggggcaggtgcggataactaaaaaggagtgcttaaaagagtatggtctacgttggcaccagagttggggagntttaagaggtttagaagcctggccgtcaatacccacaacagttatggaggcaagggaaacaggcccttgaaaagaaggtaatgtggagtgggtagcctccgtattgattaagaaggggacggacttaccctccaccgtgagagttacctaaagctcggcatccgtgatggtctacggggcttctgaggcgatcaggcaggatcagtcttcagccggtaagtcaagaaggagtcagtcagagaaccttgagccagagttccaggggctctgggaggggttgcaggtgagttgcccgtcgatttcagggggtcccaca

SEQ ID NO: 710113 - DNA, 397 bp, Homo sapiens
acgcgtgggcgcgagcggccgctcgcgatctagaaccggacgcgtgggcggggtttcaccgtgttagccaggatggtctagatctcttgacctcgtgatctgcccgcctccgcctcccaaagtgctgggattacaggcatgagccaccacgcccggccaaaaaaaaaaaacttttgtgttttgtttgtttgtttgttttctttttgagacggagtcgctctgtcacccacgctggagtgcagtggcgcgatctcggctcactgcaagctccgcctcccgggttcataccattctcctgcctcagcctcccgagtagctgggattacaggcgcccgccaccatgcccagctaattttttgtatttttagtatagatggggtttcaccgtgttagccag

SEQ ID NO: 710114 - DNA, 832 bp, Homo sapiens
gtgtacacacgcgtcttccctgtatagggcggtcccccttcttggtcccccgttatactttcgcatatggccgcccatgttccttgtagcccccgttgtctaacacactctcgcaccgactttcgtatgccgaacaactttctcggccgctcccgggattttagacccgtttggtagatgttcgtgccccgcctatttcctttggccgtctggccgctgccagttctagcgcgtccctgtttcattaaccaacggggctcacgagtccccctcccgttgcgaacaaaaccagtggcccaaccccaggggcgggacccctcggggttcaccccggcttccggccggctatatttttcgcacatctcctgacaaaaagagttcgccgccccgtattgtctcgcttgaccaccggcggaacccttccgaatctcttgaacgggtgcccacatctcgcgggtgtgggatcttctcccgcgttgggagccccccccccttcgctgatttattaatgtaaccttccaacgccaaagagtttctctgcacacttcaatgagagctggtcccccactacattatggtggctttcaaaccacgatagcccatattcccgcgaacgttgttgaaccccacccaccttgctcaccgcgctaacaacgacgcggggtataataaccgcgttccatggtttcttgaaatctttggggccacacaaccacccacggtttcactggcccctctgcttctttagaatttattcccccctaaaaaatttttaaaaggggccgttttttcccctttggccccccctttcccccttttggaccccaaaaaa

SEQ ID NO: 710115 - DNA, 122 bp, Homo sapiens
cacgagggggacagacgccatgatgcacatgtctggcgttctgaggaaggtcattgattacatcatatacttgcagcaggtcaatcataaactgcgccaggagaacatggcgctgaagctgg

SEQ ID NO: 710116 - DNA, 199 bp, Homo sapiens
tgagagacgtgtctcacttataagtgggagctaaacatttagtacatatagacacaaagataagaataatggacaccagggcctaattgaaggtggatagtaagaggagcatgaggttcaaaaaaccacctcttaagcacgatgcttatcacctgggtaaagaaatctgtacaccaaagcattgcaacacggtctctca

SEQ ID NO: 710117 - DNA, 127 bp, Homo sapiens
ctcgtgcagcagtctattctccacttccaagctgcgttcagtgcttgtgatcgcccacgctgcactgtcatcagactttgatacagttgacgactgatgcttccgttttctctcattttcatcttgg

SEQ ID NO: 710118 - DNA, 422 bp, Homo sapiens
  misc_feature (322)..(322): n is a, c, g, or t
  misc_feature (338)..(338): n is a, c, g, or t
  misc_feature (353)..(353): n is a, c, g, or t
  misc_feature (387)..(387): n is a, c, g, or t
  misc_feature (402)..(402): n is a, c, g, or t
taaatctagtaacctatgtgaacagttcccatttcaataatatttatccacagcatcactttcaatggaaaaataatactgcttttgatgcatgcactgtaccacatttgtttatttaaccaattcctattgatggaaattctgatttcctttattctctccctccccctctaaccttccttccttccatcttattacaaataaccctgttattaatatcattatagggtaaggcctttgcacataaagcttaattgtttttgtaggtttacattcgtaggaaggtggaaattggctatggtcccaaaaaatggcacttttnttttttcccttgaggnggggattttcactcngtcaccgggggtgggagtgcagtgatctcggggntcatggcaacctccntttcgggggggttcaggcgg

SEQ ID NO: 710119 - DNA, 337 bp, Homo sapiens
  misc_feature (150)..(150): n is a, c, g, or t
tttcccttgaaaggaaggctttggggtttttctgttacctgtcaaaggcaggaccctttgagggcatccaaaggcaggaaaccgtcccgtgggtctcctggaaaatcgtcctagttacatttcaaggggcaaaaccgtggtgggttttgnctggaaattcatataaactttttaaaaagttgagtgataaagctaacccctatctgtaagttttgaatttatattgtttcatcccatggacaaaacccttttttcctacaaaaagtttggggttgggggggggttcttttttttgttttggttttgttttttttttttttgcgttcggggggttgta

SEQ ID NO: 710120 - DNA, 286 bp, Homo sapiens
ccaaggagaggagtcgggtaacttggaggattccagcctcagcaactgggcagaaggtgatgtgatttttctgaaaacaagggagaaatgggcttgggaagggaaatttgatttgagacatgctaattaaacatccaggagatgtgaatgtggagatcaggggagatgtcaggcaaaaatataaatataaatgtgtgggtcatgagcatatgggtggtgtttagagccatgagcccaggaagcagaggttgcaatgagctgagattgtgccacggtactctagcct

SEQ ID NO: 710121 - DNA, 222 bp, Homo sapiens
catatcacctaagttagagccaggcctggctctgaacttaggatctcaaaaaaaaaaaaaaaaaaaagttagccatgggtgtaatggaacaactccaaacctccaggggtttaaaacagccgggcatttctaagtcccacatttaggtgtgcctggggaagatctttgggtggtaggcgttggcagaagaggcattatccagtgcatctggatgtctggcgt

SEQ ID NO: 710122 - DNA, 672 bp, Homo sapiens
atgacccctgtacggaatatgaaccggctaattcacttactgaaccactcaggctggtctgagacaaggaatacgccatttacggcatgaggaaacgatcgcttactgcttgtggcctgcctgatcctgcaagttacgactgtgatgtccctagccgtgcactagttactagacccgtgagaaagcttgtcataaatcggccacatgactgaggacgtggatgatggatgagtgatctgctagattcactcccatgaggcgtctcgattctttaggtgcctgatcgtacacatgatacgacgtctatgttacagagcatttatcatcctcacatccatggagcatcgtgatcatgctgccgcttgctactatacagggagactttatagactatgttcttctgtgaggtcaaacattaatatgatgggtgcacagagttactaacttactgtctcgctatccatacattgctgaccgacctatgctaactgatttgccgaggctatgcagtcaagttgtccgaccctgcgaccttgtacctttcagtaggttatgacctttagtattggactcctattgaactccaggtcctatatttgcgccaaccgggatctaacagccccctatgtgtgactgtgcaattcgcggaagacaacttttcaacctttactt

SEQ ID NO: 710123 - DNA, 157 bp, Homo sapiens
ttcagcaccgatcacctcctgctccctcttgggcctaagctcctgcagagtggatgtgctgtcccgtgtgtcttccagctactgtctttaaggcctccagcaccagcacgaattcccttagcacaagcacgaattcagcaccagcacgaataccctt

SEQ ID NO: 710124 - DNA, 329 bp, Homo sapiens
aagattgtgccactgcattccaagcctgggcaccagaggctctgtctcaaaaagaatcatggcaaagatgccgagtaaaggcacatcttatacactgtggggaggaatgtacattttacaacctctggaaaacagtatggagattttccaactaaaaactaccattcgatccagcaatcccactagtaggtatctacccaaaggaaactatattttaaaaatcacctgcactgtttatcgcagcactattcataataagtgtgtttatcgcagcactattcgtaatagcaaagttatggaaacaaccttagggggcatcagagagaggt

SEQ ID NO: 710125 - DNA, 398 bp, Homo sapiens
  misc_feature (37)..(37): n is a, c, g, or t
  misc_feature (55)..(55): n is a, c, g, or t
  misc_feature (114)..(114): n is a, c, g, or t
  misc_feature (291)..(291): n is a, c, g, or t
gtgactctagaggttcccaaacgcagagaggatactngttgcatctttcaggatngtcaaaaccttctggtgtatcacatacaacctttcctcaagaaaaccatcgagaaacantgtttgacatcctatatgcaagatttcataaataatgcagtaattgctaatataattccaacagactcttagcatcgctacgagtgagaaagcctcaccgcagtcaactccttgaacttgtcggaaaacatgttaacgacaagtcgagatttcttaatggtgacacttaccatcatngtctgtcttccttttaaaatccatctgtactcaaaagccttacgaccatcaagcagttcttccatagtctacactttgttttcatacatggatcctctctgcgtttg

SEQ ID NO: 710126 - DNA, 1330 bp, Homo sapiens
  misc_feature (202)..(202): n is a, c, g, or t
  misc_feature (214)..(214): n is a, c, g, or t
  misc_feature (227)..(227): n is a, c, g, or t
  misc_feature (241)..(241): n is a, c, g, or t
  misc_feature (249)..(249): n is a, c, g, or t
  misc_feature (251)..(251): n is a, c, g, or t
  misc_feature (369)..(369): n is a, c, g, or t
cgctgtctgagaattgcctaggaacaagcggcacctgtcctggtctcccccatctccaacggcaggtatactcatcccaacaagacgaggacttgtccctcagcaaccatgtcatagtccgtttgggctgctgtaatagaataccttagacaagggtggcctacccacagcaggaattaatttctgacagctcctgggctcnagggatcctccnaccttggcctccncaagtgctgagatngcaggtgngnaccaccacacccagcccacaagtcctcttagaacattgaagtgcccttctcatgacctcatggtgaataaagttcactctggttggcatggcgtcaaggcccgtcatgacctgttccntgcgtaatttaatatgacgctggaggctcagccctcaccacgattctcagttcttcccacctcctacagcccactgtgagtccctcacgtgtttgctacgactgtatctggcgcgcctgaccttctgccgccacctgctctcttctggcacagcgcttcccactctggcctaactactactcatctcttcggcgcctcagtctagcacatgacgtcctccactcacgctcccctcgtcatcccgaccaacgacgcaggacttgtccctcagcaccatgtcttagtccgtctgggctgctgtcactcgaataccttagcactgggtggcctaccccacagtcacgcgcactcccttctctcaccagcttctggcacgctggcacgcctcacagatccgcgctgcccgacgccactcacgctcgcgggtcgacggcgcctctttccacgttgcccccggccacgcttcctcaacccgagtccttccacataggctgaatccactcaacctcccctacgaaggcccaaccattcgatactaccataaccctaatgcgcgttaagagttccaccactacgcaattccgagtgcacgacacctccccatcgtacgacccgagcacacctgtctgaacatccacctcaggatcactgcgctcggacattggacaccatttccctacttctctccccctaatctagacaatattataccccacactacatctgactacaactcactactcttctactcaataccacaccccacatacttacttcctatcgtgaccacaacacacctcaccgctcttcccacacaaccaacaatcacctattcatccattcctacatcacctctcgcaatcacaactctaccacacaccactctccatagcacactctctaaccctacccaagctatccttcaccgtacccaccataaaaaaatcacccaccacctacc

SEQ ID NO: 710127 - DNA, 85 bp, Homo sapiens
cgagcggccgcccgggcaggtaccccccgagaccgtggctggcgtctccccaacaacaagctgggttccggggatgacatctctg

SEQ ID NO: 710128 - DNA, 148 bp, Homo sapiens
aaggaggctgctctgtgctgtgcggacaagcagtgctcacctcagaagtgctcaccactgcttcggccacccttcagatggccacctgtgagctctcccactcccatccttcccagagctccttcccgggcctggtccccctgcagga

SEQ ID NO: 710129 - DNA, 226 bp, Homo sapiens
  misc_feature (3)..(3): n is a, c, g, or t
  misc_feature (21)..(22): n is a, c, g, or t
  misc_feature (112)..(112): n is a, c, g, or t
  misc_feature (133)..(133): n is a, c, g, or t
  misc_feature (168)..(169): n is a, c, g, or t
  misc_feature (186)..(186): n is a, c, g, or t
  misc_feature (207)..(207): n is a, c, g, or t
  misc_feature (209)..(209): n is a, c, g, or t
  misc_feature (215)..(215): n is a, c, g, or t
  misc_feature (217)..(217): n is a, c, g, or t
  misc_feature (223)..(223): n is a, c, g, or t
tanctgctttcctcccaaatnngccccagtggagagctgtcactcaggtcgtgcggcattcggaggactgcttccgtgcttctcctcctggctctgtgtgacagtcgggatngggatctgctctgtccttctncacaccccacccttagctgttccccagttctcttnntgccatttcttgagctntttatggcagccttttcctgncnggttcntnatcccnata

SEQ ID NO: 710130 - DNA, 172 bp, Homo sapiens
tctggaggccccggagctgcatttctgaagaggctcgggtaatgcagatgcctctggccacaaagctcacttggagggaccaagcttgctgggcaccaagacaggatctaagtgggaaagcagcatcatgtccaccctttgagttctctttaccaagaaaagaggcctacat

SEQ ID NO: 710131 - DNA, 165 bp, Homo sapiens
tgcatctgtcccggggacaaaactggaggggccatgcggaaaaccaccgcgggacgcttgagatattaggtggcggaaagagaggtggtagtaggttattctcagagagcagcttggagcactacccgattcatcatggcaaggcaagcgctacacacgcgggtg

SEQ ID NO: 710132 - DNA, 100 bp, Homo sapiens
cgaaggaaggaagtacgggtgcgtaggataggaagtcggagaagataatcggttagaagaagacaatgtgttagaagaagcgatacttcctatccttcgg

SEQ ID NO: 710133 - DNA, 237 bp, Homo sapiens
  misc_feature (18)..(18): n is a, c, g, or t
  misc_feature (34)..(34): n is a, c, g, or t
  misc_feature (54)..(55): n is a, c, g, or t
  misc_feature (57)..(57): n is a, c, g, or t
  misc_feature (65)..(65): n is a, c, g, or t
  misc_feature (70)..(70): n is a, c, g, or t
  misc_feature (76)..(76): n is a, c, g, or t
  misc_feature (80)..(80): n is a, c, g, or t
  misc_feature (91)..(91): n is a, c, g, or t
  misc_feature (95)..(95): n is a, c, g, or t
  misc_feature (101)..(101): n is a, c, g, or t
  misc_feature (116)..(116): n is a, c, g, or t
  misc_feature (121)..(121): n is a, c, g, or t
  misc_feature (124)..(124): n is a, c, g, or t
  misc_feature (137)..(137): n is a, c, g, or t
  misc_feature (139)..(139): n is a, c, g, or t
  misc_feature (161)..(161): n is a, c, g, or t
  misc_feature (165)..(165): n is a, c, g, or t
  misc_feature (186)..(186): n is a, c, g, or t
  misc_feature (193)..(193): n is a, c, g, or t
  misc_feature (206)..(206): n is a, c, g, or t
  misc_feature (217)..(217): n is a, c, g, or t
ggaaccccaggcctcttncctccctccccacctncaaggccctccccccagggnncncagggccnaggtncctggncccngggtgttccancccntctctnttcagtccctggaangggcnctnagaaaggcaccancnccttggaccccacctcccatgntctnactctcatccccgttctcttntccacanagctcttccaatnaaggtgtttcncttcctccttctcctccttc

SEQ ID NO: 710134 - DNA, 119 bp, Homo sapiens
acttgaatgttagagtgcaactgacaaatgattattactccttcgtcattgaaactaatacacgctctaaactttatagcttttcacttactctgttaagcatagcttgacacaaatta

SEQ ID NO: 710135 - DNA, 324 bp, Homo sapiens
aacagttcgacgtgatcccttgagggtagaatatgtgaatccgaggacctgcaagatgaggggactctctcagtgtggagtggatggagctggtcctcgcatgtgtgatattaggcgttcgtagtgaggcgggtgcccccgtgacagtggcaatgggcagtgaggccagtgtgatgaagacagacgggtgactgccccataccgtcgctgtgcgtggacggacaggccgtgggacagaccggcacgggtggacggtttgtgccgtgctttgactcacttgtggaactccatcagtggcctacgccactctgggaccgcacatgt

SEQ ID NO: 710136 - DNA, 1605 bp, Homo sapiens
  misc_feature (295)..(295): n is a, c, g, or t
  misc_feature (446)..(446): n is a, c, g, or t
gtatggaggagtctttactgtgttagatctctagtcccttaccaaagacgcgagattcgtgattctatgcggcttctctggtggctcgaccgaggtagtggtgggccggagaggatcgattgatcactacctcaacgtactctgcgcatcttgcgcaggaccatacaagttgggcgcgcgcacaacttcaatcgattcactgacttggccacttgagtcgtctcgaagctacactcgaggctgattctaacaggatctgttgtgtgttcctcgacaaacatatgtgtcaccgagnggacacttgtcaccgaaattcatgagtaatccgagttgatctccgttagtatatcccattcgatctagaccacgtcgagtgagatagatagacactggctagccctacgaaccgtagcacgaggcatccagtactggggagattgtcgtgncggtaggagcgatctcggatgcgaatgacgctaatggcatgacaaggatttttggagatgcatgcgaggatagttctcgcacctgatgattattactaacggcactggaagtggccttggtagcactgacctggtttgccccgactcaagaaacgttccgaaaggtatggcgtgtgctggagcgtacacgccacataccgtacttatacgcagtatccagtaaggggcggcagtttgtgggcttcggctagccctggtggaagttcctcagcacacctttaggggaaagggtctggggcgactgggacacggcattccagcctttagagagactctaagagttttgccggaccccacggcctggtggcgaaacaccaggccaatgaaccccccgttcttcttaccaaaaacattttacaaacacttagctaggcgttggtggggcggtttggcgtcaaccccattaaggttcccagggggaccctcgcggggaaaagcttgagggcgacggaagaatcactgttgaagccccatggagagggccgaatcagattgcacggtggaacctgttgacttggttgcaccccttacacaggttccacccctgggggtgtggaccagcaggaagaacgaacaacaacgacgacacgtttcgctacaaatatcgggggcgaaagaagcccaacaacactttgggaggaggggccggcggtgtctcggagcacacgtacgcgtttccccgcgaaccaagaagcatttccggggggggggcacacacacacccagacactatatacattatttaccaaccaacacatcactactatctgcagcaagcaaacaataaacaacagtggagggtggtcactaacgacaggtcggccgacaggacgacaaagtagcatctgacatatagagacatcacatcacctactaattagtaagacacagcgtccgtcaaatgagcgccataatgtagtctgccagccagtcgtgtgagaaccaccagccgacaccatctgttctggctacactttacgtcagacagactaataatcgacacggtagttagcctgactccaccctcatccgtcctgctcgcaccacacaacccgacacggcaagcaacaagtaagagagaggaaggaaagcagcgacg

SEQ ID NO: 710137 - DNA, 734 bp, Homo sapiens
ggtcaacgatccctcccttaccatcaaatctattggccaccaatggtactgaacctacgagtacaccgactacggcggactaatcttcagcgtccatacatacttcccgccgattattcctagaacctaggcgaactgcgactccttgtacgttgacaatctgagtagtactcccgattgaagcccccgattcgtataataattacatcacaagacgtctggctacgtcgatgagctgtccccacattaggcgttaaaaatcagatgcaattccgcggacgtctaaaccaaaccactttcactcgctagcacagaccgggggtagtactacgggtcaagtggctctgaaatctgtgtgagcaaaccgacagtttcttgcccatctgtcctaagaattaattcccgctaaagaatcttttgaaatacgggcccgtatttaccctatagcacccgctctacgccctctatgagtcaaggagaaaggatgtgactgtaatgcataagaagagattcttgagtgggcagttgagacccttgaaaagagttttgtgaaagactatgataggggcgggggccactttgtgtccataaagcatggtgaatatgggttgcgaagaatgagtgttgactaacttggggcagtgcaatttgactacaatagaagaagtgggggctggcagatgttgttttgaaatagctcgaatgcggcattgagaggacttcaagaggttgga

SEQ ID NO: 710138 - DNA, 369 bp, Homo sapiens
  misc_feature (310)..(310): n is a, c, g, or t
  misc_feature (349)..(349): n is a, c, g, or t
atgggggttaatcggataacgaacaggctctctagaagggatataaaaaaccgccaggtccttggagttaaaggctggtggtcgtagtggtgctgggcgagcagtttggtggattaacctggtggaggttaagggctaagcataggggggtatctaatcccagttggggtctaagctatggtgtgtccagatatgtgaaagcctctttcgtagtcaatttggggtcaccgggagtttttaacaactcaggtgagtttaagctaatacacgatacctttttctgggcgataatgtggacggaggctatttnagtatagagggtgtctcatattgaggggtccggaagatnctatacccaatcaacatagg

SEQ ID NO: 710139 - DNA, 322 bp, Homo sapiens
tttttttgagacagagtctcactctctcacacaggctggagtgcagtggaaatcttggctcactgcagcctcagcctcctgggttcaagcaattctcgtacctcagcctcccaagtagctgggattacaggcacgtgcaccatgcccggctaatttttgatagagacggggtttcaccatgttggccaggctggtcttgaactcctgaccttaagtgatccgcccgcctcagcctcccaaagtgttgggattacaggcgtgacaccgcgcctggcctgaaggttacttttcttttcagtggtttggggcagggaggtcgacg

SEQ ID NO: 710140 - DNA, 541 bp, Homo sapiens
gtgcaagccgcttgaatgccgtgcttcggtatcttgagacccagcctcggccccccaaggctgaccccagtgaaaagcgtgtccagcgtgctcagcagcctgacgcccgccaaggtggcccccgctatccgaacaagcggcttccccctagcatcctgggcaagcgcagctactgagtcagcagcaacggcggtggacggtcctggcaaaccactggacagaccaggcaacatgtggaccaagggccggacacctcctgctcgagcgggaatgtgctagcccgctagcagaaggtgctgccttgatcctgtaggtgtggctccgctggcagccgaggtcaacgcttgcggcggacttcaaacttggactcgaaggccccgagatgatctgtgttcttacagtggggcaccagtaggaggaccaggggaagagtccggcataggctgctcatcattccgtctggaagaccgaagcagtgcgtgcctcagcctgggtccatagcagagccccatcggcccatgcggccagaaggtcaggcgcc

SEQ ID NO: 710141 - DNA, 742 bp, Homo sapiens
  misc_feature (574)..(574): n is a, c, g, or t
  misc_feature (577)..(577): n is a, c, g, or t
  misc_feature (590)..(590): n is a, c, g, or t
  misc_feature (597)..(597): n is a, c, g, or t
  misc_feature (660)..(660): n is a, c, g, or t
agcggttcaggcagttctcctgcctcagcctccccagtagctgggactacaggtgcatgccaccacgccctgctatgtgtgattgatatttctgtcaccttgactgtggtgatggcttcataactgtatacataagtcaacatttattatactgtatactttatgtacagtttatacttttacaactataacttcagaaacccactaccctattttaaaaaagttaataattactctcagccactgtgagacctcactgtttccttatgctcatttttccctttaacaacaatggggaactagtattttatcagataaaaataatgtttgataggatttgtgcaaagtctgtttgcctactaattctgccttatggcatctcagacatgtaaattagacaagagccttcagtatgtctggtctgtgtcacgttattttccactagtttgtgtgatttagattatttttaaagagttgataaaggaaaggaaaggaagagagagatagaagaaagaaaagagagaagaaagagaaagaaagagaaggaagggaaggaaagaaagaaagaaagaanganagaaagaaagaangaaaganagaaagaaagaaaaaaagagacgcctgtcttttaattccagttggaagcagctttagttatanaatttccatctctagaatatcttggggaaaaaatgaagtgtcattaaattgatttttttaattgcatcctatgtctctgaaa

SEQ ID NO: 710142 - DNA, 775 bp, Homo sapiens
  misc_feature (607)..(607): n is a, c, g, or t
  misc_feature (610)..(610): n is a, c, g, or t
  misc_feature (623)..(623): n is a, c, g, or t
  misc_feature (630)..(630): n is a, c, g, or t
  misc_feature (693)..(693): n is a, c, g, or t
agcggttcaggcagttctcctgcctcagcctccccagtagctgggactacaggtgcatgccaccacgccctgctatgtgtgattgatatttctgtcaccttgactgtggtgatggcttcataactgtatacataagtcaacatttattatactgtatactttatgtacagtttatacttttacaactataacttcagaaacccactaccctattttaaaaaagttaataattactctcagccactgtgagacctcactgtttccttatgctcatttttccctttaacaacaatggggaactagtattttatcagataaaaataatgtttgataggatttgtgcaaagtctgtttgcctactaattctgccttatggcatctcagacatgtaaattagacaagagccttcagtatgtctggtctgtgtcacgttattttccactagtttgtgtgatttagattatcctataaccaggtcagctccccccgagaccccagcaccgagacagagcagcagctccagaccaacaccagaacacagcacagaccaaaccagcaaaccacaccaccagcccgagccggaaccggaaagaaagaaagaaagaanganagaaagaaagaangaaaganagaaagaaagaaaaaaagagacgcctgtcttttaattccagttggaagcagctttagttatanaatttccatctctagaatatcttggggaaaaaatgaagtgtcattaaattgatttttttaattgcatcctatgtctctgaaa

SEQ ID NO: 710143 - DNA, 161 bp, Homo sapiens
actttttgatgaagtccatgagtccttggcatggttcgtgttcgctctactgcccacttctttgttttcataactaggagtgtctcccacagcctttagcacaatgtcaatttttttcttgagtgtcgccagcaggttcctctgttcccggggaaactgca

SEQ ID NO: 710144 - DNA, 136 bp, Homo sapiens
gaggtcggattaccatatcgacgcagcgtccccacttggtcgaagttgacatctgacgacgtgcaaggagcagatttacaaacggccaagaaggggcggactccttcacagatcggtgtaatcctgagagattcac

SEQ ID NO: 710145 - DNA, 210 bp, Homo sapiens
  misc_feature (166)..(166): n is a, c, g, or t
  misc_feature (168)..(168): n is a, c, g, or t
  misc_feature (208)..(208): n is a, c, g, or t
ctaaatcgatttcgaacatggatgtttgccgtcgccgccgctatcgtcggcgtgaccgttgcagtatgcggagttgttggtttcatagggctggtcatgccgcacattacgaggttgtgtgtgggggcggatcaccgtagaactcttcccatcgggctattgctgngngcgatcttcactgtactagcagaccttgcgcccgaatggnta

SEQ ID NO: 710146 - DNA, 222 bp, Homo sapiens
  misc_feature (36)..(36): n is a, c, g, or t
aagagggggtttcaaactcttagtgacttaaaatcnttcatctcttcatctgaaaattcatgaaataaataaaatagctggtgtggtggcgggtgcctgtagtcccagctatgtgggaggctgagggaggagaatggtgtgaatccgggaggcggagcttgcagtgagccgagattgtgccactgcactccagcctgggcgacagagcaagactccgtctca

SEQ ID NO: 710147 - DNA, 120 bp, Homo sapiens
  misc_feature (3)..(3): n is a, c, g, or t
tantcatcaagaagaaaactattagaaatttatctcctgcaccgagcggaatgtttcgaatagaggaaatccctttggaccaggtggacatagacaaagagaatgagatgcttgtcacag

SEQ ID NO: 710148 - DNA, 1190 bp, Homo sapiens
agcgggagcaggcggggctactcgactgctctggaggtagcggccgcggctgaggagagccatgggacgggcagtcaaggttttacagctctttaaaacactgcacaggaccagacaacaacgttttctaacacaatgatgccagcagccattacgaagcagctcagacactaaagcataacatgcaagaactttccaacacaatacataaaccacgctgacaaccttctttcctacaccaacacactagcaagcagccctaactgcacacaactacggctctcctgcactgctcggcacacctctactctaccctcccaacgcacaccccttccctggctctaagtacccacacgcgcaataactttccaaccacccaacggaaacccaaccgacaactaacccaccctggacaagaaccttggggattccccccctttaggaggcaccaaacgcaaaccccctttcccttctgcgttacggcacaaaaccactggtttgaccccagcttcacttcatgcttgcaacctggccaaccccgaaaaccccttcccacggccaacaacgccccacaacctggcaaccccattctttactcccttacaccgaacacttaaaccaacatacccacctacgtcgttccctttattgggttaacccgtttgctcctcctcctaaagaccccattctatccaaacacacaacacactttccgttaagcccaacaaaccctttccatttgtggccccagcaaccaccaacggattcccccgttgggggcagaggacaacgtttggcccaggggaaaccccaacgttagtcgttgtgcgccccctgttgttaatgaacccttggtgggccgaagtgtagccttctggcaagaagaccgcacgttggcacacacagtgttggtagcaacgttcttaaagccgacgcggcaatcaccactctacgcgccccttctttcccactgctttaaaccctttcgcccttacgcactccagcaatttctctatcccaactcggttggcctttctatcactaccactcacacggcgggggctcccagcactttgtagatacgcccttgggaaacggcgaaagatgcccctttaagtcagaacagggaaaaacgcgaagagtttaaacaagtttcgctacgaagacgggtacttacacattgtagctcg

SEQ ID NO: 710149 - DNA, 383 bp, Homo sapiens
gacacttacaggcaggcccacactcgccagagagatccttaaggcgctcatcatccatgtctactccaaaatacttgatgtaaacataggtgaattcttttgccctagctccaagtacagctatctcgtactattacagagacttaacatcgtccaacaacatattttagagatacatatacggagcattccacttcattttttcaactagctctttcagactgcttcctgcagtctccaaagtgtacaacatccatcagccctatggaaccatatattcatacacaacaccacacttacatgcaaaggatgttcccagacagcagaaaatgtatcatacagtgctttattatcaacggatttgtccagatatttactgaata

SEQ ID NO: 710150 - DNA, 1123 bp, Homo sapiens
tgggcatcaaaaagcttatattcccattgggcccaagggctgtgtaaggatagttaaaaaagctgcctatatgtgggcgtggagggaagaggctttaggcaaaagccctatattaactttgtgcaaggggccctcttcaaaagctcgcgtgggcctcaaaaggcctctatagctcggtgctgtgaaaggtgacgccttctcagaaaaagaatttctctcggcccacgccccacgcctctcgcgggccaccccaagccgcgtgtggagagggtgtgggactccaggggtggtgtcacccacactatcttctctgtgtgaataaggccttctcaactatctccactcactctctatggagaagagagagtgagtctctctccgagagaagagtctccacaaagagagagatggggtgatctcgcggtggcgtgtgcacagatacaccccgaggggccatgtttacagatatctctcacaagagtggcgcgcggtggttctcacgagtatatatatctctctcacacgggggccccattgggggagagcagtactataatcacagagtggggcaaactgcggggagagatgtatattacccccaacacactactcactctctctctcaagcagctgtgggcctctctctgtgtgaagtgtgtactcccgtggagacaacatataaacagcgccgcgcgagagcgcagagacacaacgcagccaagggaggaataatagagggcagatctcctcttcaccaagggaggagaaaaccagcgcacacgtagaaaacgccccactcatcgtcggcgagccaatatcaactcactcttcggggggcccccaaagattcagcgacgcgagggaacacagaaaagtgtggggggactacaaagcggcccctgatctccacgagaaaaggcaccacacacaaaaatacaataaccggagcagagccaccaaaaaaaacaactagagaaaaagagcccacaaagaaaagcaaaaaacgggacactaggggggtgataaacaagacgaaaaggggccccagcaggcaaaggtggaaatcaccaacaaaggtgtggggaaccccgacgggggacggcagtaaaaagaaaaacgggag

SEQ ID NO: 710151 - DNA, 468 bp, Homo sapiens
cttaataaataattattgaggggggctgggtgcagtagctcacatctgtaatcccagcacttagggaggccaaggtgggaggatcacttgaggccaggagttcgagaccagcctgggcaacatggcgagataccactatctccacaaaaaaattaaaaaacaaaaatagctgggcatggtggtgtgtgcttgtggacccagctacttgggagactgatgcaggaggctcacttgagcccaggagttggaggctgcagtgagccatgatggcaccactgccctccagcctgggggacaaagccagaccttgtctctattttcgaaaagaagtattattgaaggaatgagccaggcatggcagcatgcacctgtagtcccagccacttgggaggctgaggcagcaggatcacttgagtccaggagttcgagaccagcctgggcaatatagaaagactctgtttccaaaaa

SEQ ID NO: 710152 - DNA, 145 bp, Homo sapiens
gttaagggggaaaaaacccccccccattaaattccaaaaaatttttgggaatttcccttaagggggtgaatttgcccggggggaattgccccccgtttggcccttagggccttaaaaaatgaatttttggggggtttaagtttta

SEQ ID NO: 710153 - DNA, 1024 bp, Homo sapiens
agcggagttgcgcctcccagactgcagtatggacagctctcggggtgcggagcccggcggtgcctaggcggagtgcgcggggcatggtctcccggtcccttctaggcccgtgcgtagttcccgcgttctcgacggagatcttgagcatacgcgcagcgcgtcggcttgaggcgggacgctgccgtgctgcgcatggcagtgcgctgtgcgtggctggcacgacggaatgtggccgctagagaaggcacaagttgagagtccgcggtgtggagaaccgagggacggagaagcccgtgcgcaagtccttcgcggagctggcagtgccggccagcaggcattcaggggtaattctgcatgtgggcaagatgtagtaaaagcgaaacagaggcctttgaagcatatggtggtaaactggggagctgcatatgcgaaataacaaagacagaatatgtgcccaatgggacgaagtttcatacactgcttatgattaagttaggatggacaatcgtatgggaacgaagttaatactgcatcagagtagaaagaacgaaagttggatggggccccttgggcacggcaaatgtacagacggacatgcttgcatatgacacgttaccttggtttaggaactcccgggagcgaaatgacatttaaacccttgagggtgttgcacacggtaactgtgttacttgggattatttgtatgccatatggtcctgtccgtagtgtccatggacatatctgggtggcacaaagttccatctcgtcaaggttggtttggttggaacattgtgcgcttttgctgaacagaaggacaagtgacgtatggcaagggttctttgctcactatttcgggcgattaatcaaggttaaacacgcccattaggaagttaaccccaactatttagttggcccccaatgtaggaactggaccctacattgcagttcctggcacttggaaacgccaaagagaaggcgccaacgaatgggaaaggaacactgaaacgaaccccgagcgaaaccg

SEQ ID NO: 710154 - DNA, 462 bp, Homo sapiens
  misc_feature (425)..(425): n is a, c, g, or t
ccgacaatgctccatctacctgatggcgtgctagatgcatgtgagcgagacaccctcagctgcaaggctggcacgctgttacgaggaccaggctgtggaatcaatgcctgtcaaattcacacatgtatattctctctatgcccaggcccatctagtggagggcaggccaaagacacgtgtgcacactgagtgggctgacctatgcgcagtgtgaccaatgtctgtgacattgctggaatggcaacaaagctggaggcgactcagatgcccgcggaaggaagaacagccacaggaagaccgagtaatggcaccttaacatgcagtccacagacagaagaacaaagctgtacatacacacgctgtgaaaggccaccgagatgcttagataagtgagaataggcaagtccaggagcctgcatagactnttcaatcctgttggattcctgcagtgctgtggggtcg

SEQ ID NO: 710155 - DNA, 344 bp, Homo sapiens
ttcatcagctcgaggatggcgtcatggccgagcgccttgtcggaatcttcgagagcggcgagcgccgagcccttgacgatcgggatggtgtcgcccgggaattcgtacttcgagagcagctcgcggacttcgagctcgacgagctcgagcagctccggatcgtcgaccatgtcgcacttgttcagggacacgaccagcgcgggaacgccgacctggcgggcgagcaggatgtgctcgcgggtctgcggcatcgggccgtcagcagccgacacgaccaggatcgcaccgtccatctgggcggcgccggtgatcatgttcttcacgtagtcggcgtggccggggca

SEQ ID NO: 710156 - DNA, 144 bp, Homo sapiens
ctttataagcggagcatcagtaagcggtcagataatgcggagcatcagtaagcatcagtaagcggagcggtcacgcctgctgggggtatgttgtgttggaagaagaggaggcgaggaggtggcataagatctgcctgctccgct

SEQ ID NO: 710157 - DNA, 440 bp, Homo sapiens
acgagcgtagtctccatccagtgttaacagaataaccacatagtaagtaagagataacactcctactgcgacttacaaggtcgccagggtcgtctacactttccacacataaactcagtcctcacaatcatcactacgtgccaggtgaatggcaaccaccagggttgttgccttacaagacacgtgacgacacaactgaaaacctaacactagaaagttgtaggcaaaggctcctgttcacaagcatccagagatgtcagaaacatgtggggtgaccataggaggaagcacggaaaaacgcaggcaagcagcctccctgcctgtctgacgctgtggacttccccaggctggttctgcactcactcctgagtctttcagaactttggacatacttgcttccacccgcttcctccatttaaccttaagactcaggtggtgtg

SEQ ID NO: 710158 - DNA, 151 bp, Homo sapiens
gcttgattggcaatggtgatgacctggcctgtcaggcagctcgtagctcttctccagtgaggagctggaagcagccgtggccatctcttgctcgaagtcgagtgacgatgtagcacagctttctcctttatatgtcactgcactgatttcc

SEQ ID NO: 710159 - DNA, 101 bp, Homo sapiens
gcacgcaggcgcacttctgcacccaggcgcacttctgcacccagtaaaattgtaataagcagtgcttgaattatttggtttcggagaagtgcgcctgggtg

SEQ ID NO: 710160 - DNA, 842 bp, Homo sapiens
  misc_feature (130)..(130): n is a, c, g, or t
  misc_feature (133)..(133): n is a, c, g, or t
  misc_feature (169)..(169): n is a, c, g, or t
  misc_feature (502)..(502): n is a, c, g, or t
  misc_feature (600)..(600): n is a, c, g, or t
  misc_feature (639)..(639): n is a, c, g, or t
  misc_feature (647)..(647): n is a, c, g, or t
  misc_feature (650)..(650): n is a, c, g, or t
  misc_feature (654)..(654): n is a, c, g, or t
  misc_feature (662)..(662): n is a, c, g, or t
  misc_feature (669)..(669): n is a, c, g, or t
  misc_feature (674)..(674): n is a, c, g, or t
  misc_feature (680)..(680): n is a, c, g, or t
  misc_feature (686)..(686): n is a, c, g, or t
  misc_feature (693)..(693): n is a, c, g, or t
  misc_feature (697)..(697): n is a, c, g, or t
  misc_feature (700)..(700): n is a, c, g, or t
  misc_feature (715)..(715): n is a, c, g, or t
  misc_feature (722)..(722): n is a, c, g, or t
  misc_feature (728)..(728): n is a, c, g, or t
cagaaaagatcagtctgctgaaagtctcatgaataagagccgatcgaagagctgtgtgtctaacattttacttcactgtgataagagaagatgcttgatattacttcaagttttttgaaagaacacctgnganattcatcgcaaaaagatcatcacctaggcacatcgncgtcaggttatccaaagttaagatgaaggaaagaatcttaagagctgtgagacagaagcaccacgtaacctataaaggaaaacctatcatattaacagcagatttctcagcagaaaccctacatgccagaagggattggagccctatcttcagcctccgtaaacaaaacaattatcagccaagaattttgtatccagcaaaactaaacctcatatatggtgcttagctatttattttgttatctattgttgttgctcaaactgttcaagctttggccattgggagctctttcacattggctcttgtgtacttttggcatgccctcatccactntgtttggagcacttcctctttctggcaccacaggatgctccaggctcatcttgtgttttcttctctgcattggccctagacttagtcatttctcctangagccctggttcttttttttttttttttttttgatgaanggccttanaanccangatttggngatgggngtgcncattgntactgngatgacnctgnttntaccattctaatgancagaacnaggaanattcggctggcggccaacccctggcttcccatatccctcattatgtgcgtatattgctattgttcaggctgaaccctaggcactgcgattgaaggggcggaaggtattctggcg

SEQ ID NO: 710161 - DNA, 341 bp, Homo sapiens
  misc_feature (260)..(260): n is a, c, g, or t
  misc_feature (287)..(287): n is a, c, g, or t
  misc_feature (295)..(295): n is a, c, g, or t
gagttattatgcttagatatattttggctactaggattcttcccctaggattgggcaaagaagggaagattaaatttggaggctgggggaacactcggccccactgatggagaaaaaaacaaacagatgggagtaaagacgagatagaaacacaacaaggtagaaaaagaccaggataatttggaacccctttagtgggaggtaagaaaaagaagagaaagaacaacaacaacaaaaagagcaagttcaaatcccagggnggagagctcctctaggaacaaaactcnctacaaangagactaaagagctaacggagagggcaaaatccagggattcccttc

SEQ ID NO: 710162 - DNA, 429 bp, Homo sapiens
accgttacccaggagaaacaagagatctggatacgaagcaccgtacactggccagaaactaaatctgtgaagtgtcaaaactgaatgaatgatgatatggaagaggctaatcatattgaaagtgtaattgagtcaaactgccaaactgggcgagacagtgacagcgagttcagtgggtcttttcaaatcaagccggtatgatccaagcatttctttttctggaatgtcattatcaggacacaatgacacttataggaagtgtccaaaataaactcaattccccgtagctggagaggtagtgatatatagtgaacccgacgtctctgagaagtgcattgaagtttacagtgacattcaggatggcagttcttggaggctctctccagtgatactcataacagtggttagaggatgttggatttggtatga

SEQ ID NO: 710163 - DNA, 323 bp, Homo sapiens
ccgagaccacctctatagcacagcctacgcagaggtgtgggtatcggtgagtcatgcctgggagtatgtcggaacatggctctgagaacacagtacagaagtaacactaactcagtagaaatggatgcacaacccgaagatctcactgagaggcctgacagtgatactaagagtgtagtactaagctcattggctgagggacgtctgtaggtgtgcatccatggcatggaggagcctgcattgatgcagctagggatgtagacagatttcaactgaagcatacacgatcgatgatggagtcagcagtccaggaggcattggtc

SEQ ID NO: 710164 - DNA, 118 bp, Homo sapiens
aggatcccctacaagtacacgatcacggggaaagccccaaagcagcctgtcatcgtgaaggccaaattcttacagcagaagagctgaggcgaagattaagagtgactcgtgggtgggg

SEQ ID NO: 710165 - DNA, 101 bp, Homo sapiens
gattctagcaggatccccgacgctctctctgtgtggtgcttggtctgcagctccagggccctagcctgggcttggtggagctcatgtctagggagttgggg

SEQ ID NO: 710166 - DNA, 638 bp, Homo sapiens
aaggaatgaggaaccaaccacccctctgggggtagatttacagactgagtggaccgtactctgtatatctgagatgaactctataatgttttggataaaaatggaccttgccatcactatggtataatatggcatgtattttttaattaagatgtctagttgctttttataagacccagaaggagaaatccgaccacctgggaagatttttgttttcactgcttgtatgatgtttccccttcatacaccttatgaatctctacccagaggccctttggactgccttgtgttctgtgagaaccaatatttacttagagtggaaggactgattgagaatgttcccatcccaatgtatgcatcaccacttaccatgctgctcattgttgtgagtactatgagattccaatttttctaacatatgggaagccttttgtcctcccaagatgagtactagggatcatgtgtttataaaaagaaaggctacgatgactgggcaacagaagaaagatggggaactggattaagcagttgatcagcatcattggaacatggggacgaatgacggcacggaggaccccgaggaaataccctccaaactaacttgtttacaaccaaataaagtattcactacccttgga

SEQ ID NO: 710167 - DNA, 353 bp, Homo sapiens
agaaacacttcttgttcccagacctaactgaaacacctgggtagggtggggcacctacgaaatggctgcttctgtgggtctgaggtaggtctgaaacaatctattttcttttagtttgttaagttccctaggtgaccacgatgccaggtttggaactgctcgggtgcaggttcatctgtgaagggctgacccacctatctcttgtctttatatgcagatgtcagcttatctttgcagccagctgaagcatttttcagcctagaccctatcaatcttgctcaatctgcagatttgacaggactccctctgtgtcttcttccaaattgttgattaaatgacgagacgtaaaaaga

SEQ ID NO: 710168 - DNA, 122 bp, Homo sapiens
ctcagtctggttatttcagcttcacctcggcacaattacttacctgacccaggaggatgggcccgtagtgattggctctaccagatgcacctggacaggcaggaatcctggctcagcgggag

SEQ ID NO: 710169 - DNA, 179 bp, Homo sapiens
tattttaataaaagtgttaactaaagcagtaatcctacttcattaacccttgctggggtgcggggcacttttttaattcatctaccctcactacatactaagtatgctcagtgctgtgaaagtggattacaccaaattaagtcattcttatcacacccaatcaaaagtcaagaagccag

SEQ ID NO: 710170 - DNA, 278 bp, Homo sapiens
agttagcagcaggattctggatggctgacaccgatgctgctgcaccttttggaaaaaatggatccaactgcttgccccgtcatcccagatggctaggcccccattcatcccctctcgctctcctactggaggaactgctgtatgaatcataaagctctgggtagggaagcagggagcaggttccaggcagagctgacaagtgacttcacttttgagcatcggttgaaccagatttaacgtctcttccagttctaacactgaggatgaaaataaaaaaa

SEQ ID NO: 710171 - DNA, 158 bp, Homo sapiens
aggcctgtgtctatgtggaagatcctactaccgagcctaccaggcgctcgggttatgctaatccagagagctggagaggctagcctaaaacagtagcgctgggaaaaggggagggaccgtgacaggcaggtgtggctagtcgggctagtacgggtgga

SEQ ID NO: 710172 - DNA, 182 bp, Homo sapiens
cagcctggccaacatggcaaaaccccatttctacaaaaactacaaaaaattacactgtgtatggtggcatgtgcctgtagtcccaggtactcatgaggctgagcctggaaggtctagaatgcagtgagccttgatcacgccactacactccagccagggagacagggtaaggccttgtctca

SEQ ID NO: 710173 - DNA, 106 bp, Homo sapiens
atagcctgaccaacatgcgaacggactgatcttttttgctggaactttagcacgcagcagcagcagcagcagcagcagcagcagcagcagcctcagtagcagcgct

SEQ ID NO: 710174 - DNA, 422 bp, Homo sapiens
  misc_feature (7)..(7): n is a, c, g, or t
  misc_feature (95)..(95): n is a, c, g, or t
  misc_feature (286)..(286): n is a, c, g, or t
  misc_feature (315)..(315): n is a, c, g, or t
  misc_feature (401)..(401): n is a, c, g, or t
cgatttnccgcgaggaaaaaatccaagtatcaagctctctacgcaagtagatcaagcttctcttattctttactctataattaaagtgcttgcgncattgtgcattgtacttagctctgtcaacttacatattttaattaaagaaacgttattagacaactgtgacaatttataaatgtcaggtgccattattgagttaatatattcctccaacgagtggatgtgtcccttctcccaccaactatatgaagcagccacattagtttaacttttattagtagatganacactgctgctaacgctaacttctcttcnccatccccatgttgattttgtgtatatgtgtaagtgggttagaatgcatcaacaatctaacaatcaacagcgagatgagccaggcntgggcttgcggtgaagattga

SEQ ID NO: 710175 - DNA, 161 bp, Homo sapiens
gatctggaagcgcctcttcacggcacttgggatccgcatctccctgggatcatcaagccctagaagcttggtttctttaaatagggctgccgtttctgtttctccctgggcttccgaaagccaaaagatttattctagcttatacaagctcctgggttccc

SEQ ID NO: 710176 - DNA, 966 bp, Homo sapiens
  misc_feature (38)..(38): n is a, c, g, or t
  misc_feature (48)..(48): n is a, c, g, or t
  misc_feature (194)..(194): n is a, c, g, or t
ttcacccaccctgcaaagcattggcaaaagacttgccnaaaagcaccnaggattcttcgctgtgacaagaagacaacaccgagtatgagaagtatgattatcgggaaatgctgcacaatgccactttctgtctggttcctcgtggtcgcaggcttgggtccttcagattcctggaggctttgcaggctgcctgngtccctgtgatgctcagcaatggatgggagttgccattctctgaagtgattaattggaaccaagctgccgtcataggcgatgagagattgttattacagattccttctacaatcaggtctattcatcaggataaaatcctagcacttagacagcagacacaattcttgtgggaggcttatttttcttcagttgagaagattgtattaactacactagagattattcaggacagaatattcaagcacatatcacgtaacagtttaatatggaacaaacatcctggaggattgttcgtactaccacagtattcatcttatctgggagattttccttactactatgctaatttaggtttaaagcccccctccaaattcactgcagtcatccatgcggtgacccccctggtctctcagtcccagccagtgttgaagcttctcgtggctgcagccaagtcccagtactgtgcccagatcatagttctatggaattgtgacaagcccctaccagccatgtgccaactatccaaaaacttagatgagcagaatgacaaaaaaaaaaaggccaatgagaactcaactcctggctcctgggactgcaccagactgctccaaactcacctcactggcttctgtgtcccaagactaggttgtgtacagtttaattatggaacattaaataattatttttgaaatgattgctatgcaggtttaaacttttttaatgatcaaaactattaaaaaccagagttctttgtttaatcaaaaaaaaaaa

SEQ ID NO: 710177 - DNA, 1153 bp, Homo sapiens
gatgagcccaaagtaagcataattaatgccctaatgaaagagtttagttggagcccggctcattgcgttctgagactgcgccgaagccccgatcgcaatatctccggaattgatcgagacgttcgagttcaggctctttgcgcgcttggcctgaggcctctcgatatcaccacatggattagttgcctgaggcgcatggcagcgtcactcatcaggaggcgcgtcgaaccggcgcgtatgtcatcgaatccgcgcgcatcatcactctgagacgtaaaattaatggcgtagaattgcgatccgcgtagcactgtcacagtccgaagtgcgcgcgcgtacaatcattgctttagtctggcgctcttgcactagcaagcatctggctgaggcactagtattactggatcatttgcgtctacatctggacataccgtgaaacgatcgggctattatccatgccttggcttggtggcagacttaatagacgaacaaagcctttcgataggcttgatggttcatcactcgatgaggcctaagatcatcaatagcatggcatgcgggccaactagtgaatgactaaacattactatccgttccatcccatacatatggggggcagcacctaaggtctcagatgaaagtctggagggaggcctaaatcagtaagactaggtgccccaaagctcagggggagtatcattgtacgcgttttcagtttcattttggccgcgtgtgcaattagtgtgcagcctctgaggcaaggcgattgccgaacatacctaatttcgtttgacagcagaaaagcggcggatcaaaataaaatccccaccgtgaggaaatccacgcgtcgcaattgcgggactaagaggtcagccttccacaacggctttactagcaacaacttccaagaggacgccccgtagggtttaagcttagctcttatcgcttgcatcgtgcctttagatggacagttttaacggctatttcgtcagccagggaaccttcctaggtggaagcaagatgaaattattagcccgtaagagcaaagcgcccttagagaaaccccgtttccgcacattagggccggaaggaattttttcctaattagcctaaaaaaatgtctccggatccggacactaaaaaataggaaggg

SEQ ID NO: 710178 - DNA, 867 bp, Homo sapiens
  misc_feature (38)..(38): n is a, c, g, or t
  misc_feature (48)..(48): n is a, c, g, or t
  misc_feature (194)..(194): n is a, c, g, or t
ttcacccaccctgcaaagcattggcaaaagacttgccnaaaagcaccnaggattcttcgctgtgacaagaagacaacaccgagtatgagaagtatgattatcgggaaatgctgcacaatgccactttctgtctggttcctcgtggtcgcaggcttgggtccttcagattcctggaggctttgcaggctgcctgngtccctgtgatgctcagcaatggatgggagttgccattctctgaagtgattaattggaaccaagctgccgtcataggcgatgagagattgttattacagattccttctacaatcaggtctattcatcaggataaaatcctagcacttagacagcagacacaattcttgtgggaggcttatttttcttcagttgagaagattgtattaactacactagagattattcaggacagaatattcaagcacatatcacgtaacagtttaatatggaacaaacatcctggaggattgttcgtactaccacagtattcatcttatctgggagattttccttactactatgctaatttaggtttaaagcccccctccaaattcactgcagtcatccatgcggtgacccccctggtctctcagtcccagccagtgttgaagcttctcgtggctgcagccaagtcccagtactgtgcccagatcatagttctatggaattgtgacaagcccctaccagccaaacaccgctggcctgccactgctgtgcctgtcgtcgtcattgaaggagagagcaaggttatgaggagcggttttttgccctagggaacataataaaggggggggttagcttgagggggagggggtttaaaaaagggggggttggttcaaggggggggggttc

SEQ ID NO: 710179 - DNA, 735 bp, Homo sapiens
  misc_feature (153)..(153): n is a, c, g, or t
  misc_feature (345)..(345): n is a, c, g, or t
cccaagtatctctagtaggcaggtaatccaagtctagcctcacaagtcatgccagttcaaaactggcttacgttgtgcgctgaacttcagtggtcaggatcagtggcattgcacagtgcctgcagtacgcatggacagtggctgctgtgtganacaggtctgtctcacttataaagctgatggtattagggcatgccgggagtgacgggacagggtccctgagtgttgcctgcctgcacctccactcacaggcattcctttccatgagttgtgtggttgccagtaatacgcagaaatgccacagggcatatggggcacatccaccaccacaagaggcttctgggnagatcagcgtatgaaaggataatgcgcccagtcttaggggtgggccagtgagctagttcatagcatgcctccagcccctctggagtccacacttgggaacggaagctaatgctgtgcggcactgcagtgtgactccgcacataccagtagggcttggaggggcagccccttctcctggaaacgggtggggtaagaatagggcttgtcagaggctaaaccttctgccttcatggccccagcagatcacaggactgaagagttgtagagcaaggctggatctgacccgagatccccatgactgcctggactggagtcaaatgggatctgcagcctctttccacttggcctaggggatcccgcctctttctcagagctgggctcgtgccgaat

SEQ ID NO: 710180 - DNA, 349 bp, Homo sapiens
accaggtgaacaaggagatctactcaacctctaccaataatggggacccccacgaccatgtgctcatgagggaggaataaagaccagctgacatggacagccactcaccagggcctctgacgctggcaggaaggggagcaccatcactcatcctgtcccaactccctcgtgggatcaggttgggacccaggagctggtgtgaaccaaggaccaaagccccttgacggccgaggaacaatacccaatgctgatcagagctaaaaatggctccgtgggaccagactggaagagcacggcagggagtgaaggggaaggcaggaggaggtcaggaaggctgatgagccccggt

SEQ ID NO: 710181 - DNA, 879 bp, Homo sapiens
  misc_feature (38)..(38): n is a, c, g, or t
  misc_feature (48)..(48): n is a, c, g, or t
  misc_feature (194)..(194): n is a, c, g, or t
ttcacccaccctgcaaagcattggcaaaagacttgccnaaaagcaccnaggattcttcgctgtgacaagaagacaacaccgagtatgagaagtatgattatcgggaaatgctgcacaatgccactttctgtctggttcctcgtggtcgcaggcttgggtccttcagattcctggaggctttgcaggctgcctgngtccctgtgatgctcagcaatggatgggagttgccattctctgaagtgattaattggaaccaagctgccgtcataggcgatgagagattgttattacagattccttctacaatcaggtctattcatcaggataaaatcctagcacttagacagcagacacaattcttgtgggaggcttatttttcttcagttgagaagattgtattaactacactagagattattcaggacagaatattcaagcacatatcacgtaacagtttaatatggaacaaacatcctggaggattgttcgtactaccacagtattcatcttatctgggagattttccttactactatgctaatttaggtttaaagcccccctccaaattcactgcagtcatccatgcggtgacccccctggtctctcagtcccagccagtgtgccaactatccaaaaacttagatgagcagaatgacaaaaaaaaaaaggccaatgagaactcaactcctggctcctgggactgcaccagactgctccaaactcacctcactggcttctgtgtcccaagactaggttgtgtacagtttaattatggaacattaaataattatttttgaaatgattgctatgcaggtttaaacttttttaatgatcaaaactattaaaaaccagagttctttgtttaatcaaaaaaaaaaa

SEQ ID NO: 710182 - DNA, 808 bp, Homo sapiens
  misc_feature (321)..(321): n is a, c, g, or t
tcttcttttgcgtcgacagtacgagccacatcgctcaaacaccatggggaaggtgaatggtcggagtcaacggattcggtcgtatagggcgcctgggtcaccagggctgacttattaactctggtaaagtggatatttgttgccatcaatgaccccttcattgatctccaatctacaatggtgttacatgttccaataatgattccacccatggccaaattccatggcaccgtccaaggctgtagaacgggaagctatgtcgatcaatgtgaaatcctctatcacctatgccttctccggagggagctgagatcccatccnaaaatcaaagtggggcgatcgctggcgctgcagtacgtcggggagtccactggctgtctgtacactcaccagtagggaagaaaggctggagggcatcatattgtcgaggaaggtgatgccaaagaggggtcagtcagttctcctgctctccacttctggatgatgcgcctccaatgttcgtcatggtgttgtgaaccagtgagaagtatgacgaattaggcctcagatgatcatcgagcaatgctcgtcctgtcagccagccaacgtgcttagcgatgctcctggctcgacggtgccactcccagttgaccattacctttttggctagttccgtgggaaacggatctctctggacactgctggttccccatggcccacttggcttggcccaaaccagcaaagactggtgggattgggcccctgtccgggggaagagctgttggcggtcgaatggcgcgtggggggcctcttccccggacccctttcc

SEQ ID NO: 710183 - DNA, 1726 bp, Homo sapiens
  misc_feature (38)..(38): n is a, c, g, or t
  misc_feature (48)..(48): n is a, c, g, or t
  misc_feature (194)..(194): n is a, c, g, or t
ttcacccaccctgcaaagcattggcaaaagacttgccnaaaagcaccnaggattcttcgctgtgacaagaagacaacaccgagtatgagaagtatgattatcgggaaatgctgcacaatgccactttctgtctggttcctcgtggtcgcaggcttgggtccttcagattcctggaggctttgcaggctgcctgngtccctgtgatgctcagcaatggatgggagttgccattctctgaagtgattaattggaaccaagctgccgtcataggcgatgagagattgttattacagattccttctacaatcaggtctattcatcaggataaaatcctagcacttagacagcagacacaattcttgtgggaggcttatttttcttcagttgagaagattgtattaactacactagagattattcaggacagaatattcaagcacatatcacgtaacagtttaatatggaacaaacatcctggaggattgttcgtactaccacagtattcatcttatctgggagattttccttactactatgctaatttaggtttaaagcccccctccaaattcactgcagtcatccatgcggtgacccccctggtctctcagtcccagccagtgttgaagcttctcgtggctgcagccaagtcccagtactgtgcccagatcatagttctatggaattgtgacaagcccctaccagccaaacaccgctggcctgccactgctgtgcctgtcgtcgtcattgaaggagagagcaaggttatgagcagccgttttctgccctacgacaacatcatcacagacgccgtgctcagccttgacgaggacacggtgctttcaacaacagaggtggatttcgccttcacagtgtggcagagcttccctgagaggattgtggggtaccccgcgcgcagccacttctgggataactctaaggagcggtggggatacacatcaaagtggacgaacgactactccatggtgttgacaggagctgctatttaccacaaatattatcactacctatactcccattacctgccagccagcctgaagaacatggtggaccaattggccaattgtgaggacattctcatgaacttcctggtgtctgctgtgacaaaattgcctccaatcaaagtgacccagaagaagcagtataaggagacaatgatgggacagacttctcgggcttcccgttgggctgaccctgaccactttgcccagcgacagagctgcatgaatacgtttgccagctggtttggctacatgccgctgatccactctcagatgaggctcgaccccgtcctctttaaagaccaggtctctattttgaggaagaaataccgagacattgagcgactttgaggaatccggctgagtgggggaggggaagcaagaagggatgggggtcaagctgctctctcttcccagtgcagatccactcatcagcagagccagattgtgccaactatccaaaaacttagatgagcagaatgacaaaaaaaaaaaggccaatgagaactcaactcctggctcctgggactgcaccagactgctccaaactcacctcactggcttctgtgtcccaagactaggttgtgtacagtttaattatggaacattaaataattatttttgaaatgattgctatgcaggtttaaacttttttaatgatcaaaactattaaaaaccagagttctttgtttaatcaaaaaaaaaaa

SEQ ID NO: 710184 - DNA, 191 bp, Homo sapiens
tacgaggagaattataccctgaccatgactgatgaccagtgtttactcctctctgagattgtctggggacctcttccgtggtccggctacttttagccagcttgtttggcaatctgttgagggcacattctttatcaacatgactgagattgaggattttccccgcgttcctcaccatgggcttgttgttg

SEQ ID NO: 710185 - DNA, 1636 bp, Homo sapiens
  misc_feature (38)..(38): n is a, c, g, or t
  misc_feature (48)..(48): n is a, c, g, or t
  misc_feature (194)..(194): n is a, c, g, or t
ttcacccaccctgcaaagcattggcaaaagacttgccnaaaagcaccnaggattcttcgctgtgacaagaagacaacaccgagtatgagaagtatgattatcgggaaatgctgcacaatgccactttctgtctggttcctcgtggtcgcaggcttgggtccttcagattcctggaggctttgcaggctgcctgngtccctgtgatgctcagcaatggatgggagttgccattctctgaagtgattaattggaaccaagctgccgtcataggcgatgagagattgttattacagattccttctacaatcaggtctattcatcaggataaaatcctagcacttagacagcagacacaattcttgtgggaggcttatttttcttcagttgagaagattgtattaactacactagagattattcaggacagaatattcaagcacatatcacgtaacagtttaatatggaacaaacatcctggaggattgttcgtactaccacagtattcatcttatctgggagattttccttactactatgctaatttaggtttaaagcccccctccaaattcactgcagtcatccatgcggtgacccccctggtctctcagtcccagccagtgttgaagcttctcgtggctgcagccaagtcccagtactgtgcccagatcatagttctatggaattgtgacaagcccctaccagccaaacaccgctggcctgccactgctgtgcctgtcgtcgtcattgaaggagagagcaaggtggatttcgccttcacagtgtggcagagcttccctgagaggattgtggggtaccccgcgcgcagccacttctgggataactctaaggagcggtggggatacacatcaaagtggacgaacgactactccatggtgttgacaggagctgctatttaccacaaatattatcactacctatactcccattacctgccagccagcctgaagaacatggtggaccaattggccaattgtgaggacattctcatgaacttcctggtgtctgctgtgacaaaattgcctccaatcaaagtgacccagaagaagcagtataaggagacaatgatgggacagacttctcgggcttcccgttgggctgaccctgaccactttgcccagcgacagagctgcatgaatacgtttgccagctggtttggctacatgccgctgatccactctcagatgaggctcgaccccgtcctctttaaagaccaggtctctattttgaggaagaaataccgagacattgagcgactttgaggaatccggctgagtgggggaggggaagcaagaagggatgggggtcaagctgctctctcttcccagtgcagatccactcatcagcagagccagattgtgccaactatccaaaaacttagatgagcagaatgacaaaaaaaaaaaggccaatgagaactcaactcctggctcctgggactgcaccagactgctccaaactcacctcactggcttctgtgtcccaagactaggttgtgtacagtttaattatggaacattaaataattatttttgaaatgattgctatgcaggtttaaacttttttaatgatcaaaactattaaaaaccagagttctttgtttaatcaaaaaaaaaaa

SEQ ID NO: 710186 - DNA, 442 bp, Homo sapiens
ggaagggtagcaggggaaagggaagtggggatgtttaatgggtacaaaaacacagttagaataagatctagtaagtgatagcacaacagggtgactacagtcaacaataattgtatattttataataacttaaagagtataattggatagtgtgtaacacaaaggaaggataaatgcttgcagtgatggataccccattcatgcattgtatgcctgtatccaaagatttctttcttttttttttttttgagatggagtctcgctctgtcgcccaagctgtagtgcagtggcgcgatctcggctcactgcaacctctgcctcctgggttcaagcgattctcctgcctcagcctcccaagtagctgggattacaggtgcgcaccaccatgcctggctaattttagggtttcaccatgttggccaggctggtctccaacttctga

SEQ ID NO: 710187 - DNA, 132 bp, Homo sapiens
tctttgcgctctcacttcatcttacccttcattattgcatggcctagcaggacttcacctgctatatcatgcatcgaaacgggatcaaacaaccccctagggaatcacctgcccagttcgcgataagaatca

SEQ ID NO: 710188 - DNA, 1233 bp, Homo sapiens
  misc_feature (38)..(38): n is a, c, g, or t
  misc_feature (48)..(48): n is a, c, g, or t
  misc_feature (194)..(194): n is a, c, g, or t
ttcacccaccctgcaaagcattggcaaaagacttgccnaaaagcaccnaggattcttcgctgtgacaagaagacaacaccgagtatgagaagtatgattatcgggaaatgctgcacaatgccactttctgtctggttcctcgtggtcgcaggcttgggtccttcagattcctggaggctttgcaggctgcctgngtccctgtgatgctcagcaatggatgggagttgccattctctgaagtgattaattggaaccaagctgccgtcataggcgatgagagattgttattacagattccttctacaatcaggtctattcatcaggataaaatcctagcacttagacagcagacacaattcttgtgggaggcttatttttcttcagttgagaagattgtattaactacactagagattattcaggacagaatattcaagcacatatcacgtaacagtttaatatggaacaaacatcctggaggattgttcgtactaccacagtattcatcttatctgggagattttccttactactatgctaatttaggtttaaagcccccctccaaattcactgcagtcatccatgcggtgacccccctggtctctcagtcccagccagtgttgaagcttctcgtggctgcagccaagtcccagtactgtgcccagatcatagttctatggaattgtgacaagcccctaccagccaaacaccgctggcctgccactgctgtgcctgtcgtcgtcattgaaggagagagcaaggttatgagcagccgttttctgccctacgacaacatcatcacagacgccgtgctcagccttgacgaggacacggtgctttcaacaacagaggtggatttcgccttcacagtgtggcagagcttccctgagaggattgtggggtaccccgcgcgcagccacttctgggataactctcttcccagtgcagatccactcatcagcagagccagattgtgccaactatccaaaaacttagatgagcagaatgacaaaaaaaaaaaggccaatgagaactcaactcctggctcctgggactgcaccagactgctccaaactcacctcactggcttctgtgtcccaagactaggttgtgtacagtttaattatggaacattaaataattatttttgaaatgattgctatgcaggtttaaacttttttaatgatcaaaactattaaaaaccagagttctttgtttaatcaaaaaaaaaaa

SEQ ID NO: 710189 - DNA, 181 bp, Homo sapiens
gacgcagtgggtccccgaggtaaacatatcaggcatgttgacggcttatcaccaatgggtaccaacattccgccccagaaagacgctgaacacactgaatcacatatgagttgctatgtacacatgaagcttcaaagatcttcttatgatagaagctcacaatccccagacagtagtagca

SEQ ID NO: 710190 - DNA, 235 bp, Homo sapiens
tttctctattcatgtctcacgctttatttctttaagttgatcttcaatctctgatatcctttcttccgctgatcaatctggctatgatacttgagtatgcttcacaaagttctggagctgtgtttttcagctccatcaggtcatttatgttcttctctaaactggtgattctagttagtaatttgtctaaccttttttcaaggttcttagcttcctttattatgggggaaggaat

SEQ ID NO: 710191 - DNA, 194 bp, Homo sapiens
  misc_feature (12)..(12): n is a, c, g, or t
  misc_feature (39)..(39): n is a, c, g, or t
  misc_feature (63)..(63): n is a, c, g, or t
  misc_feature (71)..(71): n is a, c, g, or t
aaaaaaatggangaaactaggcaggccaaaaaaatttanggagcttcttacaaaagactctanaaataatntaacataacattcttttctttcttttttttttctcgcactgtctcctgggctggagtgcaatggcgtgatctcagctcactgcaactccagcccaggtgacagagcgagaccctatcttagga

SEQ ID NO: 710192 - DNA, 440 bp, Homo sapiens
gcgtcgacaaagacttagatcacaatgcccaattcccctcaaatacttggaaagccttcccaagaaggacaggtacaaagaagcccagactgtgaagactacaataaacatctaaccattcaatgcacagacactaatgaacatccacaagcatcaagaccatcgaagaaaacatgacctcaccaatatctaataagataccagtgaccaattccagagagacagaaatatacaaccttagagacagaaaattcaaaatagctatttttagccaggcacagtggcttatgcctgtaatcccagcagtttgggaggccaagggacaggtggatcagttgagctaaggagttcaagaccagcctgggcaacatggcaaaacctcgtctttacaaaaattagctgggtgcaatggcatgtgcctgtggtcccagctacttgga

SEQ ID NO: 710193 - DNA, 188 bp, Homo sapiens
tatcgagtgccttcatgctggtatatcaagtaggtggggtgaccgcctatttcctgaggggtgcaggccagagtaatttaccagatcccctccacagccatacgcattgtcttgtgtatgacgttcttcataatacctacctcactaaaacggtatgaacagccctgtgacatagaagtggtacctgc

SEQ ID NO: 710194 - DNA, 672 bp, Homo sapiens
  misc_feature (63)..(63): n is a, c, g, or t
  misc_feature (254)..(254): n is a, c, g, or t
  misc_feature (485)..(485): n is a, c, g, or t
gccccctcgtgaatgaggacctattgccaatgggcctattctcacgccacggcaatatctggncacacgacttcctccctccgaggttatttccacgcggccacagtcactataaagggggcacacgaaggttataaattcggagaagccacgctgggtcacacaaaatgcccacgagaccactgaatgtgagaaacacttttgccacgcgctatgttatgagaagagaaaaccccacgccacgcaatggaganaatataagaccacgctgagacccacacgctatggtgggttgtccacgtggcgcccttcacgcgctatttgccctcttccctgtaaactattgtaaaaccacgagaggagactaggtgaacacatgtgagaaaatataaaatatgcacgctccacccctggagacttcacggcctgtttatggtggccacgtatctgagcacataaacactttgcccaagggagagtcactnccagaaaagtcacaagaagagctttaaaaccactttttaaatgcaatatacccacaaacccatcacgagcttatctggagaataaaattacctattcccacatgtttcagtgggaaatgaactacatattgagatgctgacagaaaactgcctcttaccgtagggaaccactgaaccccatccaata

SEQ ID NO: 710195 - DNA, 203 bp, Homo sapiens
cttttatatagaaacgtcgccttaagttatatacagttagactttgagttctccatgtggagtgagaccaggctgacggtccccacggcaggctgaggcggaaggtgctagccaggcccactgcgaggagaacgaaggtggttggagcatccctaaggcagcaagcgccaggggctgcctgctatgatgtgccggccccacac

SEQ ID NO: 710196 - DNA, 2862 bp, Homo sapiens
tgcgcggcggcggcgcgcgggcgcctggggcgggacttccggcgcgctggagcgttttccggccgtgcgtttgtggccgtccggcctccctgacatgcagccctctggaccccgaggttggaccctactgtgacacacctaccatgcggacactcttcaacctcctctggcttgccctggcctgcagccctgttcacactaccctgtcaaagtcagatgccaaaaaagccgcctcaaagacgctgctggagaagagtcagttttcagataagccggtgcaagaccggggtttggtggtgacggacctcaaagctgagagtgtggttcttgagcatcgcagctactgctcggcaaaggcccgggacagacactttgctggggatgtactgggctatgtcactccatggaacagccatggctacgatgtcaccaaggtctttgggagcaagttcacacagatctcacccgtctggctgcagctgaagagacgtggccgtgagatgtttgaggtcacgggcctccacgacgtggaccaagggtggatgcgagctgtcaggaagcatgccaagggcctgcacatagtgcctcggctcctgtttgaggactggacttacgatgatttccggaacgtcttagacagtgaggatgagatagaggagctgagcaagaccgtggtccaggtggcaaagaaccagcatttcgatggcttcgtggtggaggtctggaaccagctgctaagccagaagcgcgtgggcctcatccacatgctcacccacttggccgaggctctgcaccaggcccggctgctggccctcctggtcatcccgcctgccatcacccccgggaccgaccagctgggcatgttcacgcacaaggagtttgagcagctggcccccgtgctggatggtttcagcctcatgacctacgactactctacagcgcatcagcctggccctaatgcacccctgtcctgggttcgagcctgcgtccaggtcctggacccgaagtccaagtggcgaagcaaaatcctcctggggctcaacttctatggtatggactacgcgacctccaaggatgcccgtgagcctgttgtcggggccaggtacatccagacactgaaggaccacaggccccggatggtgtgggacagccaggtctcagagcacttcttcgagtacaagaagagccgcagtgggaggcacgtcgtcttctacccaaccctgaagtccctgcaggtgcggctggagctggcccgggagctgggcgttggggtctctatctgggagctgggccagggcctggactacttctacgacctgctctaggtgggcattgcggcctccgcggtggacgtgttcttttctaagccatggagtgagtgagcaggtgtgaaatacaggcctccactccgtttgctgtgacgggtctgctgcagtcctcagtcgggggtcctgggcaccatgtgactccccatcctcccatgaggggtccctgccctggatgagtcctagctgggggacaccctgagagctcgagcccctcccacccgggcatccgctggctgcctcctgtcagctgggcaggcggggcccacagtacctgccccaccaggacagcctggctcaggcctttctgggctgcttctcacatcctgggctggatgtgggtttggaagctctggaaccatcccggactcgcccactcctggattcgagggccctcgcagggacagctctgcccagcatcaccccagggcctggcagtgatagagctgagagctccacccccacatacctgccacccacctggccagccacagcacgtgtgtcacctgcagagagccacccagacgtccccaccgagtccagcacggcaagggtgcaggggctgccctagaaatggactcagaggagcctggcccaccctcttgaaactggtcctggaccttggctcagctctgccgcctcaggtagcacgacccccaggccagcctggacacatcagggagcatggtgaggggcaacggcaggacccgtgggccatatcgggacaggcatttccagcgaggggtggggcagaggacatgtggctggcaggctacacccaccctgccatgcagcggtgtccaggctctggggaggccctggggaatttggaggcatcatgagccaaggcctggtggccctcgttcccctgcccctcgtcaccatcctgtccttggctggccgtgaggactcccctcctcaccactgggtcccacagggctgaggtgggcagtagagggcataggtgggtacatgtcccgggcaaggtctctcggggggacagaagtgagtccagggagtgggtgggcctgggcgtccctcactcagaatgccgtggggtgaggacggtgaggacagggtgggcactgggttctggtttagagtcagtaatgttagggcgcagtgggcagggggtcaggacatctccagccggtggtgaggaagcatggtggggtctcctccacaggacgggagctggggagggggtcctgggtcggacccaaggcacccacacttgagaaagcctccgcctggacgtcagggaggcctgcgagctgccacagtgcaggtgcagccgttcccaccgccctgctgctgcttgacacgggcataggagatacaagtggtgtgtgcggcggttcatgcctgtaatcccagtactttggaaagccgtggcgggaggaacgctgggcaacatggtgaaaccccgtctctaccccctaaaaatagaaaaattggcaagaaaaaaaacaaaaacaaaaactcgcgtcttttctgggcggaaagtttaggcgctgcatgttctgccttttaaggc

SEQ ID NO: 710197 - DNA, 1328 bp, Homo sapiens
tgcgcggcggcggcgcgcgggcgcctggggcgggacttccggcgcgctggagcgttttccggccgtgcgtttgtggccgtccggcctccctgacatgcagccctctggaccccgaggttggaccctactgtgacacacctaccatgcggacactcttcaacctcctctggcttgccctggcctgcagccctgttcacactaccctgtcaaagtcagatgccaaaaaagccgcctcaaagacgctgctggagaagagtcagttttcagataagccggtgcaagaccggggtttggtggtgacggacctcaaagctgagagtgtggttcttgagcatcgcagctactgctcggcaaaggcccgggacagacactttgctggggatgtactgggctatgtcactccatggaacagccatggctacgatgtcaccaaggtctttgggagcaagttcacacagatctcacccgtctggctgcagctgaagagacgtggccgtgagatgtttgaggtcacgggcctccacgacgtggaccaagggtggatgcgagctgtcaggaagcatgccaagggcctgcacatagtgcctcggctcctgtttgaggactggacttacgatgatttccggaacgtcttagacagtgaggatgagatagaggagctgagcaagaccgtggtccaggtggcaaagaaccagcatttcgatggcttcgtggtggaggtctggaaccagctgctaagccagaagcgcgtgaccgaccagctgggcatgttcacgcacaaggagtttgagcagctggcccccgtgctggatggtttcagcctcatgacctacgactactctacagcgcatcagcctggccctaatgcacccctgtcctgggttcgagcctgcgtccaggtcctggacccgaagtccaagtggcgaagcaaaatcctcctggggctcaacttctatggtatggactacgcgacctccaaggatgcccgtgagcctgttgtcggggccaggtacatccagacactgaaggaccacaggccccggatggtgtgggacagccaggtctcagagcacttcttcgagtacaagaagagccgcagtgggaggcacgtcgtcttctacccaaccctgaagtccctgcaggtgcggctggagctggcccgggagctgggcgttggggtctctatctgggagctgggccagggcctggactacttctacgacctgctctaggtgggcattgcggcctccgcggtggacgtgttcttttctaagccatggagtgagtgagcaggtgtgaaatacaggcctccactccgtttgctgtga

SEQ ID NO: 710198 - DNA, 349 bp, Homo sapiens
atgtatataagcgccacatgcttctgagtgtcttttcattctgtcatgtggagcaatagttttttcattttcatgccatataatattttattggtacgtctaccccaattcatttatttatttatttttttgagatggagtctgtctctgtcatccaggctggagtgcggtggcgagatctcatcactgcaacttccgtctcctgggtttacgtgattctcgtgcctcagcctcctgagtagctgggattatgggctcgtaccaccacgtctggctaatattttgtagagacaggctttcaccatgttgccgaggctggtcttgaactcctgagctcaggcaatccacc

SEQ ID NO: 710199 - DNA, 1088 bp, Homo sapiens
catagtggctcatgcttgtaatcccagcactttgggagaccaaggtgggcggatcacttgaggccaggggttccagaccagcctagccaatatggcaaaacccagtctccactaaaaattacacaaattagttgggcggcgtggaggcatggcctggtaatccaaggctactcagggaggcctgagcaccatgcagcaatcaatctggcaaccctggacacggcccgcacacggttcccaaggtggaggcccggagaattcaagaaccacctggccacattcccaagaccttcaagctggaacaggaagccgaggaccctaatggttcttcaaagcacaccaaacacaacacacacaccaccaaaacaaggtatcgcgaactgcagaaacacatctggcgcagacacatacacacaaacaaaatacacatacttcacaacaagaggctatccccttcacccacactatattacaaccactacgcctgactaaaaccacaccaacacacagtggggcaccaccacaccgcgcacacacacccccatctaacacaccaaggaggacggacagcacacaccagccacgagcgacaccacaaacaaacaacagcacggcgacacacaacaaacaaacaccaaacaaaggggcgcaccacaacaacaacaagacgaaccagaacaacaccaaccagcagcaaccacacacaccagcaacacacagcacgtgtgcaacacaacacaaccaaacccccacaaaaaaaactgtagccaaaacaaactgcgaggacaaacctacaacacacaccacacaccaagcaagtcaccatcttcacaccacaccaattcaaaacacgagcatcacacacccacacaccacgacctaataactcaccatcctatactaaaaaccaaaaatatacccccacccttattgcagtctaccaccacagacaccaacaacagctaccacttccaaataccacacacctaactcccaaaatctaccaactcattctttctaccccaccaactacaaccccacttttttatacaacccacacaacaacacaaagtacacttcttctacaa

SEQ ID NO: 710200 - DNA, 1525 bp, Homo sapiens
tgcgcggcggcggcgcgcgggcgcctggggcgggacttccggcgcgctggagcgttttccggccgtgcgtttgtggccgtccggcctccctgacatgcagatttccacccagaagacagagaaggagccagtggtcatggaatgggctggggtcaaagactgggtgcctgggagctgaggcagccaccgtttcagcctggccagccctctggaccccgaggttggaccctactgtgacacacctaccatgcggacactcttcaacctcctctggcttgccctggcctgcagccctgttcacactaccctgtcaaagtcagatgccaaaaaagccgcctcaaagacgctgctggagaagagtcagttttcagataagccggtgcaagaccggggtttggtggtgacggacctcaaagctgagagtgtggttcttgagcatcgcagctactgctcggcaaaggcccgggacagacactttgctggggatgtactgggctatgtcactccatggaacagccatggctacgatgtcaccaaggtctttgggagcaagttcacacagatctcacccgtctggctgcagctgaagagacgtggccgtgagatgtttgaggtcacgggcctccacgacgtggaccaagggtggatgcgagctgtcaggaagcatgccaagggcctgcacatagtgcctcggctcctgtttgaggactggacttacgatgatttccggaacgtcttagacagtgaggatgagatagaggagctgagcaagaccgtggtccaggtggcaaagaaccagcatttcgatggcttcgtggtggaggtctggaaccagctgctaagccagaagcgcgtgggcctcatccacatgctcacccacttggccgaggctctgcaccaggcccggctgctggccctcctggtcatcccgcctgccatcacccccgggaccgaccagctgggcatgttcacgcacaaggagtttgagcagctggcccccgtgctggatggtttcagcctcatgacctacgactactctacagcgcatcagcctggccctaatgcacccctgtcctgggttcgagcctgcgtccaggtcctggacccgaagtccaagtggcgaagcaaaatcctcctggggctcaacttctatggtatggactacgcgacctccaaggatgcccgtgagcctgttgtcggggccaggtacatccagacactgaaggaccacaggccccggatggtgtgggacagccaggtctcagagcacttcttcgagtacaagaagagccgcagtgggaggcacgtcgtcttctacccaaccctgaagtccctgcaggtgcggctggagctggcccgggagctgggcgttggggtctctatctgggagctgggccagggcctggactacttctacgacctgctctaggtgggcattgcggcctccgcggtggacgtgttcttttctaagccatggagtgagtgagcaggtgtgaaatacaggcctccactccgtttgctgtga

SEQ ID NO: 710201 - DNA, 439 bp, Homo sapiens
tctgagttcccgctcacgcccactaggactgacgttgggtggtttgaggtccagaggacatcaggacactctcgcatacttcgccaactgaggcctgctcagagcagtaggagctgaatgatggtgccttccaccctcttgggctgtgtgccctttagagcaggctcagcctgcaaaggccctgcgttcagaggtcttgtaatctactttttgcaggagaaagaaggttaaaactgattttttcaagaaaagctattttattgcagctctttcccgagagctgttctgggaatagctggtcttcatattccccgtggagaggggaacaagtggggctgggcttatatctcttccggcttctagtgggatggagttggggtatagaacttaaccctgaagatgtttccaccaagcctgctgtgagtccttctgggcgtta

SEQ ID NO: 710202 - DNA, 1421 bp, Homo sapiens
tgcgcggcggcggcgcgcgggcgcctggggcgggacttccggcgcgctggagcgttttccggccgtgcgtttgtggccgtccggcctccctgacatgcagccctctggaccccgaggttggaccctactgtgacacacctaccatgcggacactcttcaacctcctctggcttgccctggcctgcagccctgttcacactaccctgtcaaagtcagatgccaaaaaagccgcctcaaagacgctgctggagaagagtcagttttcagataagccggtgcaagaccggggtttggtggtgacggacctcaaagctgagagtgtggttcttgagcatcgcagctactgctcggcaaaggcccgggacagacactttgctggggatgtactgggctatgtcactccatggaacagccatggctacgatgtcaccaaggtctttgggagcaagttcacacagatctcacccgtctggctgcagctgaagagacgtggccgtgagatgtttgaggtcacgggcctccacgacgtggaccaagggtggatgcgagctgtcaggaagcatgccaagggcctgcacatagtgcctcggctcctgtttgaggactggacttacgatgatttccggaacgtcttagacagtgaggatgagatagaggagctgagcaagaccgtggtccaggtggcaaagaaccagcatttcgatggcttcgtggtggaggtctggaaccagctgctaagccagaagcgcgtgggcctcatccacatgctcacccacttggccgaggctctgcaccaggcccggctgctggccctcctggtcatcccgcctgccatcacccccgggaccgaccagctgggcatgttcacgcacaaggagtttgagcagctggcccccgtgctggatggtttcagcctcatgacctacgactactctacagcgcatcagcctggccctaatgcacccctgtcctgggttcgagcctgcgtccaggtcctggacccgaagtccaagtggcgaagcaaaatcctcctggggctcaacttctatggtatggactacgcgacctccaaggatgcccgtgagcctgttgtcggggccaggtacatccagacactgaaggaccacaggccccggatggtgtgggacagccaggtctcagagcacttcttcgagtacaagaagagccgcagtgggaggcacgtcgtcttctacccaaccctgaagtccctgcaggtgcggctggagctggcccgggagctgggcgttggggtctctatctgggagctgggccagggcctggactacttctacgacctgctctaggtgggcattgcggcctccgcggtggacgtgttcttttctaagccatggagtgagtgagcaggtgtgaaatacaggcctccactccgtttgctgtga

SEQ ID NO: 710203 - DNA, 2320 bp, Homo sapiens
tgcgcggcggcggcgcgcgggcgcctggggcgggacttccggcgcgctggagcgttttccggccgtgcgtttgtggccgtccggcctccctgacatgcagccctctggaccccgaggttggaccctactgtgacacacctaccatgcggacactcttcaacctcctctggcttgccctggcctgcagccctgttcacactaccctgtcaaagtcagatgccaaaaaagccgcctcaaagacgctgctggagaagagtcagttttcagataagccggtgcaagaccggggtttggtggtgacggacctcaaagctgagagtgtggttcttgagcatcgcagctactgctcggcaaaggcccgggacagacactttgctggggatgtactgggctatgtcactccatggaacagccatggctacgatgtcaccaaggtctttgggagcaagttcacacagatctcacccgtctggctgcagctgaagagacgtggccgtgagatgtttgaggtcacgggcctccacgacgtggaccaagggtggatgcgagctgtcaggaagcatgccaagggcctgcacatagtgcctcggctcctgtttgaggactggacttacgatgatttccggaacgtcttagacagtgaggatgagatagaggagctgagcaagaccgtggtccaggtggcaaagaaccagcatttcgatggcttcgtggtggaggtctggaaccagctgctaagccagaagcgcgtgggcctcatccacatgctcacccacttggccgaggctctgcaccaggcccggctgctggccctcctggtcatcccgcctgccatcacccccgggaccgaccagctgggcatgttcacgcacaaggagtttgagcagctggcccccgtgctggatggtttcagcctcatgacctacgactactctacagcgcatcagcctggccctaatgcacccctgtcctgggttcgagcctgcgtccaggtcctggacccgaagtccaagtggcgaagcaaaatcctcctggggctcaacttctatggtatggactacgcgacctccaaggatgcccgtgagcctgttgtcggggccaggtacatccagacactgaaggaccacaggccccggatggtgtgggacagccaggtctcagagcacttcttcgagtacaagaagagccgcagtgggaggcacgtcgtcttctacccaaccctgaagtccctgcaggtgcggctggagctggcccgggagctgggcgttggggtctctatctgggagctgggccagggcctggactacttctacgacctgctctaggtgggcattgcggcctccgcggtggacgtgttcttttctaagccatggagtgagtgagcaggtgtgaaatacaggcctccactccgtttgctgtgacgggtctgctgcagtcctcagtcgggggtcctgggcaccatgtgactccccatcctcccatgaggggtccctgccctggatgagtcctagctgggggacaccctgagagctcgagcccctcccacccgggcatccgctggctgcctcctgtcagctgggcaggcggggcccacagtacctgccccaccaggacagcctggctcaggcctttctgggctgcttctcacatcctgggctggatgtgggtttggaagctctggaaccatcccggactcgcccactcctggattcgagggccctcgcagggacagctctgcccagcatcaccccagggcctggcagtgatagagctgagagctccacccccacatacctgccacccacctggccagccacagcacgtgtgtcacctgcagagagccacccagacgtccccaccgagtccagcacggcaagggtgcaggggctgccctagaaatggactcagaggagcctggcccaccctcttgaaactggtcctggaccttggctcagctctgccgcctcaggacgggagctggggagggggtcctgggtcggacccaaggcacccacacttgagaaagcctccgcctggacgtcagggaggcctgcgagctgccacagtgcaggtgcagccgttcccaccgccctgctgctgcttgacacgggcataggagatacaagtggtgtgtgcggcggttcatgcctgtaatcccagtactttggaaagccgtggcgggaggaacgctgggcaacatggtgaaaccccgtctctaccccctaaaaatagaaaaattggcaagaaaaaaaacaaaaacaaaaactcgcgtcttttctgggcggaaagtttaggcgctgcatgttctgccttttaaggc

SEQ ID NO: 710204 - DNA, 315 bp, Homo sapiens
gtcacctttttcaccggaattggaacggtggattccaaatttatatgggaattccaaggaccccgacttgggcaagcattcctgaaaagggaattcaatccaaaaccccatgggatcctcctttcaacctgccagggaggctataataaggagaccattaataatgtgttggtaaaagtggagaaattagaaccctcatacactgctgatggaaatgtaaaatggaacagctgctttgaaacacagtctgccagtttctccaaaggttaacacagagtcactatataactcagcaattccattcccaggtcgacg

SEQ ID NO: 710205 - DNA, 1787 bp, Homo sapiens
tgcgcggcggcggcgcgcgggcgcctggggcgggacttccggcgcgctggagcgttttccggccgtgcgtttgtggccgtccggcctccctgacatgcagccctctggaccccgaggttggaccctactgtgacacacctaccatgcggacactcttcaacctcctctggcttgccctggcctgcagccctgttcacactaccctgtcaaagtcagatgccaaaaaagccgcctcaaagacgctgctggagaagagtcagttttcagataagccggtgcaagaccggggtttggtggtgacggacctcaaagctgagagtgtggttcttgagcatcgcagctactgctcggcaaaggcccgggacagacactttgctggggatgtactgggctatgtcactccatggaacagccatggctacgatgtcaccaaggtctttgggagcaagttcacacagatctcacccgtctggctgcagctgaagagacgtggccgtgagatgtttgaggtcacgggcctccacgacgtggaccaagggtggatgcgagctgtcaggaagcatgccaagggcctgcacatagtgcctcggctcctgtttgaggactggacttacgatgatttccggaacgtcttagacagtgaggatgagatagaggagctgagcaagaccgtggtccaggtggcaaagaaccagcatttcgatggcttcgtggtggaggtctggaaccagctgctaagccagaagcgcgtgggcctcatccacatgctcacccacttggccgaggctctgcaccaggcccggctgctggccctcctggtcatcccgcctgccatcacccccgggaccgaccagctgggcatgttcacgcacaaggagtttgagcagctggcccccgtgctggatggtttcagcctcatgacctacgactactctacagcgcatcagcctggccctaatgcacccctgtcctgggttcgagcctgcgtccaggtcctggacccgaagtccaagtggcgaagcaaaatcctcctggggctcaacttctatggtatggactacgcgacctccaaggatgcccgtgagcctgttgtcggggccaggtacatccagacactgaaggaccacaggccccggatggtgtgggacagccaggtctcagagcacttcttcgagtacaagaagagccgcagtgggaggcacgtcgtcttctacccaaccctgaagtccctgcaggtgcggctggagctggcccgggagctgggcgttggggtctctatctgggagctgggccagggcctggactacttctacgacctgctctaggtgggcattgcggcctccgcggtggacgtgttcttttctaagccatggagtgagtgagcaggtgtgaaatacaggcctccactccgtttgctgtgaaaaaaaaaaaaaacaaaccggagtcatcagcccttcaagcacagaacagacggggggcggcgcgcccttctagaggattattcccctccggtgggggggccccccaagtttttacggccgttccccccgaattttcggttggcatccgcagggggggcccccccctagtgaggtgctcttgcctcttttttagggcctggcgcgatcggtgcctgctgtggtttctcaacacccgtgctccgtgagctctgcgcaaccacctcgttgttccgctgtggggcatcgtgtggtggggaaggagggcacccctgctacctgagtgggcggggggtgcaccccatattggtggcgagccaactcatcctg

SEQ ID NO: 710206 - DNA, 839 bp, Homo sapiens
attgcctgtcttggtcacatgagtctgtctccggttacttatagctccctgggcaatcgttgctctaattgctttggtctgactcaagcaaggggccgaggccttaggttctgactattagaggtctcctgaccgcccaggcgaatggctgctcatagtagtcgtctaggccagaattaagataagctgttgcctgtgaactagtccatggaatcttttagtctaaaaggcaatgaggagttatcacgctcatcctcaaactccaacaagcatctatgcctatagcttgttgaccatttcgtccgtcttgccttcagaatggtgagaaacaagcgcaagagtaattataggagcgaaagaaagcgtgcgagaatgcctgctcaatattacgatcgagctaaggtcgctttctggcatattattacgaattcatgagcggaacaatatgtcttgggttttgagggtgttattagtaagtatccgggcacaagttggtgaatcgtttgtaccaaagatgcgacacgaaagacggtgaaacgaattagtaacggagagtaaagttgtgctttaatgttcgcaattcaatatttgcattgttaactgggctctaagcgtttttctttgggtccaaagcgcaatatttatttaacgccactgctagattccataagaaatttccaaagaccgtgaccgaaagttagcattgtagataaaaatataggttgttatgtacacacggggacagaaatgtaaaatcgaatatctatggaaagtgtgtaagaacataagaaataattacaggtatataataaaaatatattagacaaatcctgggcctt

SEQ ID NO: 710207 - DNA, 1704 bp, Homo sapiens
aagcaggctgtaccgggcggggggtaaggatgtctccgtccacaggtggggagggctaggcagcagggagtgctggtgtgtgtcctctcttcctgggcttccggcctctgaactagaatgtttcaaggcctaggagtgacaggacgtggtcagcaatagtggcccaggtcctgcccttgggtgacccaggccaaggtctcctagttagaacaggacagagtcacgaggctgccactgttgggaagggccctgcctgtgctgactctgcaaatgaggagtcgcccagagccgccgcgaccccacccaggagcactggccagcctggggaagacacaaacccagccccaaaggccccacagccaccaggcacctccaacaaccagccctctggaccccgaggttggaccctactgtgacacacctaccatgcggacactcttcaacctcctctggcttgccctggcctgcagccctgttcacactaccctgtcaaagtcagatgccaaaaaagccgcctcaaagacgctgctggagaagagtcagttttcagataagccggtgcaagaccggggtttggtggtgacggacctcaaagctgagagtgtggttcttgagcatcgcagctactgctcggcaaaggcccgggacagacactttgctggggatgtactgggctatgtcactccatggaacagccatggctacgatgtcaccaaggtctttgggagcaagttcacacagatctcacccgtctggctgcagctgaagagacgtggccgtgagatgtttgaggtcacgggcctccacgacgtggaccaagggtggatgcgagctgtcaggaagcatgccaagggcctgcacatagtgcctcggctcctgtttgaggactggacttacgatgatttccggaacgtcttagacagtgaggatgagatagaggagctgagcaagaccgtggtccaggtggcaaagaaccagcatttcgatggcttcgtggtggaggtctggaaccagctgctaagccagaagcgcgtgggcctcatccacatgctcacccacttggccgaggctctgcaccaggcccggctgctggccctcctggtcatcccgcctgccatcacccccgggaccgaccagctgggcatgttcacgcacaaggagtttgagcagctggcccccgtgctggatggtttcagcctcatgacctacgactactctacagcgcatcagcctggccctaatgcacccctgtcctgggttcgagcctgcgtccaggtcctggacccgaagtccaagtggcgaagcaaaatcctcctggggctcaacttctatggtatggactacgcgacctccaaggatgcccgtgagcctgttgtcggggccaggtacatccagacactgaaggaccacaggccccggatggtgtgggacagccaggtctcagagcacttcttcgagtacaagaagagccgcagtgggaggcacgtcgtcttctacccaaccctgaagtccctgcaggtgcggctggagctggcccgggagctgggcgttggggtctctatctgggagctgggccagggcctggactacttctacgacctgctctaggtgggcattgcggcctccgcggtggacgtgttcttttctaagccatggagtgagtgagcaggtgtgaaatacaggcctccactccgtttgctgtga

SEQ ID NO: 710208 - DNA, 1862 bp, Homo sapiens
aagcaggctgtaccgggcggggggtaaggatgtctccgtccacaggtggggagggctaggcagcagggagtgctggtgtgtgtcctctcttcctgggcttccggcctctgaactagaatgtttcaaggcctaggagtgacaggacgtggtcagcaatagtggcccaggtcctgcccttgggtgacccaggccaaggtctcctagttagaacaggacagagtcacgaggctgccactgttgggaagggccctgcctgtgctgactctgcaaatgaggagtcgcccagagccgccgcgaccccacccaggagcactggccagcctggggaagacacaaacccagccccaaaggccccacagccaccaggcacctccaacaaccaggtgcctcctcaccccaccggcctgcccctgccctactctgtcccccccatgcccacggcagacaggcagtgggcaagcaggagggcctcagggcaggtcagacctgggcctacagggcagagcctggacctccgccagggcaactccaacccaaccagccctctggaccccgaggttggaccctactgtgacacacctaccatgcggacactcttcaacctcctctggcttgccctggcctgcagccctgttcacactaccctgtcaaagtcagatgccaaaaaagccgcctcaaagacgctgctggagaagagtcagttttcagataagccggtgcaagaccggggtttggtggtgacggacctcaaagctgagagtgtggttcttgagcatcgcagctactgctcggcaaaggcccgggacagacactttgctggggatgtactgggctatgtcactccatggaacagccatggctacgatgtcaccaaggtctttgggagcaagttcacacagatctcacccgtctggctgcagctgaagagacgtggccgtgagatgtttgaggtcacgggcctccacgacgtggaccaagggtggatgcgagctgtcaggaagcatgccaagggcctgcacatagtgcctcggctcctgtttgaggactggacttacgatgatttccggaacgtcttagacagtgaggatgagatagaggagctgagcaagaccgtggtccaggtggcaaagaaccagcatttcgatggcttcgtggtggaggtctggaaccagctgctaagccagaagcgcgtgggcctcatccacatgctcacccacttggccgaggctctgcaccaggcccggctgctggccctcctggtcatcccgcctgccatcacccccgggaccgaccagctgggcatgttcacgcacaaggagtttgagcagctggcccccgtgctggatggtttcagcctcatgacctacgactactctacagcgcatcagcctggccctaatgcacccctgtcctgggttcgagcctgcgtccaggtcctggacccgaagtccaagtggcgaagcaaaatcctcctggggctcaacttctatggtatggactacgcgacctccaaggatgcccgtgagcctgttgtcggggccaggtacatccagacactgaaggaccacaggccccggatggtgtgggacagccaggtctcagagcacttcttcgagtacaagaagagccgcagtgggaggcacgtcgtcttctacccaaccctgaagtccctgcaggtgcggctggagctggcccgggagctgggcgttggggtctctatctgggagctgggccagggcctggactacttctacgacctgctctaggtgggcattgcggcctccgcggtggacgtgttcttttctaagccatggagtgagtgagcaggtgtgaaatacaggcctccactccgtttgctgtga

SEQ ID NO: 710209 - DNA, 1607 bp, Homo sapiens
tgcgcggcggcggcgcgcgggcgcctggggcgggacttccggcgcgctggagcgttttccggccgtgcgtttgtggccgtccggcctccctgacatgcagatttccacccagaagacagagaaggagccagtggtcatggaatgggctggggtcaaagactgggtgcctgggagctgaggcagccaccgtttcagcctggccagcctctcggaactgccgtggctgttcaagcactcactgcctttgcctgtggctccatgtactgggtgctgctgtgcttgccagccctctggaccccgaggttggaccctactgtgacacacctaccatgcggacactcttcaacctcctctggcttgccctggcctgcagccctgttcacactaccctgtcaaagtcagatgccaaaaaagccgcctcaaagacgctgctggagaagagtcagttttcagataagccggtgcaagaccggggtttggtggtgacggacctcaaagctgagagtgtggttcttgagcatcgcagctactgctcggcaaaggcccgggacagacactttgctggggatgtactgggctatgtcactccatggaacagccatggctacgatgtcaccaaggtctttgggagcaagttcacacagatctcacccgtctggctgcagctgaagagacgtggccgtgagatgtttgaggtcacgggcctccacgacgtggaccaagggtggatgcgagctgtcaggaagcatgccaagggcctgcacatagtgcctcggctcctgtttgaggactggacttacgatgatttccggaacgtcttagacagtgaggatgagatagaggagctgagcaagaccgtggtccaggtggcaaagaaccagcatttcgatggcttcgtggtggaggtctggaaccagctgctaagccagaagcgcgtgggcctcatccacatgctcacccacttggccgaggctctgcaccaggcccggctgctggccctcctggtcatcccgcctgccatcacccccgggaccgaccagctgggcatgttcacgcacaaggagtttgagcagctggcccccgtgctggatggtttcagcctcatgacctacgactactctacagcgcatcagcctggccctaatgcacccctgtcctgggttcgagcctgcgtccaggtcctggacccgaagtccaagtggcgaagcaaaatcctcctggggctcaacttctatggtatggactacgcgacctccaaggatgcccgtgagcctgttgtcggggccaggtacatccagacactgaaggaccacaggccccggatggtgtgggacagccaggtctcagagcacttcttcgagtacaagaagagccgcagtgggaggcacgtcgtcttctacccaaccctgaagtccctgcaggtgcggctggagctggcccgggagctgggcgttggggtctctatctgggagctgggccagggcctggactacttctacgacctgctctaggtgggcattgcggcctccgcggtggacgtgttcttttctaagccatggagtgagtgagcaggtgtgaaatacaggcctccactccgtttgctgtga

SEQ ID NO: 710210 - DNA, 1810 bp, Homo sapiens
tgcgcggcggcggcgcgcgggcgcctggggcgggacttccggcgcgctggagcgttttccggccgtgcgtttgtggccgtccggcctccctgacatgcagccctctggaccccgaggttggaccctactgtgacacacctaccatgcggacactcttcaacctcctctggcttgccctggcctgcagccctgttcacactaccctgtcaaagtcagatgccaaaaaagccgcctcaaagacgctgctggagaagagtcagttttcagataagccggtgcaagaccggggtttggtggtgacggacctcaaagctgagagtgtggttcttgagcatcgcagctactgctcggcaaaggcccgggacagacactttgctggggatgtactgggctatgtcactccatggaacagccatggctacgatgtcaccaaggtctttgggagcaagttcacacagatctcacccgtctggctgcagctgaagagacgtggccgtgagatgtttgaggtcacgggcctccacgacgtggaccaagggtggatgcgagctgtcaggaagcatgccaagggcctgcacatagtgcctcggctcctgtttgaggactggacttacgatgatttccggaacgtcttagacagtgaggatgagatagaggagctgagcaagaccgtggtccaggtggcaaagaaccagcatttcgatggcttcgtggtggaggtctggaaccagctgctaagccagaagcgcgtgggcctcatccacatgctcacccacttggccgaggctctgcaccaggcccggctgctggccctcctggtcatcccgcctgccatcacccccgggaccgaccagctgggcatgttcacgcacaaggagtttgagcagctggcccccgtgctggatggtttcagcctcatgacctacgactactctacagcgcatcagcctggccctaatgcacccctgtcctgggttcgagcctgcgtccaggtcctggacccgaagtccaagtggcgaagcaaaatcctcctggggctcaacttctatggtatggactacgcgacctccaaggatgcccgtgagcctgttgtcggggccaggtacatccagacactgaaggaccacaggccccggatggtgtgggacagccaggtctcagagcacttcttcgagtacaagaagagccgcagtgggaggcacgtcgtcttctacccaaccctgaagtccctgcaggtgcggctggagctggcccgggagctgggcgttggggtctctatctgggagctgggccagggcctggactacttctacgacctgctctagagagagccacccagacgtccccaccgagtccagcacggcaagggtgcaggggctgccctagaaatggactcagaggagcctggcccaccctcttgaaactggtcctggaccttggctcagctctgccgcctcaggacgggagctggggagggggtcctgggtcggacccaaggcacccacacttgagaaagcctccgcctggacgtcagggaggcctgcgagctgccacagtgcaggtgcagccgttcccaccgccctgctgctgcttgacacgggcataggagatacaagtggtgtgtgcggcggttcatgcctgtaatcccagtactttggaaagccgtggcgggaggaacgctgggcaacatggtgaaaccccgtctctaccccctaaaaatagaaaaattggcaagaaaaaaaacaaaaacaaaaactcgcgtcttttctgggcggaaagtttaggcgctgcatgttctgccttttaaggc

SEQ ID NO: 710211 - DNA, 128 bp, Homo sapiens
  misc_feature (28)..(28): n is a, c, g, or t
gacagcggctgaggaggggaagagagtnctaaatgataacagtctttatccgttaacgctgaataaatgccttttttaaaagtaaaaaaatacggtcgactgcgatctaccaatacttctcgcctgat

SEQ ID NO: 710212 - DNA, 120 bp, Homo sapiens
gccaaaatacgttctctgtgaccagacatgagaaggtcgcccaacagcccattggcaaccttctcatgtctggtcacagagggctgatttgtcctcagcacctctccgcccaaccaatat

SEQ ID NO: 710213 - DNA, 108 bp, Homo sapiens
  misc_feature (2)..(2): n is a, c, g, or t
tntaatgtttaacaacatttatagcatctttttaattagattagctttacaagcaacgttgagagctctttcataatgaaacatgcttttaaattagatgatttatag

SEQ ID NO: 710214 - DNA, 145 bp, Homo sapiens
tttgaagtaaaatttaaaaaggcctttaaaatttccaattagaggttaaatttaggcaaaggaattttgcccgggaaaaaaattcccttctccccttccttgggggcccttttgaaaaaggttattaaaaaattttttttaccca

SEQ ID NO: 710215 - DNA, 162 bp, Homo sapiens
gactggccgcacttctctccgactactagcatccatgctgcgtcaccctgcaccttgtgttgcgccttcagagtgcattattgagccttctctccgccagattgcccggacctcctactgcgacacgatgatctgccgcatgtactatgctcaccttcaacc

SEQ ID NO: 710216 - DNA, 346 bp, Homo sapiens
aatccatgtcaataacccacaaaggagccatcaaaatcaggaagttaatgtggatacagcattattataccagctaacctaggcttacttaaattttaccaatcgttacaacctctcttgtaagagaaaccccccagattacatgctgtgtccagtggtcagtttgttgtttgtttaagtctcctttaatctggagcagattctcagtttttcctgatatttttaaagaattgtttttggccaggcgctgtgctcatgcctgtaatcccagtgctttgggaggccaaggtaggagggtcacctgaggccaggagtttgagagcagcttgggcgacagagtgagacc

SEQ ID NO: 710217 - DNA, 471 bp, Homo sapiens
tgaagtgcactgagacttgtaatgcagcctgctctggcacacagtcctggcagcttgcagatgaagtgcccagctgtgcggctgtaaggctgagctcagaggtcagttgaactctcaggagctctcatgtgactactgcccttttcgatgtactatctgcaagagcgcatctgcttgccctctgtctgttactggggaaggctgctggcctcttccctgggcatcctgattgtgctaacttccttctgtactgtcaagataaggaacatgtcttgatttatcaagggtctctgtcaccgtcacttggatcttattaatgacatttatcaacatggtgggtgtatgatcttttaatctcatgacttgtaaaatacttttaaaaaatatcaaatgagtctttctttgctggaatatataggttattttattttaatgtaaaaattaaaatggaaccaaatgtatttagaaatg

SEQ ID NO: 710218 - DNA, 141 bp, Homo sapiens
agtgcggcgataaactgcctatcctggtgactcttactcaagagaaactgaagagtctgttcagcagtttctacaagaaatgcgggacctccgcttgcttcagttttttccaatatatggacacttagcagtggtgtttcg

SEQ ID NO: 710219 - DNA, 489 bp, Homo sapiens
atgatttaagtctgactgtgagcctgcccaacttttaccaagttagtgggatattcaatttcagccatcactgtggctccatatgctactactgggtcaagggaggggctttggagatcttacacagggataaacattttaaaaatctttcatagtctttttctttcttctccttgggtcttaactctccttaactccaaagatgctcacttcttttccacaatatgtaaacaaacctaggaagaaaaattctgtcctagactttcaaactccctggagccaacagagtaaaaagatttggcaggaacaaaatgcaaattagtacatcaataaatactcccaccacatttgaaatgttaaattgctaatgttaaccttccattcttactaaatgactcagaaatgttgaaacagcagtatttttctttagtcattatttccttggaattgtaacctagagtagagcagtaatctgtgctccatgcaaaa

SEQ ID NO: 710220 - DNA, 628 bp, Homo sapiens
  misc_feature (23)..(23): n is a, c, g, or t
  misc_feature (81)..(81): n is a, c, g, or t
  misc_feature (96)..(96): n is a, c, g, or t
  misc_feature (151)..(151): n is a, c, g, or t
  misc_feature (529)..(530): n is a, c, g, or t
ccctcaaagtcacttagtgccantcagcacaaaatcttaagaaaactctactactatgaaaggtaaactagcccgtatatnccaaatgggcagatntcccaattcattctgtttgctgttatttggttacagaattccaggcaattatatnttatggagagtaaatttaaatgcctgatataattgctaactcaacaaaaacattccttcctttcctgaaagactgctccttcacctgtggaaaagagaaagagataaattcaaatatcaagttttgagaatcagagaggaaccactaaaataatgcttcagacccacaaggttgaaatcaaatgctgttggcgccacccaaaagtaccaaagaagccacatacaaatgtgaaacatacacagaacccacttgtggtcagtacagcgattactactaaaaggagaaaaacctagaaaagatttttaaaattttaaacaaatttaactctatatagagattacgccgggtgcagtggctcacacctgtaatcctagagtnntcagaggtcaaggagggaggattgcttggggccaggagttcaagaccagaatgggtaacatagcaagaccctgtctctaccaaaaatttaaaaatcag

SEQ ID NO: 710221 - DNA, 137 bp, Homo sapiens
gttacctacatagtgcgcgcgccagggtagctgctgcactgctgctcttcggtcagcgtgccggagacgaagatgaaaggggtctgctggagtccgctcgcgtgccagtgcgagggccgcatcgccatcgaatccgg

SEQ ID NO: 710222 - DNA, 648 bp, Homo sapiens
ctaacaccaccagcgtgtaaggtgagtcttctttctgagtggagttctgtgataagacagatgactcacccagagggatgccagaggatgaccgtaggcagatgtctcagagagggagttctggctctatcagattgagtgtcccgtcccaccctcaggggtcaagcctggccattccaaagcagattgatgtccccaagcatgctatcaagttgtgacaattgctgttgccttcgcctgagataccccttcttggttacttgaacttttacttgaccttcaagccctacagttcctcctcctccaggaagccttgcgaacccaccctctgagctttttattggagcactgatgatcctgggtcaataatgcctgatacacatttgccttgcccatgagactgagtcccatggcagccaaggctatgtgtgattcattctgtgtgcccagttcccagaacccaggacacggcttggcacaaagaaagggaggccccagggaggccagcggattatgcctgtacagggatcatccagcccatcctcccatttctcattcctgactgagtctggaactattcctgggcatctcgcttcttggatactctggctgccgctagcagacgttgcacagagcctagttgggccc

SEQ ID NO: 710223 - DNA, 352 bp, Homo sapiens
gcacgaggaagtacaggagtacttcatagcatcatttatttatgtatttatttttgagacacggtcttgctatgttatccaggttggagtgccgtggcacaatcatggcttactgcagccttgaacactttgcctcaagtgatccttggacctcgacctccagaatagctgggactacaggtgtgagccaccacgccaggtaatttttgtagagatgaggtctatgttccccgggctggtctcgaactcctgagcttaagcaattctcctgccttgacctcccacagtgttggcattataggtatgagctatgatgcctggctgatagcattgtttaaaaggggggaaaaaa

SEQ ID NO: 710224 - DNA, 246 bp, Homo sapiens
  misc_feature (100)..(100): n is a, c, g, or t
  misc_feature (149)..(149): n is a, c, g, or t
  misc_feature (160)..(160): n is a, c, g, or t
  misc_feature (237)..(237): n is a, c, g, or t
tcagagtaaacctgaagtttctgaccaggacgagaagcaccgtggctgagtctgtgagccagcagattttgcgccagaaccggggccgcacggtagaccngcctgtacaaggaccaagaagaagaaggctgagggcaccgtgttcaccnaggaagacttncagaagttccagcaggaattacttcggcagctaggctccctgggagggcacggtgcaagaggcctttcaagcccttncagccttcc

SEQ ID NO: 710225 - DNA, 317 bp, Homo sapiens
gatcgaatccttaaaattagctttaatgcagatgggcatgcaagtctcccgtgggacttttgccctcagccaacagaaatatatgtggtgccaggagagactgccctggggtttttcagagctaagaatccttctgcccaacccgtaattgggatttttccaaccaatattgttccctttgaagctgggcagtttttccataaaatacaggcttcaaagctgcccagagtttacgttttaaaaagttggcccctttgatggggtagtgagctgatcctccccttttttttaaaataaaaaaaaaaaaatggcccgta

SEQ ID NO: 710226 - DNA, 379 bp, Homo sapiens
  misc_feature (188)..(188): n is a, c, g, or t
acagtgttctaaccttaatgtgaaggtagaatacaagagggggaatagcaagaggatataaaatcagaagttgttttaaaaaagaaaaagtaagggcagaggcttaaataagcaacaaggtaatataaaaaatgcagtcagcatatgccataggcccttgtaatcaagtgcccagaaacttatgggcnagtatatcagaaagctagaagtaagaaacttgatcggctacaggtacagcagtaaaagtgagctgagccaggcactcaggtgaagctgtgttcccaatacaaaaccagaaagagctttctcctacaggtcttcaaggagaaagcacaaagtgcccaccaccttcttgggccgcaggggtaaagagtgggtc

SEQ ID NO: 710227 - DNA, 177 bp, Homo sapiens
ttttttccccccccccccccccccagattttaaaaaagggttccccccaattttgggttcccgaaaaattttgggggggaaaccttttttaagggggttttggaaccccctaaaacggctttttttttcccccaggggcccccccccctggggttggttcccttaaatttttgggga

SEQ ID NO: 710228 - DNA, 107 bp, Homo sapiens
cacacgacacacgacacgcacgcaaacacgccagacgcgacagagcgcgcgcgggagcggagcagcggaagcgcagcagcgcacacgagagataagggcggccgagc

SEQ ID NO: 710229 - DNA, 604 bp, Homo sapiens
cgcggtggctcacgcctgtaattccagcactttgggaggcctaggtgggcggatcagctgaggtcgagagttcgaggccagtctgaccaacatggtgaaaccccatctctactaaaaatacagaaaattagctgggtctggtggtggatgcctgtaatcccagctactcgggaggctgaggcaggagaattgcttgaacccaggaggtggacggtgcagtgagctattactccagcctgggcaacaagagcgaaactctgtctcaaaaacaaacaagggggggggggaccatttacagagagtggtgattgacccaaattgtttgaacccaatttattgtcttgggggggggtgtccttagctgttgaattcctgaagggttcactacacggtgacactagctggcttaattgcagccagcgtcctgggcagcagaactttattcattccttacggtaaattctattggctgcttccaaaggtgatgattttcaagcagacattgtctatatggccggggctccaggatcgtgtggcccagcctcttatcagagcttggcctacctggcaaaagttgccttaccctttcaagttgggacacctc

SEQ ID NO: 710230 - DNA, 1385 bp, Homo sapiens
  misc_feature (268)..(268): n is a, c, g, or t
taaagggggggtctctctgatcgggggaaaggggaaaattcctagtttctacccactacgcgtatgacccaatttggggggatcccaagctaaaacaacgttgggggatttaaaactccgggattaattattttcctataaagcctcagtgagccatataaaggcctcacttgtgaccatgtgcaaaaatgtgcgggagaacccaggggtgtcgcacgtgcgcatgtgggaattacattcctcccgtgatcttctgagaagaaagacncctcttggtggaaatatttctttcacagaaagccatgtgagcccgaggatgtgtctcgctggagcaataacttctcctatacacagtctacaccccatagcacattatccttatatatatgtggaccgatgtgggtctctcccatataccgcgcatatataacacattccctcgcgagaatattctcccccgctctacagagagcgctctagagagaacagacagacacagacacacagacagagaacgaagagaaacacacaagacagacacacagagagacagacacaacaaaagacagacgagcggagagaacaccataatatgatgtgagcggggggcgcgcgcgagaacaacatgagagagaagagcaacagagaacagaaggaagcgacggagaccacgacgtgcggacgacacaacaacaagtactgaggtagtcgtcaccggcagtagagcagcccgccaaccagagtctgtcttgatggtaagaccacacaccagagtagtgagcagaaaacaaaacatcgaggccgcggggaggaagcccccaccacaacatacaaatagtagtggcggaggaggcgccagtaccagctcacatactatcatacatagctgcaagagaagaagaaagaaccgacaccggagggaagtatatacaaaacaacacgcggtgagataaaataaaaaagagacagacccgctccggccaggacgcaacagaaccaagcacagaaagcaaaaaagacaaaagacaaacacacgacggacgacaggaacagcacgctgagaacgacgccaacagacaggacgacagagaacacaagacgatacgaggacaagcacggacacgcgcagagaacgagaaaagacagacagacgacaagaacaagagcacaccggacgccataaagcacagaaccaagacaaaccaccaagacgacgcatccggagctagcagagcaggacagagaaccacagaccaaacaacctacaacgagcacgagacaactacggaggggcgcagaccgacatacagctcataatcacacaaccatacgaaagaacactactagaacgttagcagaacagcacaaagagcagagaaaagaga

SEQ ID NO: 710231 - DNA, 359 bp, Homo sapiens
aaacaaaaaaaacccgggggtctatgtcccgctattgggaaccgctgaggcagaagaatcactggaggagttcagggctcgggtattgctatgatcatacccctttcatagctatggacggcatcccagtcggggcaacatagaaagacctcatctctattggtaaaataatttagagggaaatccccatagtgtggttggtgtacggggtttggttcattaccaatatttggccggtggtcagaagtataagaagactggtaagggcgggtttatttcatttcattctcttttcagttagtgagacacgcatatcagggggattcctcatagagctcgaccctggcagggcaatgtgc

SEQ ID NO: 710232 - DNA, 1541 bp, Homo sapiens
ctaatatatattctagtatttttagtacgagatggggagttcacacatagtaagtctatagatggtctcgatctcttgacctacgtgatccgacccacctcggcccttccaaagctgctgggattataggccatgagaacaactgcgacctggccaaattcattctgatacttttaactatcttatttctatatcttaagagtgggaaccaaacaacactactagaccacacagagtctcacacaaaaaaacacacaccacacacatcacacaacaacagtaaacgaacacaaaacagtgggtgtgcggagcggctacggagcaaccgagcacgaccaagacagagtacactacacacacacaaaaaccgaacaaggagcgcgcagcgcggcgcaacccaccagcagtacagaagtaaaacagcacgcgggccaagccaaagacaggcgaaccgacacaatgcgcagacaccaccacccacgtggacgccaaccacggaacggcagccgcgcggaacgaagagaagaccaacccagccacgaaaaaaaaaaaacagataagagacagagagagtagaggacaaacacacaacacggaacagagccagacccgcgaacagcacacatgacacaccgcagacatcgctgacgaaaccacacaaggagggaaggcagagatacacgaaaccagcggagggcggaacaacaacaccgcgaccacgacgcgggggcatgagcacacaacataacgcaacgagggtagacgaagtagatagagacagtggcagcagacgccacgcgcggcaggaggggggaacaacacacacgcgccgaaagacccaaagaacgaacgcgacgagcgaaaccaacccaacagagccgggcatcccagaaggaaatacaagaccgagccgcgtcacaccgacaccagaaacagcacaagcgaagcaggggggaagcagagagatcacacgaacacacagcggccacacgcacgagacacacacaaagaacgaggatgcaaacaggctgacgagaccacggaccacacagcagcacgcaagcgagaacgcactgggcagaccaggaaatagacaaaacaccacctatcagcaaaaagataagatcaacaagaaaacataatatacacaaacagcacagtaccataaaaaactaacacactacatatcaacaaaaacacataaatcaacaatcaatcacaaaaccaccccactacctcattaatcctatatataacggacaacagacacaaacggctctcaagacacacacacaacgaacaagcagaggagtgcagcgaaagacgagccatatccgacctacgcacgaagctgacataacgcgtgaagctacgggcacaccaaatccgaacagccacgaccgaagaagaagcacagaccaggaacgtgacatacccccggcagaccgcacttcaacacagacactcaaaccaacagtacacaaaaacagaaaggagcccagaccacatagaagaagaacacaatacagaaagaacgaaca

SEQ ID NO: 710233 - DNA, 267 bp, Homo sapiens
acaaagactgggctgggcataggtggctcatatcctgtagtcccaccatatttagggaggcctgggcgggtggatcgcctgaggtcaggagttcagagagcagcctggccgatagtagagaaaacaccatctctgactaacaatacagggattggctgggcgtgatggcgggtgcctgtggtctcagctgctcgggagactgaagcgggagaattgctcgaacctgggaggcggaggtttgccgtgacgccaggatcgcgccagtgc

SEQ ID NO: 710234 - DNA, 265 bp, Homo sapiens
ccctttgcctcctgggttcaagtgattctcattgcctcagcctcctaagtagctgggattacaggtgttataggatcacattgacaaaagtaccatggagttttatgagtcagcatattttattgttcttattccttcaatagttattacagtaattttcctctttttttggcctttcatgaaaaaaaccttaaaatattgaagttctgccaaaccaaaaaaaagaccaaaggctaattcctcccaaaccggttaaaaggaagcc

SEQ ID NO: 710235 - DNA, 219 bp, Homo sapiens
gtagtgtatggaaaatcatagggaacatacaactaattagaatgaataaacaagttcagcaaggaatgctggatacaagatcaatacacaaaagtcagttgtacttccacatagttagcaatgatcagccccaaagtgaaatttggaaaacaattacatttgtgattgctttggtaaatgcaatttataatcttttaataatttataattgcatttata

SEQ ID NO: 710236 - DNA, 163 bp, Homo sapiens
tgttcagaccgatcttgctgcaacactttccggcatttctgataaaggcacggactcattctacaaaggcgcgaccgctgatgcgatcatcaaggcaagccaggacaagggcggcattctcgccaagcaggatttcgaacaatacaaagtacgcgaactggag

SEQ ID NO: 710237 - DNA, 182 bp, Homo sapiens
ttatagccatttcagggagttaaattatcctgctggatgaggaatccttgaagcaagaagtgacatgatcaggctaggcaggggggctcacgcctgtaatcccagcactttgggaggccgaggcgggcggatcacaaggtcaagagatcgagaccatcctggccgacatggtgaaaccccat

SEQ ID NO: 710238 - DNA, 342 bp, Homo sapiens
tatcaacaggacaggtatatacaccgtgaaaaatatgatcagagagatgactattagcggaactagccttgacctaggcagtgtaatgccccgagctcatagtaccactgggttcaacaattccatataaggaatagagtacccttgtattttcttctgcaacattcttacatttaagggtgcaaaaaggagccaaatctaagatttccggaaactttatgtgtttgttaactttgcgtaggttaaaaccagcctgctgaaatctctttaaatgaagagtaagaacaggaggagcaagagaaattagcatctgctttttggcattggtgtaaacatgcttcc

SEQ ID NO: 710239 - DNA, 120 bp, Homo sapiens
  misc_feature (91)..(91): n is a, c, g, or t
aaaaattacagtcacttggggcctcgctcattaattttcgtctttatgatgaggcatttatttgtggtccggcggcgatgatggatgaacnggaaaccgccttaaaagcactgggaatgc

SEQ ID NO: 710240 - DNA, 574 bp, Homo sapiens
tcatgactgcgggcccagtagtttgtttcaccccggtcaccccaaacacgtaaggtaatgtctaatgctatgcattctgatggctgcagcatgaccatgtggtaggaatgcttcatctctgttatactttgatggggctactgtggtttgtgccatccactgtctactgaattgttgttatgttgtacacgattgtacctgaagcagaaactgttagaacttcaaggagaaactgacaaatccattatgatagttggagattttaatacccacttctcaataattgaacaaatgagtagggagaaaatcagtaaggatatagtagaacactatagtgttgaagaacactattcatgaagttgaccccattgatagatacagggacttaaggcagcaggatgggtagcttacccagtgcacacagaacatttattaaggtatgccagaaaaaagcttaggaaaaaaaaggcaactcataaaatatgctctctgaccaagtgggcttcattaagaaattataataaaggtttctcggaaactgccaaatatcagataataaaggatacatttctga

SEQ ID NO: 710241 - DNA, 333 bp, Homo sapiens
  misc_feature (46)..(46): n is a, c, g, or t
  misc_feature (152)..(152): n is a, c, g, or t
  misc_feature (252)..(252): n is a, c, g, or t
aaaaaaaagaagaagaaggggacccccgggaaaaaggccaacaaanctaaccaggagacctgagaacagcggcaaagggctacaacattagaaaagaaaaaaccgaacaggagttctttgggaagttttaatgataacagcttcaacactantgagaacataccaaacctgtaatggtcactccgttcacgtccctcctcatggggccggcgggacggcccgggccgggcgatcggcgagcggagtgcacanacgggggcccaggacaggcccgggagttccgggacggggactgggcgccggaggggtgacgccgggaccgtgggacgggaa

SEQ ID NO: 710242 - DNA, 679 bp, Homo sapiens
aaagtataggcgatcagaaattgaaccctggcgcaatagatatagtaccgaagggaaggatgaaaaattataaccaagcataacatagcacggactaacccctataccttctgcataatgaatttaactagaaataactttgcaaggcagagcccaaagctaagacccctgaaacccagacgaagctaccttaagaaacagctcaaaagagcacacccgttcatattgtagcaaacatcagtgggggcccagcatcttaatcaggtagaggcgaaaaaaccttcacgctgagccgtgcgttgcatagctggtggtccaacgatagaatcttagtccaacctttccaatttgtgcccacagagccctctaaatccccttgtcacatttaacctggtaagtccacaagaggaacagctcttgggacactaggaacaaaaccttgtacgaagagacgtacacacacttaacacccatagtaggccctaaaagcaggccaccaaattacgaaagcgtcaagctcaaacccattacctaaaaaatcccaaacatataattgaactcttccacccaatttgaccaatctaacacctatagaagaactaatgtagtatcagtccctgagacatttctcctcgaataagctgcgacgatcacacatgactgaaattcaagccaatat

SEQ ID NO: 710243 - DNA, 387 bp, Homo sapiens
gtctgagcgcgctcggctttatttttattttctctacgggctgtccctgcagcagtggccggtgtccagctagcctacttttctgcccggatctcgggctcctcatgctctccggtactccgcagatctaaagccctcgggaatatgcagcagccatgccggtgtgcacacgctgtgagccccggagccccagcccggcccccgcccataccttggccagccagagcggaccaagggctccctgtggccatacctgtgctatacgcggagcgcacggcacgagtggttgagaagcccagggaaaacccgcagcgctgaagagaaggcagccagtgagagagccagaacaaagcgccaaaagatacagtatcaaagaggcccgtagac

SEQ ID NO: 710244 - DNA, 155 bp, Homo sapiens
ctaagttgcctgtgtgacttcagagtcatgttacttcttcctggagaatctttcttaggtgttgtatacttgaagatgctgggcatgaaagagcttcctaagttttgtgcagtgaactccttgatgttctggcagtaagtgttactctggcctgc

SEQ ID NO: 710245 - DNA, 436 bp, Homo sapiens
  misc_feature (25)..(25): n is a, c, g, or t
  misc_feature (50)..(50): n is a, c, g, or t
  misc_feature (168)..(168): n is a, c, g, or t
aattcacatccattttgtcctgtantttccacatcccacaggtatataanctacctttgggtccttgatgttggtgatcattcagattggggtttttgtgtggaacgtccttttttgttgatgttgatactattcctttctgtattgttagttttccttctaacagtnaggcccttctgcttacaggtctgctgaagtttgctggaggtccaatccagaccctgtttgcctgtgtatcaccagcagaggctgcagaacagcaaagactgctgcctcttccttcctctagaagctttgtcccagaggggcacctgccagatgccagctggagctctcctttatgaggtgtctgttgacccctgctgggagatgtctcccagtcatgaggcatggggatcagggacccacttgaggaggcagtctgtccttagcaggg

SEQ ID NO: 710246 - DNA, 790 bp, Homo sapiens
acagagctggcctggagtccgccggctggcctgctgtgagtatgtccctcgcctggctccctcgtgggcctccactgcagctgcagctgcccatagctctgaacagtccctgtgttcccagcccacctggaacccctggcagagtgcccaccaatggctctgtgttgccctttgatgtgaccttgttttggtgcatgtgctgctctgtgttgtggtgaactggtgaccaatggctgatgccttccattgcagactgtgtgcatgaacattttgctgtgatgcacatgctgtgctgtaatgctgtgtgtgccagcatttgacattcagtctaccattgtgccactgctgcaatgattgctgtggatgtattggttgtctgatgctgtggaccttggccttgtgtacaaccatgcttgctcaacatacttccccaaggatgtgtcttcctgtgcctcgcaaacatcaatccagctgcatcttctgtccagctaccctcgtgcatgcatggagttgtgggatttgctgtcctggagcagattggatgaaccaccggttgttgattgcccaagcaaatggacgactggatggttccttgcttgacttccagcatcttttgggactgcaaaatgcttacccccattgctcaatgttcgcgttgcgcccttgaatgcttgtgggttccctcgattcatgacccgtccaacccctttcccagtgcccccggggaacctgccccatgtgacccctgttggagcttggccattgttggccttgcggccattgagcctga

SEQ ID NO: 710247 - DNA, 937 bp, Homo sapiens
gctgatgtaattaccaaactcccctgggaggggggtgctctctgctccatcataccgatggggaacgggaggcccagggcagatccataacaagggcatgtggacaggtcactttgtggtctccatccagaatagcatcctgctgccaagtcagtgggcgtgtccccttcgctccaggcctgtcccatctatcacgggtaggggctcacctggccaggtgtactctgagcatggggctactgcatggcaggtgggcagggtagtctcccccagtctcttgatgccatattcccaatacacttagtctgttgcattgtagtcactaaggcatgctcgtcggggtggtcaggagagcgggtggtagaagcctgaaagatcagtccctggggacacgagcagagcttcgtcctcagtgaccagcagggctgagccaggcctcagaccggcttctggctctgggtgtgcagaagaagaactagaagcaaggtgctttcctccgggtcccagagctgtgagtgatggagccaggctgggatccagggttacctgagttacctgacccctggtcatttcatagtcagctctcagcacttaccagaggaacaggcagcctttggtactgccttcagagaacagagagatgagagaattcaaatgcgtgtgaggtgccctgtctagtacaagcaggcgcagggggaacgaaactgcgcactaagtgaggtgggagcggaaaactagggagagggccccggtgcagttggcttggaattacggccggttaaactcccccggcagatacatttcccccccatacaggattgggccggcacttcttgtgccccgtacatgttaggggagcaagagcaccacagggttcggcgaccccaggctcatgaggtcccgacaaggaacggacaggcggaacacgcgcagaata

SEQ ID NO: 710248 - DNA, 179 bp, Homo sapiens
aattcatagtaggggtaaaaggagggcatttctagatcaaataataagaatggtaatatgctactaagaaagacattttatgagagcaaagggacgcgggcggggagatatacgggccgaagccgcactcgtaagggggtggatttttctagtgtagcacgttgagttatagagacccg

SEQ ID NO: 710249 - DNA, 774 bp, Homo sapiens
gaggcatgaggcagcaggcagggttctgctgagggggcaggcggagtttgaggaaaccgagataagttttcctcttggaaagatagagattaatacaatacttaaaaaaatatagtcaataggttactaagatatggcttagcgtaagttttaacgtaattttaatagcttaagattttaagagaaaatatgacgacttagaagagtagcatgcggaaggacacagatacaagggtttctaaaacatgacggaggtttgagatgaagcttcttcagtggagtaaacacagtgtcattacacagaacactggcagagcaaggactacagagccccgaattaataccaatagaagggcaatgttttagattaaacgtgaaggtgacttaaacagcttaaagtttagtttcacaagtggtaggtgattacaatactctgaaggcgatcttttaaaaagagattacacgaaggtgattaaagaccttgaaatccatgacgcagggagaatgggtcattaaaagcctagtaaagcatttactaaaggcagacgaaaatggaagatcactgggagtggtaggatgacacaatttgagaagatagaagttgtgaggtggaaaactgcacagccgaagtcggcagggcagacacgatcgcgagatcggactagagctcccacctcttttgaaacacaacaaacaaaacaaaattttggggtcgcgcgaaatttaacacatgtgggggcgccagtggaataactggacaggccagaatcgttc

SEQ ID NO: 710250 - DNA, 606 bp, Homo sapiens
  misc_feature (89)..(89): n is a, c, g, or t
  misc_feature (116)..(116): n is a, c, g, or t
ttatccgtagacttgaccacatcgtgatgacggtgaagagcatcaaagacaccaccatgttttattccaagatcctgggcatggaggtnatgacttttaaggaagaccggaaagcnctgtgttttggagaccagaaatttaacctccacgaggtgggaaaggaatttgaacccaaagccgctcacccagttcctggctccctggacatatgtctgatcacagaggtgcctttggaggaaatgatccagcacctcaaggcttgtgatgtccctattgaggaggggccagtccccagaacaggggcaaaagggcctatcatgtccatctacttccgagaccccgacagaaatctgattgaggtgtccaactacatctcctcgtgatggaggctggacctcctccattctgtcccccttgatgtcgccctctcctttccttcctgcaaacccccacccaggcccagagatctccaaagactgaggacttaggcacttcacacatcctgctgaggggggacccaagacaggtttgggaccaaacctacatgtctgtatgtcatcaaagttggcctaataaatgcataacctctcaatgaaaaaaaaaaaa

SEQ ID NO: 710251 - DNA, 473 bp, Homo sapiens
  misc_feature (3)..(3): n is a, c, g, or t
canccagaaaagatgccccagaccacagccatgaggccccttgtgtgacgtctgcgcacaaacatgccttgcatgtccagctcaaccggcccaacacgaggtctgctggggctcagacagtttgaaggcctgacctgccgattctggaggcctgcctgccgggggaggcggggccgtgggactgggtgaaagtggaacgctgtgggaagatggacatgagggcagggtattcccgccccatttctaacccttcactcgttgcttcacagagagatggcagaccgcttcaacaagatttcgagagacgctgactgtccggcggcggagatctctcgggcaggaaagacgttacctgcctgtgccatacactagcttacaagctcattgaccggggcaactttcctgcggaacctataggagcagtgcttctgaattagggctttaagcagcctcctgacttacacaactttttt

SEQ ID NO: 710252 - DNA, 511 bp, Homo sapiens
  misc_feature (6)..(6): n is a, c, g, or t
ccttgnagggaagttaactgcaaaactgcctcaggcaggtccttcaggagatattccagaagaagacatcattatcataggagatgacagctccacgcacgaacaccagtgattcatagggttttcggtcaggcttctgagcccaagcctgcatgtatacatccagatggcctgagacaactgaaaagtacaaaagaagtgaaagagccagctcctttcttaactgatggacaaaccttacaacattccattatgatttgctcctgccctgtcccaaatgattgatcgatggacctcgtgacattcttcttctggaaaatgagtcttatgatctccccaccaagaaccttgcgacgccaacccctgcccgcaagagaaaaaccccctttaactgtaactttccactgcttatcccagtcccataaaagtgccgcatctctaactcccttcactgactcctttctcagactcagcccacttgcacccaaatgaataaacagctttgttgctc

SEQ ID NO: 710253 - DNA, 564 bp, Homo sapiens
  misc_feature (6)..(6): n is a, c, g, or t
ccttgnagggaagttaactgcaaaactgcctcaggcaggtccttcaggagatattccagaagaagacatcattatcataggagatgacagctccacgcacgaacaccagtgattcatagggttttcggtcaggcttctgagcccaagcctgcatgtatacatccagatggcctgagacaactgaaaagtacaaaagaagtgaaagagccagctcctttcttaactgatggacaaaccttacaacattccattatgatttgctcctgccctgtcccaaatgattgatcgatggacctcgtgacattcttcttctggaaaatgagtcttatgatctccccaccaagaaccttgcgacgccaacccctgcccgcaagagaaaaaccccctttaactgtaactttccactgcttatcccagtcccataaaagtgccgcatctctaactcccttcactgactcctttctcagactcagcccacttgcacccaaatgaataaacagctttgttgctcctaaaaaaaataacgacattatgtaaatcattggccttgttgaccttagagga

SEQ ID NO: 710254 - DNA, 378 bp, Homo sapiens
agacaactctgttaagaaacaatctaatgacctggttaagaaaaagggggcaaaagatttgaatagatatttctcaaaaggagacctacaaatggcaaacaggtataagaaaaggtgctcaatatcaccgatcatcagagaaaatcaaatcaaaactacaatgagatatcatctcaccacagtttatatgactatgtatgtaaaagacaggcaataacaaatgctagcagggatgcagagaaaagggaactcttgtaccctgctcctgggaatgcaaattagtaaaaccactaaggtaaacagtctggatgtttctcaataaactaaaagtttagctaccatatgatctagcaatcctactgctgggtctacaccaaa

SEQ ID NO: 710255 - DNA, 256 bp, Homo sapiens
  misc_feature (217)..(217): n is a, c, g, or t
tgtaatcacgtgtgtggaaaggaccaggggacatcgtggaattgtaggtgcagcgtgcccccatactattctcgtgataatgagtaagtctcatgagatctgatgtttattataaggagtatcactttcgctagtctctcattctctcttgtctgtttaccatataagacatgccttacggccggcgctgtggctcatgcctgtaatcatagcgctnttgttttttgtggaggacggatcacatggccactcaata

SEQ ID NO: 710256 - DNA, 913 bp, Homo sapiens
gacatgcccgctcttgtgacgcgttgacaatcgccggtagttgtttgaggccgacgttgtaagcctccccgggcgtccgtccggagggccacaaacaattgttgttgggcacacgcatgtccactttttcttggccgaaaagaagtgcgcactcgataatgcccccttcttgtgcctttctcgccgcgcgcagaatagatcttgccccctctcggtagggtcgcgcggggcaggacccaccggctcacccactgggttctcgccagcgccggggagagggttaccctccacagactcgccgctcggcggccacggcacgacactggggcattaccttctctggggataacccctccctcgcttgcgggaccgcatcacctcggagcttctcccccccgttagtagggaccccttttgtgtactactctcctgccgcaatctctggatatgtttgtggccccgccacactcccttgtgggcctcgtgccactccaaaggatagcctgtgtgcttgattatcaaccgcgcggcgcctgtcgattgaattacacaatacatcgttcgttgcgctcgtgaaacgggggcccgacacactacatggactgctcccttttcccatgctttctcaccagaaggccccagtgttcttcaaggcgcactctctcccctccccccgaattgtccagtcactgtcgcttcttctccttattccttctttctcccacggagagaagaagctccgctgtcccgcaaggaagcccattctggtaacggcactcctatcttcaaaaacacaaatttccaatgtttgtaaacaatcggcagtccgacaaacagaaggagaaaaaaacaggtaaaccccccccacgggctaaaaaaagaaaaaacggggatatttccgacccacaaaaca

SEQ ID NO: 710257 - DNA, 293 bp, Homo sapiens
cttttggggtctttgctcttttgggactgcagcatgctcatgttccaggacgccacgtagatgaggctctcggccaccgaaggctcgcgggaatacagcaggatgaccttggcgctctgcaccggcacggggctcatgctggaaatctcggccgccagcgctaaggcagcatccagcatgacctctttgtctgagaacacccggctgaccagcccactgcccagggccgtcgcagccatcatcttgcggacggtgaaggccagctcgttgaccaggctctggttcccgatgac

SEQ ID NO: 710258 - DNA, 161 bp, Homo sapiens
agtttaatcagctgcaatgaaaacaaacgtcttttattaggcagaatccagatgctcaaggcccttcataatatcccttaatttagtagtcgaacttagggaacaaaggaacctttaacagaaatagaacaacaagaaagcgaacttagcgatactcgcgg

SEQ ID NO: 710259 - DNA, 251 bp, Homo sapiens
gaaggaaactgcatcgtgtgaatcacagtcataatcaaggcagtattccagagaaggatagacttcttttcctgtaggaaccgagtccctccttggaacacagttgctcttgttgcgtctgttgaggaagactcagtattgcacagaggtaggaatctgtgtgggtagcagttcttatgggacgtggcccctggcagcatttcagatttagggcgggagtacagttgactactttgcttcgagtatcgagt

SEQ ID NO: 710260 - DNA, 336 bp, Homo sapiens
cgagggcatctgaactccgctatatgacgcagcatgatattttcagagtcttgtccccggcgtattagcacctctttttgaacaggaaatacgctaccgactggacatggtctcctctgattatcaagtactgacgctgagggcattacaaatagtaagcctcccacctcgtcccctgcctcaagaaattgcctccttatttatcaacatctttttcctccctttccctgagagctcacagtacaatgtttcagaagccccatttgcacaggttttcagcaactcagaatgctctacttctttttctttgagaaaggattaagatacactcctgct

SEQ ID NO: 710261 - DNA, 671 bp, Homo sapiens
tttgaagccactccaaacaagaacaaaaaagaagggggatgcctgaaagcctcctggccctctcaaggcaatcacttcccacatatgtaataatccgctgaaattggtgccaagtatcagaatccgccttgtttctatatctgtaacatgtggggatcctagtatctgcttgtgaaataccctgttatgaggccatccccatagcactaataacatttagtcatgtgtcctgaagtgtcaccgccagtgccagccttatctcatgttactaacgtttcagatcatacaacagagtagttgtagtgcattatcgggttctttctgtctaagtgtttacaatgcttacctctgtcatataggctttccgccggcaaatgttcagtgtggtaggtgtagagtcagtatatcgttcagcatgctcatgcactaacagtctagcttctcctcatgtcactgtagagttatttggtagcaatcctccagttcactgcagtgacggctcatctctccgtagcttctcataccgccgcccactacaagcatcgttcatcagtgaggttcagtcttcacatagtcagttcacactcgcagccacctctcattctaactctggtccagtcagagggcacaggttacagcgatgctgagcgatgtggcctggtcggcacaag

SEQ ID NO: 710262 - DNA, 478 bp, Homo sapiens
actcagaatcctactctcctgactcccacttcaccattttgagaatgactgactaaatcagtcagtcatttgttcgtcattccaagggtcttttccttcccttctccttactactttcctttcattcttccttccgttgatgcatttctaaataagttttcaaaatagatttgttatggaactaagaattactggacacctattatgtgccaggctttatgcaaattactgagtatataacagtagaatagacagacttggatactgtcctcacgtagcttagaatttaacagattgttgctttgagtgtagtttagatttccttttattttctgcttcccctggtatcatgctaaaccagtcctatagcattgtgtgtttagaatgttgttacttatatctctgatccagatgataatttggaaaatttccagagagggtatttttaatacggagtatttattatcaaaaaaaaaaa

SEQ ID NO: 710263 - DNA, 1012 bp, Homo sapiens
ggccggctccgaggctccgggcggtcagttagggccgccctggtggattcctcccgctgcgaggctgggaccctatcaagcttcacagatcagtgatgcggcctggatccgaaggtctctcggtgcaggaaagtggagacgcttaggccgactccagaggtggtctcaggtcaccagggtggtcccgagctgagtcgggagccgtctggctgcagtctgtgcaagccacagtcctttgtactagaggcagtaggttaccacacacgcatgcgccagtgacctcgggagtacgtgccgcacccaggctctacgggattcccgtgcgcgctggccaatctactctcgcgagataccagtatcgatcgctagggcgatagatctctagtaccagtctcatgacgagccccccgctctgtgagaacggaaccggtcgatctgtccgtcccaaaggcctactggccgcgagaatgctctaggccagttgggtgcaagtgcccaagtgcttacattgcacatgggggagcaatgccaagttggcacgattcccatacattcgttgtaccacaggaagggcatggaacgtgtgcatggtccacgttatgagccacaccagccaggtctgcgagcgtagagggtcctacttcgaaggtggcgcccccattgggagtgagataacaccattttcacccggtaacgccacctttgtgatcaacccgttattccagcctacatacggagaaatgaccacccccgtttacagaatttccggcaccagttgagagggtttcgcaaagggacaacgcacaactgttcattagtacaaattcacgtaactagacagagaagcacaattatactcgagagagcttccaaagtaatacgacgattggtagaaccaaacggagatatcggtccacacccgcgcagaaaggctctccacagatacccaagtaacacccttctagacagcgccagacgagggtatttcccagcgctggatgcccagaataag

SEQ ID NO: 710264 - DNA, 224 bp, Homo sapiens
  misc_feature (22)..(22): n is a, c, g, or t
  misc_feature (51)..(51): n is a, c, g, or t
  misc_feature (178)..(178): n is a, c, g, or t
  misc_feature (189)..(189): n is a, c, g, or t
aaattccttttaccatctttgntggtattatgactccctaaccctcaattnaaaattgtaaatcagaccaggggcagtggctcaggcctgtaatgccagcattttggcaagctgaggcaagaggattgcttgaggccaggagttcaacaccaccctgcaacatagcaaggccctgtcncattaaaactnaaatttaaaatagtaaatcagtttggcccaggatc

SEQ ID NO: 710265 - DNA, 1093 bp, Homo sapiens
  misc_feature (190)..(190): n is a, c, g, or t
  misc_feature (1092)..(1093): n is a, c, g, or t
taatttagaaaattaaaaataataacttataaattggatctcattatcacaagggtaccttggaaaagcagcttatgttactctatggaagataatcaggtaaacatgttaccaaatgatcattaataatttaaggtccttcaagttcaagggcagggtaaatcgtggtgtatactacttataacctagntagagaatggattattcaagttatcagcaatattagtccttaaaagtgttatcgttgggtgtaggtgcaaaatatatatggtgtatatttgtacacaaacttaaactacgtggacaacaaaagagcaagggtaatcatcacaaactaagattttctgggtgaacaccacaaatccgagttcattcgggagggtcatccgagttccagtagtcttctgggaggaaaacaccattttcctcagttcagttttcttctccttcttggatagtataaatacaccaaccacggggcaataaaggggcatatgagggcaaaggttagcacaccaggagacatctcgaagggccaccaagagggtctcgtggaggggggctgaggagcagtctgcaatgttgatgtcgagatttggcctgcaaagccatcagcgttccagtttctgcagtctctgaaggacattctggatgtcctacctggaagctcatcagcacgagggcgaacgggcactgaagggatgccgggaccctcggtcggaggcccaggggtcccaaaactcccattccacacggcggcgccggagcccggccaaggatggggaccaggggacacacccctgtaaaatgaaagaacagcgagtatcagccaccgcatgcacgcgaggggggacgcgccgaggtaaacgcagcacactgcacgaagggaacaccttcgttaagggggaccgggcagatacacgatggagcgggggaggagcttatcagaacaaacaagggcggcgggaggcacgcacaacctgatggggagaacagacaaagcagcgacacaacaatcaactgatgaaaagcacacgaagtgatagagactcacgggacaaaaagtacaaacaaacgtccactccacacgann

SEQ ID NO: 710266 - DNA, 1734 bp, Homo sapiens
  misc_feature (471)..(471): n is a, c, g, or t
  misc_feature (537)..(537): n is a, c, g, or t
gcagtgcaggatgtgagcgagaagacacaggagcctgattgcatgctccggaatctatcgcaagtggattagactccgaagaacataccactagtcttccattacactcgacagcgagtctgtggtacgatgagaggcatcaacgaatgtcggttgccatcatcgtggtatgtcgcagcaggaattcaggaaaattggccagtgaacaggcaggactcgggaaacatccacactgtgcggcgatcttgtatcaccctagcgcaccatattacaagatgccttgctcattgatgcgcacatatatgtggacattacacgtgatactcgttcgcacaatgacacagcatatcacgtgttggtcgcaaggacgtatgctccatatcgacacataacgttacactaggaagtattggatcgatgtacgtcacaggtagatagacagcttattaataccgtcttcgcgattagccnatacattgttatcacagtgattatgcaaacatgtatctacaaagaatcgatatcagagagacacgntcaaagatggctgcgccttggagagataacactatatttccgcttgggactcggatcaatcagtcagacaattgcaacagggttataacgtaaagagaatatggacccttctcctaaatatatatcatatgtacagaaaccaaaaaggacacagatgaacaccataatgattgaggagaagagtgcgtgagtgcgctggttttccggaaaaagttaagcagttttctctcgcacccagggtgtgtgcccctcaccgagtgtataaacgtcgaatttgccacaacaagctaaatatttatcggtgtcgacacacggggacaggtgttgtaccttttttatggccagagagaagaacgggacttggtccccaatttccttaaatgtgcccgcaaaggcgaacatcagagttcgggcccccgggttaattaggaaataggcccgataatatcaaaaccgggtgcgggtgtacactacggttcttgggttaaagagcgccccaagagggtataccttgggttcttggggaaacaaggagtatctaacattggacatgggggacagaactgaagtaagccggttaacaacttggaaggcccccctcactttcccaaaccaagttgtcccggaacacactgactaggtcggttggtgacattaagcgccaagaaatttctgaaaattacgcttccccggaggtgtggtggttccaattccgttgttgcacaggcaccacacgcatcccagcgggttttaaaccccagcgaacgtgatttggtcggcaattcgccaactgacttcccctgccgcaacggaaccataatagtcgctttggaggcagagcactatatgtttttgcacccggccgagatgatctcgcaacagcaaaagcagccaacagagcggatgagctcacaaaaaccacaattttgggttccctttccaccagcacccactacatgttgcgcgcaggcaacggagggtgattcaaaggttgataatattcaccaggtacgaccagacacatacgatcatacaacacaacaggggctcacccacgtagtgtgccactatacatcccacggggagctaacaacagacgtttggcacgcgtgtccagcgccaacctaacagtaacacgacgcgcaccggcagaagctgaaaattgtgagattgaaggagagacacaaccacgaaagc

SEQ ID NO: 710267 - DNA, 620 bp, Homo sapiens
gctgctgctgggagcgcggaggggaagggagcccccaggcctgctgggccggcccaggcccctccgcggctcccccttccactaaccgactgcccggaaaccactccccagtggttgttgaacaccccgggactccccaagaccagcctctgtgtgcagcagcacccgaggcgggactaagtctccaaggatgcccttggtggatttcttcatgcgagacctgacgtcataagccttggctggtgggcatggtgggaccagttcacacaggatgttgaaccgtgagctcacaacaactgtcagaaatgagcaggtccggaaaccaggtctcagcgtacatttccaacaaaattcctggaccacacagaatgaagtggagatccacatcaccccaccgaatgacaggcacgagaaaataacacaaggcaatgcgcccgaagacccaaagaacacatcccagaaggccaacaacccaggccccacgatggataaccgacactcgaacaacgcgcgcaatggccgccaacatcagacaagagggacggacaaaacacgaaggagagcacagagacacagccgacacacaaaaccaggaaacccaccaacaccaagagaggaca

SEQ ID NO: 710268 - DNA, 143 bp, Homo sapiens
cattacttatacttcctcagcgctcatacatatctcaaagctaatactacctcaacgctttatacttcctcaacgctttatacttatctcaacgctttatactatctcatatcatatcccggtatgaagtataaagcgttgag

SEQ ID NO: 710269 - DNA, 390 bp, Homo sapiens
gagtgtcggaggaattcttttttattaggtgagcattatttataaactttgctatgaaaaagacattaaaatatgagatgtatgatgaaaatctaagtgaagagacttttatggttaacttataatattactctgaatgcctaacgcacacattgcttaatattataagttaaccattcagagtaatattctgcattatgagaaaacttaatttcatttataagtagattaaaattagtatattttactaatacttttatatagaatgcagtatatttttttaaatttcagattatatgtgatgttaatatattcaacctttttaacatgttaaatactattgtgcattcaatgaagtgttattatgccacagacattaacctattccac

SEQ ID NO: 710270 - DNA, 478 bp, Homo sapiens
  misc_feature (20)..(20): n is a, c, g, or t
  misc_feature (107)..(107): n is a, c, g, or t
taaaccagctccttcatganaagagggaaggcattaaggcaggtggcctagcacccacaggcagggagggacagtaaagaacgtggcattaggctacaatggggatntgggcaaagccccaacacacttcccagcaggtactcaccccaggagcttgctgtggtcgagctggtggctggggggcattcgacaggcactaaacacaatgatcttccgcccatacttgtcatctcctaggtgtggagaaagatggagcacagtgggttgaaggggaaccaaaagaagtggggtgaggaacttaaaggggccaggcctgctgatttgagccagttaccacaggggccagagtgcccatgcagacagacctccgggcagcctcctgcatgcaagggtgtgccactgaagacagggacagcttgctttcagggctactgagctggggtattaaaaaaaaagtgatttttttttctttgaaaaa

SEQ ID NO: 710271 - DNA, 1312 bp, Homo sapiens
ttaccggccccggacgttttcgggatatcggaaaactggcagacaaaccagacatgggggaatatcgccatgcttcggataaggccatgcgtgaacgaaaatggagacgcaggagaagaacaccctggccgaccatacgagaccattgagcaggagaatgcggtgtgaaatttcctaagatcctggaggatttccgtaggcacccgtcctcattcgagcaccccagtcgtgatgctggaggcagagctcacctgcaagtatggacacgagccacaagctgcactgtgaacctgggtcactccgcgccgatgccaccggactgtgggtctctgaagggacccgcacacccacaatcggactgccaaattctccggtattggccacgggatatgatagaaaattataagtaatgaccctcacctgcataagatcaacagcaagacccctcagctggacccacccaccgacacacttgccaccacgacagatagccgacacgagacccctggaaagaaaaaattgcctcaatcagaaacacggcgacgccacaccccccaccgtatacccacagttacaagagtaaagaaccaaagtaacctgcaacccagatcacccaagtaggaaacagcaaagataaacacaaaaaaataaaatcaaatacagtgaaagagcacctacaacccctcgccatacgcaaacacctcaccgagcccaactcacggaaacactgtaacattacccctgctcagcctctactattataaacagacccaagtcactcgtcacaaccacaatcataatagaaacacatacgtaaccaaacaatagaaaaaagaaaaacgatatacacaacacggcgaaataaaaaaacactaaacacgacacacgaaatacacaaacaccccttcacaaatctaacccaacttgtgacgaccatattcatgggcgtgtgaagacagagaagaaagagagtgatagaacgagcatgcgtattaggttgtcgatgacctatatggcagagtgaaaccaggtaccactgggtcatcgggaagagaacataaatgaaaacagcaacaaagttaacaaacgtaactatcgagaccgggtcctaagcccaccgaagggagcgggaaggaaacagaaagagaaatgcaacctgagacatccgaggcagcatggggacatcggagggggccaagagagtgagcgagacagggaagacacgagggaagcgcagggagaagaggaagaaggagcaaagagagaagaaggtggaacaagccacacccgaatacagtgcaaagcaggagag

SEQ ID NO: 710272 - DNA, 1144 bp, Homo sapiens
  misc_feature (493)..(493): n is a, c, g, or t
  misc_feature (818)..(818): n is a, c, g, or t
gtggtctcgatctcctgacctcgtgatccgcccgcatccgcctcccaaagtgttgggattacaagcttgagccaccgcgcctggcactagcctgttttttgataacaagactggcggtgcacaaagttgggtctctgtgttcaccgggaggtgggcattggccaggtgggacggtctccagcgcctggtgcaaatctccaccaaagtgcaggaaacagcatcaactattactgcaaagttttggtttggcgcagcgggtagacgttccagcgctgaaatgcgcaagaaagtttttgctgcgcatgtaggcgggtcaggcccaagcgcttcttattggctaatgtggagcgaacctgcacatccattgactgaaagctccgtctatttgaggctaaccgagagcgtcccttccttttgtgttgcctggaaacagactgtccgcctactaacatctgatcgcgtttcccattggtcggcgtttccggaagcccgnccttccgtttccggaagcccggcacaggctgggtctgcagatggcgtccgagtgcacagtggccagtgtgattccgcagtcttgggctgttcggccaagcgcccaccggacgtgggacgctggagggtcagcagcgtggagtcctggccttcagcgtccgcggctgggaaatcggccatcgccacggcgggaactaggactggctgcgtcccggcccttccccatccgtccaccggactcgtgggcgcccgcactgactgtgatgtagtttcctgacctctgacacgtattgtctcaagattaaaggaatcaggagcttcttttnctgtacttctgttttggatgcattggaaggtccagatttggaacaagtctctctagagattgaacagagctgcgcctggaacccgccgcagtgaggagacctgaagaccagaggaaacacagtcaagcgtacgtggcattcagggatgtggctgtgtacttcagccaggaggagtggaggttgtagagccctgctcaaaggaccctgcacagggaggtgatgctggagaattataaacatctggtctcactggaaattcatcttctaaaacaaaactcattgctcagctggagccgaggggaagcgccctggagatgaggagagac

SEQ ID NO: 710273 - DNA, 137 bp, Homo sapiens
gagcttgactcatagatctggcacggatgaatgagacatgcgaggtgtatagagtggtataaacggtagtgagttttaaagggtttacgacctcgatgttggatcaggacatcccggtggtatcagggtgtatcagt

SEQ ID NO: 710274 - DNA, 1298 bp, Homo sapiens
  misc_feature (161)..(161): n is a, c, g, or t
  misc_feature (311)..(311): n is a, c, g, or t
  misc_feature (502)..(502): n is a, c, g, or t
gtgctttcctctgtgcttttgtttttttttgttctttgttgtgtttggttatttctgttgtttgttgtgttgttcgttgtttctttttgttgatgttttttgttgtctatgttgtgtttttgttctgtctgtctgttattgttttgttcgtgtttatattntggcgacgaccgaaccgacgcagagcacgcgctgcagacgccgacggcgggaagcagagaggcggggacgacagccagacagaggaaggagatgcacgctctggtttatgttcgctcgtacgtcgacacagcgtctctctcgattctctntctgtggagagctccacatcatttctgtcgctcgtggctttattcactcacatgtgtgaggccgccatattggctccctcctccagtgtatggcgacgcacccgtccagtctggggggttgtcgttcccccgacggcgccggcgggtccccccacaccccgatacctccggcgccacctaactatcgcgancgtgtgctcccctgctacgcttggggggacgccctctttttggtcttgtgggtgtgcaccacacacccggattcgttgggcgcccactcccgacaactgtggcgaccccaccacgaggtcgggtttttcaaaatccggccaacccccacacaaggtacaactttttcttgggccccccttcagcccccaaggcccttctccccaattgtgcccacccggggacctcgatctcccatgagaccccctggggcctggcgtcttttcgtgccaccccttggaccaagaccaaacccagtctgggaccgccagattaccaagccagccaggcccctgctgccccaatcttcccatcttgtccaacaggggcctagaggtccccaggaagtggcccacaagcgtagaccagatcccccgttctcctgaccatccaccagccagcctctccaaccaccaggcgtcccagacctaggcgtcactggaacgagatgggaaggcaccacgggagaaagggataaaccctacaccccgaccccacggctggacactgctgactgtcctctcccctccagcctttggccttggcttttttatgcctatttaacctgcacggctgaagccacactcttttcccctttcccacgcactcacactcccccagagaagagacccatagttttcccccccaataatacctttctgccgacccctaggttcccttctgctccaccccagacttggtatccagcttttcagggccctggttcaccttagaaattaaaggttagttaacttagga

SEQ ID NO: 710275 - DNA, 498 bp, Homo sapiens
  misc_feature (2)..(2): n is a, c, g, or t
  misc_feature (157)..(157): n is a, c, g, or t
  misc_feature (159)..(159): n is a, c, g, or t
  misc_feature (195)..(195): n is a, c, g, or t
  misc_feature (206)..(206): n is a, c, g, or t
  misc_feature (234)..(234): n is a, c, g, or t
  misc_feature (242)..(242): n is a, c, g, or t
  misc_feature (252)..(252): n is a, c, g, or t
  misc_feature (266)..(266): n is a, c, g, or t
  misc_feature (298)..(298): n is a, c, g, or t
  misc_feature (306)..(306): n is a, c, g, or t
  misc_feature (315)..(316): n is a, c, g, or t
  misc_feature (323)..(324): n is a, c, g, or t
  misc_feature (326)..(326): n is a, c, g, or t
  misc_feature (359)..(360): n is a, c, g, or t
  misc_feature (362)..(362): n is a, c, g, or t
  misc_feature (376)..(377): n is a, c, g, or t
  misc_feature (379)..(379): n is a, c, g, or t
  misc_feature (381)..(381): n is a, c, g, or t
  misc_feature (392)..(392): n is a, c, g, or t
  misc_feature (407)..(408): n is a, c, g, or t
  misc_feature (429)..(429): n is a, c, g, or t
  misc_feature (493)..(493): n is a, c, g, or t
anaaatattttgtacaaaaatacaaagttttaaaagctctttaagtatatttcatattattactaatagttggcctatatatctgtatgtctgcatatttttcctacacttgggattttagaaatgtatggaactgtttacacagtatatgcttaantncttcccataactcaacgaccaatgataacctttttntgattggagtnttccatactttggaagacataatttgtntaatcgcncggttactgncgggggggaatctntgtgattcagtccatgtgcccaatgaaaatcngcttttcnccctggggnncattttnntncccaagtctttgggtaatggcgggtggcaaaanncnctagctgtcaattnncncnccgtgtttggntttccgtgcttttcnnttttcattctggtgggagggngttgcaattgggagggggtgtcctttgcctttgggagctgaaattttgctcatgtgatcccatnacagt

SEQ ID NO: 710276 - DNA, 595 bp, Homo sapiens
  misc_feature (371)..(371): n is a, c, g, or t
gtgcccattccccggcctttgatgcaaggggatacaatatcgggcccagagccccactctgggacacacacggagaaacaaacatagctggttgttatcgcccacacgggagtattgtactgcccggtttgagttgaaatgcccagtttttggacccccccctctaagagtctcacatctgtgtgtactcatcagatttcattgtattcccatttacctctccgcatcttttacttcgaaacacacgtaagtatgttaattagtaattcctctcccgagtaatacactccacacctcgtagtatcacattgtgtaaaactccccttattataaatatggaaagacatttttgcacctctcgcgcccatttnacagaaaattatgaggaaaaagcccctttcggtgcttctcactaaggcgtggtgtagcatagatactcctcgcgcccccttatcactatttaattcacaactcctactgattttatttctcattatatcgtcagatcgcaccgactagaagaagatattaagtaaagctttcgcttacatataaaacaaattctttttttgagccgaccacaaatagcacgaac

SEQ ID NO: 710277 - DNA, 838 bp, Homo sapiens
  misc_feature (714)..(714): n is a, c, g, or t
agcggagtgagcgggccgacatgatgcagctcaatgtaccgcttagccacgtctacttcgagaaggttctgcttcctgtaacaggcgaaaccaaggcgctggctgctgagctgaaccagctgcgggccatggtagcccactcaatctggcatgtacgtctaccagcgctagagctgcgagagctgcgtgctgcggctcagatcaagctcgaccgccaacgagcgcccgggctggaggtttgatagggactatctggcgacaggacctggtccactgtgagtgcagaacgctccaggatagatcccgaccttgaggctgcgtagcctatgaactatcctgtgctgcctattatacagtgatacgcagatgacatgccatccactggccctgtctgtagtcttggcgaggatagattgatgtcgctgtgaggacggagatccgagttccttgatgtgaagatctcaggaacggcaggaggttccgggaaactctcagcgagcaggttggccctcgaggtgtctgtgtcccatgtggccgccttgacgttgggccatatgccatgatgctcgtcgcgcagactcctgaaaatcacggatccgtcactgctagttatcgagtgcgacattggcggtaccatcgaatcagttgcatgcacagctcgaagatgttgcgtaccggttcgcaaggttaggcgagaccatgactgacggctgnctgcccagcaacgcggagcatgttcccgccaggccaagcactaagccgacgactacgcggcgccagttgctggtccttgacctgtgacctggcagtctctgtcgcggacacgaaccgagtccct

SEQ ID NO: 710278 - DNA, 255 bp, Homo sapiens
  misc_feature (23)..(23): n is a, c, g, or t
  misc_feature (75)..(75): n is a, c, g, or t
  misc_feature (118)..(118): n is a, c, g, or t
  misc_feature (165)..(165): n is a, c, g, or t
aacagagtaaacagcctacagantgggagaaaacatctgcaaactgtgcatctgacaaaggtttaataaccagantctataaggaacttagtaagcaaaaaagaaccccattaaaaantgggcaaaggacatgaacacttttcaaaagaaacataagaaaaaaantgcttaatatccctaattaggggaatgcaaatcaaaaccacaatgggataccattttacaccagtcagaaagggctattattaaaaaggt

SEQ ID NO: 710279 - DNA, 85 bp, Homo sapiens
ccccgggggggggggggggggggggggttgggcccccccctttttccggggccctttttaaattttggggcggtttttcccccca

SEQ ID NO: 710280 - DNA, 373 bp, Homo sapiens
tgcggacggtggacaggcggtgtggacggtggacactgtgatgcggacggtggacaggcggtgtggatggtggacaggcggtgtggacggtggacaggctgggtggatggtggacactgcgatgaggacggtggacactgcgatgaggacagtggacaggtggtgtggacggtggacactgcagtgtgaatggtggacaggtggtgtggacagtggacactgcagtgtggatggtggacaggtggtgtggacggtggacaggcagtgtggacggtggacactgtgatgcggacggtggacaggcagtgtggatggtggacaggcggtgtggacggtgttgatccgcccgcgaatttagtagtagtagtcgacc

SEQ ID NO: 710281 - DNA, 231 bp, Homo sapiens
gaaaacagctagtcagcagcacaacggagtccctgtcagcagctttgcctgagaagccaggtgacagcgaggtctcagcatcagcagcctcacttctagaggagcaacacgcagcccagcttccccaggctcctccgcaaacttctgactctgataaaaaagaacctgttcttgcccagcccgcagtcagcaactctggcactgcagcatctagtactactgaggtgtaag

SEQ ID NO: 710282 - DNA, 748 bp, Homo sapiens
ccgaggccgggagctcgcggaggcaaggccgaggataaggagtcgatgcccgtcaccaatgtggccgcttggtcaaggacatgaagatcatgtccctggaggagatctatctcttctccctgcctataaggaatcagagatcatgatttcttctgggggcctctctcaggggatgaggttcgaagattatgccagtgcagaagaagacccgtgccgcccagcgcaccaggttcaacggcatgtggtgcctatcggggacttacaaatggccacgttggtctgggtgtaaaggtgctccaaggaggtggccaccggcaaatccgtgggggggccatcaatccgtggcacaaagctctccattcgtccccgtgcgcaagaggtaatgggggggacccaaggatgggaaaggcccaaaattgtccccttgcaaggtgaaggccgtgggttctgtgatggtacggctcattcactgaccacagggcaatggatcgtctcgaacgtggtgcataagaaaagtggtaatgaatggtgtatgatgatgtaaacttcagcggggttggattgcaaccttgggaattccgcagggacactttgattgcaattttaagactaaagtacgtgacccgacttgagggagatgtatcacaaggtctcctataggagtcatgacacttgtaagaccaaacagagttcgtggagggatcaggtcaggtgggtacacataggttttacagaaaaaagtggtggc

SEQ ID NO: 710283 - DNA, 739 bp, Homo sapiens
agtggtggttcgtgcctataaacccagcaccttggcaggccgaagcaggaggattgcctgagctcaggagtttgagaccaccctgggcaacagagtgagaacctgtctacaaaaaatacaaaaattagctgggtgtggctgagtgcgcctgtagtcctagctactggggaggctgaggtggaaggatcacttgagcccaggaggcggaggttgcagtgagccaagatgacaccattgcactccacccttggcaaatgaacgataccctgtctcaaaaaaaaacaaaaaaacgtgttggaacggtaacaatggctttttgccttcctcttagggaaacctagtataagtcctgtgggcaataatacttgcgggggtgctggtaaaggggtcataattggggaagacggctactaaaccaattcaccaaaaaaccatcccacgaaaggaacacaccgcgttgattgagaacacttctgggcagattttgaaacggggcccaacgacgcggtgagtggggttaactctccagtaatctggggggacctaatagaggaaattaaggttcaagccctttttaaagatcacccatattaaagagagcgacaaaatcatttggtgtgggcgacgctgatgagccctccggaaagaagacgttttagaaaccaacattgtgtgggggcggagcgcggccccccagtgtatgtatgtaaagacgtgctcagaggttgtccaaggagac

SEQ ID NO: 710284 - DNA, 440 bp, Homo sapiens
aaaaataatcagtttattaatttacaacaggggtagcatcaacatggtagtagtcaacactaggacatggtcgggtgacattaaaataaggagttcctccacactgtgtcaacaggcgcccggggtgtcccagagaagtgaagaaatgatgggcattagggagtccacacaaccagggcaggcattcagggccccagacgcccagcgcatgtggacaagcacagacgccactgagtgtgagggaacgagcttctgatgctacattccaacatcgctgaaaacggaaaggtgctcacatctacgggataagaaagggcttcatctcctcatccatacaaggggagagcaagggagtacccctcgggcaaatcggggccccttaaaacgtttatatcaggtccccaccccctgggaaggtcacagggggaaccagacacagt

SEQ ID NO: 710285 - DNA, 139 bp, Homo sapiens
gggcacggtggcttatggctgtaatctgcaaactctgggaggctgaggtgggagaatcgcttaaccccagaagtttgagtccagcccaggcaacacagcaagaccccatctctataaaaagaaaaaataaagaaactgc

SEQ ID NO: 710286 - DNA, 128 bp, Homo sapiens
tcttgtcggagacactcatcttatccttcttgtcttggagcgagattccaattttctttatctttctgtctcttctcgctctctatctaactctttctctttctctcgttgaagaagtttatctctgt

SEQ ID NO: 710287 - DNA, 260 bp, Homo sapiens
taatataatagttacattaagactggttctgttcgggttgtcggtagacctgctcttcttcgtcctatgtgggtacttgaggcgtctgctcagcttttgcgtagctgggtttggtttagtccacctcaactgcctgctatgatggataacgacttgagacgacgtgacggacgacaggcttaccgtttacgtgagggagagactttggtatatgattgacgatgggggctacgtttttgtcatgtgagaccgaagcaggc

SEQ ID NO: 710288 - DNA, 278 bp, Homo sapiens
  misc_feature (33)..(33): n is a, c, g, or t
  misc_feature (199)..(199): n is a, c, g, or t
cgctgatccggagccctgatcttgcagcatgtngaagaaaggcgcattcgtactgggtacaccttcaacgccttggtcagcaaataggctcgcaattgatcagcaataggcttgctaaccagccaaagagcatcctgtgtcagccatccatctgacggtccatcgggttgattcagtttgaatgtatctcggaccaggngacgcaacccatctgctaattgacgctgcaaagactgtttgggcgcgacagcgcgcgggggggatttccaccgagctcc

SEQ ID NO: 710289 - DNA, 128 bp, Homo sapiens
acgtgtatacacagtgcggtgcatcttcttacaatgtcctgtcgacacagtgacaccgtgctgactccaaatattgtcagctggagctggacgagtctagaggatcgtcgagtacccgagtctacatt

SEQ ID NO: 710290 - DNA, 266 bp, Homo sapiens
cacttgtgaaagcaactcaatttggtttatgcccagggtaatatttttccaaggatcatccaaaattccccccagacaaggcttttgtcctcattaggggttggcctcagcctaaccctctaggactgttttattaaattgctgccagaattttacatccagttacctcccctttttagaacatattctttactaatggtattgaaacccatttttacttcatactgatgtttttggaaacagcaattaaagttttttttccatga

SEQ ID NO: 710291 - DNA, 101 bp, Homo sapiens
atcattcagctcgtacccgacagtatggactgatttccctatgctcatttcgtcctctttccccagaaccccccaaagtgtccctgatgccagcaacaatg

SEQ ID NO: 710292 - DNA, 1747 bp, Homo sapiens
  misc_feature (324)..(324): n is a, c, g, or t
  misc_feature (348)..(348): n is a, c, g, or t
  misc_feature (418)..(418): n is a, c, g, or t
  misc_feature (682)..(682): n is a, c, g, or t
  misc_feature (766)..(766): n is a, c, g, or t
ctcatctcctccatcaaccggtataccacggtacaccgtattctgcctggcggatgcagcaagaacgcgcgtaatcacggaggacgtgaggacacacaaatcaggagctcgagggtacatccatgcagaagcctggtccctcaatttcacatggaagcatgatcctgagagaagtatgttcgatacgaaacgttcgaatgcgaattccggttagtgagacttgtgttgtatccaatcagtgagaatacccagactgccattcacactccagcgtggtgtcatataggaccaagtctggatccatacagggttactccaataganatagacatcggaggtgctactcgncgaggtaaatgcgctgaatcttcctcgcaaggacataccaccaaatgcttagagaggcctctcggtgagncatcgatgagtgctctccccccctgcgttcaaatcgcatagctttgccgtgtgccttccagacggtttccttgacttattgtaaagaggtgaggaggcgttcccgcgaacgaaggcagagcgaacccacgcgagtatgacacgtgcaagagtgcaatatgccgcgtacgccacgtgtatgccccattggggaagagcctacaacgttcgtctccacaaccaggtgcggcgagcccacatcccagactatccacaaagcgttganacttggccacccaacttttccggtgcagcattatgagtcgaggaacccgtaaagcaccaatggggcctggcattaagtgtcccntccttagcgtacgtgtattggggtgagcggaacaggcaccaaaccttgggtgcattgtggaggggaaaaagcaaaaagtaaacatttagggtacataaacccccgcgctcgcacatgtggacagtttaggactctccaaagtgtaagccgggacagccgaaacactctctctacgtataagagcttcgtggacaatgccccggatagggcaatacgggtgccaaaccaaggccccaagcctaaggataaagccgtgtttcctaacccttactttcttcccttgggcttccagcattgtccaggttacgatgtgggactccgggtactaaatcctagcgttgaattgcccctcacaatgacactagggaaaggccgtccaaatgggcggtcgccaaagcgaaaacaggatttcccaatgtgcggtttccccgggagagccaacacagaaccgcaggtggaggagcaagtttgaattgcaaagcgggccccatttctcccatgaaggtatagggccaacaggacaactacacttcacgagttcgccaaaggggagtctccaagataaaccacgagcgaggtgcaaaccacctcttacggagaattgtctaatttcacaaaatctaaccgtgtggtgggaatgatcggaaacatacccagaggtgtccccccccgtgcggagaaaggactctgaggcccatgagcctcgagcgtagtaatatggaggaaagatcggcgaaaacacagtacacacaggcacgacggaaaacagtggggagaagtgacaacagcgcagatggagaagaggggacagctactacaccaccgagcggtggggattcgatagggagctgtgacacgccacaagtttgagcgcgccacaacaacaatgtgcgcggatggcccccaagcagcgacgtagaaaagacagcgtgcatagcacgggacacaaggcagaatatacacctcaggagggggcgttgt

SEQ ID NO: 710293 - DNA, 434 bp, Homo sapiens
aaaaaaaaaaaaaaaagtgaacagaagactatactatactacatgaagattctgcatagtcctggagacattcttcttgtagtatagtatagtcttctgttcactttttttttttttggttaagacaaagtcttactctgttgcccaggctggagtgcagtggcacaatcttggctcactgcagcctcgacctcctgtgctcaagtgatcctcccacctcagcctcccaattaactgtgaccacaggtgcgctgccacgcccatctaatttctatattttttggaggaacggggtttcactatcttgcccagactggtcttgaacccctgggctgaagtgcggcactttgcctttctcggcctcacaaagtgctggaattacaagcatgagccactgtgcccttcctctattcccgtcgacgcggccgcgaatt

SEQ ID NO: 710294 - DNA, 152 bp, Homo sapiens
tggcggcacttagggagacctgcttctgcaaaatccaaaaactagctggtgcactggtggcttatgcctatctctccctgctacttgtggaggctgagacaggaggatcacttgagccaaggaggtcaaggctgcagagagctgtgatactg

SEQ ID NO: 710295 - DNA, 726 bp, Homo sapiens
tcaggtatccacaggcagcagaggtgagtgggtcccccgagctctgtgaccttatgctccacagctaactctggcagagcctccgttgtcctcatagaacaaagaacagccaccatgcgagcgtcttcctccgtcttgtgccatgggtgcttctcatgccctcaggggagcctcccttcatcgcgtccaccatcccccgggagatgaatgaatgcagagtcgaggacctccatggtaggtgccacggctgtgcccccgagcagacatgcaaggggactttatcctttgaaccgtctagcagtggccattggtcctatccggtctgacgcgcgctcagctctagaatactactcttgctttcttcccactgtgagtcatctccatgtagtcgctggtcgcagtagctcttccctgtggcggctcggtgtccacgcacaaaggatgcagtactcctggatgggcctgtggcactgaatgctccagaaaagctcagtagaaggagctgcagcacgaggcttgtgcatgcagctccgttcagcgaactgcaagcctagaccctagcagcatggcttccaggctgagcctcggtcaatgcccttttcaccgagctggtggtagacctgcaggacaccttcgtaatgtgccatgaagacgctgtacctggcagacgctttcgccaccgaagctttagggactctgcagggccatgaagcagatcatgatttg

SEQ ID NO: 710296 - DNA, 296 bp, Homo sapiens
aagcaggctgtacggcctggggtatggattcgtccggcgctggcgtctaggtctcggccctccccagcctgctcctgcgcccttggcggcccctgcgcctgcagcccttgttgctccctgcgggccccgccgaggccgcctgcgccctgtgccagctgcgcgccccgggaaccggtgcgcgccgactgcggccaccgcttctgtcgggctgtgcgtggtgctgcttcttggtgcctgatggagtgacgggcccttccctgtgcccctgatgtgcgcctgagcgacttgcttggcat

SEQ ID NO: 710297 - DNA, 104 bp, Homo sapiens
ctagaggatccccaaataaagagagtgtcttatcgctcacgagccctctctgtcagctcctgatgccatcattttctgtagcgtcttcaccttgcaaatgtcgg

SEQ ID NO: 710298 - DNA, 93 bp, Homo sapiens
ctagaagattcagcaaagtacttttgtgctcttggggaacccccctacctacgaacttactgggggatacgcagtatgaccgataaactcact

SEQ ID NO: 710299 - DNA, 992 bp, Homo sapiens
gggcgcggggggcagtgcgtgcgccgggcaggggcccggatcatatcggcgctcacgtccttgacgatgcccgatgtgttaccgaacctgccgctcatcgccatacacccgcgaatccggctgttcccgacgctttatcaagattatcgaggttagtgtaataatgaatgttggttgagtcttgcagagaagtgaaagttcgtctacgcccagccttatgtcggcgtcttatctaagagagagatgaccagcaatgagtcggatgtggtcgagatgcctgagatgaaagtctaccacatcgtgggccgtttgcccagatccatgagatgcagtgaccttgtggtgacaagtctgcgcatgatcgtcatgtggacacagaagagtccatatcagcagacagctggcggtggagcccgatggacgccggaggcggagaacaagcacaagccccgcaggaagtcaaggcggggcagaaaggaggcggaggacgagctgagcgcaggcagccggcggaggtggggatggagcccacccctgagctcccggctgaggtgctcatggtggaggtagagaaacgtgtccacgatggacttccaggtcaccggagtgagggtgaaagccctgactgcagagatcgtgcaagaccatccgggacatcattggcttgaacccctctctacagggagtcacgtgtctgcagatgatgcaaggctgtacagcgtgtggttggacaaccgccattatacctgagcgacatgggcgcccgcgctcaccgggactgggtcccagtgaagctgcagggagtcctggaagagaccaatattcctaaggcggcggacaacaggcctctcccttgtgaagcaaggaattggagctgatgcagccgcgcagcgcctggggcggatgtcgagcaaaattcaagaaaccacagtaataccgatgcggaaataagctcatcggagggactgcggaaagggcaaagaaccaaagaa

SEQ ID NO: 710300 - DNA, 81 bp, Homo sapiens
  misc_feature (68)..(68): n is a, c, g, or t
gccaccgccgagcagcagcttacagccagggcagctttgaatgcggcccaacacaaattcacaagtgntctcaaaaaactc

SEQ ID NO: 710301 - DNA, 792 bp, Homo sapiens
  misc_feature (20)..(20): n is a, c, g, or t
  misc_feature (98)..(98): n is a, c, g, or t
  misc_feature (110)..(110): n is a, c, g, or t
  misc_feature (141)..(141): n is a, c, g, or t
  misc_feature (148)..(148): n is a, c, g, or t
  misc_feature (150)..(150): n is a, c, g, or t
  misc_feature (275)..(275): n is a, c, g, or t
  misc_feature (345)..(345): n is a, c, g, or t
  misc_feature (402)..(402): n is a, c, g, or t
  misc_feature (415)..(415): n is a, c, g, or t
  misc_feature (614)..(614): n is a, c, g, or t
  misc_feature (757)..(757): n is a, c, g, or t
ccttcatatgtaaatatttnagaaaacaaatttatattcaggttcttaacttcattagggaagtaagaagttgcagctcagcgcaccatgaagttganacaaaaatgganacatccagcccacttctctggaacaggaaanatgatcngngagggaacacaggtcagtatggggacaggggtcacggtggacacgggggtgggctgtctctccacctcctcacattatgctaacaggaacgcagacacattcagatgcctttgcagaaaaaaatnccataagctcttgaagtcacaaaggagaggtgtgaagaaatcctgcatctcagtcccacacaggcagctntctcaggctttacaagcgatgagagactcatcagagccctgggcactgttgctggangcagcctgagatnttttccctccttttccacctgagctcttcctcctacacatcacaacagccaccacagctcctaggacagctaggacagccaggacagccaggccagcaacgatgcccacgatggggatggtgggctgggaagacggctcccatctcagggtgaagggctccggcagcccctcgtgctgcacatggcacgtgtatctctnctcttctccagaaggcaccatcacagctgcccacttctggaaggttccatctcctgctggcctggtctccacaagctcggtgtcctgagtttggtcctcccccatcccactgccaggtcagtgtgatctccgcaggtaagaanccagggcccagcacctcagggtggcctcatggtca

SEQ ID NO: 710302 - DNA, 100 bp, Homo sapiens
caacgatggtcctcagctgttgcctctggggctgtgcgttgccgtgcgagctacaccgaggctgtatatgagcgggaatacacaggtgagcatgctagtg

SEQ ID NO: 710303 - DNA, 105 bp, Homo sapiens
cgcggggcaagatcaagtcaagtcatcagtcaggcacatagcattgcctgtacagaggtgatagatcccgttctggtgtacgtaggtaattctttccaagcatag

SEQ ID NO: 710304 - DNA, 173 bp, Homo sapiens
gggttttgcggtctgtagcggatggggtctgtttcccagccactcggtgggcgaggaaggagaatagtttgaacccgggagggcggaggttgcagtgagccaagatcacgccgctgtactccaatctacagtctgggcaacagagtgaagccttgtctcacacaaaaaaaaaa

SEQ ID NO: 710305 - DNA, 112 bp, Homo sapiens
gctccgctcagcagcgccagctcgacgcatttctaccgcaagctctggcctgaaagtcatatagatggcacgctccggagaccaccccgccctttccgaagctggcaaaggg

SEQ ID NO: 710306 - DNA, 235 bp, Homo sapiens
agtacatagacctggcatatgagatcacacagtgcacaatcatctaactgcacatgacggccttgaaaaattccagaggttaacaatgactcaccacttcatcacgcaggcagcggaagtgtgtagaacgatttaccaggggtgtcacgtcttagacactcagaacggcaccattctagccatcttgattggatcacatgtatatacttatgtccctacgatacgacattgtgat

SEQ ID NO: 710307 - DNA, 139 bp, Homo sapiens
tccagctttcgttcctgactgcggcgggctgacctgtagtaactacaagctgaatgcagagacaacaggaacaaccctgctgttgtgactgctaattcgtttcttccaaaatctgtatttcgagcgcaacaccgggcgg

SEQ ID NO: 710308 - DNA, 107 bp, Homo sapiens
aaagcggtctgaactagtgtcgagctcagtccttagagataggggagaactgcagccagaacaagccccctactcctgaccaccctccatcagcagtctcccctacc

SEQ ID NO: 710309 - DNA, 230 bp, Homo sapiens
cggttacgcgtatcgatgggcagtgcaggcggcgcatatgcatctaggctataatatccggaaatacgtagccggtaacgtaaacaccggtcctctagaactatagctagcatgcgcaaatttaaagcgctgatatcgatcgcgcgcagatctgtcatgatgatcattgcaattggatccatatatagggccggggttataattacctcaggtcgacgtcccatggccat

SEQ ID NO: 710310 - DNA, 310 bp, Homo sapiens
caagaaggtaagctagagaaaaaaaaaatgttattaaggaagtaatatattccctattcgttaggtagaagtgaatcatcctaaaggttttcatcctcattttcacgctgagtagtttgaggagcaaaaggagttggtctttttgtcccagtggcagaggtggaagaaaatccccaaaaacgtggacctgcgcagttcaaacctgtgttgtttgggtcaactgtattgtaaaagcattttaatgtttttttcagacttttacgagtatgaatttgagctttttttgaataaacccgccggctccccatta

SEQ ID NO: 710311 - DNA, 769 bp, Homo sapiens
cgtgttcagatgtggatgatattgttcaatatgtcaagctgaatttcagaagccaattcttctcatctgtcagcatatattttgtgaagagtgcatgaccttatggtttaacagagagaaaacatgtccactctgcagaactgtgatttcagaccatataaacaaatggaaggatggagccacttcatcacaccttcaaatgtattaagttgtataaactatcaaggccacaaaatactaatgtcatttggtcataatgactactgataaggcatcagaatggattttcagggctaccagaaaaatgtttccagatggttttagaatgtaggacttatgatccaattcaccaaaagattaaatgaaaccaccctgtgttttaaaatatatataatgttcaacctaatgtatatgcaacatttattctattctaattatttgacaggtaactgcagtgttaaattgtaaatgtgttttctttatgttaccaaaacagcaatttgaaattagaactagtggttttagagaactcgggtattctttcctgacattgttttcagaataaagaatatttttcataatattttaagatacatactatctaaaagtagaattttgttcagcattgacttttataattcccatcctaaaaattcttaatattttcataaaatttgtatttttaaatgaaaattctaaatgttgtattttatcagtaacattttctaagtgaagattaatttactgaggataccacatagcgtattga

SEQ ID NO: 710312 - DNA, 884 bp, Homo sapiens
gctcctacaagaaaagtcctggaagtacctcgagaaggcagtcggtcagtcccccttacaagggagccttcggtgctaccaggtccagcacccggtcaccgagcccctacagtaggcgagcagagatctgtcagtccctatagcaggagacggtcgtccagctacgaaagaagtggctcttactagcgggcgatcgcccagtccctatggtcgaaggcggtccagctagccctttccgtgagctaagcggtctctgagtcggagtccactccccagtaggaaatccatgaagtccagaagtagaagtcctgcatattcaagacattcatcttctcatagtaaaaagaagagatccagttcacgcagtcgtcattccagtatctcacctgtcaggcttccacttaattccagtctgggagctgaactcagtaggaaaaagaaggaaagagcagctgctgctgctgcagcaaagatggatggaaaggagtccaagggttcacctgtatttttgcctagaaaagagaacagttcagtagaggctaaggattcaggtttggagtctaaaaagttacccagaagtgtaaaattggaaaaatctgccccagatactgaactggtgaatgtaacacatctaaacacagaggtaaaaaattcttcagatacagggaaagtaaagttggatgagaactccgagaagcatcttgttaaagatttgaaagcacagggaacaagagactctaaacccatagcactgaaagaggagattgttactccaaaggagacagaaacatcagaaaaggagacccctccacctcttcccacaattgcttctcccccaccccctctaccaactataccactcccgtaccggggatcctctgaat

SEQ ID NO: 710313 - DNA, 153 bp, Homo sapiens
ctgcttgccttctgaagacaactccaaggactcacttccatagcaaatgctcacagtgtcactataacctaactgttgactttttaaacctcagacagtagaaagtgactgcaacgtaccaatatgtgcataccgtgaacagaaataattcct

SEQ ID NO: 710314 - DNA, 645 bp, Homo sapiens
  misc_feature (421)..(421): n is a, c, g, or t
  misc_feature (500)..(500): n is a, c, g, or t
  misc_feature (583)..(584): n is a, c, g, or t
cacggtagctcacgcctgtaatcccaccactttgggaggccgaggcgggtgtatcacgaggtcaagagatcgagaccatcctggctaacatggtgaaacccccgtctctactaaaaatacaaaaaaattagccaggcgtcgtggtggcgggcgcctgtactcccagctacttgggaggctgaggccggagaatggcgtgaacctgggaggcggagagtacagtgagccgagatcgcatcactgcactccagcccggacgacagagcaagactccgtctcaaacctggctacttggaaggctgaggtgggaggatccctggagcccaggagttggagggtgcagtgagctatcatggtgccactgcacctcagcctgggtgacagagagagaccctgtctaaaaattttttttagcccacangggagcctgcagcagtggagggcagcccttcctggcagagcccccagggaagcaccgccagaaagcgtctgtgactggngggacttctgctcccctaactcatgctgccagctcaacatcttccagacaaaggtgactgggcttgctcttagtctaactggnnatatgctccaattcttctttaagcagaccagcatggtctgaccatttctgcaagaccactg

SEQ ID NO: 710315 - DNA, 872 bp, Homo sapiens
gctcctacaagaaaagtcctggaagtacctcgagaaggcagtcggtcagtcccccttacaagggagccttcggtgctaccaggtccagcacccggtcaccgagcccctacagtaggcgagcagagatctgtcagtccctatagcaggagacggtcgtccagctacgaaagaagtggctcttactagcgggcgatcgcccagtccctatggtcgaaggcggtccagctagccctttccgtgagctaagcggtctctgagtcggagtccactccccagtaggaaatccatgaagtccagaagtagaagtcctgcatattcaagacattcatcttctcatagtaaaaagaagagatccagttcacgcagtcgtcattccagtatctcacctgtcaggcttccacttaattccagtctgggagctgaactcagtaggaaaaagaaggaaagagcagctgctgctgctgcagcaaagatggatggaaaggagtccaagggttcacctgtatttttgcctagaaaagagaacagttcagtagaggctaaggattcaggtttggagtctaaaaagttacccagaagtgtaaaattggaaaaatctgccccagatactgaactggtgaatgtaacacatctaaacacagaggtaaaaaattcttcagatacagggaaagtaaagttggatgagaactccgagaagcatcttgttaaagatttgaaagcacagggaacaagagactctaaacccatagcactgaaagaggagattgttactccaaaggagacagaaacatcagaaaaggagacgtctatagcagctcagtgaactcctccttatggtcataggtggttcccgttgtcaaccaaaggagact

SEQ ID NO: 710316 - DNA, 350 bp, Homo sapiens
gaatatttctaggaaggctccaacttgtagaatagctagggtctctgcaggagctacactgtgactgcctgtagcttcttggtcctggtcctaggagagctctacctatgtgacctaagtcccttctccagcctgagggttctcatgaagtcctatcctgctgtttctagagagtctagaacacttcatcaggacggggcattgataaactgatgttattatagatgatcggttatcttacttaaagtatggttccggcaaatgcaaacacaatgtgatgtgatcctcaccactgttttctcctcacgtagcctgcatgtctgtgggttttgttttagcatggttccatc

SEQ ID NO: 710317 - DNA, 156 bp, Homo sapiens
tattagttgttcttgccttccctctttctattttctctcctgttcccttttctctccctcctctgccctctccttcctccaacatcaggcgttcccctattgtaccacacccgttacatggaaaacaactcttgtgcggatttattggctctcatg

SEQ ID NO: 710318 - DNA, 374 bp, Homo sapiens
ggtgactattttcttgtacagtgctgaaatacctagtggcaatgcctttgagactctaagggaataccaggcaattgatagttattgaacaaattaataaactaattaatgaacttttccttgcccttcaatatctttctaaagtaaccacaaaaccttgtcatctgttttacgtgggtggtaatcatgcaggtactgaaggtatgtcacagcaaggtgaagggacaattgtcatttcattcattaactccagagtagtggagtcttatttatagtttctggaagtgactaatggtaggaaagggaacccaagaggaaactagtagagtttccaggctttctatacagtgacccatcgtgtgacccatcgcgtg

SEQ ID NO: 710319 - DNA, 727 bp, Homo sapiens
  misc_feature (8)..(8): n is a, c, g, or t
  misc_feature (10)..(10): n is a, c, g, or t
  misc_feature (12)..(12): n is a, c, g, or t
  misc_feature (555)..(555): n is a, c, g, or t
ggggcgtncngnggcgcatgcgcgtgagggctgcgcggcaggcccagacatgtccgtccttgtaagttaaaagcttccatgggagccttccttcctaatcaagatgcaaataatacggcactccgaacagacactaaaaacagctctcatctcaaagaacccagtgcttgtatcacagtatgagaaattagatgctggggaacaacgtttaaatgaatgagaagcctttccagccagccagtgatctcttgtggacccattaccttgcattctccatccagatgtggatcacctcccaccctgagggtccccaagacttttgaacagttcttcagtgatccttacagaaagacaccctctccaaacaaacgcagcatttatatacagtccatgtggctctctaggaaacaccagaattatcaggtgaagaatatattaacatggctcacgggctactgtaaagcatatttctatggcttgagagtaaaactcctagaaccagttcctgtttctgtaacaagatgttcctttagagtcaatgagaacacacacaanctacaaattcatgcaggggacatcctgaagttcttgaaaaagaagaaacctgaagatgccttctgtgttgtgggaataacaatgatgatctttacccaagagactcgtggaatttgtctttggacaggcctcttggacagatggtgtggggaattcagttgccaggtatggc

SEQ ID NO: 710320 - DNA, 134 bp, Homo sapiens
tggtgatctagaggatcccatttccttctttatgcacagcgaaaagatagaaaaatagaagattatactaggagatcaataacccaataagggcaattctagaaagagagagaagacaataaagaaggaaaata

SEQ ID NO: 710321 - DNA, 118 bp, Homo sapiens
gttagtggctattgacactcccaccaggacagggctatctaaagacacatacgaaagtgtgtcaactatacaaaaaaagacactgtacagtttaaaaacacatctcacacagacctta

SEQ ID NO: 710322 - DNA, 274 bp, Homo sapiens
accccagaggattcagaggccaagaagaggaaaagagccaagccctttgggattgcctgataaaaagttcctgatactttctgttctccagtgttttccctttctccccttctttttggtcccatatatgcctaaatgcacagtcatgtgcctacgtcctgcctcccaattagggagcatgtacccccggtacatcccttaacttcggcaccagtttgactttttgctgtttccgctttaaggttgttgtgtttttgtttttgattatgttgct

SEQ ID NO: 710323 - DNA, 259 bp, Homo sapiens
tttttccccccccggggggggtggcccttttcgcccccttgccccccgggggtgtgggccctttggccccccccccccccgggggcccagggggggggggggggccccccctgggggggggggggttcccccccctttccccccccccccgggggttcccccccccccgcgtgcgcctttgcccccctggggggggggggggccctggggcccccccccccttttttccccccccaaaacacccccttttcgcccccca

SEQ ID NO: 710324 - DNA, 937 bp, Homo sapiens
ccttgcatgttgaagttctgtatagctggggcttccaacaaaaaccacagtcactgacagagggaacagcagagaccttgttggtatcaggctgtgatggatatacagaatcagaggcaccttgcttttcacaatctaggataaatacgtagtctgactgggtacctttaccattccgtatttaggagggagtcctggctccatgagcccctcccgagtggactgtccacgcagtataggctacacacgagataaacatgctgcacgtgctgacatagcggcgcggggctcatgcgaacgtagccgcggtaaggcgagcatccaacgtggcggaacgattgccacgtgtgacactgctctgtgccattgccattttcaccaacagtttagattcgttgggttagattccaccaagaacttaaggttaacgagctaccacatttgtctcggaaccaggtagtcgatagcgattgcgcacacggcatagcgacccttcctttcattgggaactaagggcacttgagccaagctatagcaacatagcgacccccaaatacacttgcgaggatatacacccattaatgttacccttcggccatcgagggctgcccccaactacggtgcccgccaatactatcgggcggcggcgcgacttcgcaggaaacacgccgcagacaggccctatgggccgatggcacattggacgcttggccttttcggcccaacccccctttggggcggcccatttgggaaaccaatcgggcacggccggaccacgcccctcgagaaacccgcaccaaacgagccggatatggctcacccacaaccctccgcaaaattatcccctccttgggcttaacgagacccttttgactgcttcggatttcggcgtggtaggcgacatccataggataaacaccctatgctcacttaacgg

SEQ ID NO: 710325 - DNA, 1850 bp, Homo sapiens
  misc_feature (445)..(445): n is a, c, g, or t
  misc_feature (719)..(719): n is a, c, g, or t
gtccggctcatgctgacactggttgccgaggggcggctggaagatctagtggacaaatatgatcattgaggtctgaccgctttgaggaccttgcctcgcgtctattctcaagtgacatttccgatggtactgcgaaagcatcggggacatgtgagtagaatacggatgcgatagcaatgcaatgtcttcacgtctagtgacaattggtcactgtgcatccactcgactgagccctggcaggtgtcactagactgtgagctcaatcgaggcaacgtctcgatccccaccaagcacctatgcgcagtgccggcaaagtcctacaacaaagtagcgttaacgaatacgaatgccgtgtgggatcatatatgccgcgcataggggttgtagtcgaaaacgacgtagccacaatgaaaaccatcggcacactcgttgtatcagcatgagnttcaaattgcaacaccctcccgggaaaaagtaagcgatgtgattggatcatacgtggatagcttgggccagaaacaaggcctggttctcgaatattgtcctcgcgtcctcaacggcctcaaagaagcccaacgacgccacgggagaccgtcacgtatgaaactaggtgtcttttggatttcgccgtgggcaaggtgtacccatgggaaaaggcttgagcttataagcccgtgcggcactacgcgtgaacaaatctgcgattacttcgttggcantgcgatcgcttcacccaagggataaccctggcatgtcttcgcattttgggaggcattagttcaatggtttggttccctgttcccctgacactattggaagcgtgtctcaattgcgaccaattgaaaagccttcgccctttctgaacacgcttattcggttctccaaggttctcaccttaggaacccaggaacaaggaggaccgaaaattgagtgcgccccggggtcggttcgaatatgtaaaacagttaggttcgcacacctgggagactttgtggaccttccctcggagtatggccccgaaggattgggcccccacaaaggaaaatgtgtccccattcgattattccatatggggcggggacacacaaaggggtggcgcgctttaagcgggacacgcacccaatggataagcttcgctttgaaaaatgattcaggcaggtcacacggagagccccaagaaggggcacccccaaattttctcccgggaaaaccaggggcccctagggagaaaccattttccgagaaagtgggtcgttcccaccaaagttggaaaacggggcccgtgtgggaacgcaactgacgtggggagtaccaccatatgagcaaatgttaagcgcctctgtatgagaggagcaacacagaggcgaggagagccacactatacaaacactctctggcggcaaagggaggaacacctcggataatcaccagggggagagagcccagtcatagacccgaggtgggtgatgcacgccaactcgtacgagacacagtgtgtgagggggaggagcccaccacaccaatatagaagaaagagagggaggtccccacacaaagcgggggagaagaacacaaacacgagctgggaggcaccacacaacacctgtgacggcgacgcacacagcgggagtgttgctaaccccagccagacgctgctgaagagagacgcgcctaaataaaacaacgcaaggacaggaagagaaaaaacacacccgggcgacatagcatttactcgcgagcaagaacgacaacagcgaccaacgagaagagaacagacgagattagcgagtacgagaaagaaccacaagaccgcgtggacgaaccgacacaaaccgaacgaattacaagac

SEQ ID NO: 710326 - DNA, 353 bp, Homo sapiens
agctcgcacccccaccggcaggttgtactcagggtcataggacaatagtggagggaaggtcagcagataaacaagtgaacaaaggtctctggttttcctaggcagaggaccctgcggccttccgcagtgtttgtgtccctgggtacttgagattagggagtggtgatgactcttaacgagcatgctgccttcaagcatctgtttaacaaagcacatcttgcaccgcccttaatccatttaaccctgagtggacacagcacatgtttcagagagcacagggttggggataaggtcacagatcaacaggatcccaaggcagaagaatttttcttagtacaacctgccggtggggg

SEQ ID NO: 710327 - DNA, 117 bp, Homo sapiens
  misc_feature (84)..(85): n is a, c, g, or t
gttttcaagttatttattaagttcttcattggaaggttttttttatatctggttcactaccaccatttttttgtttcctactanntcagtggtgttcatttgaaaagaaattagaag

SEQ ID NO: 710328 - DNA, 596 bp, Homo sapiens
ttacgacgttggacctagtccatatgaccagcttgcagctatggtacttactgcttctatccgagcatcactctccagtacctcagactcttatacaagcatgcattcctatctggacctcagtaactaggactcagctgccccatttatctaggtaagtcccctgcacctatgagtatgcctgggtcatacttcagccctaagcctgaatggatagtctgcaagacagccatagccccttgacatctaggatccctgctcacaactaaggcagaagcttgctcagctaatgtctgagcctgttataactcatgttacacctctccagtcccatctcgcaaccatctctacctcatactcatccccagacactggctcagattctacagcatgccaagttccttcccaccctctgaagcctcctctggtactacatcgtggagaacgctttcctcctccattgttagctcctcctccagatcttcagttaaatgagggctcccatactacatgggccctatccatacgtacttagggtatcgaaaccctatttacgcatacgataaaacctaagaatccaatggacataatggctc

SEQ ID NO: 710329 - DNA, 394 bp, Homo sapiens
  misc_feature (13)..(13): n is a, c, g, or t
  misc_feature (259)..(259): n is a, c, g, or t
agctaactgttanatctctctcctgggcctgacagtttcagaatgctaaggcaagcaggagttgaatccagtgtcaagaggattacagagttctcatacattgctggtgggaatgtaaaatggtgccgctgtttaggaaagcagtccagcagtttctcaaaatgctaaacatagaattacacagtaactctgagtaacatcccacttcaaggattgaaagagaattgaaagcatatgtctacacaaaaacgtgtacatnaatgcccataggagcattattcataatagccaaaaagtggaaacaacctaaatgcccatcgatggacaaatggataaacaaaatgtggtatatgcatatgatggaatattattcagccaaacattcaagccgtca

SEQ ID NO: 710330 - DNA, 392 bp, Homo sapiens
gagttctttgctaatggcccgggtgttgcttgccagttggcctggtgttgctttctgctgtgacatggtaacactgagttccagtgcaaagtcccacaatcactgtgctccccctcccccaagcacacagattctttgcaccacacggccactgcatgggggtggaaggggtagtagacaatcgaaaactgtctttcctactctcttcagtgtctctttcagcaatatgaagttaaaatcaggtactgtgatcacttacctgatttttggttcttgtgaaggtgctttttttgtgtagatagttgttaaatttggtgttcctgtggtgggggcagcgattggttgaggcttctattcagccatcttgcttcatctccctccaatagattaaa

SEQ ID NO: 710331 - DNA, 116 bp, Homo sapiens
ccgatttgcgcacgcgcttgtacggcaggaggtacaaataggcctccatctcggctccagcccacactgtagatcgtgtctgggtgcacctctgggcccagggcaagcggccgcaa

SEQ ID NO: 710332 - DNA, 1083 bp, Homo sapiens
ggtcgttctgccttctgccatgggatgacacagcaagaagccccttgctagatgtgcgggctctcgatcttggacttcttagtcttgcagaactaggagccattgaagagtactgttgtcctatcccagaaggagcaaagcggatagagactgatatcctgacgcacgtaaccatccagcaccacttaaagccattgctctcctcttgggtctttcctggtacgcatcatacaagccgcacagatggaggactcgtgcacttgcttgtgctcgtctgcctggagctctagtggcgtccagagtagactccgtgcgcaacgtccgttcgccttgtccaaggttaccgttcatgtaacatgtcagcttaccactgtgtgccgtactttgtgccctacgctagaattggcagaggaccgtcgtcaccaggtgggctcccagttctccttaacttaatgccacttttagttctcatagatagagccacatatttatgctgattatatcataatcgtgacggtatgactcctagtattatcacttatggtgtgtatagcttactggaatgatgcggttcacgacgggtgtaagccccatgagaccaagagatcttgggactgtcgattcacctgatttatgccaatgttggagcaacaatggccggcgcataggtgacggttgaaaaattcccaagatgcggaatgaacatgctctttttgcccaaagtttgtgaccctgaaggaatgggactctaatggggggggaaagttttgtcggaaacgcaacatgtggtgtagaccaatttaaacggggaaaaaatggctacggcaaaagcggggggaagaacaacgcacatataaaaataaaggaggcgcccaaacgtggggagaaaggtcacaaagaggggctgttaccaccagcacgacagtagtgaagtgaaagaggcgtgtcaacaaatgagtaggtcacaacaagaaagagcagatactattatcaaaaagacggacggagtgtctttttctgtgtcttcttcgttgttcttgtgtcttttgtcgtgaagaagagaaaaaaagcaaagaagaggca

SEQ ID NO: 710333 - DNA, 409 bp, Homo sapiens
  misc_feature (10)..(10): n is a, c, g, or t
  misc_feature (73)..(73): n is a, c, g, or t
  misc_feature (76)..(76): n is a, c, g, or t
  misc_feature (87)..(87): n is a, c, g, or t
  misc_feature (90)..(90): n is a, c, g, or t
  misc_feature (94)..(94): n is a, c, g, or t
  misc_feature (101)..(101): n is a, c, g, or t
  misc_feature (108)..(108): n is a, c, g, or t
  misc_feature (116)..(117): n is a, c, g, or t
  misc_feature (123)..(123): n is a, c, g, or t
  misc_feature (141)..(141): n is a, c, g, or t
  misc_feature (237)..(237): n is a, c, g, or t
  misc_feature (262)..(262): n is a, c, g, or t
  misc_feature (273)..(274): n is a, c, g, or t
  misc_feature (398)..(398): n is a, c, g, or t
gtcaggaggnccccctcaagtttaaatccccacacttacttacttactgctcatccgtcactttctctaagtnagnttaataattcnttntctngtccatnccgcacngcttgggnncgcagnggcccaggcctcatgtantttcccactcccgtaactgaacgtgctgacccatgttgatgtctgccttcatccaggtggcaaatcagacatgctacgctgcccccttcaaacganttcctcgtgttaggggcaaaggtcncagccaaactnnaccactgacagccagtgccttggcctggatcctctctgtggatgcaggcctacccctcctcagtccagcctcatctactagaccagcttggccattcacttttcagatgtctgtgagcagaggnctgcagactga

SEQ ID NO: 710334 - DNA, 132 bp, Homo sapiens
ttactctacacaagatatttttgtcaccaagaccctggcttctatgctctcctggtacttatgaattcgaacagcatacccccgattccgctgcaaaccattatcgcgaaaaccagccgcgcaaaccaggta

SEQ ID NO: 710335 - DNA, 358 bp, Homo sapiens
tcttgtttcctgcacttccacacacacccctagaggatattctgagaaaagaggaggcaaggggtggcagtgacttgtgatgaagagggttgcggttggagaccagaagggcctgaaagcagctgggtgcggtggctcacgcctgtaatcccaacactctgggaggccgagacaggcagatcacttgaggtcaggagttggagaccagcttgggcaacatgacgaaacccatctccaccaaaattacaaaaaaattagtctggcgtggtggcacgcgcctgtagtcccagctatttgggggaggatcccagctaaggtgggaggatcacttgagcctgggaagtcaaggctgcagtga

SEQ ID NO: 710336 - DNA, 145 bp, Homo sapiens
gtaacgttgcggatctcaccgacctaaagttaatgaagggtatgtacttggaaactgtgaaagtctttaaagaatatccggaataattttactgtgaacattagttctgatgacttagatatttgaatatgtcaggtctacctgg

SEQ ID NO: 710337 - DNA, 135 bp, Homo sapiens
  misc_feature (99)..(99): n is a, c, g, or t
tagagttcagctgagtaagccactgtggagccttaagtggtgaggtcttccaatttcagagtgatgggtcttcaactggattcatcatttaagcgaaanaacataaatttaattttggtgaaatgagattcatct

SEQ ID NO: 710338 - DNA, 235 bp, Homo sapiens
agcagtgtccgtattttcccctgggctagtcatactgactgtgctgtgacaggggatgcgactgtaggaggacctggggttgttgctataccttcacatcagcaggcacccgaggtcatctgacagcctggtggaatctctgagggactcgctccagccctcagcccatgcccaagagggaggtgtataaagagccaagcaaatggagtggagaaagaggacagccagagcctcc

SEQ ID NO: 710339 - DNA, 463 bp, Homo sapiens
acacctccctcggcctcccaacgtgttgggatgacaggcgtgagccatcacacctggccatgtaatactttttaaaatgtggattggtacagttacttagtcttcataataagataacattttattttgctgtcatgtagtaggttggagatattctattctgctccatgaagtaatacagggatccacttgtcatggttgtacaatttcacacttcagtctgtggggaggagaaggaggaaattcaggacagtttgccattgaggaggtgagcaggaagttctgctatttcttttactcacattgcatcattggtgagaacttagtgacacggctatgcctacctataagggaggctgggaaatggagcctatgtgactgattgtatgctcaggaagaacatgagaatagatgttttgggagacaactagtagtatgggttttcggcgtgtgcagggtaccg

SEQ ID NO: 710340 - DNA, 1268 bp, Homo sapiens
gggacaaagcgcggctgatttggaggattatcagtatcacgatttgcaggattcccttctgggacttcattctggaaacttttgtaagggctgcttattcttaagtgcccacatttgatggagggtggctgtcatgcagcagctgtgactgatgtgctggtttagagggtgtctcccgagaggacccagaaattcaggaacgttccctgtgaaattacgttgccccgtgtgtgagtggtctccatggcaacttgagagccagaccacggcatgggagtaggagagcagcaggaaggcaactacgtgggcagggcagcaggacccccacgaacacacaatccaaccatatacccccacaggacacatgaaggctcccaagacaaatcttgacagaacggagaccccacagaacagaacaaacaccacaatcagaagaacacgacagagaaaaagccacaacgacaagcggagaagagaacagcagcccgaccccagacaaaaacaccaaacacaacacacaaagggagacaacaaacagcaggcagcagggcagccaccaccacacaagcagcccagcaagccgagagacagaagagcaagacaccaagcaaacgccgcgccagacgcacacggcgcagcacacagacaggacaaaggaaacaaggccacacaacagcaaccaacaacacgcacaccgagggcacacagagcacaacagaaacccacacgcacgcccgcaagaacagaaaaaaagacagaacaacaagagcagagaacacgcacacgacgccggagaagcgaaacacgaacacacaacaacaccacaccgacaccaaaaacaaaaaccacacacaagcaacaacaaggaacgacccgaccgacagacgcacgaaggaaaacgggaagaacgaaggaaagaaaaaaagaaacacagggcaacaaagcaagaaaaggacaaacacgaaaacgacagaaaggggaggagcggacggagggaacaagaagaaaaagacaacgaggcaagcagcggaaaaacaggaaacaggaagaagcaagagggaaagacaagcgacgcgaccagcggaggcaaccaggcagcgagaaaggcgcgggcaacgagagggccaaacgcgccacgacgagcgcaacgggaggagagcagcacgcaacagaaaacagagacccaaacacaccccgccgccagcaggcaaaacgctgaccgcacaccccaacggaaagaggagaccacgcagcgaccggagccaaac

SEQ ID NO: 710341 - DNA, 205 bp, Homo sapiens
tttcttgccaacgatcgaaagcgcttctactgagtggcgcctccggtggggcttgtccctgggccctggagccaatgtgaactttttttttaccggggattataaaatgaacaacaatgatgacctatatttctataactggtttcaacataaattgattaaatgtatttatcatcacattttgtgcttccttgccccatgtatg

SEQ ID NO: 710342 - DNA, 857 bp, Homo sapiens
gtcaaccgggccacagacgcggcgtcaggagagagagcggggagaggtgactgcacactgccgcgtccattctcttgaattcccacaaagactgttattgctggggctcataaaattatactccaaagtatggggctggggcatccagagtgctttgaactaaaggagactgaaggccccagaagccaagtttccctctgaccttctcctgccttcctgtcttccaccccctacttttcccctgaagtgagtcctggaaaccagaattcttcttgcccaaagcaagccggggcgccctggaaatatcactctaaccttccttgcctttccgtgtggcagctggccatgaagaaattctctgacctaccttgtttgatagcagatcacaagaccctgggtccagagcggtcttgctttacaccgagggaaaggaatggcattcagaaaggccaagaagaatctgaacaggtgtccaatcacctttggacggggctgcccattcttcattgaacctaagcattaaaatagaccggtggccctggggatttggggcttcatttctgaagactccatggccatggaaacttccgataaatgactggctcctgagaaaaaaaaaacaacggccccgtgggccttagcggaggagctctcgggccagtaccctttacggaggggtaccccatgagcctcagtaactgactcgttgcggtccggccgtgcggcggggggaagcggcctcaagctcactcacagggggcaataacggcgctccacatacctacggcgtacaccccggggaaaacatgggagccaacggcccgcaatagggcacgagccatacaaggcgcgcgttg

SEQ ID NO: 710343 - DNA, 1157 bp, Homo sapiens
ctccgggaccatcttctcggccatctcctgcttctggcgtagcctgaccagcgaccgtttaagtgtgttagctccttctgtgccaagcctagccatgagactcccatgattctgtcagagatttgattcgcaccgtacgatgtaggcgagccgtctaaccaggtctggtcagatttgtagcctgcagggcctccttacaccgtacctctctctgggcttctattgtcgaccgcgatcgatgtagtgctctggtacaggcagatgagccacatatttcttgtaccgcgtacattagggcgctgccacgtgagatcgcgggcgaagtgggactttcaccagaaggcgttactcctcgagcatggtagtgctaaaaaagccactaggtcggttgggctggggtcaggcgcccttctgcgttgccccggagtaccattcaagaaaagtcgcaagctggatatgactagacggtggggggcctaatggagcccctcaagtaaccagacacacctaggaagacggcgtggcactattgaggcccccactgggtaaggaacacctaaaagcgctttgattaatcgcaaggagtccccccttgttagagcgcagtacgttatccaatggccacccctgggcgctttcggtagcccccggcgaaccagggcacacgcatccaattcattcgtagatgaaacttttcccggtggagtaggcatcggtccaacggtttccccataaagaacctcgaaaggagaaaaagggtagatagatcgcatttaacatccacatgcgtacacggcaaataggtggggtttagtatcacgcaacccagttggaaggcctaatatacacacggtgcaccaaacgcacggggcccctggcgcgtatggtgaaccaccgcgggtagagagcgtagtggccgttgtgcagtacggaatgggtattcactgcatgtgcggcatcaaggggtcctcgacacgtcttcaactatgaacaccgcggaactgtaatgacaagacccgttccgtggaaggcccccaaacggaaccctattcgttggaaaagagcggcacgcgtgtttcacaataggctactaaactatgcgtggaatttccgttgtccgcgttacacgcatggcctggcgattcacgcatgccaag

SEQ ID NO: 710344 - DNA, 1296 bp, Homo sapiens
cctagaggcaagaacggcacgtgctcatcaagcatactgctgacaacagaatgcatcttccccagagaaacgccaacgggctagacactactggtgcctctgtatgccacctgcaaaagcagcaacgtttctacaacaagtactgaggagcaacgagctggacgacagagtatgacaacatgcagcaagaaggctggctgcgacgcactgccgcgacacacaagaactgacacgacatctcaacgaaaaccttgcctcctggcctaggcaaatagaggacaaccatgatgcaacgaaaatcaagctggacgccagggctcaaccaaagaactcaagattgagccgtatcccagcttttcccgccaccagcaactgaaccccgaaaattcaaaatccaaacaattccgtaaaagaaacccaagggcagggaacacttattaaaggggaacacgtgaaaacccttataacgacttcgcttgaaaaggcgtaacgtgaaaaaaaaggccaagatcccgtatccaattctatcccagtggtccccccagaaggagtgggactttacaaggggggaactggcttacccaagtgtgggtagtaacaggcccccattaatcaaaccgccattgtttcccccataaggggcaaacagcgcacatacaaggaaacaccacttttctggcacgtggaacaagcccaaggcatttgtccgttaacccacttacttgtttggcccccactatttgggccaaaccaagagcaaaaagggctttggaccaacgcaaccctgtccccaatttacacaacccggaaaaccccccccagttaaagagcaaggcaacataattccaacttacctggcaaaggggaaaggcccgaaaaggaaaaacgcggacatttgcgcacttacattataaacaccccctctgggattataacacccactattcccgaaagacaactccgtttatcaatgcgtggaaagccgaaaaggaaattcatcggccaacggaaaggaaacccccccaagcgaaggaaacgattccccggggtaaaccgtggtgcaaagagcgcccagaagaagaaacccggtaggtcacaccgggggcacctgtggagtgaaccccttgtgcaaacaaaagggataacaaaggcgcaggcaaagccctagtgacaagcgggccatttgcaatgaggtcaaacccctcccggaaaggaaaccacatatgtgcccacccccgacatattaacccaccagaattttcccgataccaggcacaacgggtttgaaaacccttg

SEQ ID NO: 710345 - DNA, 467 bp, Homo sapiens
  misc_feature (3)..(3): n is a, c, g, or t
  misc_feature (5)..(5): n is a, c, g, or t
ggntncccttgtctctaccagaaaatgaaaggaattgaaattaagagaaggaagagattgaagtatgtgagcaagattggaaggagaaagaggttgagggttagtgagggaggttggagaagagagaaaaacaggccacttaccagatttgaaattggtgagatgttccttgggctggtcagtctgaggacctgaggtcgtaggtggatctttctcacggagcaaagagcaggaggacaggttattgatttcccaagggaggtcccccaatccgagtcatggcatcaaattttacgtgcgtctgtgtgaagagaccaacaaaaaggctttgtgtgagcaacaaggctgtttatttcacctgggtgcaggcgggctgagtctgaaaagagaatcagtgaagggagatggggtggggtcgttttataagatttaggtaggtaaaggaaaattacagacaaagggaaaca

SEQ ID NO: 710346 - DNA, 84 bp, Homo sapiens
aggtgatctagaggatccctgatatgctgttcaacaaaaaagaaaaaaagaaaagaaaattaaaatttgtttgtttttaaattt

SEQ ID NO: 710347 - DNA, 157 bp, Homo sapiens
actaaaatgggagtgaggaataggaggagtgtgtgtataaacttgtatagttatatgttgtgttaggaagtgagggtgacagtttgtacatgaagagtacccatttgtttcagtcatgtgtgtgattgtttggctcttgccttgtggttaagactgt

SEQ ID NO: 710348 - DNA, 268 bp, Homo sapiens
cctctggtggatgtggagcgtgctttttagtcccaggtagttaggaggctgaggtgggaggattgcttgtcgctgggaaggtcaagactccagtgagctgtaatccgcgccactgcactccagcctggacaacagagcgagaccctgtcttcaaaaaaaaaaaaaaaggtgattttttttccctttgttttttaaaaaatatacaattgacagattcaatctggggaaactgggattagattcgcccccaggcattatacaggtacaa

SEQ ID NO: 710349 - DNA, 222 bp, Homo sapiens
ggccttgacgcactgacgtggggatgcgtgagttcctcaacgtatcggctagtgggctcccaggaggacttggcatcatggggtcatgagtattttaggcatctggcaggagaagtggctacggagtgtcagagagctggatgacgcaaagaaggtccagcgggagcctctgttcactctggtgacatggcacacatcgtcccctcataacagggccctgag

SEQ ID NO: 710350 - DNA, 524 bp, Homo sapiens
agagatagaaagaggggaccctgacgggcgggcgcgcggccaagcctttctgctgtaggtctgtgtggaaagtggacaggacgctcacccgcctgtattccctgcttctgaccctgctcgggtaccaataccaacgggacaggagctgaccacactccggtagccactactgcataaagctgtcccctcctgtgaccagctgaggacctcaggctgtagcgtggccatgcccagatacacggtgcacgtacgtggcgtatggatggcaatggccgtgcaggacgcgcaggtcaatgtggacatgctgggcacggatgcctataggcgctatatcaagaataagctctgcaacagccgatatacctttcggggtgactcgcactttcatgtgccgcggagcaaaggcatgggcctttggtcaactaggaccgagtattgatggcctatcacccagttcggcgatttgtaatgacggtgatgcaggggtactgcttcatacatctgaccggggggttcttatcggg

SEQ ID NO: 710351 - DNA, 148 bp, Homo sapiens
ctcaggcaggacaatctgtaggaattctacatcttgcctccagtgtgcatatttagatgaatgatgtcaattgccagctccctcataaaggccatcctcagagtttctctcgcgtatggctagaagtcacaatcttcccatagcaggc

SEQ ID NO: 710352 - DNA, 247 bp, Homo sapiens
tccacctccagcacgcgacttctcaggacgacgaatcttctcaatgggggggcggctgagctccaggcaccccgcagtcactttctatgtaacaacttcctttgatgacatcgtaacctgacacagtgtttatgacgtgtacatacatatacttattacctcattcagttattcttcgaaacaaagccctgtggaagaaattgggaagcttgaagaagcatcaaagtcattctgttaagctgcttca

SEQ ID NO: 710353 - DNA, 160 bp, Homo sapiens
tagtacaactctttctctttttccttcagacagagtcttgctctgtcacccaggctgcattgcaatggtgctatctcggttcactgcaacctttgcctcccaggttcaagcaatttctcctgcctcagcctccgtgacttgctgaattattctccagggt

SEQ ID NO: 710354 - DNA, 776 bp, Homo sapiens
tgtgtgtgtgtgtgtgtgtgtgtgtgtgtgtgtgtatatatatatgcatcaccagagaaataaaattataagaaaaatacacagcaggcgtggggccgagggtgtggtctcgatgcggtgtgaatcctacacattggaggaagagagccggaggcgggtggtgcgtcgcgcctggatgctcgaagggagttcagagaccagctgctggccacaatgaggtggatgaaagtagccgtgctctactaaaaactacaaaaattgaagctggcgcggtgggtggtatatacccattacgtccccgagaatacctgcggaggaggagcgtgggcggcggaggaagaacaatcaacgaagcaagcccgccggggagcgagcggagagaggcggcagcgacgatctgacgtgccgactgagtgcggccggccaacgtggcagactgaacgacgccgtgtggatcgacgacgaagtagcacgaccttcctcccgaggtcggtcttcagagagagagtccaacggtcggcaggcccgcgaggggcggctgtccgagggcacataagaagggtggggcaccaaccaattaagggggagaacctcctatccttcctacacacaaataatatttctaccaagaaacttcttattcattctcacttcaataactccttcactactacagacagcgacaaaaaccacaacggttggccgccgaataaattactatttggcggcgggacggacgaccagagtatcctcccctatggttgccccagggtgtg

SEQ ID NO: 710355 - DNA, 104 bp, Homo sapiens
ccccaccagtttcgcccacgtcacctcgtcgaacttgtccaccgccaccggcatcggcgcgcagaacaccggcatcaccgtcggcgccggcaacctcatcccgc

SEQ ID NO: 710356 - DNA, 379 bp, Homo sapiens
  misc_feature (62)..(62): n is a, c, g, or t
acccggaagccggccgcggagagagagaggaagaagggagggagggacgcctacaggagtgngggaaaggcaacaggaaaaggagggagggttcgctgcgaaccgacaataactgtgacaccacaggcatgtgcggagtccccgcccccccaggcactgtgccaaggccagcacctacatggcatgagaccctctcagcaactctgtaaccttgtccccaccagaacattccttgcacagctgagaaaacaacagcacagagaggatgaattaaaaattggccaacacgctgggcgcagtggctcacgcctggaatcccagcactttgtgaagatgaggcaggcggaacacaaggtcaagagagcaagaccatcccggc

SEQ ID NO: 710357 - DNA, 446 bp, Homo sapiens
tactccttttttttaggcatgtgtagtgtatagcagacagattgtaagaatatataataattgatctattcccacttaataaatttttttagttgtttccattttcaattacagaaaattctccaataatgaacttgtatatatttgccattttctacatgtgaagtctatgtgtctgaaggataaagtcccaaaagtgggattgctaggtaaaaggacataagcatttgtaataatgatggatattgccaaattacttactatgaaaattatagctacttatactccctcaggagcaatatgtctatttcctcacgatattgccaactgagtcttatctaacttttgatgtttgccagtctgatagatgaaaaatgtgtcctctaagtataatgtactattcttattatgagtgagttgaacatcttttgaatatgtcaaagcca

SEQ ID NO: 710358 - DNA, 281 bp, Homo sapiens
ataaacgactaagttatactaaaatctgtatgactcacaataatccatatgaaaggtctgtattctactatgtggcactcttgtggatccctatagtaatagtcaccgataacttttggttctgtgtcatgtaccaccgttagatgagcagcaggttatgagcttaaactcacctttccagggtcctataggtgataacgataagaatccaaaactgatagaatctagtactctactaacagcattactgataattagtgcaacatcaagcttgccataca

SEQ ID NO: 710359 - DNA, 1682 bp, Homo sapiens
  misc_feature (252)..(252): n is a, c, g, or t
  misc_feature (258)..(258): n is a, c, g, or t
atcatgaggtcaggagttcaaggagcagccctagccaacgatggtgaagaccgccgctgctctaggtaaaaagataactaacaccagattcaggctgggtctggatgggcgatgcggcctgtgatatcccagctgagctcgggcaggttgaggacaggagcacatcgcttgaagatccaggcggatacgaggttgcagctgcagccaagatcgcgccactgcagtccagtgctcagacaatgaggagtcgangacgtngtgcgtcaaaagaagagaacacaaaagacaaaaaagtaggcatgccctagattcctagaaacttacccgcgataagatgtctattgtgcaatacggtgtcggccatattagagggaactagatcatcgagacgaggggattctagagccatcctaggtggtctttgcgtgaaccaatatgagcgctgtgcgcggtggcgatcggcgtgggagggaggcgatcgcgcgatgtatgcttgctatggggccgattggatcccacgcatatgagatccacaacgagagagtccgagataaggaacgagggacaataatggcactgggggcattaataacgctcctcgcaagataggggtatacaagcgggcgctcataggggcgcccatagttccctgttgtgtccataggcggccactgtctctgattggctttgggtcgcaccgataccataagggggcccatactagggctgcgggctacccccccgtggggcaataagagtgaacatcggcagggtgctgaccaagcaccgggggggtccaaacgctgtatgaagggttgaaaccccacttcttggggaggaacgtgcccgtgattgtgttctgttcccccacaaaaatgtgccccctgggcctgaaacatttcttgggggaccactgggagcggggggacaggaaaaaacggggatttcggcaccctagtgttttgcatccccaagggattcgctaacactcggaaatagggagcgcaaagaaacacaacaaagcgaggaatatcgagaggcggaccccgaataacaggaggaaccagcgaagaaggcgggccgagagcaacaaacgcggggcggaatgggaagacgacacatagtgtaccccccacgtccgtattaggtgtaaaaccaaggacacacatgattcgacgaacagagaggagaatagagacgaccttatacaacagggagaagagaagagcccacaaaaggagcgacccaaaagagaccaggagcaaagagccgacgtagcgggagaaaaacaagaacaacccgagcggagcagagagcagccaagccaaacagcacacacaaaaaaagagaggtagacaccccacaagacaagagaggggcacgaacaaaaacacaccaaaaaagagaggaggcggagcagagaaacacacaaaagggaggacgacacaaaagagcaacgagtagaagaacagagggaaccacatcgacgacaaaacaaacaaagcagctaccgaccgacacacactcagaccaacagcgccacaaccactagcgcacaagcacaagaggaagagccgagcgactacacacaaccaggcgaacaaagagaagactagacacggtgactaggaagcaaacggaggacactaacaaaacgaccacaaccagaatagcagatagga

SEQ ID NO: 710360 - DNA, 105 bp, Homo sapiens
gaagatgacccagatcatgttatgagagcttcaactgtgccctgccatgtactgttgccatccaggcctgtgctgtccctctacgcctccggcaggatcacctgg

SEQ ID NO: 710361 - DNA, 121 bp, Homo sapiens
ggttacatgcgtgcatggaggtcgacgtgtatacacctactgcgatgctatgcctccctgtacaagtccggtcgacacgtgagcaccgtgctgacctccaaatatcgtaaagctggagcct

SEQ ID NO: 710362 - DNA, 408 bp, Homo sapiens
gctatgctcaacgcgttgcggagctctccatataggtcgacctgcaggcggcgcgaattcactagtgattgggagctgagatcgcacctggcacctacgtgtaactagtttgaggaagcagtaaactgtattccacagtggctacattgtatttatattcttgcagcggtatactaaggttcccatttctccaaaccctcaccaacactttttgtatactgatgatagccatcctaatttgtgtagagtaaggtacagcatctcatttgttttgattttgcatttccctattgagtagtcatagctgagcatctttttacatgcttattgaccatttgtatacattcactggagaaatgtctattcaaatactttgcctggtaattttatttatattttttttttttc

SEQ ID NO: 710363 - DNA, 441 bp, Homo sapiens
gtaatcttggtcaagatatctaatccccagattccatctgctcatctgttaaaactaaatggttttcctgggaactctgactctggccacaagatcaagactgacaaatttcctttctctgtttatggagggagacttcacaacattcactgaaagaggagcaaaggacctggtttttgccatgactggctttggccccgtccatgaatgcccctatggcggtggaaaggggatagccaaaagagcagaaccacaaatggggtattatgacaagtgttcaatgaaggaaacaaaatctagggcacgatccaacataggacaccatctcagcatgttatgtcatttgcccacccaagtaaagcatttcttagagttatctggcacattggcaactaagagctttttgtgaataaagcctgtggccaccacgttaactgtaaa

SEQ ID NO: 710364 - DNA, 341 bp, Homo sapiens
gacgtcgagaccatcctggctaacacagtgaaactccgtctgtactaaaaatacaaaaaattagccgggtgtggtggcaggtgcatgtagtcccagctactcaggaggctgaggcaggagaatggcgtgaacctggggggcggcttgcagtgagccgagatcgcaccactgcactccagcctgggcgacagagcgacactccgtctcaaaaaaaaaaaaaaaaaaaagttttccttattctctttcataattttatgaggagaatatgcacttatggatattcactcacggatcaatccttccagatgagcctgttaattttgattatgcacattgtcgac

SEQ ID NO: 710365 - DNA, 771 bp, Homo sapiens
  misc_feature (41)..(41): n is a, c, g, or t
  misc_feature (52)..(52): n is a, c, g, or t
  misc_feature (75)..(75): n is a, c, g, or t
  misc_feature (107)..(107): n is a, c, g, or t
  misc_feature (161)..(161): n is a, c, g, or t
  misc_feature (166)..(166): n is a, c, g, or t
  misc_feature (171)..(172): n is a, c, g, or t
  misc_feature (174)..(174): n is a, c, g, or t
  misc_feature (189)..(189): n is a, c, g, or t
  misc_feature (195)..(195): n is a, c, g, or t
  misc_feature (463)..(463): n is a, c, g, or t
  misc_feature (466)..(466): n is a, c, g, or t
  misc_feature (482)..(482): n is a, c, g, or t
  misc_feature (499)..(499): n is a, c, g, or t
  misc_feature (510)..(510): n is a, c, g, or t
  misc_feature (523)..(523): n is a, c, g, or t
  misc_feature (544)..(544): n is a, c, g, or t
  misc_feature (550)..(551): n is a, c, g, or t
  misc_feature (554)..(554): n is a, c, g, or t
  misc_feature (558)..(558): n is a, c, g, or t
  misc_feature (560)..(560): n is a, c, g, or t
  misc_feature (572)..(572): n is a, c, g, or t
  misc_feature (584)..(584): n is a, c, g, or t
  misc_feature (591)..(591): n is a, c, g, or t
  misc_feature (599)..(599): n is a, c, g, or t
  misc_feature (604)..(604): n is a, c, g, or t
  misc_feature (621)..(621): n is a, c, g, or t
  misc_feature (633)..(633): n is a, c, g, or t
  misc_feature (644)..(644): n is a, c, g, or t
  misc_feature (646)..(647): n is a, c, g, or t
  misc_feature (669)..(669): n is a, c, g, or t
agcggacagaagtccactcattcttggcaggatggcttctnatcgtctgctnctcctctgccttgctggactggnatttgtgtctgaggctggccctacgggcaccngtgaatccaagtgtcctctgatggtcaaagttctagatgctgtccgaggcagtnctgcnatcanngnggccgtgcatgtgtncagaanggctgctgatgacacctgggggagcccattttggctcttggggaaaaacccagttggaagtctgggagagcttggcattggggctccacaaacttggaagggaggaacatttggttagaacagggcattattcccaaaggttgggaaataagaacacccaaaattctttacctgggaaaaggcccctttgggcattcttccccatttcccatggacgcaatggagaagggtgggtgatttcacaaggccaaacgactcccggggcccncgncgctacaccattgccngcctgctgagcccctantcctattccancacggctgtcgtnaccaatcccaaggaatgaggnacttcnnctncagngnacctgaaggacnagggatgggatntcatgtnaccaagantattncatttttactaatgcantgttttcacctnatatgctatgntnnaagtccaggcagagacaataanacattcctgtgaaaggcactattcattgcggacaacgagctgtgccgtcaaaggcagtggaagcagaggccacgctgagagccataacataactcggggtgg

SEQ ID NO: 710366 - DNA, 983 bp, Homo sapiens
  misc_feature (177)..(177): n is a, c, g, or t
  misc_feature (181)..(181): n is a, c, g, or t
  misc_feature (195)..(195): n is a, c, g, or t
  misc_feature (215)..(215): n is a, c, g, or t
  misc_feature (276)..(276): n is a, c, g, or t
  misc_feature (281)..(281): n is a, c, g, or t
  misc_feature (284)..(284): n is a, c, g, or t
ggccgcctcgcacccggaacaacaaagcaaggaagacggagtccgagcctcgggggctcctagcaacgggccggggcgggagttccatggagactggggagcgcgcccgtctcatcctcatccttgtcctccagcttctccttcgcatccgacgcaaccggcagcagcgctgccgcngcgntcctcagccaccgntccctcttcccacggatgtngatctttcgtggtggaaagctaaattttaaaaccaccccaatggatgcagacagtgatgtngcatnggncattctaattacaaatgtagtctgtgtattatcagaacaagatgtcatttaacacttaaggacgattgcttcggacaggagcacatgtacttgataaccgtgatgtaggaaaagtattcaatgacagcttagacaaacctaggaacttacagctacaatttggtcctcaggaacacacttcatttgcactggagcaacaatgtgaagaaagaaagcctaaacttgggtgccgagacgcttatgcccgtaagtcgtgcagaaacgtaggttatcaggtcactatctaccagattctaagggaggtaaacagttctggcagtggtgtaaacatgccatttggaactcccgtttgccagacatttcacaaaagaaacaactagacctccatggccagtttaacggaaccctgaactttcattcctaactgtgtgctacatcgggatcaaacttcttctaaagaggcttacattacgaggacttattctaccaacacagggaaacgtatttcacagggatacaaaggggtcccaaatgttcaaaccgctgttggctaatggatgattggacaccgaattgccccacatcatggaggagtcggacacgcatccgcacagcaagttgcaataaaatcccgaataaaagtggaaacaaaaactcgtaaactgaccaccttgtagcacactggattgcacattggct

SEQ ID NO: 710367 - DNA, 706 bp, Homo sapiens
  misc_feature (41)..(41): n is a, c, g, or t
  misc_feature (52)..(52): n is a, c, g, or t
  misc_feature (75)..(75): n is a, c, g, or t
  misc_feature (107)..(107): n is a, c, g, or t
  misc_feature (161)..(161): n is a, c, g, or t
  misc_feature (166)..(166): n is a, c, g, or t
  misc_feature (171)..(172): n is a, c, g, or t
  misc_feature (174)..(174): n is a, c, g, or t
  misc_feature (189)..(189): n is a, c, g, or t
  misc_feature (195)..(195): n is a, c, g, or t
  misc_feature (398)..(398): n is a, c, g, or t
  misc_feature (401)..(401): n is a, c, g, or t
  misc_feature (417)..(417): n is a, c, g, or t
  misc_feature (434)..(434): n is a, c, g, or t
  misc_feature (445)..(445): n is a, c, g, or t
  misc_feature (458)..(458): n is a, c, g, or t
  misc_feature (479)..(479): n is a, c, g, or t
  misc_feature (485)..(486): n is a, c, g, or t
  misc_feature (489)..(489): n is a, c, g, or t
  misc_feature (493)..(493): n is a, c, g, or t
  misc_feature (495)..(495): n is a, c, g, or t
  misc_feature (507)..(507): n is a, c, g, or t
  misc_feature (519)..(519): n is a, c, g, or t
  misc_feature (526)..(526): n is a, c, g, or t
  misc_feature (534)..(534): n is a, c, g, or t
  misc_feature (539)..(539): n is a, c, g, or t
  misc_feature (556)..(556): n is a, c, g, or t
  misc_feature (568)..(568): n is a, c, g, or t
  misc_feature (579)..(579): n is a, c, g, or t
  misc_feature (581)..(582): n is a, c, g, or t
  misc_feature (604)..(604): n is a, c, g, or t
agcggacagaagtccactcattcttggcaggatggcttctnatcgtctgctnctcctctgccttgctggactggnatttgtgtctgaggctggccctacgggcaccngtgaatccaagtgtcctctgatggtcaaagttctagatgctgtccgaggcagtnctgcnatcanngnggccgtgcatgtgtncagaanggctgctgatgacacctgggagccatttgcctctgggaataaccagtgagtctggagagctgcatggtctcacaactgacgaggaatatggagaacggatatacaaagtggaaatagacaccaaatcttactggaaggcactggccatcttccgattccatgagcatgcagaggtggtattcacagtcaacgactccggcccncgncgctacaccattgccngcctgctgagcccctantcctattccancacggctgtcgtnaccaatcccaaggaatgaggnacttcnnctncagngnacctgaaggacnagggatgggatntcatgtnaccaagantattncatttttactaatgcantgttttcacctnatatgctatgntnnaagtccaggcagagacaataanacattcctgtgaaaggcactattcattgcggacaacgagctgtgccgtcaaaggcagtggaagcagaggccacgctgagagccataacataactcggggtgg

SEQ ID NO: 710368 - DNA, 139 bp, Homo sapiens
gcctagaagcacctgaatcacacttttccctcatctcctttccagcgttccaatccacatgactgccttattcccaaaccctgggacccaaggcacattcacaaaacggagagccaggcattgggattacttaagataa

SEQ ID NO: 710369 - DNA, 516 bp, Homo sapiens
  misc_feature (254)..(254): n is a, c, g, or t
  misc_feature (256)..(256): n is a, c, g, or t
  misc_feature (259)..(259): n is a, c, g, or t
  misc_feature (262)..(262): n is a, c, g, or t
  misc_feature (266)..(266): n is a, c, g, or t
  misc_feature (269)..(269): n is a, c, g, or t
  misc_feature (271)..(272): n is a, c, g, or t
  misc_feature (277)..(277): n is a, c, g, or t
  misc_feature (280)..(280): n is a, c, g, or t
  misc_feature (283)..(284): n is a, c, g, or t
  misc_feature (289)..(289): n is a, c, g, or t
  misc_feature (292)..(292): n is a, c, g, or t
  misc_feature (296)..(296): n is a, c, g, or t
  misc_feature (313)..(313): n is a, c, g, or t
  misc_feature (319)..(320): n is a, c, g, or t
  misc_feature (337)..(337): n is a, c, g, or t
  misc_feature (347)..(347): n is a, c, g, or t
gctcgacgtgaaccagacactgtctgcaatcccggcacctccggagccgaggctggcggatcactcgcggttaggagctggaggccagcccggccaacacagcgaaaccccgtctccaccaaaaaaatacgaaaaccagtcaggcgtggcggcgcgcgctgcactcgcaggcactcagcaggctgaggcaggagaatcaggcagggaggttgcagtgagccgagatggcagcagtacagtccagcttcggctcngnatnagngggngangnnggtgnggnagnngaggnagngggngagggaagtccaggatnttcttnngtggtgatgaaaatgtnttcgaactanatagaggtgggtataacattatgaattaactaaataccccgaattgtgaactttagaaataattgaattttatatttggtgaatctcacctcaattaaaaagaaaaattagaaaacggccaggcatggtggctcatgccggtaattgcagcgcttgggaacgccacggt

SEQ ID NO: 710370 - DNA, 515 bp, Homo sapiens
cacgcctgtagtcccagcactttcggaggccgaggcgggtggatcacaaggtcaggagatcgagaccatcctggctaacacagtgaaaccctatctctactaaaaatattctttaaaaaattagctgggtgtggtggcaggtgcctgtggtcccagctactcgggaggctgaggcaggagagtggtgtgaacccgggaggcagagcttgcagtgagccaagatcaagtcactgcactccagcctgggcgacagagcgagactccatctcaaaaaaaaaaaaaaaaaaaaaaaaaaaaaaaagaaatgtaagaactggaagaaaattcaggaggcatttttaaaaataatttttaagtggaaaagatatttctaagcaagacacaaaactcagaagcccgaaaaggaaagactgatgaagttgagtacatgttcatttgtggagaacaaacatacagttaaaaaaacaaaactgggccgagagttattcatgcctgtaatcccagcaatttgggag

SEQ ID NO: 710371 - DNA, 166 bp, Homo sapiens
aaagaaatacaggaatccaaattggaaaggaagaagtgaaattactcattatttgcagatgacatgatactatacctagagaaccctaaagactctaccagaaaactgttagagctcatcaatgaatttgacaaattcacaggatacaaaattaatatacagaaat

SEQ ID NO: 710372 - DNA, 446 bp, Homo sapiens
  misc_feature (232)..(232): n is a, c, g, or t
  misc_feature (276)..(276): n is a, c, g, or t
  misc_feature (329)..(329): n is a, c, g, or t
  misc_feature (431)..(431): n is a, c, g, or t
gatctagagatggagtctcacactgtagcccaagctggagtgtagtctggtcactgcaacctccacctcccaggttcaagcgaattctcctgcctcagactcacgagtagctgggactacaggcacgtgccaccacacctggctaattttggtacttttggtagagacaggttttcaccatgttggccaggctggtcttgaactcctgaccttgtgatccacctgcctcggnttcccaaagtgctaggattaccggtgtgagccagcactcccggncttcctagaccagaatttatgcgggctcttctaagcccatttctcaactaggncccaagaatgccagacgtgaatagcccaatgttagcaaagtcctgcttatcagtttagtgagaaccctccaagctattatacatctgatcaaattcctcatntcccccgattccatc

SEQ ID NO: 710373 - DNA, 103 bp, Homo sapiens
gtatcgtttttatggtttgctgggcgcctgggtggtactgctcaactttagttccaatatggcaggttgggtgggtgggggcttgaatctggccctcatcatc

SEQ ID NO: 710374 - DNA, 223 bp, Homo sapiens
tgttcagctcggacccagatttctccttcaaacccaggtttcttacctagtataaatttccttaaaatgtgactatttcttcactataccctgataaaacaaaaaaggaatcataccaacagttcatattctgactctgcaccttagaatatgtgaggcagacaagtcattccatttattcaggctgatttcctaatattataaaaatgagggtaaagttaga

SEQ ID NO: 710375 - DNA, 878 bp, Homo sapiens
  misc_feature (581)..(581): n is a, c, g, or t
gtatggaaacagtgataggcagtgctgtatacaatatactctgaaaagtagtgggggtcaccaaagaatattttaacaagaatatagaagcgtcttcaaggaacatctttaagtgtagtactcttgaggaacatgattataaatgataatcatgtctgataatcaatttttatccagtccttaactatgtaaaagccgtatcagtagaaataactgtgctggtgtcgtgtctaacagatggtctaaattacttatggaattatatctttggagaccaacttgtatgcaggcagagtttgccgtcgtacgagcttggaaccagaagaaaacttcactctagatttcaggtcctaacaggcgtatgtctctacattttgccaggggtaaagtgacttcagagatacagcagtggatgtctgtgtatctagtagaatattgtgctagcgatctaagaaaacgtggatttgagccttcaaattgggccgtttctcaagttgtctagttgaccttagtacaattgacgtgtccactggctttccttttgttatgcccatactgaggaacttaaactacagctctanaatgtctgtggttcaagattctggatgcttatatactactattaagaagtaggaaccccctcaaatagtaggggagaccaggtaatattggaattacatggttttttatgcaggatttggtgccaccggtgaattgatcaggaaatcgatacaaccagtgggacaccgctccgtctgttgttcactaattcgcgtaaagtgtgaaaggctgacgcagggaacgcttgttgaaggggtggaaagcggtgaaatttaaaacttggtgacagggggattggtgcccagtttgagaggtct

SEQ ID NO: 710376 - DNA, 161 bp, Homo sapiens
cgatgcacgcggcgccaccgatggcgtcgtcgtcagagtctgaggatgactcgagaggtgagacaaagggaggacccggtaggttggaacttccagcatttggtgtggagtcagtgatttccagacaaatttccaacagattactaacgaagaacggaaaa

SEQ ID NO: 710377 - DNA, 383 bp, Homo sapiens
atgcacatcccccattctggtccagtgtccatccattgcagaggggcctgcaggatgctgaaggagctcagagccagagcacaacggggggacctggactcacagagaggcaggacaccttttgtatatctgactgtctaggcgaaagagatcaagatgaatagcaccatgcaaacaagttcgtcagtgccaccattgccacctgagtattgggtgctcaagtgagaacaggggactatgaggaaaggtggggaagcagtaggagaagtgagtggtagaggcaaaccgaaatagggcccacccaggacggaacagctgggtttctcaaacctatagcacgagtgacatctatgagccccgatcaatatccgtctatgcaacga

SEQ ID NO: 710378 - DNA, 1457 bp, Homo sapiens
  misc_feature (828)..(828): n is a, c, g, or t
gtcggcaggttgtctccgcgactgcctccggtgctgtgggtggcggaccgggggtgagacccttctaggaggtgtctgtctggtcactgtccgctaggtcgacttttttgtggagaatgaggttgagagtgctgggttctactatagaccctcttcctgttgtatagtaccgcccacgactgtgctggggtgtgtagtacatgtgtttttcatgctggggggttaccacagcggcggcgctttcctcgcgtgggttgcacaccggggggggtctcataataagttgcgtctcgtcgcgagaacgtgcgtgtgtcagcgtgtgggccacagaccaaggggggcgcaccgacgggggcctaccgttcactatattggggggccgcccagcggggtccactcagttgcctcccctgtggaggcccacctggtggtgttgcctcctcaccgggtctgcgtgcgtatggtcctcttttgtaacgctcggtctgcaggggttgggttcccgctggcggaagattggtccccctgctcctccgcggcgttcttgttaggtgtgggcagtgtgccccccgactttgtggagctgcgcctggtgattgttgtcagccccgcgtggttgctcccgcctcgcactttagacgggcgtctcgtcaagctgcctggggagttgttttgtcgcagccaaccgacggggttattcattttcccggcgcgtaatttttttctcgcgctgcgttgttctgggttgtgagcacacacgcggggggcacacagccccgcatgtcatggcggggcctgtgtttataatagtggggccccctcttgttncgactcgcagggtcagcacacttgtgcccacgacatcgcttcggcggtcacgcccccatttgtgccgagccacgcaccgactcgtggtgcccgctcttcgcttggtttgtttgcaaggtcccccacccttgtgggtggatacataaagggcttccggtcgcacgagctgcctgccccacatggtgtcctgttgtccccggtggagagatgtgttggttgccttggtcgtccttgtgggggaggaccaccccccaccctcccgtcgctccactgtgggcaccacgatccccagcacccagcgcgggggattgttctccaccgcccccccgtggcgaccagcaccaccacgaccccaccacattctggggcttgggggcaccccttcacgtgcttggcctcccaattccggcctctctgggccccggacgtggctgtcgtcctcgtcacccctccgtcggttcttgcctggcaccttttgcccgccttccctcgcggggttgagacccggaggcccgttcacgagatggaccctcggcccgatcgtgttggccccccccccatttttgcgcttacaatccccccttctcccccattttctccttcccactaaagccctttgataacaccca

SEQ ID NO: 710379 - DNA, 150 bp, Homo sapiens
ggctcagtgatctcgcttcttaattctcatgtctggattgattcagaaaacttctgagtgagcttcagacggtagtcacgaaaatgacagattgacaaaatgatgatgtcacaggtccatgaagtccagatgaagcctgctcaagtccaa

SEQ ID NO: 710380 - DNA, 435 bp, Homo sapiens
ggttcgtatctagcaggatacccaaagactgaaagcaaagactaaaataagatgatcaaaaaagaacaactacacgactatccgagaactgcggaaaactaaaaaaggtgtactaaacacactaatgggtaataccagaagacagaaaggaatagaacaaaaatttgaagctctaatgactgagaatatccccaatttaatgtcagacaccaaaccacacattcaggaaggtcagcgaacaccaatcagagactgagtgtgaattggctcacagccaatccaagactggtgtgattagactccttatgcaaataaatgtcctggaatgaaccactcattggccagagtgcaggtctggcccatggtcaatcagaggctgatgtggtttgataccttatgcaaattaaggtcctggaatggaccactcacaggcca

SEQ ID NO: 710381 - DNA, 216 bp, Homo sapiens
cttcccccacaggagtccactcactttctacctaggcccagtcatgtgtgctccttttctgatcccagagccatgccctgataattgaggggtttgtacgttttgattcatgttctatttactcacatgaatgtacttaaaatatgaagaattccatctgaattctgagataccttccagcctgggccgaagagagcctcaggttgactgcagccc

SEQ ID NO: 710382 - DNA, 468 bp, Homo sapiens
cgccgctgggtgggttcgcaggagcagccagttgaccatgagaacgctcgtgtaggcggccgacagcagtaagatcgcgcagcccacaccgaagattcctaccagcggcgcactgctgaaggcagtaatcgaattgaccagttgccccactttctttcccagcgtgtaggtcgtctcgtcacgactgcgcttgacgatggcctgcgcacgctgatcgaagccagtgatgacccacagacccgccatgaacaactcgcgttcgtcgtgctgaatcaacgcgtccacgtagcggcgcgacatcagcctggcgacgacgatattgtcgggcatatccagcccgctgaggaaacggaagagtttgtagaacacctgcccggtccagcgcttgaagtgcttgccttttcgctgctgctggacaccatagaccacatcggccctttcgcgctccatttgctcgctggtcgacgc

SEQ ID NO: 710383 - DNA, 257 bp, Homo sapiens
  misc_feature (5)..(5): n is a, c, g, or t
cgtantggcagcacccaggcagtctgtgtatgaggcatagcccctggacacacattcacacagacacacacactacctggatagcatgtatgcacacacactgcgcgcaacacgtgcatcaccatgaaaagtgccacacgtacgcacacacgcacatgcacagatatgccgcctgggcacacagtataagcatgcccaaatatgcacgcacacgcacagagacatgccagaacatacaaggacatgctgttttgaac

SEQ ID NO: 710384 - DNA, 107 bp, Homo sapiens
gacatggtacaccgtctcacttatccaactgaccggcatttataaatctgtacaggtctttgtagaaaggttataccacgcgctgaatagcgttcaacgttatcccc

SEQ ID NO: 710385 - DNA, 1169 bp, Homo sapiens
ggtgaacgcggagcagcacgccactgaaggcctcgagcacgctaaggatgagtagcaaggtagtgtgtgtcgctgccctagcaccactccaccaaatagccatcacgtccgcccctactagcctgcatgcgcaatgctgttagacgcctaagtacattgtacagtacgactccaatgtctctctgccctgtctgtgcgtgcactatctagctcaatactaacgacgtatctaaagaagcaagacgtattgcatacgaagacggttacttataacctagcggacgccacgcatatgtgtactcgactaggtaaggagtcccatgcggtcaggtgccttcaagaaaacaatacatcgtacaccaccacaccccttagaccccgagcggcttacgcaggcgtgaacaacccttcacctgcgctgagcacttaacataatagaagacatatacgcactctccgtttacctaaagcaactcataacctccaccccagcttgcggcgaccacaagtggaccacaacacacacacacgacaacaccacctagctcatggtctacaccccacaaggagagcaggagacacactgcaacacacaccgggcaggcgagcaaccgcaccccttctaggcagcgcgcaccaacgtcgctccagtgcagaaccagacgagcaggcccgcggtccaacacggaatgaccaaaaaccactcccatacggactcgggacccctttaactaccgcaggtaagggccaaaccgccacagtattggcagccgcgatctgcggcccgcccctaggcacgtccccagactcgcgagtgagaccgacccatcagggggacagagcgtacacagcccaaacaacacatcacccccaaaaccgaccatcagaacggccacaacccatccacacacgttggcaaaacaccggacggcactcggcaaagcaccacagcgcgccaacagcacacagatccagcgcaacggagagaaaccaaaaagtaggcacaagaaacgggcataggaccccgcaaggcgatcaacccaaggtagcaccgctcggcagagccaaaactgtggaccgctacaagccacaacactcctcaacctagccgagacagaagccgacaacatccgcggacaacaacacacacaatccgcaccaacaaaccc

SEQ ID NO: 710386 - DNA, 452 bp, Homo sapiens
ctaccgcacagccggccaggtgaaggaagaggcactgtgctcctcagagcagtcggagaaggggggaggcggaggcgtggaggtggtttgtgtatcttactggtctgaagggaccaagtgtgtttgttgatgtttgtatcttgtaattctgatcggagcatcactactgacctgttgtaggcagctatcttacagacgcatgaatgtaagagtaggaagggggtgggttttagggatcacttgggatctatgacacttgaaaaattacacctggcagctgtgttaaagccttccccccatcgttgtaacttgcagagtttgagctgccaggggaggggctgagagggtgggggttgcaaccccttccccgggaggagtgccattcttgggtcttccatcttagaacttgtttacatgaagataagatactcacttgtcatgaacacaccatg

SEQ ID NO: 710387 - DNA, 198 bp, Homo sapiens
tacactgctttgctggtatcctctcttaggcacctggtggtccccgctacctggagtcaccatattagatgccgagcttagtgcggacacccgatcggcatagcgcactacagcccagaactcctgggctcaagcgatcctcccacctcagcctacccgagtagctgggactacagtgcacgcgccaccgcgcccggc

SEQ ID NO: 710388 - DNA, 264 bp, Homo sapiens
  misc_feature (97)..(97): n is a, c, g, or t
  misc_feature (198)..(198): n is a, c, g, or t
ttagagggtggttttaagtttaagaggtgttacatatccattgcctttgaatcattggagtagggcagaggatttaagtagtttaaaatgggctttnggttttataggtgaataaagttttttaattagtttctttagccaaaagtggatgagtttggcaattgatttttaagtatattatagtaagaaatggctaantggtttgtttcatttcataaacaaactttgcatttagataactattaaaggttgttaagatgaaga

SEQ ID NO: 710389 - DNA, 215 bp, Homo sapiens
ggacagcccccaccccatggctgtcaggggtgggggcagtagtgtctccttcacccctgacagcccccaccccgatggcttccatcgtttagcatcaccgaccactccttgaacccccattatctgatttgtcagaattgttttttgtaacaagaagctaaaaatgaaacacatgtgtctgtggtatctataagaaaaaaaaacaacaaaacaaa

SEQ ID NO: 710390 - DNA, 367 bp, Homo sapiens
  misc_feature (57)..(57): n is a, c, g, or t
  misc_feature (82)..(83): n is a, c, g, or t
  misc_feature (102)..(102): n is a, c, g, or t
  misc_feature (117)..(117): n is a, c, g, or t
  misc_feature (137)..(137): n is a, c, g, or t
  misc_feature (179)..(180): n is a, c, g, or t
  misc_feature (197)..(197): n is a, c, g, or t
  misc_feature (205)..(205): n is a, c, g, or t
  misc_feature (241)..(241): n is a, c, g, or t
  misc_feature (270)..(270): n is a, c, g, or t
cccccccgttccggcccaagggttaaagacggggccccccccccccttccggcccangggtgattttgggggcccccccccnntccgcccaggggtgattcnggggcccccccccgngacccccacgggtgattcanagccgcccccgtccgcccacgggtgaatccggggcccccccnntgccccccacgggtgantttgaggntgcccctgtgccccccacagatgactccaaggaagntcagatgcctgcagtcattaggttttagngtcccatgagccttggtatcaaaaggccacaagagtgggaccccaggggctcccctcccattttgagcttttcctgaataaagcctcatacccctga

SEQ ID NO: 710391 - DNA, 2846 bp, Homo sapiens
ctggactcatttacttttacagttatatcatagacttgctttctggcactggtttcctggaggaaactagcctcttttacggacattacaccattgatgaggtgaaatttcagaacttcacctatgatctgcccctggcgtatttgttaagcacaatcgcctccctggccctgagccttctttggatagtgaaaaggtcggtggaaggattcaaaatcaacctgattcggagtgaggagcactttcagagttactgcaacaagatatttgccggctgggacttctgcatcactaaccgcagcatggcggatctgaagcacagcagcttgcggtacgagctccgagcagatctggaggaagaaagaatgcggcagaaaatagcagaaaggacctcagaagaaacaatacgcatttactctttgagactgtttttgaactgtattgttctggctgttttaggggcatgcttttatgcaatatacgtagcaactgtcttctcgcaagagcacatgaaaaaggaaatcgacaagatggtttttggagagaacctcttcatattgtatctaccgtctattgtgatcacgctggccaattttatcaccccaatgatctttgccaagatcatccgctatgaggattattctccaggctttgagatccgtctgacaatccttaggtgtgtctttatgcggctggccaccatatgtgtcctggtgttcacgctgggctccaagatcacatcctgtgatgatgacacatgtgacctttgcggctacaaccagaaactctacccgtgctgggagacccaagttgggcaggaaatgtacaagctgatgatcttcgacttcatcatcatcttggctgtgacactcttcgtggattttcctagaaagctcctggtgacctactgttcctcttgcaagctgattcagtgctgggggcagcaggagtttgccattcctgataacgtcctggggatagtttacgggcaaaccatctgctggatcggagcctttttctcaccccttctccctgcaattgcaaccctgaaattcattatcatcttctatgtgaaagagtggagtctgctttacacctgcagaccctcccccaggccgttcagagcatccaattctaatttcttcttcctgttggtgttgttgatcgggctgtgtttggcaataatacctctgacaatcagcatatcacgcatcccttcctcgaaagcctgtgggccgttcaccaacttcaacaccacctgggaggtcatccccaagacggtgagcaccttccccagctcgctgcagtccttcatccatggtgtcacatccgaagcctttgcagttcctttcttcatgattatttgcctcatcatgttttacttcattgccttagctggagcacacaaacgggtggtcatccagctccgagagcagctatccctggaaagtcgtgacaagtgctacctaatccagaaactaacagaagcccaaagggacatgaggaactaactagactgagcgtgaagatggtgctgcctgttgcttctaagctgacctagtgattctgctgagcctacagagtctacctgggttttgagtggacatttaaaaatatatttttcttgagtttaggcttttccatatgtgcagctgtgtttacctaacccagcccttaattagggcttcagtgacttagaaaagcaggggaaacccaaggctttgcctgcagaccggccactctgtgacaactctaccaaaaaccaacaagccattcaagcttttacaagaatgaaagagcggagacggtagtttagtatttgagccacgagtttatgtgcacaagtgttttgggttgtggactgaagctcagcctgttaatcagaccagcccatgagtgtataacaaacagaattggaggctggtttcttaaacacacacgtccacattttttagggttgttttcctgtgcttacaatttttaatgcatgtgcctttatttcacaaaacatgtggctgggcgcagcggctcacgcctgttatcccaacactttgggaggccgaggcaggcggagcacctaagttggggagttcaagaccagcctgaccaacgtggagaaactccgtctccactaaaatacaaaattagctgggtgtggtggcacatgcctgtaatatcagctactcaggaggctgaggcaggagaattgcttgaacccaggaggtggagtttgcagtgagctgagatcacaccattgcactccagcctgggcaaaaagagcaaaactctccctaaaaaaaaaatgtagaatatctcttaagatttccgttatggtaaaaaccatatgcaataaatacctcattgtaagcttacccaaaattgatagatgtcaaccttttaacagaagaacagaagtttaagttattgtttaatgtaatcagttttcattttaatatctttgaaatctttttcaaaggactgtagttttgtaatggacttttcaagccttccttccattgtttttcttccgttcactggctccacacgtttcctggggagtagcctggaatttaaagttgggtgcaggttttagaaagctgttgctgttaacaataattctcccggccatctccactccactactcaaaaatgcctgaatccttgctcagaggagcaaaggtatcttctcgtccctttcttacagccattttcttgcttttccacaaagatattatttaaagtggaatatttttgtaactgggataccaatgagcttttcggtcttttcctgacttggtaaggtttatgggtttctaaatctaataactacagtcataccaccctga

SEQ ID NO: 710392 - DNA, 315 bp, Homo sapiens
aaaaaatggggccccccctttttaaatttaaggttttgccctcaaaaaccactcccgggggttttttaaaaagggggggtctttcgcccccaaataaaatgaaaaaaaaattttaaaatggggtttgtttttccttttccaaaaccggggaataggggagggggggggtgaaaaaaagtttttccctttttcaaggggaaaaggtccacttttctttttggtccctttataacaaaaatcccggaggaaacaggttgggtttgtggcccctttgggagggggtccaggaggggaaaaaaacccccttttttttga

SEQ ID NO: 710393 - DNA, 868 bp, Homo sapiens
  misc_feature (6)..(6): n is a, c, g, or t
  misc_feature (13)..(13): n is a, c, g, or t
  misc_feature (15)..(15): n is a, c, g, or t
  misc_feature (18)..(18): n is a, c, g, or t
  misc_feature (21)..(21): n is a, c, g, or t
  misc_feature (24)..(25): n is a, c, g, or t
ggctgntacgacngnganttnggnntcggggcgctggcgggcggggcggggtctgtagttagcggcgagagtgacaggaggacaggggttgtttcggcagtgacgcctggggagtgacgcaattgcacccctgtgcagtgatgtcacggcaggcttatggaagaagaaccagtgtcagatttcgcagttcaggaatgactttagacaatatcagtcgggcagctgtggatcgaataatccgggtggatcatgcaggcgaatatggagcaaaccgcatctatgccgggcagatggctgtcctgggtcggaccagcgtcgggccagtcattcagaaaatgtgggatcaagaaaaggaccatttgaaaaagttcaatgagttgatggttatgttcagggtccggccaacagttctgatgcccttgtggaacgtgctggggtttgcactgggggcggggaccgccttgctcgggaaggaaggtgccatggcctgcaccgtggcggtggaagagagcatagcacatcactacaacaaccagatcaggacgctgatggaggaggaccctgaaaaatacgaggaacttcttcagctgataaagaaatttcgggatgaagagcttgagcaccatgacataggcctcgaccatgatgcagaattggctccagcctatgccgtcctgaagagcattatccaggccggatgcagagtggcgatatatttatcagaaagattataaagtgtgtccagttttgcctgtctataaaagatgatagtaatttaccaagtgacatttgcagagaaacaggtgtacagttatcgttgtacttttgtacaatgtgaattttgttaataaattataaggtttgtttt

SEQ ID NO: 710394 - DNA, 671 bp, Homo sapiens
  misc_feature (509)..(509): n is a, c, g, or t
  misc_feature (671)..(671): n is a, c, g, or t
tatcctgaaaactggaggtgccttcaaggctctcatcgctgctcagtacagcggggtctcaggtccgcgtgctctcgcagaacatcccagcttccattatcggctcatagagccagagcgtcacccctagaagtttcgtcctgcaaatttgccgtagccgagcaggaggtcccgagcatttagagaggtgatgataggacttctcgtgatagttttgaggaggcaaaacagactcgaatgtgcgcgttatcgtagatgagttgtagggcaataattgggacagggaagacttgggccgagggagaataggtataactttctcaagaatggtgtcacggtctaggcacctaggaggtggggttgacatggtgggggctagaggcatttttgctagaagtgtcacgagtgataagtggtcacgcctctaaggccaaggttttaacctccaattaggtggcgggggattgggggggttttatttcccgcgcccgccctaccgagaaaaagcnccccggttttactctcgggggcggggggggcacccaaagatttttccaaaagtttgggtgccaaacctcgaacgaaattcgaaaaaactagagacgcaacgtgtaggcaagttgccaacaagtgagggaaagctcgaggggctgaagttctgggagctgctn

SEQ ID NO: 710395 - DNA, 5806 bp, Homo sapiens
  misc_feature (864)..(864): n is a, c, g, or t
  misc_feature (873)..(873): n is a, c, g, or t
  misc_feature (907)..(907): n is a, c, g, or t
  misc_feature (967)..(967): n is a, c, g, or t
  misc_feature (992)..(992): n is a, c, g, or t
  misc_feature (994)..(994): n is a, c, g, or t
  misc_feature (997)..(997): n is a, c, g, or t
  misc_feature (1001)..(1001): n is a, c, g, or t
  misc_feature (1013)..(1013): n is a, c, g, or t
  misc_feature (1017)..(1017): n is a, c, g, or t
  misc_feature (1036)..(1036): n is a, c, g, or t
  misc_feature (1043)..(1043): n is a, c, g, or t
  misc_feature (1046)..(1046): n is a, c, g, or t
  misc_feature (1052)..(1052): n is a, c, g, or t
  misc_feature (1054)..(1054): n is a, c, g, or t
  misc_feature (1061)..(1061): n is a, c, g, or t
  misc_feature (1070)..(1070): n is a, c, g, or t
  misc_feature (1072)..(1072): n is a, c, g, or t
  misc_feature (1076)..(1076): n is a, c, g, or t
  misc_feature (1078)..(1078): n is a, c, g, or t
  misc_feature (1087)..(1087): n is a, c, g, or t
  misc_feature (1092)..(1092): n is a, c, g, or t
ctggactcatttacttttacagttatatcatagacttgctttctggcactggtttcctggaggaaactagcctcttttacggacattacaccattgatgaggtgaaatttcagaacttcacctatgatctgcccctggcgtatttgttaagcacaatcgcctccctggccctgagccttctttggatagtgaaaaggtcggtggaaggattcaaaatcaacctgattcggagtgaggagcactttcagagttactgcaacaagatatttgccggctgggacttctgcatcactaaccgcagcatggcggatctgaagcacagcagcttgcggtacgagctccgagcagatctggaggaagaaagaatgcggcagaaaatagcagaaaggacctcagaagaaacaatacgcatttactctttgagactgtttttgaactgtattgttctggctgttttaggggcatgcttttatgcaatatacgtagcaactgtcttctcgcaagagcacatgaaaaaggaaatcgacaagatggtttttggagagaacctcttcatattgtatctaccgtctattgtgatcacgctggccaattttatcaccccaatgatctttgccaagatcatccgctatgaggattattctccaggctttgagatccgtctgacaatccttaggtgtgtctttatgcggctggccaccatatgtgtcctggtgttcacgctgggctccaagatcacatcctgtgatgatgacacatgtgacctttgcggctacaaccagaaactctacccggtgagttgcggcgcggtggcgttcggctgtatgggtccttctggaatacagtgctggtcaagagaacagnggttgaagncatgggtttgaactgcatttgcttcgtttcttgntctaggatgagacagagtctggccccatggagtctaaccccaggcacttctgagggcttngaaaccaaggtctgtgctgaggctnanagnttgnatcagctgatgncctnactggagccacaggatctngagttgnggnaattanangtgtctngggagcctngntttntntgcctgctngggtntttcagtttccctcactctctttgatttcagtgctgggagacccaagttgggcaggaaatgtacaagctgatgatcttcgacttcatcatcatcttggctgtgacactcttcgtggattttcctagaaagctcctggtgacctactgttcctcttgcaagctgattcagtgctgggggcagcaggagtttgccattcctgataacgtcctggggatagtttacgggcaaaccatctgctggatcggagcctttttctcaccccttctccctgcaattgcaaccctgaaattcattatcatcttctatgtgaaagagtggagtctgctttacacctgcagaccctcccccaggccgttcagagcatccaattctaatttcttcttcctgttggtgttgttgatcgggctgtgtttggcaataatacctctgacaatcagcatatcacgcatcccttcctcgaaagcctgtgggccgttcaccaacttcaacaccacctgggaggtcatccccaagacggtgagcaccttccccagctcgctgcagtccttcatccatggtgtcacatccgaagcctttgcagttcctttcttcatgattatttgcctcatcatgttttacttcattgccttagctggagcacacaaacgggtggtcatccagctccgagagcagctatccctggaaagtcgtgacaagtgctacctaatccagaaactaacagaagcccaaagggacatgaggaactaactagactgagcgtgaagatggtgctgcctgttgcttctaagctgacctagtgattctgctgagcctacagagtctacctgggttttgagtggacatttaaaaatatatttttcttgagtttaggcttttccatatgtgcagctgtgtttacctaacccagcccttaattagggcttcagtgacttagaaaagcaggggaaacccaaggctttgcctgcagaccggccactctgtgacaactctaccaaaaaccaacaagccattcaagcttttacaagaatgaaagagcggagacggtagtttagtatttgagccacgagtttatgtgcacaagtgttttgggttgtggactgaagctcagcctgttaatcagaccagcccatgagtgtataacaaacagaattggaggctggtttcttaaacacacacgtccacattttttagggttgttttcctgtgcttacaatttttaatgcatgtgcctttatttcacaaaacatgtggctgggcgcagcggctcacgcctgttatcccaacactttgggaggccgaggcaggcggagcacctaagttggggagttcaagaccagcctgaccaacgtggagaaactccgtctccactaaaatacaaaattagctgggtgtggtggcacatgcctgtaatatcagctactcaggaggctgaggcaggagaattgcttgaacccaggaggtggagtttgcagtgagctgagatcacaccattgcactccagcctgggcaaaaagagcaaaactctccctaaaaaaaaaatgtagaatatctcttaagatttccgttatggtaaaaaccatatgcaataaatacctcattgtaagcttacccaaaattgatagatgtcaaccttttaacagaagaacagaagtttaagttattgtttaatgtaatcagttttcattttaatatctttgaaatctttttcaaaggactgtagttttgtaatggacttttcaagccttccttccattgtttttcttccgttcactggctccacacgtttcctggggagtagcctcttacttgaaggtttttaatatgttttgataactttaataacttcaggtgatgtctgtataatttttaaagtgcagctctctctaacaaatgtgccttacaactcctgattaaacggcgtcttgaaggttttaaaatgtgatcgtgtatactggaattcaaagaggcttcttgtcagcagtcaagtgatgatggaaaactgtaatagtttgtaaagttcctctttgctttttcgtctgctgtgcgtcatcagtccgagccaagggcactattggccagttccgttcaacgaagtggttgctttttttagttccggcaatgagttgcgccggggcggcggcggctccccgcctttggcggctgcgcccgggggcccggcggtccctctcagcttatggaagaagaaccagtgtcagatttcgcagttcaggaatgactttagacaatatcagtcgggcagctgtggatcgaataatccgggtggatcatgcaggcgaatatggagcaaaccgcatctatgccgggcagatggctgtcctgggtcggaccagcgtcgggccagtcattcagaaaatgtgggatcaagaaaaggaccatttgaaaaagttcaatgagttgatggttatgttcagggtccggccaacagttctgatgcccttgtggaacgtgctggggtttgcactgggggcggggaccgccttgctcgggaaggaaggtgccatggcctgcaccgtggcggtggaagagagcatagcacatcactacaacaaccagatcaggacgctgatggaggaggaccctgaaaaatacgaggaacttcttcagctgataaagaaatttcgggatgaagagcttgagcaccatgacataggcctcgaccatgatgcagaattggctccagcctatgccgtcctgaagagcattatccaggccggatgcagagtggcgatatatttatcagaaagattataaagtgtgtccagttttgcctgtctataaaagatgatagtaatttaccaagtgacatttgcagagaaacaggtgtacagttatcgttgtacttttgtacaatgtgaattttgttaataaattataaggtttgtttttttttttaaactctgcagtgttgatttttctctgggttgttttttctgccatgagaccaacaggtcaccagccttgttcaagttacagcaaacgaagctgggccttgtttggtctcatacttaattttcttttatatacatgtttttcttttacatgcatatatatatattttattttattttatgttttttggagacagggcctcgctcttttgtccaggccgggtcacaactcactgcagcctggacctcctagcctcaagcaatccacccacctcagccttccaagtagctgggactacaggtgtgcaccaccacagctggctaattctatttttttatagaggcgaagtctcactatgtcgccaggctggtctctaactcctgggctcagtgatcctcccgtttcgacttcccaaagtgctgggattacaggtgtgagccacttcaccaggcccattttctcctaaaacttcaaggacaaatcattaataatgtaacaggaatctttaggagaaaaaacaatttggtttactgataacaaaagataattggaaacatgagagtatttgagattggccaagcagaactatgaagtccatcaagtaagtcaaagatcatcgtttctgttttgaattgtgggtgataatgggtgggagagtgctacagtctgtatgtctgtgtctccctagaattcatacgatgaaatcttcactctcaagttgatagaaggtggggcccttgggaagtgtgaggtcatgagagtggagccctcatgaatgggatcagtgccttatgaaaggccctagagagatacctcatcctctccacagtgtgagacttcaaggggaagtatgagacttctctgaggaagcagacccttcacaagcaaaatcagccagcactttgatcacggacttcccagcctctaggactgtgagcaataaatgtttgatgtttataagccacccagactgtggtattttgttatagcagcctgaacagactaagacgggggtgttgcttccatcaaaggatgtactaagttgtggattatttgtgaaattgaattacaaccttttccttaaggtcttttaccacctcccccccaaaaaaatcccccaaaactgattcagattttcatactttaatgaaatattttataatttgcaaatttttaagtaatttatgaaaaacctagatcagtggatctcctctctggctgcccattagaatgtcctgtggagattaaacttttttttttcagtttatggaccaagagttttgatttatttagggtggagttcaggatcagaatggtttcagaagctcccaggtgattccggagtgagttggagctgcaagcccctgagctagattataagatgcttctgggaaagaaccacattttaggaatttgcttcccacccagtgccctgcatttaatcagcacctgatgacttggcaggacttgccccaccagggtctggctttgaagggtagtggacaccaggatcctttggattaatcctctgccacctctctcttttcctcaaccgagagtgaatttatgtaattgagtgaaagtctacgaatcataattgtaataaattaaggctgggcatttgtttgaaattagataggataaagccaaaggtttgaacaagttgtggatggtttgtaaaaattaatcttacaaaataaatgctgtgtgtgaacacgttgattaaattcaaaagggtattatttggtttttctgtaaattgaaccttgaaataaaagcacaacaaggttttcttaaaaaaaa

SEQ ID NO: 710396 - DNA, 4938 bp, Homo sapiens
  misc_feature (864)..(864): n is a, c, g, or t
  misc_feature (873)..(873): n is a, c, g, or t
  misc_feature (907)..(907): n is a, c, g, or t
  misc_feature (967)..(967): n is a, c, g, or t
  misc_feature (992)..(992): n is a, c, g, or t
  misc_feature (994)..(994): n is a, c, g, or t
  misc_feature (997)..(997): n is a, c, g, or t
  misc_feature (1001)..(1001): n is a, c, g, or t
  misc_feature (1013)..(1013): n is a, c, g, or t
  misc_feature (1017)..(1017): n is a, c, g, or t
  misc_feature (1036)..(1036): n is a, c, g, or t
  misc_feature (1043)..(1043): n is a, c, g, or t
  misc_feature (1046)..(1046): n is a, c, g, or t
  misc_feature (1052)..(1052): n is a, c, g, or t
  misc_feature (1054)..(1054): n is a, c, g, or t
  misc_feature (1061)..(1061): n is a, c, g, or t
  misc_feature (1070)..(1070): n is a, c, g, or t
  misc_feature (1072)..(1072): n is a, c, g, or t
  misc_feature (1076)..(1076): n is a, c, g, or t
  misc_feature (1078)..(1078): n is a, c, g, or t
  misc_feature (1087)..(1087): n is a, c, g, or t
  misc_feature (1092)..(1092): n is a, c, g, or t
ctggactcatttacttttacagttatatcatagacttgctttctggcactggtttcctggaggaaactagcctcttttacggacattacaccattgatgaggtgaaatttcagaacttcacctatgatctgcccctggcgtatttgttaagcacaatcgcctccctggccctgagccttctttggatagtgaaaaggtcggtggaaggattcaaaatcaacctgattcggagtgaggagcactttcagagttactgcaacaagatatttgccggctgggacttctgcatcactaaccgcagcatggcggatctgaagcacagcagcttgcggtacgagctccgagcagatctggaggaagaaagaatgcggcagaaaatagcagaaaggacctcagaagaaacaatacgcatttactctttgagactgtttttgaactgtattgttctggctgttttaggggcatgcttttatgcaatatacgtagcaactgtcttctcgcaagagcacatgaaaaaggaaatcgacaagatggtttttggagagaacctcttcatattgtatctaccgtctattgtgatcacgctggccaattttatcaccccaatgatctttgccaagatcatccgctatgaggattattctccaggctttgagatccgtctgacaatccttaggtgtgtctttatgcggctggccaccatatgtgtcctggtgttcacgctgggctccaagatcacatcctgtgatgatgacacatgtgacctttgcggctacaaccagaaactctacccggtgagttgcggcgcggtggcgttcggctgtatgggtccttctggaatacagtgctggtcaagagaacagnggttgaagncatgggtttgaactgcatttgcttcgtttcttgntctaggatgagacagagtctggccccatggagtctaaccccaggcacttctgagggcttngaaaccaaggtctgtgctgaggctnanagnttgnatcagctgatgncctnactggagccacaggatctngagttgnggnaattanangtgtctngggagcctngntttntntgcctgctngggtntttcagtttccctcactctctttgatttcagtgctgggagacccaagttgggcaggaaatgtacaagctgatgatcttcgacttcatcatcatcttggctgtgacactcttcgtggattttcctagaaagctcctggtgacctactgttcctcttgcaagctgattcagtgctgggggcagcaggagtttgccattcctgataacgtcctggggatagtttacgggcaaaccatctgctggatcggagcctttttctcaccccttctccctgcaattgcaaccctgaaattcattatcatcttctatgtgaaagagtggagtctgctttacacctgcagaccctcccccaggccgttcagagcatccaattctaatttcttcttcctgttggtgttgttgatcgggctgtgtttggcaataatacctctgacaatcagcatatcacgcatcccttcctcgaaagcctgtgggccgttcaccaacttcaacaccacctgggaggtcatccccaagacggtgagcaccttccccagctcgctgcagtccttcatccatggtgtcacatccgaagcctttgcagttcctttcttcatgattatttgcctcatcatgttttacttcattgcactccagcctgggcaaaaagagcaaaactctccctaaaaaaaaaatgtagaatatctcttaagatttccgttatggtaaaaaccatatgcaataaatacctcattgtaagcttacccaaaattgatagatgtcaaccttttaacagaagaacagaagtttaagttattgtttaatgtaatcagttttcattttaatatctttgaaatctttttcaaaggactgtagttttgtaatggacttttcaagccttccttccattgtttttcttccgttcactggctccacacgtttcctggggagtagcctcttacttgaaggtttttaatatgttttgataactttaataacttcaggtgatgtctgtataatttttaaagtgcagctctctctaacaaatgtgccttacaactcctgattaaacggcgtcttgaaggttttaaaatgtgatcgtgtatactggaattcaaagaggcttcttgtcagcagtcaagtgatgatggaaaactgtaatagtttgtaaagttcctctttgctttttcgtctgctgtgcgtcatcagtccgagccaagggcactattggccagttccgttcaacgaagtggttgctttttttagttccggcaatgagttgcgccggggcggcggcggctccccgcctttggcggctgcgcccgggggcccggcggtccctctcagcttatggaagaagaaccagtgtcagatttcgcagttcaggaatgactttagacaatatcagtcgggcagctgtggatcgaataatccgggtggatcatgcaggcgaatatggagcaaaccgcatctatgccgggcagatggctgtcctgggtcggaccagcgtcgggccagtcattcagaaaatgtgggatcaagaaaaggaccatttgaaaaagttcaatgagttgatggttatgttcagggtccggccaacagttctgatgcccttgtggaacgtgctggggtttgcactgggggcggggaccgccttgctcgggaaggaaggtgccatggcctgcaccgtggcggtggaagagagcatagcacatcactacaacaaccagatcaggacgctgatggaggaggaccctgaaaaatacgaggaacttcttcagctgataaagaaatttcgggatgaagagcttgagcaccatgacataggcctcgaccatgatgcagaattggctccagcctatgccgtcctgaagagcattatccaggccggatgcagagtggcgatatatttatcagaaagattataaagtgtgtccagttttgcctgtctataaaagatgatagtaatttaccaagtgacatttgcagagaaacaggtgtacagttatcgttgtacttttgtacaatgtgaattttgttaataaattataaggtttgtttttttttttaaactctgcagtgttgatttttctctgggttgttttttctgccatgagaccaacaggtcaccagccttgttcaagttacagcaaacgaagctgggccttgtttggtctcatacttaattttcttttatatacatgtttttcttttacatgcatatatatatattttattttattttatgttttttggagacagggcctcgctcttttgtccaggccgggtcacaactcactgcagcctggacctcctagcctcaagcaatccacccacctcagccttccaagtagctgggactacaggtgtgcaccaccacagctggctaattctatttttttatagaggcgaagtctcactatgtcgccaggctggtctctaactcctgggctcagtgatcctcccgtttcgacttcccaaagtgctgggattacaggtgtgagccacttcaccaggcccattttctcctaaaacttcaaggacaaatcattaataatgtaacaggaatctttaggagaaaaaacaatttggtttactgataacaaaagataattggaaacatgagagtatttgagattggccaagcagaactatgaagtccatcaagtaagtcaaagatcatcgtttctgttttgaattgtgggtgataatgggtgggagagtgctacagtctgtatgtctgtgtctccctagaattcatacgatgaaatcttcactctcaagttgatagaaggtggggcccttgggaagtgtgaggtcatgagagtggagccctcatgaatgggatcagtgccttatgaaaggccctagagagatacctcatcctctccacagtgtgagacttcaaggggaagtatgagacttctctgaggaagcagacccttcacaagcaaaatcagccagcactttgatcacggacttcccagcctctaggactgtgagcaataaatgtttgatgtttataagccacccagactgtggtattttgttatagcagcctgaacagactaagacgggggtgttgcttccatcaaaggatgtactaagttgtggattatttgtgaaattgaattacaaccttttccttaaggtcttttaccacctcccccccaaaaaaatcccccaaaactgattcagattttcatactttaatgaaatattttataatttgcaaatttttaagtaatttatgaaaaacctagatcagtggatctcctctctggctgcccattagaatgtcctgtggagattaaacttttttttttcagtttatggaccaagagttttgatttatttagggtggagttcaggatcagaatggtttcagaagctcccaggtgattccggagtgagttggagctgcaagcccctgagctagattataagatgcttctgggaaagaaccacattttaggaatttgcttcccacccagtgccctgcatttaatcagcacctgatgacttggcaggacttgccccaccagggtctggctttgaagggtagtggacaccaggatcctttggattaatcctctgccacctctctcttttcctcaaccgagagtgaatttatgtaattgagtgaaagtctacgaatcataattgtaataaattaaggctgggcatttgtttgaaattagataggataaagccaaaggtttgaacaagttgtggatggtttgtaaaaattaatcttacaaaataaatgctgtgtgtgaacacgttgattaaattcaaaagggtattatttggtttttctgtaaattgaaccttgaaataaaagcacaacaaggttttcttaaaaaaaa

SEQ ID NO: 710397 - DNA, 232 bp, Homo sapiens
gagctatctcattaataatttttattttgataagatgttgaagtgatattttggataatgctaacattttaggcgaaataaaactaatttcacctgtttctttgtaaccttttttttttttttgagatggagtctccctctgtcgcccaggctggagtgcagtggcgctacctcggctcactgcaagctctgcctaccgggttcacgccattcccccttctgtcgtcttctc

SEQ ID NO: 710398 - DNA, 187 bp, Homo sapiens
acggcccccggaaccattgcatcgtgtgtgtgcggtgtgtgcctgtgtgtgcgtgtgcagtgcatttgtgtgctgtgtgctcgtgtgtgtgctgtgtgtgcgtgtgtgactgtgcgtttgtgtgtgctgtgcgttggtgtgtgtgctgtgtgtgcctgtgtgtgcgtgtgtgtgtggggtaccgcgc

SEQ ID NO: 710399 - DNA, 3978 bp, Homo sapiens
  misc_feature (6)..(6): n is a, c, g, or t
  misc_feature (13)..(13): n is a, c, g, or t
  misc_feature (15)..(15): n is a, c, g, or t
  misc_feature (18)..(18): n is a, c, g, or t
  misc_feature (21)..(21): n is a, c, g, or t
  misc_feature (24)..(25): n is a, c, g, or t
  misc_feature (386)..(386): n is a, c, g, or t
  misc_feature (429)..(429): n is a, c, g, or t
ggctgntacgacngnganttnggnntcggggcgctggcgggcggggcggggtctgtagttagcggcgagagtgacaggaggacaggggttgtttcggcagtgacgcctggggagtgacgcaattgcacccctgtgcagtgatgtcacggcaggtgcggccagcgttccgagtcgaggacagttggcgacactgaaaattcagcgtctccgggagtctctctctttgtagtctttgcccagggccttgccaggcaaagggtagcccgacgaccagcagcctccgctacttctgggcgctcgctagaaatacagattctcgggccccaccccgacctacttggtcggtatctgtgatctgtgaacaggacctttaggtgatttgcatncactgtaaactgtgaaagccatcagtgtagtggaaggagcatnaatttagagtagagagacatggttttggaccctggttcctgctttccttgtttcatctgtgctgccttagaaaattgtcatgagcccgggcgcggtggctccggcctataatctcagcactttgggaggccgaggctggaggatcccctgaggtcaggagtttgagaccagcctggccaacatggtgaaaccccgcctctactaaaaatacaaaaatttgccaggcgtgatggcaggtgcctgtaatcccagctactcaggaggctgaggcaggagaattgcttgaacccaggaggtggagtttgcagtgagctgagatcacaccattgcactccagcctgggcaaaaagagcaaaactctccctaaaaaaaaaatgtagaatatctcttaagatttccgttatggtaaaaaccatatgcaataaatacctcattgtaagcttacccaaaattgatagatgtcaaccttttaacagaagaacagaagtttaagttattgtttaatgtaatcagttttcattttaatatctttgaaatctttttcaaaggactgtagttttgtaatggacttttcaagccttccttccattgtttttcttccgttcactggctccacacgtttcctggggagtagcctcttacttgaaggtttttaatatgttttgataactttaataacttcaggtgatgtctgtataatttttaaagtgcagctctctctaacaaatgtgccttacaactcctgattaaacggcgtcttgaaggttttaaaatgtgatcgtgtatactggaattcaaagaggcttcttgtcagcagtcaagtgatgatggaaaactgtaatagtttgtaaagttcctctttgctttttcgtctgctgtgcgtcatcagtccgagccaagggcactattggccagttccgttcaacgaagtggttgctttttttagttccggcaatgagttgcgccggggcggcggcggctccccgcctttggcggctgcgcccgggggcccggcggtccctctcagcttatggaagaagaaccagtgtcagatttcgcagttcaggaatgactttagacaatatcagtcgggcagctgtggatcgaataatccgggtggatcatgcaggcgaatatggagcaaaccgcatctatgccgggcagatggctgtcctgggtcggaccagcgtcgggccagtcattcagaaaatgtgggatcaagaaaaggaccatttgaaaaagttcaatgagttgatggttatgttcagggtccggccaacagttctgatgcccttgtggaacgtgctggggtttgcactgggggcggggaccgccttgctcgggaaggaaggtgccatggcctgcaccgtggcggtggaagagagcatagcacatcactacaacaaccagatcaggacgctgatggaggaggaccctgaaaaatacgaggaacttcttcagctgataaagaaatttcgggatgaagagcttgagcaccatgacataggcctcgaccatgatgcagaattggctccagcctatgccgtcctgaagagcattatccaggccggatgcagagtggcgatatatttatcagaaagattataaagtgtgtccagttttgcctgtctataaaagatgatagtaatttaccaagtgacatttgcagagaaacaggtgtacagttatcgttgtacttttgtacaatgtgaattttgttaataaattataaggtttgtttttttttttaaactctgcagtgttgatttttctctgggttgttttttctgccatgagaccaacaggtcaccagccttgttcaagttacagcaaacgaagctgggccttgtttggtctcatacttaattttcttttatatacatgtttttcttttacatgcatatatatatattttattttattttatgttttttggagacagggcctcgctcttttgtccaggccgggtcacaactcactgcagcctggacctcctagcctcaagcaatccacccacctcagccttccaagtagctgggactacaggtgtgcaccaccacagctggctaattctatttttttatagaggcgaagtctcactatgtcgccaggctggtctctaactcctgggctcagtgatcctcccgtttcgacttcccaaagtgctgggattacaggtgtgagccacttcaccaggcccattttctcctaaaacttcaaggacaaatcattaataatgtaacaggaatctttaggagaaaaaacaatttggtttactgataacaaaagataattggaaacatgagagtatttgagattggccaagcagaactatgaagtccatcaagtaagtcaaagatcatcgtttctgttttgaattgtgggtgataatgggtgggagagtgctacagtctgtatgtctgtgtctccctagaattcatacgatgaaatcttcactctcaagttgatagaaggtggggcccttgggaagtgtgaggtcatgagagtggagccctcatgaatgggatcagtgccttatgaaaggccctagagagatacctcatcctctccacagtgtgagacttcaaggggaagtatgagacttctctgaggaagcagacccttcacaagcaaaatcagccagcactttgatcacggacttcccagcctctaggactgtgagcaataaatgtttgatgtttataagccacccagactgtggtattttgttatagcagcctgaacagactaagacgggggtgttgcttccatcaaaggatgtactaagttgtggattatttgtgaaattgaattacaaccttttccttaaggtcttttaccacctcccccccaaaaaaatcccccaaaactgattcagattttcatactttaatgaaatattttataatttgcaaatttttaagtaatttatgaaaaacctagatcagtggatctcctctctggctgcccattagaatgtcctgtggagattaaacttttttttttcagtttatggaccaagagttttgatttatttagggtggagttcaggatcagaatggtttcagaagctcccaggtgattccggagtgagttggagctgcaagcccctgagctagattataagatgcttctgggaaagaaccacattttaggaatttgcttcccacccagtgccctgcatttaatcagcacctgatgacttggcaggacttgccccaccagggtctggctttgaagggtagtggacaccaggatcctttggattaatcctctgccacctctctcttttcctcaaccgagagtgaatttatgtaattgagtgaaagtctacgaatcataattgtaataaattaaggctgggcatttgtttgaaattagataggataaagccaaaggtttgaacaagttgtggatggtttgtaaaaattaatcttacaaaataaatgctgtgtgtgaacacgttgattaaattcaaaagggtattatttggtttttctgtaaattgaaccttgaaataaaagcacaacaaggttttcttaaaaaaaa

SEQ ID NO: 710400 - DNA, 542 bp, Homo sapiens
gggctgcgttccgagggtcccggatgtgcggtctcaaagcaaacaaggaataataagataaatgagctttgaaaagtaggaactaatttaacttaaatcacctctatgaaaacttaaaatattcactagaaagaactcttgggaaaaggaatgggctatgtttgtatgtggtggtttgaataagtcaacagaattgaagtctgttatataaatatataggaacaagagaaattttcacattaatataaattaagaagatactgttattcacaaactgggtaagtgtatttagactcttccctagtatctaattcataataaaataattaagctttactttacagtcactttggtgtattgcttccttgtctgtaaggtgagggtgttgaactacatgatctctacaatctttttctaatttttaacattctcatattattctgagactatcccatgaaaatctttccagtcaagtaaatggctataaagactctggatataggttaataaattatataaagtttatcgctagaatagtaatt

SEQ ID NO: 710401 - DNA, 5719 bp, Homo sapiens
  misc_feature (864)..(864): n is a, c, g, or t
  misc_feature (873)..(873): n is a, c, g, or t
  misc_feature (907)..(907): n is a, c, g, or t
  misc_feature (967)..(967): n is a, c, g, or t
  misc_feature (992)..(992): n is a, c, g, or t
  misc_feature (994)..(994): n is a, c, g, or t
  misc_feature (997)..(997): n is a, c, g, or t
  misc_feature (1001)..(1001): n is a, c, g, or t
  misc_feature (1013)..(1013): n is a, c, g, or t
  misc_feature (1017)..(1017): n is a, c, g, or t
  misc_feature (1036)..(1036): n is a, c, g, or t
  misc_feature (1043)..(1043): n is a, c, g, or t
  misc_feature (1046)..(1046): n is a, c, g, or t
  misc_feature (1052)..(1052): n is a, c, g, or t
  misc_feature (1054)..(1054): n is a, c, g, or t
  misc_feature (1061)..(1061): n is a, c, g, or t
  misc_feature (1070)..(1070): n is a, c, g, or t
  misc_feature (1072)..(1072): n is a, c, g, or t
  misc_feature (1076)..(1076): n is a, c, g, or t
  misc_feature (1078)..(1078): n is a, c, g, or t
  misc_feature (1087)..(1087): n is a, c, g, or t
  misc_feature (1092)..(1092): n is a, c, g, or t
ctggactcatttacttttacagttatatcatagacttgctttctggcactggtttcctggaggaaactagcctcttttacggacattacaccattgatgaggtgaaatttcagaacttcacctatgatctgcccctggcgtatttgttaagcacaatcgcctccctggccctgagccttctttggatagtgaaaaggtcggtggaaggattcaaaatcaacctgattcggagtgaggagcactttcagagttactgcaacaagatatttgccggctgggacttctgcatcactaaccgcagcatggcggatctgaagcacagcagcttgcggtacgagctccgagcagatctggaggaagaaagaatgcggcagaaaatagcagaaaggacctcagaagaaacaatacgcatttactctttgagactgtttttgaactgtattgttctggctgttttaggggcatgcttttatgcaatatacgtagcaactgtcttctcgcaagagcacatgaaaaaggaaatcgacaagatggtttttggagagaacctcttcatattgtatctaccgtctattgtgatcacgctggccaattttatcaccccaatgatctttgccaagatcatccgctatgaggattattctccaggctttgagatccgtctgacaatccttaggtgtgtctttatgcggctggccaccatatgtgtcctggtgttcacgctgggctccaagatcacatcctgtgatgatgacacatgtgacctttgcggctacaaccagaaactctacccggtgagttgcggcgcggtggcgttcggctgtatgggtccttctggaatacagtgctggtcaagagaacagnggttgaagncatgggtttgaactgcatttgcttcgtttcttgntctaggatgagacagagtctggccccatggagtctaaccccaggcacttctgagggcttngaaaccaaggtctgtgctgaggctnanagnttgnatcagctgatgncctnactggagccacaggatctngagttgnggnaattanangtgtctngggagcctngntttntntgcctgctngggtntttcagtttccctcactctctttgatttcagtgctgggagacccaagttgggcaggaaatgtacaagctgatgatcttcgacttcatcatcatcttggctgtgacactcttcgtggattttcctagaaagctcctggtgacctactgttcctcttgcaagctgattcagtgctgggggcagcaggagtttgccattcctgataacgtcctggggatagtttacgggcaaaccatctgctggatcggagcctttttctcaccccttctccctgcaattgcaaccctgaaattcattatcatcttctatgtgaaagagtggagtctgctttacacctgcagaccctcccccaggccgttcagagcatccaattctaatttcttcttcctgttggtgttgttgatcgggctgtgtttggcaataatacctctgacaatcagcatatcacgcatcccttcctcgaaagcctgtgggccgttcaccaacttcaacaccacctgggaggtcatccccaagacggtgagcaccttccccagctcgctgcagtccttcatccatggtgtcacatccgaagcctttgcagttcctttcttcatgattatttgcctcatcatgttttacttcattgccttagctggagcacacaaacgggtggtcatccagctccgagagcagctatccctggaaagtcgtgacaagtgctacctaatccagaaactaacagaagcccaaagggacatgaggaactaactagactgagcgtgaagatggtgctgcctgttgcttctaagctgacctagtgattctgctgagcctacagagtctacctgggttttgagtggacatttaaaaatatatttttcttgagtttaggcttttccatatgtgcagctgtgtttacctaacccagcccttaattagggcttcagtgacttagaaaagcaggggaaacccaaggctttgcctgcagaccggccactctgtgacaactctaccaaaaaccaacaagccattcaagcttttacaagaatgaaagagcggagacggtagtttagtatttgagccacgagtttatgtgcacaagtgttttgggttgtggactgaagctcagcctgttaatcagaccagcccatgagtgtataacaaacagaattggaggctggtttcttaaacacacacgtccacattttttagggttgttttcctgtgcttacaatttttaatgcatgtgcctttatttcacaaaacatgtggctgggcgcagcggctcacgcctgttatcccaacactttgggaggccgaggcaggcggagcacctaagttggggagttcaagaccagcctgaccaacgtggagaaactccgtctccactaaaatacaaaattagctgggtgtggtggcacatgcctgtaatatcagctactcaggaggctgaggcaggagaattgcttgaacccaggaggtggagtttgcagtgagctgagatcacaccattgcactccagcctgggcaaaaagagcaaaactctccctaaaaaaaaaatgtagaatatctcttaagatttccgttatggtaaaaaccatatgcaataaatacctcattgtaagcttacccaaaattgatagatgtcaaccttttaacagaagaacagaagtttaagttattgtttaatgtaatcagttttcattttaatatctttgaaatctttttcaaaggactgtagttttgtaatggacttttcaagccttccttccattgtttttcttccgttcactggctccacacgtttcctggggagtagcctcttacttgaaggtttttaatatgttttgataactttaataacttcaggtgatgtctgtataatttttaaagtgcagctctctctaacaaatgtgccttacaactcctgattaaacggcgtcttgaaggttttaaaatgtgatcgtgtatactggaattcaaagaggcttcttgtcagcagtcaagtgatgatggaaaactgtaatagtttgtaaagttcctctttgctttttcgtctgctgtgcgtcatcagtccgagccaagggcactattggccagttccgttcaacgaagtggttgctttttttagttccggcaatgagttgcgccggggcggcggcggctccccgcctttggcggctgcgcccgggggcccggcggtccctctcagcttatggaagaagaaccagtgtcagatttcgcagttcaggaatgactttagacaatatcagtcgggcagctgtggatcgaataatccgggtggatcatgcaggcgaatatggagcaaaccgcatctatgccgggcagatggctgtcctgggtcggaccagcgtcgggccagtcattcagaaaatgtgggatcaagaaaaggaccatttgaaaaagttcaatgagttgatggttatgttcagggtccggccaacagttctgatgcccttgtggaacgtgctggggtttgcactgggggcggggaccgccttgctcgggaaggaaggtgccatggcctgcaccgtggcggtggaagagagcatagcacatcactacaacaaccagatcaggacgctgatggaggaggaccctgaaaaatacgaggaacttcttcagctgataaagaaatttcgggatgaagagcttgagcaccatgacataggcctcgaccatgatgcagaattggctccagcctatgccgtcctgaagagcattatccaggccggatgcagagtggcgatatatttatcagaaagattataaagtgtgtccagttttgcctgtctataaaagatgatagtaatttaccaagtgacatttgcagagaaacaggtgtacagttatcgttgtacttttgtacaatgtgaattttgttaataaattataaggtttgtttttttttttaaactctgcagtgttgatttttctctgggttgttttttctgccatgagaccaacaggtcaccagccttgttcaagttacagcaaacgaagctgggccttgtttggtctcatacttaattttcttttatatacatgtttttcttttacatgcatatatatatattttattttattttatgttttttggagacagggcctcgctcttttgtccaggccgggtcacaactcactgcagcctggacctcctagcctcaagcaatccacccacctcagccttccaagtagctgggactacaggtgtgcaccaccacagctggctaattctatttttttatagaggcgaagtctcactatgtcgccaggctggtctctaactcctgggctcagtgatcctcccgtttcgacttcccaaagtgctgggattacaggtgtgagccacttcaccaggcccattttctcctaaaacttcaaggacaaatcattaataatgtaacaggaatctttaggagaaaaaacaatttggtttactgataacaaaagataattggaaacatgagagtatttgagattggccaagcagaactatgaagtccatcaaaattcatacgatgaaatcttcactctcaagttgatagaaggtggggcccttgggaagtgtgaggtcatgagagtggagccctcatgaatgggatcagtgccttatgaaaggccctagagagatacctcatcctctccacagtgtgagacttcaaggggaagtatgagacttctctgaggaagcagacccttcacaagcaaaatcagccagcactttgatcacggacttcccagcctctaggactgtgagcaataaatgtttgatgtttataagccacccagactgtggtattttgttatagcagcctgaacagactaagacgggggtgttgcttccatcaaaggatgtactaagttgtggattatttgtgaaattgaattacaaccttttccttaaggtcttttaccacctcccccccaaaaaaatcccccaaaactgattcagattttcatactttaatgaaatattttataatttgcaaatttttaagtaatttatgaaaaacctagatcagtggatctcctctctggctgcccattagaatgtcctgtggagattaaacttttttttttcagtttatggaccaagagttttgatttatttagggtggagttcaggatcagaatggtttcagaagctcccaggtgattccggagtgagttggagctgcaagcccctgagctagattataagatgcttctgggaaagaaccacattttaggaatttgcttcccacccagtgccctgcatttaatcagcacctgatgacttggcaggacttgccccaccagggtctggctttgaagggtagtggacaccaggatcctttggattaatcctctgccacctctctcttttcctcaaccgagagtgaatttatgtaattgagtgaaagtctacgaatcataattgtaataaattaaggctgggcatttgtttgaaattagataggataaagccaaaggtttgaacaagttgtggatggtttgtaaaaattaatcttacaaaataaatgctgtgtgtgaacacgttgattaaattcaaaagggtattatttggtttttctgtaaattgaaccttgaaataaaagcacaacaaggttttcttaaaaaaaa

SEQ ID NO: 710402 - DNA, 5585 bp, Homo sapiens
  misc_feature (864)..(864): n is a, c, g, or t
  misc_feature (873)..(873): n is a, c, g, or t
  misc_feature (907)..(907): n is a, c, g, or t
  misc_feature (967)..(967): n is a, c, g, or t
  misc_feature (992)..(992): n is a, c, g, or t
  misc_feature (994)..(994): n is a, c, g, or t
  misc_feature (997)..(997): n is a, c, g, or t
  misc_feature (1001)..(1001): n is a, c, g, or t
  misc_feature (1013)..(1013): n is a, c, g, or t
  misc_feature (1017)..(1017): n is a, c, g, or t
  misc_feature (1036)..(1036): n is a, c, g, or t
  misc_feature (1043)..(1043): n is a, c, g, or t
  misc_feature (1046)..(1046): n is a, c, g, or t
  misc_feature (1052)..(1052): n is a, c, g, or t
  misc_feature (1054)..(1054): n is a, c, g, or t
  misc_feature (1061)..(1061): n is a, c, g, or t
  misc_feature (1070)..(1070): n is a, c, g, or t
  misc_feature (1072)..(1072): n is a, c, g, or t
  misc_feature (1076)..(1076): n is a, c, g, or t
  misc_feature (1078)..(1078): n is a, c, g, or t
  misc_feature (1087)..(1087): n is a, c, g, or t
  misc_feature (1092)..(1092): n is a, c, g, or t
ctggactcatttacttttacagttatatcatagacttgctttctggcactggtttcctggaggaaactagcctcttttacggacattacaccattgatgaggtgaaatttcagaacttcacctatgatctgcccctggcgtatttgttaagcacaatcgcctccctggccctgagccttctttggatagtgaaaaggtcggtggaaggattcaaaatcaacctgattcggagtgaggagcactttcagagttactgcaacaagatatttgccggctgggacttctgcatcactaaccgcagcatggcggatctgaagcacagcagcttgcggtacgagctccgagcagatctggaggaagaaagaatgcggcagaaaatagcagaaaggacctcagaagaaacaatacgcatttactctttgagactgtttttgaactgtattgttctggctgttttaggggcatgcttttatgcaatatacgtagcaactgtcttctcgcaagagcacatgaaaaaggaaatcgacaagatggtttttggagagaacctcttcatattgtatctaccgtctattgtgatcacgctggccaattttatcaccccaatgatctttgccaagatcatccgctatgaggattattctccaggctttgagatccgtctgacaatccttaggtgtgtctttatgcggctggccaccatatgtgtcctggtgttcacgctgggctccaagatcacatcctgtgatgatgacacatgtgacctttgcggctacaaccagaaactctacccggtgagttgcggcgcggtggcgttcggctgtatgggtccttctggaatacagtgctggtcaagagaacagnggttgaagncatgggtttgaactgcatttgcttcgtttcttgntctaggatgagacagagtctggccccatggagtctaaccccaggcacttctgagggcttngaaaccaaggtctgtgctgaggctnanagnttgnatcagctgatgncctnactggagccacaggatctngagttgnggnaattanangtgtctngggagcctngntttntntgcctgctngggtntttcagtttccctcactctctttgatttcagtgctgggagacccaagttgggcaggaaatgtacaagctgatgatcttcgacttcatcatcatcttggctgtgacactcttcgtggattttcctagaaagctcctggtgacctactgttcctcttgcaagctgattcagtgctgggggcagcaggagtttgccattcctgataacgtcctggggatagtttacgggcaaaccatctgctggatcggagcctttttctcaccccttctccctgcaattgcaaccctgaaattcattatcatcttctatgtgaaagagtggagtctgctttacacctgcagaccctcccccaggccgttcagagcatccaattctaatttcttcttcctgttggtgttgttgatcgggctgtgtttggcaataatacctctgacaatcagcatatcacgcatcccttcctcgaaagcctgtgggccgttcaccaacttcaacaccacctgggaggtcatccccaagacggtgagcaccttccccagctcgctgcagtccttcatccatggtgtcacatccgaagcctttgcagttcctttcttcatgattatttgcctcatcatgttttacttcattgccttagctggagcacacaaacgggtggtcatccagctccgagagcagctatccctggaaagtcgtgacaagtgctacctaatccagaaactaacagaagcccaaagggacatgaggaactaactagactgagcgtgaagatggtgctgcctgttgcttctaagctgacctagtgattctgctgagcctacagagtctacctgggttttgagtggacatttaaaaatatatttttcttgagtttaggcttttccatatgtgcagctgtgtttacctaacccagcccttaattagggcttcagtgacttagaaaagcaggggaaacccaaggctttgcctgcagaccggccactctgtgacaactctaccaaaaaccaacaagccattcaagcttttacaagaatgaaagagcggagacggtagtttagtatttgagccacgagtttatgtgcacaagtgttttgggttgtggactgaagctcagcctgttaatcagaccagcccatgagtgtataacaaacagaattggaggctggtttcttaaacacacacgtccacattttttagggttgttttcctgtgcttacaatttttaatgcatgtgcctttatttcacaaaacatgtggctgggcgcagcggctcacgcctgttatcccaacactttgggaggccgaggcaggcggagcacctaagttggggagttcaagaccagcctgaccaacgtggagaaactccgtctccactaaaatacaaaattagctgggtgtggtggcacatgcctgtaatatcagctactcaggaggctgaggcaggagaattgcttgaacccaggaggtggagtttgcagtgagctgagatcacaccattgcactccagcctgggcaaaaagagcaaaactctccctaaaaaaaaaatgtagaatatctcttaagatttccgttatggtaaaaaccatatgcaataaatacctcattgtaagcttacccaaaattgatagatgtcaaccttttaacagaagaacagaagtttaagttattgtttaatgtaatcagttttcattttaatatctttgaaatctttttcaaaggactgtagttttgtaatggacttttcaagccttccttccattgtttttcttccgttcactggctccacacgtttcctggggagtagcctcttacttgaaggtttttaatatgttttgataactttaataacttcaggtgatgtctgtataatttttaaagtgcagctctctctaacaaatgtgccttacaactcctgattaaacggcgtcttgaaggttttaaaatgtgatcgtgtatactggaattcaaagaggcttcttgtcagcagtcaagtgatgatggaaaactgtaatagtttgtaaagttcctctttgctttttcgtctgctgtgcgtcatcagtccgagccaagggcactattggccagttccgttcaacgaagtggttgctttttttagttccggcaatgagttgcgccggggcggcggcggctccccgcctttggcggctgcgcccgggggcccggcggtccctctcagcttatggaagaagaaccagtgtcagatttcgcagttcaggaatgactttagacaatatcagtcgggcagctgtggatcgaataatccgggtggatcatgcaggcgaatatggagcaaaccgcatctatgccgggcagatggctgtcctgggtcggaccagcgtcgggccagtcattcagaaaatgtgggatcaagaaaaggaccatttgaaaaagttcaatgagttgatggttatgttcagggtccggccaacagttctgatgcccttgtggaacgtgctggggtttgcactgggggcggggaccgccttgctcgggaaggaaggtgccatggcctgcaccgtggcggtggaagagagcatagcacatcactacaacaaccagatcaggacgctgatggaggaggaccctgaaaaatacgaggaacttcttcagctgataaagaaatttcgggatgaagagcttgagcaccatgacataggcctcgaccatgatgcagaattggctccagcctatgccgtcctgaagagcattatccaggccggatgcagagtggcgatatatttatcagaaagattataaagtgtgtccagttttgcctgtctataaaagatgatagtaatttaccaagtgacatttgcagagaaacaggtgtacagttatcgttgtacttttgtacaatgtgaattttgttaataaattataaggtttgtttttttttttaaactctgcagtgttgatttttctctgggttgttttttctgccatgagaccaacaggtcaccagccttgttcaagttacagcaaacgaagctgggccttgtttggtctcatacttaattttcttttatatacatgtttttcttttacatgcatatatatatattttattttattttatgttttttggagacagggcctcgctcttttgtccaggccgggtcacaactcactgcagcctggacctcctagcctcaagcaatccacccacctcagccttccaagtagctgggactacaggtgtgcaccaccacagctggctaattctatttttttatagaggcgaagtctcactatgtcgccaggctggtctctaactcctgggctcagtgatcctcccgtttcgacttcccaaagtgctgggattacaggtgtgagccacttcaccaggcccattttctcctaaaacttcaaggacaaatcattaataatgtaacaggaatctttaggagaaaaaacaatttggtttactgataacaaaagataattggaaacatgagagtatttgagattggccaagcagaactatgaagtccatcaatccacagtgtgagacttcaaggggaagtatgagacttctctgaggaagcagacccttcacaagcaaaatcagccagcactttgatcacggacttcccagcctctaggactgtgagcaataaatgtttgatgtttataagccacccagactgtggtattttgttatagcagcctgaacagactaagacgggggtgttgcttccatcaaaggatgtactaagttgtggattatttgtgaaattgaattacaaccttttccttaaggtcttttaccacctcccccccaaaaaaatcccccaaaactgattcagattttcatactttaatgaaatattttataatttgcaaatttttaagtaatttatgaaaaacctagatcagtggatctcctctctggctgcccattagaatgtcctgtggagattaaacttttttttttcagtttatggaccaagagttttgatttatttagggtggagttcaggatcagaatggtttcagaagctcccaggtgattccggagtgagttggagctgcaagcccctgagctagattataagatgcttctgggaaagaaccacattttaggaatttgcttcccacccagtgccctgcatttaatcagcacctgatgacttggcaggacttgccccaccagggtctggctttgaagggtagtggacaccaggatcctttggattaatcctctgccacctctctcttttcctcaaccgagagtgaatttatgtaattgagtgaaagtctacgaatcataattgtaataaattaaggctgggcatttgtttgaaattagataggataaagccaaaggtttgaacaagttgtggatggtttgtaaaaattaatcttacaaaataaatgctgtgtgtgaacacgttgattaaattcaaaagggtattatttggtttttctgtaaattgaaccttgaaataaaagcacaacaaggttttcttaaaaaaaa

SEQ ID NO: 710403 - DNA, 371 bp, Homo sapiens
  misc_feature (154)..(154): n is a, c, g, or t
  misc_feature (163)..(163): n is a, c, g, or t
  misc_feature (305)..(305): n is a, c, g, or t
gatgattttgtatctttttctatttattgagataatcaaatgatttttgtccttcgttctattgatgtgatgtttattgatcatgtttattgatttgcatatggtgagccatccttgtattcctggtataaatgccacctgatcatggtatatnatctttttnatgtgctattggatttggtttgccagtattttgttgagaattttttcatctgtgtctattacggatattggcctgtagttttttttgctgtgttcttctttggttttgatatcaggataatgctagctttgtagaatgagtnagggaggagttatctactcttcaatttttgggaacagttgcagaactgttgtgtgttttagaacag

SEQ ID NO: 710404 - DNA, 4890 bp, Homo sapiens
  misc_feature (864)..(864): n is a, c, g, or t
  misc_feature (873)..(873): n is a, c, g, or t
  misc_feature (907)..(907): n is a, c, g, or t
  misc_feature (967)..(967): n is a, c, g, or t
  misc_feature (992)..(992): n is a, c, g, or t
  misc_feature (994)..(994): n is a, c, g, or t
  misc_feature (997)..(997): n is a, c, g, or t
  misc_feature (1001)..(1001): n is a, c, g, or t
  misc_feature (1013)..(1013): n is a, c, g, or t
  misc_feature (1017)..(1017): n is a, c, g, or t
  misc_feature (1036)..(1036): n is a, c, g, or t
  misc_feature (1043)..(1043): n is a, c, g, or t
  misc_feature (1046)..(1046): n is a, c, g, or t
  misc_feature (1052)..(1052): n is a, c, g, or t
  misc_feature (1054)..(1054): n is a, c, g, or t
  misc_feature (1061)..(1061): n is a, c, g, or t
  misc_feature (1070)..(1070): n is a, c, g, or t
  misc_feature (1072)..(1072): n is a, c, g, or t
  misc_feature (1076)..(1076): n is a, c, g, or t
  misc_feature (1078)..(1078): n is a, c, g, or t
  misc_feature (1087)..(1087): n is a, c, g, or t
  misc_feature (1092)..(1092): n is a, c, g, or t
ctggactcatttacttttacagttatatcatagacttgctttctggcactggtttcctggaggaaactagcctcttttacggacattacaccattgatgaggtgaaatttcagaacttcacctatgatctgcccctggcgtatttgttaagcacaatcgcctccctggccctgagccttctttggatagtgaaaaggtcggtggaaggattcaaaatcaacctgattcggagtgaggagcactttcagagttactgcaacaagatatttgccggctgggacttctgcatcactaaccgcagcatggcggatctgaagcacagcagcttgcggtacgagctccgagcagatctggaggaagaaagaatgcggcagaaaatagcagaaaggacctcagaagaaacaatacgcatttactctttgagactgtttttgaactgtattgttctggctgttttaggggcatgcttttatgcaatatacgtagcaactgtcttctcgcaagagcacatgaaaaaggaaatcgacaagatggtttttggagagaacctcttcatattgtatctaccgtctattgtgatcacgctggccaattttatcaccccaatgatctttgccaagatcatccgctatgaggattattctccaggctttgagatccgtctgacaatccttaggtgtgtctttatgcggctggccaccatatgtgtcctggtgttcacgctgggctccaagatcacatcctgtgatgatgacacatgtgacctttgcggctacaaccagaaactctacccggtgagttgcggcgcggtggcgttcggctgtatgggtccttctggaatacagtgctggtcaagagaacagnggttgaagncatgggtttgaactgcatttgcttcgtttcttgntctaggatgagacagagtctggccccatggagtctaaccccaggcacttctgagggcttngaaaccaaggtctgtgctgaggctnanagnttgnatcagctgatgncctnactggagccacaggatctngagttgnggnaattanangtgtctngggagcctngntttntntgcctgctngggtntttcagtttccctcactctctttgatttcagtgctgggagacccaagttgggcaggaaatgtacaagctgatgatcttcgacttcatcatcatcttggctgtgacactcttcgtggattttcctagaaagctcctggtgacctactgttcctcttgcaagctgattcagtgctgggggcagcaggagtttgccattcctgataacgtcctggggatagtttacgggcaaaccatctgctggatcggagcctttttctcaccccttctccctgcaattgcaaccctgaaattcattatcatcttctatgtgaaagagtggagtctgctttacacctgcagaccctcccccaggccgttcagagcatccaattctaatttcttcttcctgttggtgttgttgatcgggctgtgtttggcaataatacctctgacaatcagcatatcacgcatcccttcctcgaaagcctgtgggccgttcaccaacttcaacaccacctgggaggtcatccccaagacggtgagcaccttccccagctcgctgcagtccttcatccatggtgtcacatccgaagcctttgcagttcctttcttcatgattatttgcctcatcatgttttacttcattgccttagctggagcacacaaacgggtggtcatccagctccgagagcagctatccctggaaagtcgtgacaagtgctacctaatccagaaactaacagaagcccaaagggacatgaggaactaactagactgagcgtgaagatggtgctgcctgttgcttctaagctgacctagtgattctgctgagcctacagagtctacctgggttttgagtggacatttaaaaatatatttttcttgagtttaggcttttccatatgtgcagctgtgtttacctaacccagcccttaattagggcttcagtgacttagaaaagcaggggaaacccaaggctttgcctgcagaccggccactctgtgacaactctaccaaaaaccaacaagccattcaagcttttacaagaatgaaagagcggagacggtagtttagtatttgagccacgagtttatgtgcacaagtgttttgggttgtggactgaagctcagcctgttaatcagaccagcccatgagtgtataacaaacagaattggaggctggtttcttaaacacacacgtccacattttttagggttgttttcctgtgcttacaatttttaatgcatgtgcctttatttcacaaaacatgtggctgggcgcagcggctcacgcctgttatcccaacactttgggaggccgaggcaggcggagcacctaagttggggagttcaagaccagcctgaccaacgtggagaaactccgtctccactaaaatacaaaattagctgggtgtggtggcacatgcctgtaatatcagctactcaggaggctgaggcaggagaattgcttgaacccaggaggtggagtttgcagtgagctgagatcacaccattgcactccagcctgggcaaaaagagcaaaactctccctaaaaaaaaaatgtagaatatctcttaagatttccgttatggtaaaaaccatatgcaataaatacctcattgtaagcttacccaaaattgatagatgtcaaccttttaacagaagaacagaagtttaagttattgtttaatgtaatcagttttcattttaatatctttgaaatctttttcaaaggactgtagttttgtaatggacttttcaagccttccttccattgtttttcttccgttcactggctccacacgtttcctggggagtagcctcttacttgaaggtttttaatatgttttgataactttaataacttcaggtgatgtctgtataatttttaaagtgcagctctctctaacaaatgtgccttacaactcctgattaaacggcgtcttgaaggttttaaaatgtgatcgtgtatactggaattcaaagaggcttcttgtcagcagtcaagtgatgatggaaaactgtaatagtttgtaaagttcctctttgctttttcgtctgctgtgcgtcatcagtccgagccaagggcactattggccagttccgttcaacgaagtggttgctttttttagttccggcaatgagttgcgccggggcggcggcggctccccgcctttggcggctgcgcccgggggcccggcggtccctctcagcttatggaagaagaaccagtgtcagatttcgcagttcaggaatgactttagacaatatcagtcgggcagctgtggatcgaataatccgggtggatcatgcaggcgaatatggagcaaaccgcatctatgccgggcagatggctgtcctgggtcggaccagcgtcgggccagtcattcagaaaatgtgggatcaagaaaaggaccatttgaaaaagttcaatgagttgatggttatgttcagggtccggccaacagttctgatgcccttgtggaacgtgctggggtttgcactgggggcggggaccgccttgctcgggaaggaaggtgccatggcctgcaccgtggcggtggaagagagcatagcacatcactacaacaaccagatcaggacgctgatggaggaggaccctgaaaaatacgaggaacttcttcagctgataaagaaatttcgggatgaagagcttgagcaccatgacataggcctcgaccatgatgcagaattggctccagcctatgccgtcctgaagagcattatccaggccggatgcagagtggcgatatatttatcagaaagattataaagtgtgtccagttttgcctgtctataaaagatgatagtaatttaccaagtgacatttgcagagaaacaggtgtacagttatcgttgtacttttgtacaatgtgaattttgttaataaattataaggtttgtttttttttttaaactctgcagtgttgatttttctctgggttgttttttctgccatgagaccaacaggtcaccagccttgttcaagttacagcaaacgaagctgggccttgtttggtctcatacttaattttcttttatatacatgtttttcttttacatgcatatatatatattttattttattttatgttttttggagacagggcctcgctcttttgtccaggccgggtcacaactcactgcagcctggacctcctagcctcaagcaatccacccacctcagccttccaagtagctgggactacaggtgtgcaccaccacagctggctaattctatttttttatagaggcgaagtctcactatgtcgccaggctggtctctaactcctgggctcagtgatcctcccgtttcgacttcccaaagtgctgggattacaggtgtgagccacttcaccaggcccattttctcctaaaacttcaaggacaaatcattaataatgtaacaggaatctttaggagaaaaaacaatttggtttactgataacaaaagataattggaaacatgagagtatttgagattggccaagcagaactatgaagtccatcaagtaagtcaaagatcatcgtttctgttttgaattgtgggtgataatgggtgggagagtgctacagtctgtatgtctgtgtctccctagaattcatacgatgaaatcttcactctcaagttgatagaaggtggggcccttgggaagtgtgaggtcatgagagtggagccctcatgaatgggatcagtgccttatgaaaggccctagagagatacctcatcctctccaacgcgggagacttaaggggaaaggctcagacttcttctggcaacgcccccccttgccacgc

SEQ ID NO: 710405 - DNA, 1271 bp, Homo sapiens
gatgttgatatggtgtgtgcgtcattcatccgcgaggacagtctgatgtccatgaagttaggaaggtcctgggagagaagggaaagaacatcaatgattgatacagcaaaatcgagaatcatgagggggttcggaggtatgatgaaatcctggaggccagtgatgggatcatggtggctcgatggtgatctaggcattgagattcctgacagagaacggtcttccttgctcatgaagatgatgattggacggtgcaatcgagctgggaagcctgatcatctgtgctactctagatgcatggagagcatgatcaagaagccccgaccccgacatcgaggactgacggcatgtgatgtggccaagtgcatgtcctggatggagccagactggaatcatgctgtcatggagaaacagccaaaggggacgtatcctctgggaggctgtgctgcatgtcacgcagctgattgcccgggaggcagaggctgacatctaccatgttgcacattctagagaggaacatccgccgacctggcgcccgattaccaatgcgacctccagcagaagccacacgacagatgaggatggccagagggaaggacctccagttacaaggctagcatagcaggatgagggaacaataagtcgaacactcgagcaaacgttcttgagacagagacatagcgtcaagaaccagcgtgaaacaagaataacgctgcaccagcagatgcaccccgcgaaacacatacgcgattcgcgtgcaccgcagggaacaaatcaacgcgccaagcacacaagacgtaccagctcacaggaggacaaccaagacctaggacacacagtaacggagaattcaaagcacccgtggccagactagatgcaacgtggacaccgacagagcacaagagggaagtggacattaggagcacgcgaacgacgacccggatgggcgagaacacacacaccggggagacaacggaaaaaccagatagaggacccaaaaccgccaacaactgcgaacaaagagagaaagaacagggcgcccacagcgcaaggcgcactcaccatttcgcaacaaggaaagctaggcgaccagaaaactactggtagacacaaacacgagggaagaaacaagaacccagggcgacagtaggacggacacacagtgaggcagcaccagccgacataggcaaaacgcacagacgcgagcaagttcgcacgcgggacggacaagcaccagagacacgacaagcgtagaacgtgcgagccaccaa

SEQ ID NO: 710406 - DNA, 5371 bp, Homo sapiens
  misc_feature (864)..(864): n is a, c, g, or t
  misc_feature (873)..(873): n is a, c, g, or t
  misc_feature (907)..(907): n is a, c, g, or t
  misc_feature (967)..(967): n is a, c, g, or t
  misc_feature (992)..(992): n is a, c, g, or t
  misc_feature (994)..(994): n is a, c, g, or t
  misc_feature (997)..(997): n is a, c, g, or t
  misc_feature (1001)..(1001): n is a, c, g, or t
  misc_feature (1013)..(1013): n is a, c, g, or t
  misc_feature (1017)..(1017): n is a, c, g, or t
  misc_feature (1036)..(1036): n is a, c, g, or t
  misc_feature (1043)..(1043): n is a, c, g, or t
  misc_feature (1046)..(1046): n is a, c, g, or t
  misc_feature (1052)..(1052): n is a, c, g, or t
  misc_feature (1054)..(1054): n is a, c, g, or t
  misc_feature (1061)..(1061): n is a, c, g, or t
  misc_feature (1070)..(1070): n is a, c, g, or t
  misc_feature (1072)..(1072): n is a, c, g, or t
  misc_feature (1076)..(1076): n is a, c, g, or t
  misc_feature (1078)..(1078): n is a, c, g, or t
  misc_feature (1087)..(1087): n is a, c, g, or t
  misc_feature (1092)..(1092): n is a, c, g, or t
ctggactcatttacttttacagttatatcatagacttgctttctggcactggtttcctggaggaaactagcctcttttacggacattacaccattgatgaggtgaaatttcagaacttcacctatgatctgcccctggcgtatttgttaagcacaatcgcctccctggccctgagccttctttggatagtgaaaaggtcggtggaaggattcaaaatcaacctgattcggagtgaggagcactttcagagttactgcaacaagatatttgccggctgggacttctgcatcactaaccgcagcatggcggatctgaagcacagcagcttgcggtacgagctccgagcagatctggaggaagaaagaatgcggcagaaaatagcagaaaggacctcagaagaaacaatacgcatttactctttgagactgtttttgaactgtattgttctggctgttttaggggcatgcttttatgcaatatacgtagcaactgtcttctcgcaagagcacatgaaaaaggaaatcgacaagatggtttttggagagaacctcttcatattgtatctaccgtctattgtgatcacgctggccaattttatcaccccaatgatctttgccaagatcatccgctatgaggattattctccaggctttgagatccgtctgacaatccttaggtgtgtctttatgcggctggccaccatatgtgtcctggtgttcacgctgggctccaagatcacatcctgtgatgatgacacatgtgacctttgcggctacaaccagaaactctacccggtgagttgcggcgcggtggcgttcggctgtatgggtccttctggaatacagtgctggtcaagagaacagnggttgaagncatgggtttgaactgcatttgcttcgtttcttgntctaggatgagacagagtctggccccatggagtctaaccccaggcacttctgagggcttngaaaccaaggtctgtgctgaggctnanagnttgnatcagctgatgncctnactggagccacaggatctngagttgnggnaattanangtgtctngggagcctngntttntntgcctgctngggtntttcagtttccctcactctctttgatttcagtgctgggagacccaagttgggcaggaaatgtacaagctgatgatcttcgacttcatcatcatcttggctgtgacactcttcgtggattttcctagaaagctcctggtgacctactgttcctcttgcaagctgattcagtgctgggggcagcaggagtttgccattcctgataacgtcctggggatagtttacgggcaaaccatctgctggatcggagcctttttctcaccccttctccctgcaattgcaaccctgaaattcattatcatcttctatgtgaaagagtggagtctgctttacacctgcagaccctcccccaggccgttcagagcatccaattctaatttcttcttcctgttggtgttgttgatcgggctgtgtttggcaataatacctctgacaatcagcatatcacgcatcccttcctcgaaagcctgtgggccgttcaccaacttcaacaccacctgggaggtcatccccaagacggtgagcaccttccccagctcgctgcagtccttcatccatggtgtcacatccgaagcctttgcagttcctttcttcatgattatttgcctcatcatgttttacttcattgccttagctggagcacacaaacgggtggtcatccagctccgagagcagctatccctggaaagtcgtgacaagtgctacctaatccagaaactaacagaagcccaaagggacatgaggaactaactagactgagcgtgaagatggtgctgcctgttgcttctaagctgacctagtgattctgctgagcctacagagtctacctgggttttgagtggacatttaaaaatatatttttcttgagtttaggcttttccatatgtgcagctgtgtttacctaacccagcccttaattagggcttcagtgacttagaaaagcaggggaaacccaaggctttgcctgcagaccggccactctgtgacaactctaccaaaaaccaacaagccattcaagcttttacaagaatgaaagagcggagacggtagtttagtatttgagccacgagtttatgtgcacaagtgttttgggttgtggactgaagctcagcctgttaatcagaccagcccatgagtgtataacaaacagaattggaggctggtttcttaaacacacacgtccacattttttagggttgttttcctgtgcttacaatttttaatgcatgtgcctttatttcacaaaacatgtggctgggcgcagcggctcacgcctgttatcccaacactttgggaggccgaggcaggcggagcacctaagttggggagttcaagaccagcctgaccaacgtggagaaactccgtctccactaaaatacaaaattagctgggtgtggtggcacatgcctgtaatatcagctactcaggaggctgaggcaggagaattgcttgaacccgggaggcagagattgctttgaggcgagattgcaccactgcactgcaacctggggcgtcagagcgagactttgtctcccccgcgcccaaaaaaaaaaaaaaagaaatttcatgaagtcgttttctcaacgttaaattaccgtgtaccactttcgggatttttgcctaatggcagtactgcttgaacttttgattactagatgtgtttttttgtatagctatgtcccatttaaaaattaaattaatttccttgaaacaaaatccttatggtgaatgggaagccagtgtcacttgccacaaatggcttatggaagaagaaccagtgtcagatttcgcagttcaggaatgactttagacaatatcagtcgggcagctgtggatcgaataatccgggtggatcatgcaggcgaatatggagcaaaccgcatctatgccgggcagatggctgtcctgggtcggaccagcgtcgggccagtcattcagaaaatgtgggatcaagaaaaggaccatttgaaaaagttcaatgagttgatggttatgttcagggtccggccaacagttctgatgcccttgtggaacgtgctggggtttgcactgggggcggggaccgccttgctcgggaaggaaggtgccatggcctgcaccgtggcggtggaagagagcatagcacatcactacaacaaccagatcaggacgctgatggaggaggaccctgaaaaatacgaggaacttcttcagctgataaagaaatttcgggatgaagagcttgagcaccatgacataggcctcgaccatgatgcagaattggctccagcctatgccgtcctgaagagcattatccaggccggatgcagagtggcgatatatttatcagaaagattataaagtgtgtccagttttgcctgtctataaaagatgatagtaatttaccaagtgacatttgcagagaaacaggtgtacagttatcgttgtacttttgtacaatgtgaattttgttaataaattataaggtttgtttttttttttaaactctgcagtgttgatttttctctgggttgttttttctgccatgagaccaacaggtcaccagccttgttcaagttacagcaaacgaagctgggccttgtttggtctcatacttaattttcttttatatacatgtttttcttttacatgcatatatatatattttattttattttatgttttttggagacagggcctcgctcttttgtccaggccgggtcacaactcactgcagcctggacctcctagcctcaagcaatccacccacctcagccttccaagtagctgggactacaggtgtgcaccaccacagctggctaattctatttttttatagaggcgaagtctcactatgtcgccaggctggtctctaactcctgggctcagtgatcctcccgtttcgacttcccaaagtgctgggattacaggtgtgagccacttcaccaggcccattttctcctaaaacttcaaggacaaatcattaataatgtaacaggaatctttaggagaaaaaacaatttggtttactgataacaaaagataattggaaacatgagagtatttgagattggccaagcagaactatgaagtccatcaagtaagtcaaagatcatcgtttctgttttgaattgtgggtgataatgggtgggagagtgctacagtctgtatgtctgtgtctccctagaattcatacgatgaaatcttcactctcaagttgatagaaggtggggcccttgggaagtgtgaggtcatgagagtggagccctcatgaatgggatcagtgccttatgaaaggccctagagagatacctcatcctctccacagtgtgagacttcaaggggaagtatgagacttctctgaggaagcagacccttcacaagcaaaatcagccagcactttgatcacggacttcccagcctctaggactgtgagcaataaatgtttgatgtttataagccacccagactgtggtattttgttatagcagcctgaacagactaagacgggggtgttgcttccatcaaaggatgtactaagttgtggattatttgtgaaattgaattacaaccttttccttaaggtcttttaccacctcccccccaaaaaaatcccccaaaactgattcagattttcatactttaatgaaatattttataatttgcaaatttttaagtaatttatgaaaaacctagatcagtggatctcctctctggctgcccattagaatgtcctgtggagattaaacttttttttttcagtttatggaccaagagttttgatttatttagggtggagttcaggatcagaatggtttcagaagctcccaggtgattccggagtgagttggagctgcaagcccctgagctagattataagatgcttctgggaaagaaccacattttaggaatttgcttcccacccagtgccctgcatttaatcagcacctgatgacttggcaggacttgccccaccagggtctggctttgaagggtagtggacaccaggatcctttggattaatcctctgccacctctctcttttcctcaaccgagagtgaatttatgtaattgagtgaaagtctacgaatcataattgtaataaattaaggctgggcatttgtttgaaattagataggataaagccaaaggtttgaacaagttgtggatggtttgtaaaaattaatcttacaaaataaatgctgtgtgtgaacacgttgattaaattcaaaagggtattatttggtttttctgtaaattgaaccttgaaataaaagcacaacaaggttttcttaaaaaaaa

SEQ ID NO: 710407 - DNA, 3543 bp, Homo sapiens
  misc_feature (6)..(6): n is a, c, g, or t
  misc_feature (13)..(13): n is a, c, g, or t
  misc_feature (15)..(15): n is a, c, g, or t
  misc_feature (18)..(18): n is a, c, g, or t
  misc_feature (21)..(21): n is a, c, g, or t
  misc_feature (24)..(25): n is a, c, g, or t
  misc_feature (386)..(386): n is a, c, g, or t
  misc_feature (429)..(429): n is a, c, g, or t
ggctgntacgacngnganttnggnntcggggcgctggcgggcggggcggggtctgtagttagcggcgagagtgacaggaggacaggggttgtttcggcagtgacgcctggggagtgacgcaattgcacccctgtgcagtgatgtcacggcaggtgcggccagcgttccgagtcgaggacagttggcgacactgaaaattcagcgtctccgggagtctctctctttgtagtctttgcccagggccttgccaggcaaagggtagcccgacgaccagcagcctccgctacttctgggcgctcgctagaaatacagattctcgggccccaccccgacctacttggtcggtatctgtgatctgtgaacaggacctttaggtgatttgcatncactgtaaactgtgaaagccatcagtgtagtggaaggagcatnaatttagagtagagagacatggttttggaccctggttcctgctttccttgtttcatctgtgctgccttagaaaattgtcatgagcccgggcgcggtggctccggcctataatctcagcactttgggaggccgaggctggaggatcccctgaggtcaggagtttgagaccagcctggccaacatggtgaaaccccgcctctactaaaaatacaaaaatttgccaggcgtgatggcaggtgcctgtaatcccagctactcaggaggctgaggcaggagaattgcttgaacccgggaggcagagattgctttgaggcgagattgcaccactgcactgcaacctggggcgtcagagcgagactttgtctcccccgcgcccaaaaaaaaaaaaaaagaaatttcatgaagtcgttttctcaacgttaaattaccgtgtaccactttcgggatttttgcctaatggcagtactgcttgaacttttgattactagatgtgtttttttgtatagctatgtcccatttaaaaattaaattaatttccttgaaacaaaatccttatggtgaatgggaagccagtgtcacttgccacaaatggcttatggaagaagaaccagtgtcagatttcgcagttcaggaatgactttagacaatatcagtcgggcagctgtggatcgaataatccgggtggatcatgcaggcgaatatggagcaaaccgcatctatgccgggcagatggctgtcctgggtcggaccagcgtcgggccagtcattcagaaaatgtgggatcaagaaaaggaccatttgaaaaagttcaatgagttgatggttatgttcagggtccggccaacagttctgatgcccttgtggaacgtgctggggtttgcactgggggcggggaccgccttgctcgggaaggaaggtgccatggcctgcaccgtggcggtggaagagagcatagcacatcactacaacaaccagatcaggacgctgatggaggaggaccctgaaaaatacgaggaacttcttcagctgataaagaaatttcgggatgaagagcttgagcaccatgacataggcctcgaccatgatgcagaattggctccagcctatgccgtcctgaagagcattatccaggccggatgcagagtggcgatatatttatcagaaagattataaagtgtgtccagttttgcctgtctataaaagatgatagtaatttaccaagtgacatttgcagagaaacaggtgtacagttatcgttgtacttttgtacaatgtgaattttgttaataaattataaggtttgtttttttttttaaactctgcagtgttgatttttctctgggttgttttttctgccatgagaccaacaggtcaccagccttgttcaagttacagcaaacgaagctgggccttgtttggtctcatacttaattttcttttatatacatgtttttcttttacatgcatatatatatattttattttattttatgttttttggagacagggcctcgctcttttgtccaggccgggtcacaactcactgcagcctggacctcctagcctcaagcaatccacccacctcagccttccaagtagctgggactacaggtgtgcaccaccacagctggctaattctatttttttatagaggcgaagtctcactatgtcgccaggctggtctctaactcctgggctcagtgatcctcccgtttcgacttcccaaagtgctgggattacaggtgtgagccacttcaccaggcccattttctcctaaaacttcaaggacaaatcattaataatgtaacaggaatctttaggagaaaaaacaatttggtttactgataacaaaagataattggaaacatgagagtatttgagattggccaagcagaactatgaagtccatcaagtaagtcaaagatcatcgtttctgttttgaattgtgggtgataatgggtgggagagtgctacagtctgtatgtctgtgtctccctagaattcatacgatgaaatcttcactctcaagttgatagaaggtggggcccttgggaagtgtgaggtcatgagagtggagccctcatgaatgggatcagtgccttatgaaaggccctagagagatacctcatcctctccacagtgtgagacttcaaggggaagtatgagacttctctgaggaagcagacccttcacaagcaaaatcagccagcactttgatcacggacttcccagcctctaggactgtgagcaataaatgtttgatgtttataagccacccagactgtggtattttgttatagcagcctgaacagactaagacgggggtgttgcttccatcaaaggatgtactaagttgtggattatttgtgaaattgaattacaaccttttccttaaggtcttttaccacctcccccccaaaaaaatcccccaaaactgattcagattttcatactttaatgaaatattttataatttgcaaatttttaagtaatttatgaaaaacctagatcagtggatctcctctctggctgcccattagaatgtcctgtggagattaaacttttttttttcagtttatggaccaagagttttgatttatttagggtggagttcaggatcagaatggtttcagaagctcccaggtgattccggagtgagttggagctgcaagcccctgagctagattataagatgcttctgggaaagaaccacattttaggaatttgcttcccacccagtgccctgcatttaatcagcacctgatgacttggcaggacttgccccaccagggtctggctttgaagggtagtggacaccaggatcctttggattaatcctctgccacctctctcttttcctcaaccgagagtgaatttatgtaattgagtgaaagtctacgaatcataattgtaataaattaaggctgggcatttgtttgaaattagataggataaagccaaaggtttgaacaagttgtggatggtttgtaaaaattaatcttacaaaataaatgctgtgtgtgaacacgttgattaaattcaaaagggtattatttggtttttctgtaaattgaaccttgaaataaaagcacaacaaggttttcttaaaaaaaa

SEQ ID NO: 710408 - DNA, 384 bp, Homo sapiens
ggactcccgcactcagggcgagtctgtctctttcttaatacttcccagtagggtctctgtctggcatgatatgaggacttgaagctcggttgggttgtgttagcctcaggggacccttatccgctcttagccctggacccgattcttctagaagcctggagggaactgagaactttccaagtggaggtcgcatgaggcgaggtccctgtatggtgggatgtcacactgtcttgttcgtcccttgctctgaagggggtgcccttggtcggaatcagtgtctgggtgctgcgaatgccgatctcacccgctccgcagggtgttcagcctgcctgcagggggccagtctggtcctcctgggatatggcacggaccctgcagctcgcc

SEQ ID NO: 710409 - DNA, 182 bp, Homo sapiens
ctgggcgcggtggctcacgctcatgtttcctcagcacttcgggcaggccaagcgggacagatcacgacggtcaggagatcgagaccatccttggctaatacggtgaaatcccgtctcttactacgtattcaaccaaattggcccgcgcatcgcggcaggcgcctgtcttcccagctgctccg

SEQ ID NO: 710410 - DNA, 398 bp, Homo sapiens
taaaattccctaaacccaaaagggattttaaacccctggggtatggagtcctgatggggaaaccaaaacttttttgccctattttaggatagattaaaaatttggggaaatttggatatgcccttagccactttaaaaatttctttgccggtcccggttaagttttaaaattatttttttaacttcctaatttttgaggagggtggattttgggaaaccgccaattggaattggaagttaatttggaccccattggggggaaaatggggaaaaattttaaaaggcttgtttttttaaccggattgtaaaaccttttccggggtggggttttttaaacgaaaggggatttttgccaaaggtttactatttggaagccattaatttttgttaacccttta

SEQ ID NO: 710411 - DNA, 197 bp, Homo sapiens
ttatcatcagatgacattgaggacgtctctgcccggacctcagatcgtgtgtccagaccttaccctgccaaacagagctgtacgtggcacagtgcacgcagcgtgccgtgcgaaatatgtcttacctgctggacggtccgagcggctgggcgagcagaacttccacaagggccggtgcttcgtggagcatgtgacgc

SEQ ID NO: 710412 - DNA, 284 bp, Homo sapiens
aacgatggtaatattaatttgtttgaactgaggccccccactgattttttgacaaattgaatttttatatttaaaaaattttatgggaatgttccctcataatttttaaatcctttataaatcaagggagcctttaatttgtatatgtttcaggacaaagagattttattgcctctgggaagctgtttagtttgtattttgttgaacgtttttatcctaggaaaaaaaacctatgacttggggacctagatcatctgttacattaaaaaactgctctttcagca

SEQ ID NO: 710413 - DNA, 150 bp, Homo sapiens
aatcgagctcggctccgtttcgccctcggcggcgtcgccagcttgatgtggacgcgcatggggttcgcttcatcctccgggcgcaggcggaacgcatagtcccgcaaatattcgctggtcttgatgtagtactggtccgcgttggcccag

SEQ ID NO: 710414 - DNA, 387 bp, Homo sapiens
tctgtggctgctggtggctgttgctggcctggggctcgctgtctttgcgctgctggacgtctgtacctggtgcgccttccgtgcgccgtgctgcgcgcgcgcctgctgcagcctgcgcgtctgtgacctgctagctgagcagcgcttcccgggccggtgctgccctcggacttgtgacctgctgctgcacatgaacaactgcgctgctacctgctgcgaggccgactttgctgctgcgtctgcgcacctgaccctgctgcggggtgctcggggcgctgagggagttgcgggcgcacacgggtgcttggctggcctcgttgcgctgcggccaccgccagttcgcttgcgccttgctggaggcccttcgagggttgctgcacccgcctg

SEQ ID NO: 710415 - DNA, 770 bp, Homo sapiens
ggtggtcgtggccgtatctgtgtgccgcccagcgatttaccggggccagctgtctctgttgtcgtcgtgtgcgaatgttggtggtcccccgtcgtatgttcttgcagctcggcgtggatcgttggtcgccccgatgtgttggacacgccctgtggtttggttgctccccccttcgctggtggggttgttctgcacggggaccagccacagctctgatagtgtagggtcgccctgcgggggagtaccctccgctcgtggtgtggcgtctgtcggctgctcgctcgctcctcttgtcgggacactcgttttccgccgtgggtcggctttcagttacctccgctgtgggcaggaggtccgccgtctctgcgggccgcccgcactggtgcgcgcgttctgtgcgggccctccctggagtgtcgctcagtcgcgggtgtcggacgctgcttatgccccccccttttgtgcgccccgtcggttgaagctcgctgggctggtagagccccgacgtgctgcagtcgttcgtctgtatcacgttccgcccgctgttcccattgttccttccaactatgtgtctggccagcccatcaaccagcccgcgtgtctgaagtgttccccccatccaccggggggtgctttcgtgccccccccctgtgtgttgcccctccgtttgcgcctcgtcgaccctctcggcggacacccccttttccccccctttcccccgttccccccttccccccaccccgcccccttcccgggtccccccccaaaaa

SEQ ID NO: 710416 - DNA, 1040 bp, Homo sapiens
taccaaacccaacatttattggaaaacaaaaggaaccagtgggcttaaaggcccgatttcaattctcattcaaacttcaacttgaggatgtggggaacacggggggtgtggccagcccttgaagtttgcccctcccagggaggaaccagcctctgtgggaggagaggggcttgtcagacctctccagggccgtggcgtgggactcctcgtggctcagagaatgtgtgtgtgtgaaagggggtgggtgggagaagaagaaaagatgtgtgcagaacccccacagggccatgtggcgctgtgcagaacacacgctgtgggtggcaaagaagagacgtgccggtgtgacaccgtgtgtgcgccattccaatgcgcgttggagagaacacagacagagcggtgtgtggacacgcgggtcacccccagtggtgtatctggcaacagggggggcccagaggcaacacccgaaagcacctcgagagccaagacacagaactccaagaggcgtgagaggagacacacagggcgggggacccacaacacgggcactactgacactacccaggtgggaacacagtagtgacatctcacacaacgtttgataaagctggactatgagacaagatatatattcaaagaagagacccaaaaaatttttggtcacacgattgtgtacacatactattggggcgattagcggaaagtgtatccccgaaaaaaagcgtggcgatcgcccaataagattacaaaacgccttatatatctcctatccaacaacgagcacccggggaaaagtagacacagacgggagaaaaccgtgaaccacaaagcagcgaacagcagtagggcacaaacatccggaagaggactcacagagagacagcaacagcagacgacaacaaaaccccccggataccgcgacggacaaactgaactatgtaagagagggagcaaccaaccaaaacaagagtgaggacgaactagaggaatagaaagagcgaccggctatgaaacatgtattaacacccaaaagagcaagacaa

SEQ ID NO: 710417 - DNA, 950 bp, Homo sapiens
ggagcggggaaggacagcacgagcacccccaacaacctccctcctagcatgatgacccgagaaacacctacgttgcacagaacgcccgggggctgagcgcccgtcactgttgcaaatgggaaagaaaacagctcaggcaccccacgggtgccccctggctccccctccagtcacagcctggcacccccatcagggagcggagccgcctggcacgcggttccaccatccgcagcaccttccatggtggccaggtccgggacggcgggcagggggtgggggtggtgggggtgtgctggaatgggcccctgctctcgcagagtgtgccatgaggctgacccctgccgcgggggccctgaccaccaacaactcttaacaagtgaactcaaatgacccgaagggtcgcagacgaacctgagagaatcgggggacctgaggtcaccaagtgtggcatctaccttgggatcaacacggaaaccgcccccgtgtgtccgattcccctggagtgtgaagcatgaccagttcggccctcctgaagcctgatggaggtctggcgcaggcacaagagcgccgttgcgtgcgcaagcacagcgtcctgttggctgctgaacgggaagtgcggcgggcccgagcccggtcccattcgaagtggaggtttgcagttgtccagacaaggttggggggaattctattcagcgggttggtgggaccgcctggcttcgaaaactgtgacacgatttcaaagacctacgagattgaagccaaggccagggcttatattctttcctgggatacgttacgagggagggcagaaggatttcctattataccataatccggataataggggaaaattccatatttttgagagcaaagaaagatacgtatggagtggacgaataataggtttataatacgtaaatataaggataaagaattaaacatgataaacg

SEQ ID NO: 710418 - DNA, 353 bp, Homo sapiens
tgtgtctgtgtatgagggagggaaggggagtgattcaagaactgattaagaggaacagccccagcacacagtgcagataggtaacgcaaaagtgtgttgctattgtgtaatctatagcaagggaaatgctggagtgtttcgttgtctggttttgttttctggaagtagcttccagcaagattgggaaaaaagacaagcctaattattccaaagtacacactgattattccctggctttgtgtagctgtgtattttccttttaaaaataaaagcaccatttagatgtcagacttttaggtaacttcaaagtttatccagtcagtcagagtgtgtctcctggggcacctggagac

SEQ ID NO: 710419 - DNA, 875 bp, Homo sapiens
tagcatttagcagttctaactaatttagatgtgaggacaagtaaaaatgccattttctggacatgaatttgaacaatcaaatgattatcctccagaatgtctacaacgcttgaaatactctctacgggatcagagaagtcaaagagctatgtgtgtctcagaataatctccttcttctggtcacagtatctttgtctcgtgccaggtggctctttcatttcttggtagctatttttagacttacagtcattcaccaatatacagttagcagtgttctgatagacacagtatcagtcatattctccatttgagtcataatttcaaactcaacagagatttcagaaaggtgataatcatgtaatttctcatattaaaactgagaagagaggccaggcatggtggttcacacctgtaatcctagcagtttgggaggccaaggcggacagatcacttgagctcaggagttcgagaccacctagggccacaaggcgagaccctgtctctacaaaagaatacaaaaattagccaggcgtggtggcacatgcctgtagttccagccacccgggagcctgaggtgggaggattggttcgagtctgcgaggttgggtgctgcgtgagcccagatggcgccattgtgctccacgcgggtgacgaagcaggcgccggctcaaaaagaagagcgaggggccgggctttgttaaacaaacttttttaaacagagggaacccgggggtggaccctgtggccgctaacaaaagaaggcatcctcggaaaaaaaccagcacagcgggatgagaggggaaaacgaatccccgaagaagaagtctggtcacaatacccaagggcgggaaacccggacacgccccaatgcacgc

SEQ ID NO: 710420 - DNA, 103 bp, Homo sapiens
tagactctgtgcttgagcgcccagacaccccttcaggaatcaagggcacatcagcgtcacgtggcagctgtcgctgagaattgccctgagatgaaaaaaggtg

SEQ ID NO: 710421 - DNA, 323 bp, Homo sapiens
aggtcatcaaaaataaagtgtgagaaattgccacatttaaaaagacatgacaacttaatgtaaagtggtatctgagatggaatcttggaacagagaaagggcattgaataaaagctaagaatctctaaataaactatgccattttaaaaataatgatgtgtcaatattggcttattaatcataacacatgtatcatactaatgtaaagtgtcaacgatggggaaactgaatggaaggtatctgggaactttctgtactgtctcctcagttgtttctgtaaatctaaaactgttctaaaaaataaagtttgtcaaaaagaaaat

SEQ ID NO: 710422 - DNA, 630 bp, Homo sapiens
  misc_feature (31)..(31): n is a, c, g, or t
  misc_feature (90)..(92): n is a, c, g, or t
  misc_feature (98)..(98): n is a, c, g, or t
  misc_feature (103)..(103): n is a, c, g, or t
  misc_feature (105)..(105): n is a, c, g, or t
  misc_feature (109)..(109): n is a, c, g, or t
  misc_feature (119)..(119): n is a, c, g, or t
  misc_feature (130)..(130): n is a, c, g, or t
  misc_feature (158)..(158): n is a, c, g, or t
  misc_feature (162)..(162): n is a, c, g, or t
  misc_feature (168)..(169): n is a, c, g, or t
  misc_feature (185)..(185): n is a, c, g, or t
  misc_feature (188)..(188): n is a, c, g, or t
  misc_feature (192)..(192): n is a, c, g, or t
  misc_feature (205)..(207): n is a, c, g, or t
  misc_feature (214)..(214): n is a, c, g, or t
  misc_feature (216)..(216): n is a, c, g, or t
  misc_feature (221)..(221): n is a, c, g, or t
  misc_feature (226)..(227): n is a, c, g, or t
  misc_feature (232)..(234): n is a, c, g, or t
  misc_feature (236)..(236): n is a, c, g, or t
  misc_feature (251)..(251): n is a, c, g, or t
  misc_feature (254)..(254): n is a, c, g, or t
  misc_feature (266)..(266): n is a, c, g, or t
  misc_feature (274)..(276): n is a, c, g, or t
  misc_feature (288)..(289): n is a, c, g, or t
  misc_feature (291)..(291): n is a, c, g, or t
  misc_feature (294)..(294): n is a, c, g, or t
  misc_feature (303)..(303): n is a, c, g, or t
  misc_feature (313)..(313): n is a, c, g, or t
  misc_feature (318)..(319): n is a, c, g, or t
  misc_feature (323)..(323): n is a, c, g, or t
  misc_feature (327)..(327): n is a, c, g, or t
  misc_feature (335)..(335): n is a, c, g, or t
  misc_feature (344)..(344): n is a, c, g, or t
  misc_feature (348)..(348): n is a, c, g, or t
  misc_feature (366)..(366): n is a, c, g, or t
  misc_feature (373)..(373): n is a, c, g, or t
  misc_feature (378)..(378): n is a, c, g, or t
  misc_feature (384)..(384): n is a, c, g, or t
  misc_feature (387)..(388): n is a, c, g, or t
  misc_feature (390)..(390): n is a, c, g, or t
  misc_feature (396)..(396): n is a, c, g, or t
  misc_feature (401)..(401): n is a, c, g, or t
  misc_feature (403)..(403): n is a, c, g, or t
  misc_feature (422)..(423): n is a, c, g, or t
  misc_feature (429)..(429): n is a, c, g, or t
  misc_feature (442)..(445): n is a, c, g, or t
  misc_feature (451)..(451): n is a, c, g, or t
  misc_feature (491)..(491): n is a, c, g, or t
  misc_feature (504)..(504): n is a, c, g, or t
atttatttatctttcttttttcacatctctncctttcataaccattacctatcaattttttttttcaaacaaaaactaatactttccctnnnaaaaanccatntnttancaattaccanaaatttttatngccaaataatacaccactatatccatanaccncatttnntttatccactcatctnctnattntttccccctcttnnntattatnantaatnctatnnacatnnntntacacatctctcttnaantcccttcttagntcctttannnatacatatccannancanaactactanatcacatatnctaanntctnaatntccccccnccaaattcntatnttgaagcaaccaccaacntgatagntgagnctttanganntnattatntcatnanagctccatcctcattaatnnatttantgcctttataaannnnctcaanggaaccaattacctcctttttgcccttcgattcccttccnccatatgaggacncagcaacaggccccgtcctagaagctgagactgggccctcaataaatgaaaccagtttgccagcacgctgatcgtgggcttttcagttttcccaactatgagaaataaattcgtacttttaaatta

SEQ ID NO: 710423 - DNA, 138 bp, Homo sapiens
cagtagcatccttggctctactacaggagatgctagatagcaccgctaccagatgtgacaaccagaaatgtctaccctggaggaacacaaacataccctgatagagaaccattgtactaacctaacaaaacgtgctta

SEQ ID NO: 710424 - DNA, 215 bp, Homo sapiens
acctagaggatgggaagccagggcgtctactgaggcttgactggtgaggatggcattgtccgtatggaccttgatgagcagctcacgatcctccatcctccgcttcctggggaagctcctggaagcctgaagcatgcaggtccggtggacttcgtcggatgaagcgtgatcctccttccttccctggcccttggtctgtgacccacgatcctccg

SEQ ID NO: 710425 - DNA, 373 bp, Homo sapiens
aactctgagttggcactacatcagtgtctaggttgctgacttcgattctcacaaagcagtcatttccgcacgtttgagtaatcagtcgctaatcagtcattccgcacgacatgttacatatatccggacagacgtctatatgacctgatgcattcgacgactgtgtttcagcatcatgcactcatgcttcatcttcagtgcagcaaggatcatgtgttacaatcaggtagtatgtactcagaaaggctacgatgtatgcatcctcccacatcttgatcagccattgatccggtactatatagctgggtgtcgtattaatcctccgctggaatgagtagagcttgctatcaacattggggatacagcgtctatc

SEQ ID NO: 710426 - DNA, 670 bp, Homo sapiens
tcaacgggctaaaaaaaaaaaaataaaatcaagcatagaaacaccacaacaaacctgccctttttccttgtttcaggttacgtgaaaagcatccagagaagatatcccaaagactgaagaggtgtagttggctcattcacgtcgttcgtttatattatcaaggaaggggtttttgatcggctcgaacaagactcgcaagaatccgttttctattgttttttttgaggattccaatatgtcaaattccaattcaaaaaaacctgttgcgaattacgcataccgtcaacagcaagattataatgggatgaacgccatggtgggaaatccaatgatgtatcatcctgttgatttcgtaaacggtgccggccaatatggtccttctcaacacccagcatattacaccaactcaccattacctaatattccaccaacaccttttgatactgcatacggtgccagtcttttgccatctcacctattgatgggatctccatttgtttcctcgcctaacatgcaaagtggctataattctgcaagatcatctaatctcaaaagaaaggcttattcgaggcccgtttctaatcataacggttacaacggaaacagtaacagtaaccaaaacaatactaataacggaatgagtaacaccctcgaactattatagaatggg

SEQ ID NO: 710427 - DNA, 264 bp, Homo sapiens
  misc_feature (161)..(161): n is a, c, g, or t
aaaacaaaacaaaacagaacaaaaaatgggaggggggaccggtcgaaaagaaccgaagggtggagcgagatcgaggaaaggggcggagaattttttttttcttcttcccatttctttaaaaaaccaacacaagaaaacacacacacacacaaccaacgttngttccccgagtagaaacataaataggggggaatcgaacactctgttcttctctcttccaaagaaaaaaaaaaaaggtcacagtacagggaaaggccgggtttt

SEQ ID NO: 710428 - DNA, 399 bp, Homo sapiens
acaatatattctacgagctaaagggagaatgcagtggaaacgttctctttggtagatctggcagggagatgagcgaggcggcggactcttccagtgctgaccggcagacccgcatggagggcgcagaaatcaacaagagtctcttagccctgagggagtgcatcaggtccctgggacagaacaaggctcacaccccgttccgtgatagcaagctgacacaggtgctgagggactcccttcattggggagaactctaggacttgcctgattgccacgatctcaccaggcataagcctcctgtgaatatcctttaaacaccctgtagatatgcagacagggtcaaggagctgaggccccacagtgggcccagtggagagcagttgattcaaatgtccgctg

SEQ ID NO: 710429 - DNA, 220 bp, Homo sapiens
tgatcacgacccttctacgcccctcactgtgacgtgcggaccagaccggtcaaatctcggctacatgctggctcgcgaaaactcatggccttgtcgttgcgaaccaggagttaagacagcgcttggggatggatgccctggtagctggcgaggaggaggaaaccaaggggaatgaagtgaggccagtggacgggtctgctgagtccgcagaactcagact

SEQ ID NO: 710430 - DNA, 136 bp, Homo sapiens
tgtcccgcgagcctctggtccagcagccttgcctgtcgacggaacagtacactccgacgccggtcgcgctggggtctgctgcccgtcgagctcccctcttcgttcttctcaccagcgccctacggggtacctgacg

SEQ ID NO: 710431 - DNA, 329 bp, Homo sapiens
ggagtatctttatggtgttctctgtgtttcctgaatttgaatgttggccttccttgctaggttggggaagtcctcctggataatatcctgaagaatgtttcccagcttggttccattctccccgtcactttcagtacaccaatcaaacgtagatttggtctctccacatagtcccatatttattggaggcttgttcatttctttttactcttttttctctaaacttctcttctcgcttcatttcactaatttgatcttgaagaacactagtgttcttcaagatattaagtcttttgattaggaatacagcacaagactttcttcaccta

SEQ ID NO: 710432 - DNA, 294 bp, Homo sapiens
tcagaccttggcgaatctctctcctcgctgggtcccacagattgaatgtcacctttgagatagatgtgaatggtatcttcgagtgacagctgaagacaagggtacagtggaacaaaaataagatcacaatcaccaatgacccagaatcgcctgacacgctgaagaaatcggaaagggattgggttaactgaatgcttgaggaatgtttggcttgagggaaagacaaaaaaaggcttcaaatgggaggaagggagggaaatttcggccccggggtaccctgaggctccgaaattt

SEQ ID NO: 710433 - DNA, 1387 bp, Homo sapiens
ggatcgcatataactcttaaccacaaaacacgaagggagtatgacttcgtgcatactattactcatgcttacttgattctgagcagcaatgaactcatcgcgaaggatacgcacaagggccagcaagacttgcaaaaaggccagtctctatctatttcggtaggcctgaggacttggtgtctcgataactagcgtcggatacaatatcggtaagctatgcgcgaacagctattcactatctcagagaacatcagaacggcaaggacacactacctgcatctagttcatctaagtcttctcctatcagtaagatcccctacccatgtcgatatccttcgagatcaggcattttgagagcagagctgagacaataacggtcccacaccctaacaaatgaggtccagcgatgaccacccccagggattgaatcgtaccggtgatctacacgctcagttctttgagaaacgctacacaaaggtgacggtcgtccccctagaagaattccttttagttcgtcaccgcttgcgtacttgactctggaacattcacccgaaattacaggggattaacctatgtggaaacttacagtcagtataggcgccaccagagacagggtcacaagcggaaattcgcagcggttttttggaaaggcaaggatacatttagccctcgtacaccgcgtagtagagcctatgtggagcccaccgattagcattcgctccaaagcggctcttccggtggaaagtactccgttgcgcagatggaggccaccaccaagtccgatcgccacagtacagttgtacgatcatctctaattattctatggccctttagggacattgtgattggatcaatacgtgatccagaagaccgcaaatagaggcgagagagcaaatatcacacacccgatattgtaaaggtcacggcgaatacggcagcagattttacatgtcctacacaggataagcgtacaacagattctgccgccccgttgaagcgaacatagattgccgctagagaatagcgcatacacatctgttcccttccctatgtcatttggcaggagactagtagaagctcaccacgaagatcgtcactataataggtagatacaacagtccgatatggtccccagtaccccgaatgtcggtaacgcattattatacttatagaaaagcccataggagggttctcggaatatgccaatggcactctggagcaaagatatttacagatatggttaaccataaaggaataaaaaatacacgacaactcactttaattacgacccgtacagatagtcaagagcgaagctccaagttcagttatcagaagacacccaagtccaacgcggtaggggataaaggggaccaaaaccagagagaag

SEQ ID NO: 710434 - DNA, 88 bp, Homo sapiens
  misc_feature (25)..(25): n is a, c, g, or t
tcaacgcttctaacaattgtacggnggacatgttttattggaacatgctgttcatactttaacataaagctttcttaatgcaaaaaaa

SEQ ID NO: 710435 - DNA, 555 bp, Homo sapiens
cagaaaggtaactcccctaacatatttggaagttcacaaatgggtgctccatagtagatgctttggatacccctttatatcatgggacttcatgatgaattcctagatgggcaaagatggattgaagacaaccttgatttcagtgtgaattcagaggtgtctgtgtttgaagtcaacattcgatttattggaggcctacttgcagcatattacctatcaggagaggagggaataggaagaacgtctgagaaataaaattcgagctgatcatgagaaggccttggaataagtgaaggaaaaattaagacagtcacgagaggcagatatgatgagaatatcagacagcgaagaataaggtagtccaagaaatgaagataaaagagaacaagccactgacaacagtccatattcccaaccttgtaggaatacgtggtggagacccagaagataatggcataagagagaaatgttgacaaatacaagaaatgatgaaacatgcttgtgataaatatagtgaatatgggtggagaataatgaactagactattgaaggaa

SEQ ID NO: 710436 - DNA, 1376 bp, Homo sapiens
agcggggcagtggctgctgggagtgtcgtggacgccgtgccgttactcgtagtcaggcggtggcggcacgcggcggcggcgggatagcgcacagtgcgccttaacaagtaagcagcagcagttagctagtattcggatggtacccccgactggtcgcagcaccccggcgtcgtgtgtgcacgtcagccctcagctaacttcatgcgtcttccgtcccttcgacatcgcagccatggcatgatcagaatgaaccgaagacacaagagttgctgaggttcgtcatgggaagccttcggtccctatctcttgcattagaatgattggcagcatggcggcgcatccactagactaacaggacactatgggagacatgtcgatgaggtcacactgggatccatcaacctccagacgagtatagccttgaagtttggcatgcgaatatcgtatcacagtgacatgctgggattggcgttgaattgggttaatttggggcaaacgcgatgtagagcctgtgcactcactgtacacctgggtatcgtagcctattgggaattagggtcattaagggatagacacatttgggaccccgggacttagcgaggactcaccgttgaaaaggaacacgtaaagacttcgcagattgcacgggcaaatttccccggaggctactttcttgcatcctataggagtagaggcaaatgtaggtggtttcacttacttccaaggttagtccatggcggatgaaaggcataaccgcgtcctatctgatgcgatttgaccgaaaaagcggttataaggggacgaacacagtaaaagggttacccccagagattgcacagcgaaaggatatatggcattgcagagatctggagtctcaggattcaccaaggccggtagttccttgggatttggggaggaaccaggcggagcgaaagggtcgataactttgagtttgcacttggaatatttacaggtcaaccgcagggatttcccacttggggacactgtggcgcgttataatcattggaaaaggaagacgcggttaaggcgtttttccaaaatactttgcccttttatattctcaccccgcgcgtccttaaggaaaggcgcaattgtccacggggttgggccatatcctggttgaaaccgttttaccccgtcggttgggcaaaaatttgggcagagggagaccgcaccggcaaagaacatggtttccacttttcagtttcgcatgcccttggttatcttaattatttagggcaagaaaacttcgtaatgtgttcaacagtatggtttacctctttctgtgggtcctaaaaccacgactcaagaatctgtgcagggttattctggatgaggaggaccactgttccccc

SEQ ID NO: 710437 - DNA, 370 bp, Homo sapiens
gcaaagctgaaaacaaaaactcgttgaactcgtaaactgaaaatgatttacgagttattcgctaggtatcaactttatagcacttttattaaaaacaaattagttagaaaactctaataaaactactatatatactaacacaataactaagtaatgttgtttaatgagattattgttagtatagctgtaagtactggtactatgggataactcgtaaactcgtaaaactcgttggttgcgacaggttattttttttattgttgttttagggtaacgatttacgagttcacgcattttagttttttgaataaataatatacggtgcctagcaaccaaaaaacgttcaatgttatggctcgcattaacgtaa

SEQ ID NO: 710438 - DNA, 466 bp, Homo sapiens
tgcgagtgtcccggcggcttcctgctcgacgcctcccgcgcccgctgcgtggatatcgccgagtgccgagagctgagccagcgcgggctgctgtgctagagcgagcgctgcgtgaacaccagcggctccttccgctgcgtctgcatagccggcttcgcgcgcagccgcccgcacggggcctgcgttccccagcgccgccgctgtccctgccgcccccgccctcggcccggccttcggttgtcccctgagggttttccgcgagctcggcctcgcttctgctccgacttgtggctcgggcccagggaccttcagggcccgcagaccctcccggcgcctttagccccggggcgccccttccggcccccctccccggttagcgggcggttgtacggtttccggcgggccctgcttgccttcctcccaaagggtgattcatagaaaatgataaatcagatcgtacataaaa

SEQ ID NO: 710439 - DNA, 1437 bp, Homo sapiens
  misc_feature (1272)..(1272): n is a, c, g, or t
gacctgacactgtcatgtccgggtcccagaactcaggacggtgaatggctctcagatgctccttggtgtttgtgttgctctcgatggttgccggcaggtgtggtggctccactgtcgtctgagtcggcgcatggctgagcacgctgcctagtgttcttgcgggaaccgcgtcatcagattgccagctcgcgacaagactcccagattggccgaggaatctggtctggagagaggagcgtacatagagtaccctgtctaaacacacgtgtctgtcgaggtcgcagaccgaggaggcttggggcaaaggatttcgtagaccaccggaacctcggttccgtgacaccttggcgaggtcccggaatatctacttcgactcagagaatttcgggggcttgggaatctcaggcggcacactctgtacactgctgtatctcttcgagtgcacgacgcttacccagaagagtggcttcccacgtaaggctcattccccgcgattgcgccgttggctctagttgccggctgtcactccgtaccgagccgttcgatagtgtgcgacgcggaactttcgacaacggatcgcggctgaccgcgacgtgcaagctgcatgctcttaggcgagagtacctccgagtgtctgtccccggcaggcttgtctaggctgggagtagttcggtcgctcgggtgtcaacatttcgtgaccaattggatggtcatatatacttcgaccgtaggggaccaccagtctgggagtggcaactttggcggtcgaaagcgcggcgcagggaggctgccgaagagctgctgtgtctgcagcaactgagggactcacatgtctcgactcagggcaccagggacgtttggtagccagtcctgcaacagcggcccctgcagcgggtcagcatggaaaggaaccgtgggtgccttagggaccagtactttggggggtgcgtagtacgcctcacggtgtgtataggttggcgaagttgactctaattgttgtcaattccgtggagctgttggcccagaataaccgatcttccctgggcggtgcaataacaactcgcatcgcctcacgcatcaagagaactgaagtcgttggaccctggctttagttcccgcgagaacgggtggctcaggcaggaccctgctcgtgggtggcccgtacttagcctagaactccccattgtggtgtcttgtgtttcaaaatagaaggccggactgccgggggttgtttgtttccaagaaaccttattgaatgaactcggcttagtntcagagagcttggcgactggccctaattgaagagagtcctgaggtccttccaccctgtggatgccttgtcaagcgtggggccgccggacccttctgtgttgtccttgggcgcttgtggtaatggcgcgtaacggtgctgagagagagccgcaatatatgtcccaa

SEQ ID NO: 710440 - DNA, 482 bp, Homo sapiens
  misc_feature (352)..(353): n is a, c, g, or t
  misc_feature (464)..(464): n is a, c, g, or t
  misc_feature (466)..(466): n is a, c, g, or t
aaatgtgctcccagcttagtgatgtgggtatactagggaaagcataaatgaggcctcaaaaggtgtgcggggcccaaagatggcaaattcataaaactcatggttctccatttatttaaaagagagcgggctctgaggaatggatttatattaatcagagctataatagacggattaataaaatacaaggccatttattcattaccggtgaatgtggtaactaccaggctgaaattcaggtcggtgggtcagcacatgctcttccgggtaggaaaaatctatttaagaaaccatattaaaatcagaaggttacatgttatatatggaagctgaacaaatcaagtgggacgtnncgaaaggctatttccagccgggcgcaggggctcaggccggtaatcccagcacttggggaggccaaagcaggcagatcacgaggtcaggagatggagaccatcctgaccaananggtgagaccccgtctc

SEQ ID NO: 710441 - DNA, 191 bp, Homo sapiens
  misc_feature (58)..(58): n is a, c, g, or t
  misc_feature (67)..(67): n is a, c, g, or t
  misc_feature (85)..(85): n is a, c, g, or t
  misc_feature (102)..(102): n is a, c, g, or t
  misc_feature (114)..(114): n is a, c, g, or t
  misc_feature (117)..(118): n is a, c, g, or t
  misc_feature (138)..(138): n is a, c, g, or t
tcattgtgaccaatggcctttttacaacccggcctgtggcctgttcaaggcaaaaccncgacccttnactcccgggtggggaggnggccaaggatgctgganttgaatcaaacnctnncagtttttcaggcatttttntttcccaatcgaattgaacccattggccaaataaagttgaaattttcccccca

SEQ ID NO: 710442 - DNA, 134 bp, Homo sapiens
caacccggagccccccaggacttgctgtgtggggtccaggggggctcggttgtcctgggggccccaggctgggcaacaggcggcctcgagggctggaagatgaggacgatgtgctactggtgccacttgctgag

SEQ ID NO: 710443 - DNA, 711 bp, Homo sapiens
  misc_feature (414)..(414): n is a, c, g, or t
  misc_feature (444)..(444): n is a, c, g, or t
  misc_feature (456)..(456): n is a, c, g, or t
  misc_feature (491)..(492): n is a, c, g, or t
  misc_feature (548)..(548): n is a, c, g, or t
  misc_feature (554)..(554): n is a, c, g, or t
  misc_feature (560)..(560): n is a, c, g, or t
  misc_feature (564)..(564): n is a, c, g, or t
  misc_feature (570)..(570): n is a, c, g, or t
  misc_feature (578)..(579): n is a, c, g, or t
  misc_feature (587)..(587): n is a, c, g, or t
  misc_feature (600)..(600): n is a, c, g, or t
gggctcccgcgtctcgctgcaacatcttgtcctacgactactccggctacggtgccagctccgggcaaggccttccgacgaggaacctctatgcccgacatctgacggccgcatggcaaggccctgcgcatccaggtacggcatcagcccggacagcatcatcctgtacgggcagagcatcggcacggatgcccaccagtggacctggcctcgcgctacgagtgtgccgcggtggtgctgcacctcgccgctcacctcgggaatgcgcgtcgccttccccgacaccaagaagacctactgcttcgacgccttccctaacatcgagaaggtgtccaagatcacgtctcccgtgctcatcatccacggcacggaggacgaggtgatcgacttctcgcacgggctggcgctctacgngcgctgccccaaggcggtggagccgctgtngggtggagggcnccgggcacaacgacatcgagctctacagccagtannctggagcgcctgcgtcgcttcatctcccaggagctgcccagccagcgcgcctagcnggcggncccaancggncggacntcagcaannaaggcggnccccggacctcancccacgcgcacaggcccccacacatggggcatgcatgtgacccccgcagggcggcaccagggagccccgcccagatccaaaggggctgtggacgatgtacaggcaacataa

SEQ ID NO: 710444 - DNA, 585 bp, Homo sapiens
gtattaaccaattgatgaacataaatagacacataattatcgtccaaactagattgtagtccgtcaggtgacactcttgggatcgcacattactatgggtacggataaatatatagtgacatgtatccacccttctgtctacctacagaatagtttcactgtcttaaaaatcctctagcactctgcctatatatccctccttaccctcaacccctgacaaccactgatctaataatgtctccatagttttgccttttccagaatgtcatatagttggaatcatatgattggcttctttcacttagaaatatgcatttcagtttcctccatgtcctttcatgtattgctagctcatttctttacagtgctgaataatattccatagtctaggtgcgccataatctcttctctcacctactgaaggatatgtgggttgcttccacgtccgggaaattatgaataaagctgctataaatatcagtgtgcaggttacagaacagatatatgtaacgaactcattttgtacataccaaggaactggatggctgaatcatatggtcagagtatgtttaattatatcagaaa

SEQ ID NO: 710445 - DNA, 966 bp, Homo sapiens
  misc_feature (414)..(414): n is a, c, g, or t
  misc_feature (444)..(444): n is a, c, g, or t
  misc_feature (456)..(456): n is a, c, g, or t
  misc_feature (491)..(492): n is a, c, g, or t
  misc_feature (548)..(548): n is a, c, g, or t
  misc_feature (554)..(554): n is a, c, g, or t
  misc_feature (560)..(560): n is a, c, g, or t
  misc_feature (564)..(564): n is a, c, g, or t
  misc_feature (570)..(570): n is a, c, g, or t
  misc_feature (578)..(579): n is a, c, g, or t
  misc_feature (587)..(587): n is a, c, g, or t
  misc_feature (600)..(600): n is a, c, g, or t
gggctcccgcgtctcgctgcaacatcttgtcctacgactactccggctacggtgccagctccgggcaaggccttccgacgaggaacctctatgcccgacatctgacggccgcatggcaaggccctgcgcatccaggtacggcatcagcccggacagcatcatcctgtacgggcagagcatcggcacggatgcccaccagtggacctggcctcgcgctacgagtgtgccgcggtggtgctgcacctcgccgctcacctcgggaatgcgcgtcgccttccccgacaccaagaagacctactgcttcgacgccttccctaacatcgagaaggtgtccaagatcacgtctcccgtgctcatcatccacggcacggaggacgaggtgatcgacttctcgcacgggctggcgctctacgngcgctgccccaaggcggtggagccgctgtngggtggagggcnccgggcacaacgacatcgagctctacagccagtannctggagcgcctgcgtcgcttcatctcccaggagctgcccagccagcgcgcctagcnggcggncccaancggncggacntcagcaannaaggcggnccccggacctcancccagtagctggtctccgagcctggggctgcgtgtgtgactcgtgctgctcgatccagggggacctggatcctttccaggggctgtcgactatcgtgcaggcgatatcacctagtgactgcgcttgaccgtatgagtgaaagcttccactgactctatcgtgaggaaccggaagattctgacgcattatgaggagtcggagagcaggtgcctagtggacggaggccagcgagtaaaagccgaagcagtggggcgtgcagtacagtggacgacgtcagcgaagacccgggtccaacgtggacccaggtgttctttgacctaatgcagagaaatcagaacgagcgacccatgtcagaaaacaacgacc

SEQ ID NO: 710446 - DNA, 119 bp, Homo sapiens
tattccaaggaataaatggtcaaatggtcacaagagtccaatcggtttatacgcaaaggaaacagaaatagtaaattgtcgtttggaacatctgcaaagcctctcatgaatttttaaca

SEQ ID NO: 710447 - DNA, 144 bp, Homo sapiens
cagcatgcgcccccttcatacttacttatttatttttgacagtgtcttgcttccccacatgctgcggtgctttcctaccagtgtagagttccaaactccaagactgaagtacacaaagtagggggcgggccctgtgctgggggg

SEQ ID NO: 710448 - DNA, 205 bp, Homo sapiens
tctgtgtaagacggagctcgctctgtcgcccaggatggagtgcagtgagccgagatggcgccattgcactccagcctgggtgacaaaagcaaaagtccatcttaagaaatatatatatatattatatatattcttagttctaaggatttcctttaattctatgattctctgggatttaaatgcattattcatatttcttgaaggc

SEQ ID NO: 710449 - DNA, 569 bp, Homo sapiens
  misc_feature (255)..(256): n is a, c, g, or t
  misc_feature (258)..(263): n is a, c, g, or t
  misc_feature (267)..(269): n is a, c, g, or t
  misc_feature (276)..(276): n is a, c, g, or t
  misc_feature (281)..(281): n is a, c, g, or t
tctagtgtatttgtgtaaagactccccaagagctcaagagggagttgctgctctgcaaatgacaaaaggtgtgtagctgcaagccaatcaggcagaacatttaacatcgtcctggccattaatgactaagcctgcgccagctcaaaagcggtcggaaacagacgtcagactatgggacagctaaaacattgattctcagggatgtcgtccaagaggaggtctctgaagctgggtgtcatcctttagggtggcccnncnnnnnnaaannntaaaaantaaantgggtgacacattatgcctcctggcgagttcataaacactttgaacggcaaagacaccaagtcccggggacttccaacgaagatcttggggcaagaagagatgtccaccagcactttctgttctgtgactgtaaagtgtaaatggatctggggttgcgtggggaagggggggcagagggagagaaacaatgtcttgcggctgctgttgctctggctgctgctccacggggcttgttttggatccccctgcagtgaaacaggtcctgtacggctccgccactgtagtag

SEQ ID NO: 710450 - DNA, 786 bp, Homo sapiens
agcggggacgtggttctccgcccctgtccactggtgccatggatgactgtggcacagtagactgtagtagtgaggctcgcgggggcatgctgtgccatggcatgtgccgtgctgaactgagctggtgtctgtgagaggacctgctgatattttgaaaaggaaatttcacgtctgagaaggcacgcaggctcggctgtccaagatcacgcagtttgacgtacgcctggtgcctggtgcggagcaagttacatattgactgacatccgtaaaggcatcgtgctgctcgaggagctgctgcccaaagggagcaacggaggaaccacgcgggattacgtcttctacctggccgtggggaactaccggctcaacggaatacgagaaggccttaacagtactgtccgcgtggtttgctgcatgaccagacgccccacgaatcaagccagtgcctacacggtaactggcagcgtgctcattgactatggccatgaagaacgatggactcgtgggcatggccatcgtgggaggcatggccctgtggtgtggcgggactggccggactcatcggacttgctgtgtccgagtccaactcctgaatggagacgcgggagcccactggagaacgctccaggagggccctgtccatcctcgctgtcctttccctgttctcccctgccccccgtctctatcctctgtggccttcagctaatttctgctcccctgagattcgtcctttcagcccatcatgtgctttgggatgagtgtacataaacggggctgtggcttggg

SEQ ID NO: 710451 - DNA, 134 bp, Homo sapiens
ccagtggttggtaacttgcccaaaataaccctttggttttggagtattcataaaatgaaggtgttgccatctcccttaatgctgggggaatatatttcaattgactcaagtcttcattgctgaatgatatctta

SEQ ID NO: 710452 - DNA, 363 bp, Homo sapiens
ccaacggcctgcccccaaaagcgcaaaaaattgtaaggcaacggcaggaggaactgtgcctggccaggcagtacaggctgattgtccccaacggtttctgcgatggcagatcaaaaaaaaaccctttgtagcaaaatcaaaaatctagtttcattttaaaacttttgattagctctcagttttcagctctatttattttaggagtttaatttgcccttctctccccattttccctcagtttccataaaaccttcattacacataaaaaaacacgtggggggcagtgaatttgcttgcctttcctgaaagtttttgggggttaaaattccagacttttattcatttaactatagtcccccgtga

SEQ ID NO: 710453 - DNA, 286 bp, Homo sapiens
  misc_feature (1)..(1): n is a, c, g, or t
ntccccgacgtgatacaccctataccaccaaggctgcagtgagccaagatcgtgccactgcactccagcctgggcaacagaatgagaccctgtctcaaaaataaaataaaataaagactttttaggccaggcacagtggcttatgcctgtaatcccaacactttgggaggccaaggtgggtggatcacttgaggccaggagtttgagaccagcctgacaatatagcgacactccatccctacaaaaaaattaaaaataaaaaaataagctggacatggtggtatag

SEQ ID NO: 710454 - DNA, 145 bp, Homo sapiens
cgtccattaaactcacattttcacaagtagcaaataatcctaactgtatagaatctggaatacaacacgcaatgggatgccaatgaagaacactggcggagctccgccctgaaagtgcatcgccctgatatagttgtccatgggg

SEQ ID NO: 710455 - DNA, 445 bp, Homo sapiens
  misc_feature (1)..(1): n is a, c, g, or t
ntatgtcggtaccatacattgtctgatgacaggagaatcgctgggcctgggaggtggaggttgcagtgaggtgagattgttccactgcattccagcctgggcaacagagcgagactctgtgtcaaagaaaaaaaaaaaaaagaaatgaccccatatcctgtccccccagtttccccaggggtaacatcttatttaaccaaagtacaccaccaccaccaggaaactgaccttgatccaacgcattccgccttattcggattcaccagcttcacatggtatggtgtgtgtgtgtgtgtgtgtgtgtgtgtgtgtacaattctcgtgcaatgtctcacctatgtagcctccgtgtgatagcccaccatagccaacatatctcatagctccataaaaaagatcctaggctcatactcttgcgtccctgcagagacctccctccgtgctc

SEQ ID NO: 710456 - DNA, 606 bp, Homo sapiens
  misc_feature (173)..(173): n is a, c, g, or t
  misc_feature (271)..(271): n is a, c, g, or t
  misc_feature (281)..(281): n is a, c, g, or t
  misc_feature (305)..(306): n is a, c, g, or t
  misc_feature (324)..(325): n is a, c, g, or t
  misc_feature (333)..(333): n is a, c, g, or t
aactgaacgcaaatcagccactttaattaagctaagcccttactagaccaatgggacttaaacccacaaacacttagttaacagctaagcaccctaatcaactggcttcaatctacttctcccgccgccgggaaaaaaggcgggagaagccccggcaggtttgaagctgcttncttcggaaattctttttctcgggcccccgaaaattccaatatgaaaatcacctcggagctggtaaaaagaggcctaacccctgtctttagatttacangtccaatgcnttcactcagccattttacctcacnncccccactgaattggggnntttttttntttcccggcccgggcaaccgttgactattctctacaaaccacaaagacattggaacactatacctattattcggcgcatgagctggagtcctaggcacagctctaagcctccttattcgagccgagctaggccagccaggcaaccttctaggtaacgaccacatctacaacgttatcgtcacagcccatgcatttgtaataatcttcttcatagtaatacccatcataatcggaggctttggcaactgactagttcccctaataatcggtgcc

SEQ ID NO: 710457 - DNA, 741 bp, Homo sapiens
acaaaatctatctaagaaaaatataatgaagacccaaataaataaaatcacaccaaaataaagagacattacaactgatgccacagtaatataaaggatcattagagacttaatgaaaaactatatgccaataaaggaaaacctaaaagaagtggaaaaattcctggatacattgtctaccaagattgaaccatgaagaaacagaaaacctgaatagaccaatatgagtaacaagacagaggcagtaataaaagaaaagcccagcacctgatggcttcgttgctaaattctatctaacattaaaaaaaaattaatagcaattctactcaaactattccaaaaaattgaagaatattcccaaactcggttctgcaaggccagcattaccctgataccaaaacaagacaaagacacaacaaaaaatgaaaactacaggccgatatctctgatgaacacagatgcaaaagtcctcaacaaagtatcagccaaccaaattcaataatacattaaaaagaccattcaccatgatcaagagggatccatctcagagatgcaaggatgattcaacatatgcaaatcaataaatgtaatacatcacattaacagaatcaagaacaaaaatcatgtaatcatttcaatagatggtaaaaaagcatttaataaaattcaacatactatcatgataaaaactctcaatgtgccggatatggtggctcactcctgtaatcccagcacttaggg

SEQ ID NO: 710458 - DNA, 431 bp, Homo sapiens
caggcactgaccttcagcgcctcggctccaccgccatggcgccctccacgatgtccttcgttggggggaactgcaagatcaacggccggaagcccactctggggaaccttatcggctctctgaacgcggccaacgtgccggccgacaccgaggtggtttgggctccccctactgcctatatcgacttttcccggcagaagctacatcccaatattgctgtggctgcccacaactgctactgactaatggggctttcactggggagatcacccctggcctgattactttggggattcacatgatcttgctgggcacaaagtgccccatgctctcccacagggacttttcgtaaatcccctgtattgtggcaaacttttctataaacgtaaccttccatcattgcacgttgtttttcagcatacgcttctgcc

SEQ ID NO: 710459 - DNA, 205 bp, Homo sapiens
gcagctgctgtggccctgtgagagacaaggcctgcacaggagtccagcagggttcaaataagtgaaggctccggctcctcatgccggaggaatgagggctcttcacgtctctgccacatctgccaccccttcccatgaggagtgtctagttacccagaccctagagcggcagtgcggccagcttgatgacgtgctgctagtcgtt

SEQ ID NO: 710460 - DNA, 161 bp, Homo sapiens
acacttcctacccagtagtctccagatgtctaccagggtgccttcttatgaccttggaagtgggccctgtattcctccatgagcatgcatgcttggtccagatatggtgccccgaggtgtacccaccacactctcactccatccccccgatacagcgacca

SEQ ID NO: 710461 - DNA, 124 bp, Homo sapiens
ccccatcatcgacatcatgcgctgtcctggcaacgacatgtcgttggtccacgctgcattgcgatgcgcgggcgctccgacaagccggtgctttcgccgtggctccgagagtcccatgcctcga

SEQ ID NO: 710462 - DNA, 108 bp, Homo sapiens
aggcagtggtgggcagaggtctccggcagtgatcacaggtctgtatgacaaatgttcttatatctcacgtgaccgaggatgggtcgtgagtgttcacaccatcagtga

SEQ ID NO: 710463 - DNA, 1273 bp, Homo sapiens
  misc_feature (128)..(128): n is a, c, g, or t
  misc_feature (1273)..(1273): n is a, c, g, or t
ggcgtgaaggagatgaatgacgtagcacggttcctgttgggggtgtcacgagccttgggtgtactggccatcagactctagtcgtggaaccgaccctctatagcttcgcctcttagtaaatggctccnacatgtgcctatgaatccgaccatgtagggtgtagatcgcaaggttggtcgcgtagctcttacatgtctacgggtacacaaagtaggatcacctgcgtgtgaaacgccgcaattaggtataccatgcttcacgcgataggcactacattcacaagtagtgcttgtggagttgtgtcaatgagggcctttgtagcatgacttgagcagagttataagtgcatactcttgaagcgcaacatagatgaactatcgtgtagatgcgcaaggcactatagaatgttacgacatatatgtgaaacgatagatatcgataggtgcggcattttcatccactaagatccctgtcgcgcttccctccacgttccctagaggtatcgacgtttgcccgcgagactagtaactgcagatgggccacatgggcaccgagttcgaactcgagttgatctaggatggctaatcgctcgagatttctagaaagtaacagaggaaggggcccggattgggggagataactctggccttattgagattgggagcagatctatcgttcgcttccctaggttgggaaccaattgagaggttcatccatccaacaagaggtaggggaagggacaacaatttcgacgctgtttcccttttggtgaagagggacgtacttacaatcggtacccatcattgaaggcgagaaaacgcaccttcagaggtagaggtcacgaaggcgccatagtcccaagggcaactttcctaggccgcgccatattcgacgtggcacacccattgtacagagaaatatctcagatggttccgccaaaatcaagctcaacaggtgtgagaaaacgatatagggcccccctttgggtgaacacttgcaattagaacatgtagtgaacgaccttaaggatggagccttacctatatgggacaggagggcatgatcagcgttttgaagcgtagaggaaatctagggtgaacggagccaccaagtttaattccgaatcacattaaggcatagagcttgaacacaatcaaagcgggcgatggggaagttggggcacaggcagattggggacacccccatgatggggattgcaagccatgtatttcagagcaatagggcccaatttcccaatagtagacacacaggn

SEQ ID NO: 710464 - DNA, 305 bp, Homo sapiens
aacgagcatgcatatcttttcattcgaatctacagatgaaccctgagcagacgaacacagaaaagccatgaagacttactgcttaattcaggagcttacaggattcttcagagtgtgtgtgaacaaaagctatatatagtacgtatatccaggatacaaataagagagagactatggcttgaggtgagaatgtactgcattacaaggtctacagcacaattaagacacagaaagcagatgggaagagggtgtccagcatctggtggttggtttctcaagggattgtctgtgcaccaaattacttc

SEQ ID NO: 710465 - DNA, 170 bp, Homo sapiens
  misc_feature (21)..(21): n is a, c, g, or t
  misc_feature (44)..(44): n is a, c, g, or t
  misc_feature (55)..(55): n is a, c, g, or t
aaggtgcggggtggcacacgnccttttatgcccactactctggnagctgagaaanaaaatcacttgaacctgggaggcaaagattgaagtgaaccaagatcacaccactgtactccagcctgggcaacagagcaagactctgtctcaaaaataaatttaaatttaaatgc

SEQ ID NO: 710466 - DNA, 536 bp, Homo sapiens
  misc_feature (11)..(11): n is a, c, g, or t
  misc_feature (110)..(110): n is a, c, g, or t
  misc_feature (147)..(147): n is a, c, g, or t
ccatgcttggnaaaggattgattactaggatattaatccaggttcatactgctgtaaagactgcccgaagactaggtaccttataaaggaaagaggtttaattgacttcncagttcacagcatggctgggaggcctcaggaaacttncaatcatggcagaaggtgaaagagaagcaaggcatcttcttcacaaggcagcaggaaggagaagtgttaagcgaagcagggagagccccttataaaaccatcagacctcgtcgggtgcggtggctcatgcctgtaatcccagcactttgggaggccaaggtgggcggatcatgaggtcaggagatcaagaccatcctggctaacatggtgaaactccatctctactaaaaatacaaaaaattagctgggtgtggtggcaggcacctgtagtcccagctacttgggaggctgaggcaggagaatggtgtgaacctgggaattggagtttgcagtgagcagaggtcgtgccactgcactccagtctgggcgacagagcgagactcagtctc

SEQ ID NO: 710467 - DNA, 911 bp, Homo sapiens
gatgcctgcctgccggcgtgtgtcaagtactgcgggggaagcttcgccgcacaggatcctcgggcgaggcgccacaaacggtttatacgagcgcagctagtcaatgggagctctgttgtgctctgtggcggcttcatgggatgatgcgtccatatacttgtactacttgtgctgaggtgagctcagtcgatgtcacgaacgattggaaaaatgtatcttataattattaaacgacttaatgatccatacggaggtgagctataaagggacaggtcgaggtggtgacagtgtagtctatggaaagagtgttgaaggatgacccgtcatctcagattatgaaattcacgggggctgggaaattgtctcgtggaaggtcagatcgcggaggtcaagagtaaccgatgtgtagccagaatctttgtggaaccgtcgaccttcagcaagaggctgcgagggtatcgacagcatcctgggcgagcgtgtcagggctcggaatggtgaatcgcgtgggaaaggcaaacaaaatgcgcaagagccgcctggggcaagtgaagaccattgagcgccattcctttgggggagagggggaccccactggagaagtccacacgggaagaggctcggcgggcaggttgtgatgcacgacgcggtgggagcggcaggccgggggggggagcacccaccaagggccgggctgggaacacaccgagcccgcagagaggcgtaaggcccagaatagtccaattcagagccggagaaaaagtatataacacactcactgaaatggaagcaaatatctgtcctctgtttttttcttctcctcctttatctcactgctgtctacgttctttgctccacttcagaactcgacacagtgaccagaccaccacgaccagaacaaatacagcagg

SEQ ID NO: 710468 - DNA, 668 bp, Homo sapiens
  misc_feature (380)..(380): n is a, c, g, or t
  misc_feature (471)..(471): n is a, c, g, or t
atttatcttccacccacaccccagctgtcttcttgagcaggatttaaaggggctccaggatcgttctcttctgtgtgtcccacatttggtccatagggacactcaacacctattttgctctaataaactcaaagtgcagaccaatcctaccaaccgtgcagcctgttcagtcgccgaagaggctcaccaatccctctctcctgatctgtaggtttccagggctggagtcagacaacaatcccctatgctcccaacttacaggttctctgagtggcccacatggagaggaaaaaatagtatgagaaggattacttttcaggactttccgggactgagacaggaaaatactgggggtgggggaggggtctccagagaaatgnaaccaatggattatatagtcgtgaactatggctatatctgggtctatggagacttattatgaggaattggctgccacagattatggagctngtaagtcctaccatatgccatctgcaagatggaaaccccagaaagcggggtggttcagtctgaatccgaaagcctgcggatcgttagcagtaggcagaggagggcgaagttgtggttttggtctggtgaagcccccgcactaaggggatgcggcctgctgaagggaggcaagtactgggtcccctggggggcggggg

SEQ ID NO: 710469 - DNA, 282 bp, Homo sapiens
atgggaccggctgagacacaagcagtaagacataaaaaacaaagaaggtgtattaaaaagaaacaaaactttcctaaatttaaccaatgtggctgtctagtacccaagaaaatctaagtaccaaacatttagcatttaaaagaattcagctgaaatgaagatcaatgtactaaaattaacagtgtatctatattctaacagtagagaaaggaaatacaataattaacaaaactacttagggtatgggaggctgaggcaggagaattgcttgaacccgggagg

SEQ ID NO: 710470 - DNA, 202 bp, Homo sapiens
  misc_feature (191)..(191): n is a, c, g, or t
agctgaactactgtgtctgcctagaacccagagcagaatttagatctcagatttgaaagcttgcctgatatgcctgtccgtgggaagagcagtcaccagtcactacctaccgccctccaggctttggatcacggccattttatatccttcacatgtcttcaactcttgactacccactattgcttcagcgntcttgacgggc

SEQ ID NO: 710471 - DNA, 197 bp, Homo sapiens
gtttttagacacatttttgtccggagtttaggagcccggtttatctattgtgtggcaaggttccctataaccataacctaacaggaaccggttttgactggatttggtggggattctgtgttattgttgggaattggggaattgaaacctggaatttcggtcgaagtaataaaaaagaggttaatcgtttgcggccg

SEQ ID NO: 710472 - DNA, 374 bp, Homo sapiens
  misc_feature (191)..(191): n is a, c, g, or t
catgccgtaatttgggagcgaggcgggtggatcacttgaggtcaggagttcgagaccagcctggcaacatggcgaaaccctgtctctactaaaaatacaaaaactagccagatgcggtggtacgtgcctgtaatcccagctactcaggaggctgaagcaggagaatcacttgaacctgggaggcggaggtngcagtgagtcaagatcaccccactgcattccagcctgggagacatagcaagactccgtctccaaaaaaaaaaaaggtaagccttggggtttaaaagggcccagggtaaacccttggaaaaaactttcaaaatttaacacgtgtgaaatggggggcggcggggtaccagagaggctccagaatt

SEQ ID NO: 710473 - DNA, 282 bp, Homo sapiens
cagcagtgccaccataatattatgaattcatcagccagcagtggtggtttgcacctgtaatctcagctactcgggaggccaaggcgggagaattgcttgaacccgggatacagaagttacagtgagccaagatggtgccattgtactccagcctgggcgacgagtgaaactccctctcaaaaaaaaaaaaggaaggaacgaaatgaatattttgaaccaaaattttaagggggaaaaaaaatgcccctcttttattattttctgcctctgaggcttagcctt

SEQ ID NO: 710474 - DNA, 260 bp, Homo sapiens
catagtcgtctggaaacatcaccatctgtctgtcttgcccaagcacaggtactgtgcgcagactgagctggtgttggactgagcagtcccgtctccagggaaaggatctgtgatagttcagagagttcgactggtgcgttccaggcgccacagtccttatttccttgttcttggcttttgcctttgtaaaaaggctggatcacagcccggacaacagaactctgctcctgggaactctccctttgccgaaggttatgctt

SEQ ID NO: 710475 - DNA, 132 bp, Homo sapiens
  misc_feature (66)..(66): n is a, c, g, or t
  misc_feature (93)..(93): n is a, c, g, or t
gaaaaaacacacacaccctgagaaccaaaattgatctgaaaatactgtttcgcttcaatttcattncccccaacaatacctagggcctatccnctccgcagtactgatcatttctattttccccctctattg

SEQ ID NO: 710476 - DNA, 236 bp, Homo sapiens
tgacttggagatgcatcgatgtgcactcagcagtgttgccagatgtctggggggactgtccgtcacggtggtcagacggcggcactgcgttgccagtccacgggtacacttggtggtggggctaccacaatccggcgctccgtgctcgaggctccggctaggtcctccgcagcgcctggtcgccgcgccctcctccccgtctgctgatggccgggccttcggcgccgggcagtctg

SEQ ID NO: 710477 - DNA, 81 bp, Homo sapiens
ttttgtgctcttggggagggggccccgagggatcgctacggctgggactcggagagaaccgataaactcatctttggaaaa

SEQ ID NO: 710478 - DNA, 683 bp, Homo sapiens
gccgcggacctcgctatggcaaggccggcgataatgagtggatgcccgtcaccaagttggaccgcttgctcaaggacatgaagatcaagttcctggaggagatctatctcttctccctgcccattaaggaatcagcgagcattggtttcttcctggtacgcctctgtcaaggatgaggttctgaagatcatgccagtgcagaagcagacccgtgccgatcagcgcaccaggttcatggcattatgttgatatcggggactacaatgttcacgtgagtctgggtagacaagggctacaaggaggtggccagcgacatccgtgtggacatcaatctggccaagctctacatcgttcctgtgcgcagagtctactagaggaacaagatcgtcaagccccacactgtcccttgcaaggtgacaggccgctgcggttctgagctgctacgcatcatcccttcactcagtggcacctgcagtcgctccgctgtgcctaataagctgatcatgaagtctgttactgaggacgtgctcaacttagcactgcgctgcacttgcactctggccaattttgcaaggccacctttgtaccattgctatgactacattaccagaccctgacctctgaaggagactgtattaccagtttacctatagcagttactgccacccgtgacctaccaggtc

SEQ ID NO: 710479 - DNA, 168 bp, Homo sapiens
ctgtctggtaacttacatgctacgcgtctctaccgaagcatgaactcccagtatctgaagctgcttagctcacagaaataccagatccttttatatcatggagatgtgacatggccctgcaatttcatggtggtatgagtggttggtggattccctcaaccagaagat

SEQ ID NO: 710480 - DNA, 107 bp, Homo sapiens
agtctccactccacctgcctacgttatgaaccctccttctgatgtatccaccaataccagtactgaatgtggccgagacgttttcagtaaatcttattagctaccgt

SEQ ID NO: 710481 - DNA, 445 bp, Homo sapiens
gcagacagatgtcaatcattccatcccttgttttgctgggtggagtcactggagcttaaagaaggggaagtaaactcaagcacacatcctggtgacctctagccacgggtcaaatttcactgatgtcaattaaaaatgaccaaagacccgcccctgtgaaaaccctgtgggcagccattttgtctcagggaaactgcccagatctgatgtaaagtatttccggacgtctcttcgttgtatatggcatttccctgaaataagcaactctctgaaaaatatcatagcgcatatcaaaatgaagtactctgtggtgaagtagaagtacacagtcaacaaagaaacttgccctcaggctgcacagtaaaacgttggaaatcccagagcagcaacttggaaatcccacctgctacatatttgcctgagtactttaaggttctatggacaa

SEQ ID NO: 710482 - DNA, 604 bp, Homo sapiens
  misc_feature (59)..(59): n is a, c, g, or t
  misc_feature (85)..(85): n is a, c, g, or t
  misc_feature (547)..(547): n is a, c, g, or t
tgaaagtccaaacaacgctagggcaaaactgtccttagcctgtggcattcttagaaggnagcaggagggtgagctggagaagaanataggcatgccagaaatatcccagaaataaacctgatttacatgtcttattttcttctcctttatctgataactactttgtttttaccctaatccttcaggaaaggcttagagagaattcagtgttcaattacaactgctgtcacaaacgcccagtatctggtagctttacatcatagtacagttatgcttacttgggaagacatatttcttcatattaaatacaaattagtaaaatttcatattaaatacaaatgaataaaattatctttgttttcctacactcagtgttagttagtatttaacagctaaagtattaagagcaaaggagtttccaaacttatgttctaaaccaagtcaggtcagagaattcatattaaatcattctatttatgggcaaatgtagaaagttctttacatcgagaatcaacctagagaaggtatgagttagctttcttccttnctaaaacattagtttctgagacttgcagataaacgattttttttaatgaaatgctta

SEQ ID NO: 710483 - DNA, 700 bp, Homo sapiens
atggacaggaaagatttattaatggagtgtggtgtacacagacttaacatagctgaccaagatgaattgccgagcatgcaaagagcacatcaaacgacattataacccactggcttctgctaacccattggggagccctgttggtcagtatgttacgcatcatgtaaaaagttgcaagctccatctttctttggtcctaagtacctaatgctcttgttagctgcagatctagagctaatcacctgcatacatgaggcaaataaggtgggtgcctgtggggatatactctccccatgatgacagggaacttgtgctcgtggtcccagagcaccaagaggaagggctgctgcactctaaagaccagttaggtgcggtccacatagatagcggatgctgcagccgactagcccgcagtctctgtcacgtccaagacttgtctagtgctgcatcacagaaaacctggagaatgtggggctttattgaccccacacaagttatggcatgaagacaaaaccgatgaattccaatatcttcattgaactgacagcgtattccggcctgggcaatacttttaattgggggaagaggcccggagaggtgggattgaaaattggacaatttccggtttacccaaggattgcctctaaaaacaaaagggccttggagccctgtttcatgggtttcaaaaacaagagtttag

SEQ ID NO: 710484 - DNA, 427 bp, Homo sapiens
  misc_feature (388)..(388): n is a, c, g, or t
catgctgtatcagaggatcccctcagcacattaggggaatcggtcttaatggatacggtttcttcaccgactatttctccctcaaactctgggcctcggctttttctctggtagccgggtcctcgggtgtgaacaggagcagatgacaaatagcacctagctgggtgacaacccataggaggtatgcctattaaaatgccaggggccacggaggtgtcacggtgaggatgacactatgggcaaggatggatgattggtattgtgaactacggatgagaaatgctccagagggggtacggaccagccttctctaggtgtccagacaccggtctgagtttctgggggtaaagatcatttccagcaggttttgagtctcatcggggtgcanggacaagtcgggtatcttcggtatgactaaaggtgctga

SEQ ID NO: 710485 - DNA, 292 bp, Homo sapiens
cttttggggccccagggggggggccccccccccccctggttcccccgggcgggagaactgttccccaagggggggggcttttcccccaggagggggggggggggcggggccctggggccccccaaaggccccccccgggtgtttgggggggttttttcccctttgggccaaaggttggggcccttggggccctttggggggggccccccccccccccccggttttgggttggaaaattttgggccccggggttgggtttttttaacccaaaaacggttttttttggggccca

SEQ ID NO: 710486 - DNA, 551 bp, Homo sapiens
  misc_feature (429)..(429): n is a, c, g, or t
ggatggtctgaccctgactgtgaggcgcctgcgcgagacccaactggtgctctacggagacgtgcatgagcgtgaagaggagcgtggacgagctccccagcaccgcgtgatcactgcagaaggcgctctagcaggtgcacacgctgcttagtcaggaccaagcatacgccgcacgtatggcttgtcaggacttgctggacagactttcttgtatagacaacctgaaagcctcactcagtcaagtggaggctgactcgaaaatgcgtcatgactgctgaggacagttaggttgcctactcggccaaaatagaaaccaacgcgaacaatctggaatcagtcaagggtttactagatgacctcgggaatgatctggataggttgtttgcgaaaagtgacaagactcacgggtctaaatgaattgcgtgacanggcgccggtttgaggcatttccacgacctcttaagaggaactgtaccaacttgacagcgaggcatttgaattccatggcccggtgagctcaatttccatatttaacctgttttgttttgctg

SEQ ID NO: 710487 - DNA, 1067 bp, Homo sapiens
tcagtaatttttacagagtccatgttttgtgacaaccatctctaatagccaactctttattaaacacactcctaaacaataaggaaccatgacattgctagagtacttgtaactattgtacagtatagaaacctccatttttgccttcgaatgcatatttaagagttaacagaatgaacaaaaaaaagtctgtgtcggcgataactagtgtttgactagcgtttctcaagaacttgcacgagtaacaagcaacaataagcatttttctcaccctcttcctgcttccacccccaaactgagaacatcactcaattgttcgtggaacgaaactgtaggctcatatactaaattctctactttatacatggtactgctgtaatatacctaatcataattacagttctcagatgcagggaccgaagttgggcatttaatcattgaggctttagcgttattctgactgtgatcagactgggccatgtcaaacccggaattttcaccaacagttcactcaccctccgtggtacattgcccattccaaggaattctgagagtaggccaaaccaactttttgccttcatggtcaccagcttctcagcttccttcttatagcgagaaatatggtacactgtccataacgagtccttttactgacgcacttactcgcattttccatcgcctgctggcctcgccgctcttgcgccaaccagaacgtccctcatggccctgatcttccctcagcttcctactgacttgactcccctcttgaacgcccccccttcgccctggcccccctgtcgcacctctcaccgcccttgcgcgcgcgacactccccgggaccgctctccgcatcgctcctcgcgctcccgcggtcggccccacgtcgccgggctcccagcctttcctccgcgattatcaccgggtctgacgaggctttgccgaataagagagggcccccggcggtccactgctggaccccccctcgtacggagccgcccacgtggggcctgccgctcaggtgctctccccgcgcgcgcctccgcgacgatagcgcgggcgccgctctg

SEQ ID NO: 710488 - DNA, 123 bp, Homo sapiens
agactaagcgatgaatgaggtgggctgttcttcctgtcttcctgtgacttgcccccagtcgttctcacacatgctggaaatccaggggcacctctgagtcttcccaggcctccatcctgagct

SEQ ID NO: 710489 - DNA, 177 bp, Homo sapiens
gcgcaacggtcccaactgactgagggcagatggtgacatgttatgtgaggtgttgcccggtgccagccagctactgaaccaaggtgaagagcgctggcgatgttaaacccagacagagatgacaggtctgcactactcagagagtactcgttaccatatgtagaagaaatggctgat

SEQ ID NO: 710490 - DNA, 759 bp, Homo sapiens
tacaagcaagaatttatcgatcacaaatattgaacagtaagtggtcagcaatttgtcgtcgatgattctaagtatcacagtcggtccgcctgctttaacaatttctaaagtgtcgtggttatccatattgttcgactgctatgtgatccgaaagcccagatgaccccctagtggccgagagatggcaacaggatctataagaacacgacgagagataagtaacactcaatgaatatctctgggaatgggactcatgagagtatgctcactgttgactgtctacctttaaaatgtcagaaataaaccctgcacttatagtctggaagtaaagctttacaattactgatatccttatatttgactttacttatcacggacgtgctaccgcctatcaagacactcagtcatttttttaaatatgtcattctccattagtctatagcactgcgcactcgcacttcattcaccatgtcgtactatctgcagaaagaacgtataatgattcattacgcaagcatttggcagaataactgcattgtagaagactgtgagaaggtagttacgaagagaaagcgaggttggcgccaaggactcagatatgtttgtaatgatagaagaagggtggaaggcatgtggtataatgatggtcgcaaagttcttgcactctgaacttgggttgatgagtaccttaaagaaccattccttcactgtactctaaacatgctgaaagaaattccatctgagggggagtggtagcac

SEQ ID NO: 710491 - DNA, 436 bp, Homo sapiens
cgaccgggaacagccgccagaggtagctaggatgacaggcgacggccaccaagccgggcggataaaactataaacagtagagatggggtatcagcgatatcggccaggcgggacttgaaatccggaccgcaagtgagccagccgccgtaggcctcccaacagtgcgtcggatacacggtagggagatctcccatacatgtatcctagagagattactgccagactggaggtcgggttgacaaatggcaaaattctactgaagttcagatgagggcatacatagtataccgtgatagtaaacttaagaatataaggcgacagggtcattgctcttttactgcagcctctaactcccaggctacaagttatcctcccagcctcagcactctcaactgtagccgcttgccatcacacccagactattatactttttatc

SEQ ID NO: 710492 - DNA, 172 bp, Homo sapiens
ccgatgaggactcagaagttcaagctaacatattgttgacattctgtggtacactgtgaaagaagagaaacgggagtcctgcatattgcgtgggacacagtgtgttatcaccagtacatttgaagaaaactaataaagtcttacggtcacaaatcgtctagaatcctctaga

SEQ ID NO: 710493 - DNA, 821 bp, Homo sapiens
tcacacgagagacaacaaaagttgtgtgtcacaaaatcccccccaaagaaccgggggcaaaaaaatggccaccccaggatctgtcctattctccctccagtgccccccccacgagtgtttattctcccatttatacccgccctttaggagaaaccaacgagcccaaccaagggtgacactacgaccgtccccccacgaattaatttcttggggaatctcctcacccccctctttgtccccccgaggaaactcttcacacggcgcttctcgccccactcttcacaactgcgcaaactactccctctctcccgcgccccgacataataaatagaaacattcttcccccgccccaccaaacaaatctttctccctcctaggatgtttttagcaaaaacatgtcagtatctcctggccccccgattgatacagattctattcaacgagaacattatttaaaatgacacctgtggccccacctcctattatgaatcttctcaccgctgagccaccctgaaaaaatggaggctataagcgaatcgcccccaacactcttgggtgccccccagatgtcttcttgaccccctatgtacctctcctttcatgaccacaccagccccctctcctcggtagtcctcgaaccccttaaattgaaaccacgactatttgacgcgcctctaaatagggcatgtacaacaacacctgaatattcccccctccttacaattaggctaagcaaagaacattctttgaatgcatacaacaactataagaaaaagaaaaaaatattccttttccgaaaggaaagggggccaccacataac

SEQ ID NO: 710494 - DNA, 855 bp, Homo sapiens
tgcaagaggagacctcacattcaggactggcctagtgaacgtaatccatgctttaaactggccattaaacagtcccacatggttggatgccctgtttgattgtgcgagtggggcttcaccccaaaccctggttcagagacctcatgcaatatcacttgtgaaagttatttccggttatactacacaaacatggtaatataccggtaatactatttatatattgcaaggtataacacgggtaggcgcttcaaaaaaaacaccctctagtgtgtaggattttacctcagaatctctacaatatacggggagacagacttgtggcaaatacaagcataatctccatagcgtgcttcagataccctcgggagttctaacggggaccattttcccgggtacttttcacaactaaggcctgttcacaaactcattctggacattaagcgtcaatataccttggccaaaaggctgggtttgttggaccagtaagccgcgtggcccaatccttccctatcggtagatagtgcggcgagcctttaaatcacaaaggtcccagggtggcccgtctacccggactctcccgagataaactctttaccaaagtggtcttcctcaaacagggtcgctagaggtcacctctgtgcccgtatgcaccgatttggccaagctctacacagggggccacctatcgaggacaccgcatgggcatctttaaactttcacccagaacttttcgaggtttcacagggtcacgctcgcccttaatttaaattccggcagttgcgggtccaacggacgggggatttagcgtgcctgcaactgcactcaaggcattgttgtcccacgccatattcggga

SEQ ID NO: 710495 - DNA, 173 bp, Homo sapiens
cgcaatcatgtgggcagaataggtctggtgctaactcaggtctatggaacatgatgactcctacttcgctgttcaatgaaaagatctattgcacttatgtttgtgagatgcaaaatataaggcaaatgccttaaataccgtatcatctttcaaggaatgttgaagctcacaga

SEQ ID NO: 710496 - DNA, 834 bp, Homo sapiens
ctgtgggctggttgttggaggagataggctgttcgcctcccccctcctcgggggcgtagataatgcccgggggaaggggctcgccccccccccgttgctgtgtgtagaggggtcgcgcggtggggcgtgccccgcccctcttcgtctctatagtggagggttgctctccctcggcgcacgcgcccccccgcctcttgtttgtatgaagcgtttctccgcgcgggtgccccgcccaccgggggcgcgcctctcttcgtctttgctctcgagagagagataagcgcaccccgccgcctgcccgcggggggggcggtctcctctctcacaccgcgccgcgggccacaccacacagatggcgctgcgcgggaggggcgcgcccacgtctcctcccgcgcgttgtctctccccgcccctctcccgcgcgggcggagcacaatgagaatatatatcctccccgcagatactatccgccccccccccgcctttcttcccgctgctgtgggtgtgagaaaccccgctgctctctcacagacacctttgtgttttctctctctcacgccccccctctaagtgtgttgtgtgatttgtataaaagcagagcggtggtggatgatggagagacacacacccacgcctctctgtgttctacacacctctctctcctagagagaaaaagaataaatagtgtgtttgggccccccctcggttttttttttgtgtgggggcgcgccgttttagggtgtatttgtttttttaacacagcgtgtttttttgtgtgggcaccaccccgcccccccctttttgcccgccggctgttgtgtgggcgccccccta

SEQ ID NO: 710497 - DNA, 283 bp, Homo sapiens
  misc_feature (144)..(144): n is a, c, g, or t
gattgagcgtagaatgatcagtagttcgagataacagttgtgcacttactgtacattatgtacgtcccattggtaagactatcacactgatctgtattggaagactataaggtaatgaggtatgacaagcatatagacacgcanacttgactagacttactcatctccatacatcattcatccagcgctatgcgtgaccactcacatccacacatcatcatactatctacaatttggcgactcaggtacagacccgtaccattacatctggttcttactggcg

SEQ ID NO: 710498 - DNA, 783 bp, Homo sapiens
gaagtcctcgcggatgtcaggcaagattccagaatgaatattatctagaattgccccttgttagatgatcttcccgctgccatcgaaaatgggtcctcagattttccataatacctgctgtcgcctgttccttcccaggcttgacgagctgtgcaccgaacgtcgtgtcccagaccaagggacgtagcgtagagacggttaggacgcaataacgcgaagtagtagaaggacattgttagtgggttgggtggatgggtgttcgcagctctcattttggctgtctggcacttcatataacaggcacgctgactcgcgcacatgacttgttggctgagagcatgccgctgtcacagggttggtgggtcgagtcggaccagtagtccctaaggaagtagtgtcgattatatctatctttggtacagttattcaggaagtgaaaacaagcaatgttggctacgacgaggctgcccttggagctggcgttctctgactaagactccgtgctcacactgtcaccatgggcttgtatctctgtcgaaccaagccatgaccacaggtgtgggtttgatggcttctggccagtgtgatgtgatcgtggcaggtggtgttgagttgatgtgcgatgtgcctattcgtcactcaaggaaaatgaggaaaactgatgcttgatctcgaataagggcaaaatctatggggcagagaatggctttaatcctaaattccgattgatttcctagcactgaattccggggggcttggttccaccagtggacacggcacctt

SEQ ID NO: 710499 - DNA, 136 bp, Homo sapiens
ttcttaggctttacaatcaccctcacgaaagcagcaactccgctttgcacattcctcagtctgctttaatctctccagcgcttacttactacctgatgtgctccatggccatactatcagtctcctcatacataag

SEQ ID NO: 710500 - DNA, 453 bp, Homo sapiens
ctgtgcgttgggacggcgggggcaggagcgtgagcatcggcagcagctgcctggagcatcttttgccttggccatgtggagccttgccccaactctacgggctgagtctctcctccccaggggctggagtgacagcacaggccccatgacaccaggtggcatggtagggtggtgggggaaggctagttgaacccaaggcaccatcactcacatggaggggctaatagaaaagacaggaggacagacggatggtcacctttccctctagcccaggccaagaaaaaacccttgagggtccaaagctccttgtccccatgcacgctggtaagcgagccagtcattctctcagcctggccacagatcccctgctcagtgcctggagactgcccaggcaggggctactctgcagcaggcaggccaaaggccccattgtgccgccgtcccaaagcacag

SEQ ID NO: 710501 - DNA, 283 bp, Homo sapiens
cattgtcccgctttactcatgtctcccgctttactcatcgtctcccgcactacaggaaatttatccgaaaacaaaacacaagcagttatagaaccccattctctagcatcagaagtaatttcagagcaagtaaacttatgaggtgacaaccagacatacttgaacagttaaggatgggacgaagaggcttaaggatatcacccaaattaaacctgtacagtgcagacaaagccttggcgaaagggcagggtcaaacaatcgatgcaagtcccagcatccagtg

SEQ ID NO: 710502 - DNA, 815 bp, Homo sapiens
gcacaggtgtcagtgagaagtacccctagaagccaacaatgggaaaggaagcagactcatatcgaacatgtacgtcattggacacgtagattcgggcaagtccaccactacaggtccatctgatctataaagtgcggtggtcatcgactataagaaccattgaacagaatttgagaaggaggctgctgagatgggattacgggctgccttcaagtatgcctgggtcttggatgaaactgtagacagcttgaggcgtgaacgtggtatcagcattgagtatctccttggtggaaatttgagaccagttacagtgactatgtgacgtatcgatttgatgccccaggacacgagagactttactgcaaaaacatgcatgtacaggggacatctcaggcgtgacgtgtagactgatccgtgagttgttcgctgctggttgattggtgacactatgatatgctgggtactctccacatgaatcgggcatgaggccgatgacgcatgcccttctgagcttagcaacactggagatgatgcaacatcaatgtaacatggtcggtgtgtgctcacaacactggattcccacatgagacctaccctacacgtccagacacacgactactgacggacaacttggttaacggacatgtcagcagcgtgcaccatgtacagccaacgacatgacgcgatacaaaccaccgtaaaaccagcacagccagtactgatggccacagcgtacctggatatgggaaatggttcgaccgaacgatgctggcaagccaacgcgcgacaccactgccctgggactcaaggggatg

SEQ ID NO: 710503 - DNA, 227 bp, Homo sapiens
gctccctcttcattcctctccttctcacatctgaaaaaaggcttctacagaccacagaggcctggtgtgaggggtaggagtcaggtagttcagtatgaacgagggaggcacgcagcaggacactgaaggagaaggtggtactgaggaaggcctgggatatttaaatccttctgtctgccaaagacaaaaataagacataaacatcacaacagtgtcctggcttccca

SEQ ID NO: 710504 - DNA, 332 bp, Homo sapiens
agtgtggtatgtatagggactgatcagaaaatgttttaaaaattaggctgggcatggtggctcacaccctgtaatcccagtactttgggaggccgaggcaggcggatcacttgaggtcaagagattgagaccattctggccaacatggtgaaaccccatctctactaaaaatacaaaaattagctgagtgtggtggtgcatgcctgtagtcccacctacgcgggagactgaggcaggagaatcgattgaaccggggaggcggaggttgcggtgagctgagattgtgccactgcactccagcctggcaacagagtaggacttcatctcaaaaa

SEQ ID NO: 710505 - DNA, 346 bp, Homo sapiens
tggactacagaaatcgcatcacatcatctactagacaactatcaagatgcacattcttcaccaaccttatgatggctggcactgacctctggtgtattgtctaccctttgatcaccaggttgatgccagtcatacactgtcttcgtcataccaattatgccaggtgaactcttccagcttactcaccattccttttgcacctctctcacttagactctaggcaactttgctgtgcttacacatgtaccatactggatgggcagaaatctgtgagagcttacccctctactgatatccttctattcaacaagcttctctgggggcgtgggttcacaccaggccaccc

SEQ ID NO: 710506 - DNA, 442 bp, Homo sapiens
tcaactagatgaacccgaggaatcgcttatcaggaataagtagtttgcattcccacaaaaagcagaggcagctctttgccacagagcgttccctgtagccacccccaccccactggcccttggttctttagaaggagcacacacatgccttgattcctccctgatgtggtaaagtggcacactccaggggtctaaaacataaaacagttgtgtttagggaaccttaagtcatgcagacatgactgttctctttgtacaagtgtgaatcaaaatatgtatctctttttcagagtctggttaagctatgtcattgtctactgcatagtttcctgagtctgtttgtaaagtgcttatggctaacagttcagttctgtatttgttgacaggtaaataagtggagttgagtgccatctttgaaaaaaattaccctctagctctaaca

SEQ ID NO: 710507 - DNA, 109 bp, Homo sapiens
tcacaaaaaaaaagttaaactcttcttttctttttatgataatgaccagcttttggtatttcattgttaccaagatctatttttagaataaaattgttctccttctaaa

SEQ ID NO: 710508 - DNA, 302 bp, Homo sapiens
gtgattaattagccagtcagaggttaagactctggagaccacaggtcaagttctgctctgaaggtccgtttctctgttaacagtgcagtctccatggcctgatttgtctttgacaagtagattggagggttaatcttccactctgccgtgtggggagtctcggacctttaccggtataattattcgattgaatggcttcagctttgggagcctacagctagtctcaggtttgaaacttacttctagcaccacctaaatctcttttttgcttttcctagatctatgagagtctccgtcgaact

SEQ ID NO: 710509 - DNA, 268 bp, Homo sapiens
tcccaaaacccggtttttaatgagggggccccaaaaaaccctttttctcgggggggggaaaccttaaatcccaccccccccagagggggagcccccccccccccccaatttgttcccggggcccccccttaacccccccacacccccggggcaaaattttacaaaaacccccccccccccccaaaaatttccgggggggcgcgcccccaaaaaaaaaaaacgcccttttgggttccccgggaaactttgaaacaaaagaccccaaccc

SEQ ID NO: 710510 - DNA, 937 bp, Homo sapiens
  misc_feature (937)..(937): n is a, c, g, or t
aactccaccatgaaccgctatgtattcctcatagtactgatagctaatcgtgaatatgtcctaatgcttacctacttggaacatctgaggtaatttaaaactaagcacagatcacaacgtcgtcctcatgttatggagagtaaatgtacagccttatcgacatgcactcaaattatacactactatcaaacatggaagctccataagatacaccgcctacaatctattcagtgcatcctacattaaaatcctaagccaaccgcattatataaggtactatagctatcgtatcagtctaatttatggataccatagtacattaaagtacaaatcctgtttctcgtctccatgtatgacccccctcagtatcggggtcccttgaggcacaaatccgtccgtgaaatcattatcccggacaaggagtgctaacatctcctcggcatccggggcctataacacttggggggtagctaaacccgtgaactgtatcctgatgatcgtggtcctacttcagtgtcataaatgcctaatatacgcccacagtgttccccttaaataagacatcactgattggaatcacaggtctatcactcctatttaacacttcacgggagctctccaggcaattgggatagtattccgtctgcggaggtgtgcacgcgaatagcaatgccgagacgctgatgccgaggacaacccagacaaggtacacgcatcaaaccgacttttgcggacgccgtccacaagaaagtctagccgatcgggagggtcggcccaaaggcatgacattgggctctgggccagaaatcgggctccccggggtgacccaatagacaccggggacaggctgaaacacaagagtgggctggtaaaaggcacgtgaaccccgggggaaagtcacacagcccaaaaaaggccaaacgaagaaaaacacggn

SEQ ID NO: 710511 - DNA, 156 bp, Homo sapiens
cagtcggccagtgagcattacgtgtgtgagctcggccccctgccagagcattactgtgtgagctccaccccctgccagtagcattacgtgtgtgagctccgccgcctggcagagcttcacgggtttgtgctcagctcgcgtttcagagcttcaggg

SEQ ID NO: 710512 - DNA, 369 bp, Homo sapiens
ctataagtgctcgaacaaaagaaaacctgtaacagaccttactaatcaccttaaaataatctgctccaggttataaaatcttaaaacttgagagctgaagtcagagtacatactcacctctttcaaattatatgtgtgtgtgtatgtgtgtgtgtgtgtgtgtgtgtgtgtgtgtgtgtgtgtatgtgtgtattcctgagtcaccatgaatacctttaaaaaattctagacctttgggccaggcatggtggctcatgcctgtaatgccagcactttgggaggccgaggcaggcagatcacgaggtcaagagatcaagcccattctgcccaacatggtgaaaccccatctctactaaaaatacaaaaatt

SEQ ID NO: 710513 - DNA, 1354 bp, Homo sapiens
  misc_feature (971)..(971): n is a, c, g, or t
agcggagaggcgccatcttgtgggagcaaaaccaacgcctggctcggagcagcagcctctgaggtgtccctggccagtgtccttccacctgtccacaagcatggggaacatcttcgccaacctcttcaagggcctttttggcaaaaaagaaatgcgcatcctcatggtgggcctggatgctgcagggaagaccacgatcctctacaagcttaagctgggtgagatcgtgaccaccattcccaccataggcttcaacgtggaaaccgtggagtacaagaacatcagcttcactgtgtgggacgtgggtggccaggacaagatccggcccctgtggcgccactacttccagaacacacaaggcctgatcttcgtggtggacagcaatgacagagagcgtgtgaacgaggcccgtgaggagctcatgaggatgctggccgaggacgagctccgggatgctgtcctcctggtgttcgccaacaagcaggacctccccaacgccatgaatgcggccgagatcacagacaagctggggctgcactcactacgccaacaggaactggtacattcaggccacctgcgccaccagcggcgacgggctctatgaaggactggactggctgtccaatcagctccggaaccagaagtgaacgcgacccccctccctctcactcctcttgccctctgctttactctcatgtggcaaacgtgcggctcgtggtgtgagtgccagaagctgcctccgtggtttggtcaccgtgtgcatcgcaccgtgctgtaaatgtggcagacgcagcctgcggccaggctttttatttaatgtaaatagtttttgtttccaatgaggcagtttctggtactcctatgcaatattactcagctttttttattgtaacaaagaaaaatcaactcactgttcagtgctgagaggggatgtaggcccatgggcacctggcctccaggagtcgctgtgntgggagagccggccactgcccttggcttttagagctgtgtttgaaaatccattttggttggttggttttaaacgccaaagtcatgtgcaattttttaacaaatacgttaaatgaatccaatgtcgagaacacttttgaaacacacatgaagtggatgacccctgcctaaagcataagattttgcagttaacggtgcgtggaatgccagtctgccagcccaagcctgttccccttcggggaaacattgagcgtggttggtggcgcaagacagacttgcgaatcaaattctgcattggtcacagtatgagatccccggcaactcgcttgtccttgggtacacccttgaattcccatagccatgtgcttgtcccctgttgctccca

SEQ ID NO: 710514 - DNA, 1115 bp, Homo sapiens
agcggagaggcgccatcttgtgggagcaaaaccaacgcctggctcggagcagcagcctctgaggtgtccctggccagtgtccttccacctgtccacaagcatggggaacatcttcgccaacctcttcaagggcctttttggcaaaaaagaaatgcgcatcctcatggtgggcctggatgctgcagggaagaccacgatcctctacaagcttaagctgggtgagatcgtgaccaccattcccaccataggcttcaacgtggaaaccgtggagtacaagaacatcagcttcactgtgtgggacgtgggtggccaggacaagatccggcccctgtggcgccactacttccagaacacacaaggcctgatcttcgtggtggacagcaatgacagagagcgtgtgaacgaggcccgtgaggagctcatgaggatgctggccgaggacgagctccgggatgctgtcctcctggtgttcgccaacaagcaggacctccccaacgccatgaatgcggccgagatcacagacaagctggggctgcactcactacgccaacaggaactggtacattcaggccacctgcgccaccagcggcgacgggctctatgaaggactggactggctgtccaatcagctccggaaccagaagtgaacgcgacccccctccctctcactcctcttgccctctgctttactctcatgtgggcaacgtgcacgactcgatgactgatgagtcgccagaagcctgactaccgcgcagcacagcgacacccgatgctgccatctgcacccgcatccatgtaacactcgtggacagaacggcacccctgcgccaccaaggctatacaacatatcacctggacacatagctacacgggcaacccaaatgaaggcaagatccctgaatcacatcatacatcgcaaacagagaaacacagaccacagccgcccacccgcacccaaacgcagccacaccacccgaccacaggaacacagcgaccacgagccaacgccgcatcgtaggccccacgcgagcccacaagagccccagcgcagcagacgccgacagcggagagccaccgcacgaccccgcgcgaaaaaagcgcagcccgcaaaccat

SEQ ID NO: 710515 - DNA, 221 bp, Homo sapiens
cttacagtccccaacccttactaagacatcagattgcgttatactaggcgaggaaccatacgaaactgctgagtgaatgtggcatggccttttaaccgtatcctataacaacttactgaacataagaaaatttacactagagagaaagcctacaaatgtgaagaatgtggcaaagcctttaaccagttttcaacccttattacacatagttcagcgtctga

SEQ ID NO: 710516 - DNA, 454 bp, Homo sapiens
  misc_feature (142)..(143): n is a, c, g, or t
  misc_feature (146)..(147): n is a, c, g, or t
  misc_feature (150)..(151): n is a, c, g, or t
  misc_feature (153)..(153): n is a, c, g, or t
  misc_feature (162)..(163): n is a, c, g, or t
  misc_feature (167)..(167): n is a, c, g, or t
  misc_feature (170)..(170): n is a, c, g, or t
  misc_feature (176)..(176): n is a, c, g, or t
  misc_feature (181)..(181): n is a, c, g, or t
  misc_feature (196)..(196): n is a, c, g, or t
  misc_feature (204)..(204): n is a, c, g, or t
  misc_feature (213)..(213): n is a, c, g, or t
  misc_feature (228)..(228): n is a, c, g, or t
  misc_feature (238)..(238): n is a, c, g, or t
  misc_feature (244)..(244): n is a, c, g, or t
  misc_feature (248)..(249): n is a, c, g, or t
  misc_feature (285)..(285): n is a, c, g, or t
  misc_feature (292)..(292): n is a, c, g, or t
  misc_feature (294)..(294): n is a, c, g, or t
  misc_feature (329)..(329): n is a, c, g, or t
  misc_feature (333)..(333): n is a, c, g, or t
  misc_feature (350)..(350): n is a, c, g, or t
  misc_feature (366)..(366): n is a, c, g, or t
  misc_feature (369)..(369): n is a, c, g, or t
  misc_feature (371)..(371): n is a, c, g, or t
  misc_feature (375)..(375): n is a, c, g, or t
  misc_feature (378)..(378): n is a, c, g, or t
  misc_feature (385)..(385): n is a, c, g, or t
  misc_feature (388)..(388): n is a, c, g, or t
  misc_feature (402)..(402): n is a, c, g, or t
  misc_feature (423)..(423): n is a, c, g, or t
  misc_feature (426)..(426): n is a, c, g, or t
agcggagaggcgccatcttgtgggagcaaaaccaacgcctggctcggagcagcagcctctgaggtgtccctggccagtgtccttccacctgtccacaagcatggggaacatcttcgccaacctcttcaagggcctttttggnngannagnnangggcgagtnngggnggngggcgnggggnggggggggggggggngggatggnctggggggntaggggggggggggnggggggcacnattcgnagcnngggggtcagggggggaacgggggggtgcaagagcgngggcttnanggggggggggggggggggccggggcagggtggggngccnggggggccagtggttgngggggggggaaggggnggngntggnggngggcggnggnggcggggggggggngggcggggggcgggggggggncgngggggtgcgggcggggggggggctcgcg

SEQ ID NO: 710517 - DNA, 169 bp, Homo sapiens
ctgtcgatggtgcatgatactaggaccgcagcctgtccggcagcagccagagccgagctgctgcagaggcgattcagaagctccctcccctgcccgggacagagacagacaagatgccagcgcttgttgtccctgacatcaaggagatccgagtcagcccgactcgttc

SEQ ID NO: 710518 - DNA, 1320 bp, Homo sapiens
  misc_feature (937)..(937): n is a, c, g, or t
gctcggaatccctgaagcagcctgcagagcccatcctagccagggcccttatacatgcacacaagcatggggaacatcttcgccaacctcttcaagggcctttttggcaaaaaagaaatgcgcatcctcatggtgggcctggatgctgcagggaagaccacgatcctctacaagcttaagctgggtgagatcgtgaccaccattcccaccataggcttcaacgtggaaaccgtggagtacaagaacatcagcttcactgtgtgggacgtgggtggccaggacaagatccggcccctgtggcgccactacttccagaacacacaaggcctgatcttcgtggtggacagcaatgacagagagcgtgtgaacgaggcccgtgaggagctcatgaggatgctggccgaggacgagctccgggatgctgtcctcctggtgttcgccaacaagcaggacctccccaacgccatgaatgcggccgagatcacagacaagctggggctgcactcactacgccaacaggaactggtacattcaggccacctgcgccaccagcggcgacgggctctatgaaggactggactggctgtccaatcagctccggaaccagaagtgaacgcgacccccctccctctcactcctcttgccctctgctttactctcatgtggcaaacgtgcggctcgtggtgtgagtgccagaagctgcctccgtggtttggtcaccgtgtgcatcgcaccgtgctgtaaatgtggcagacgcagcctgcggccaggctttttatttaatgtaaatagtttttgtttccaatgaggcagtttctggtactcctatgcaatattactcagctttttttattgtaacaaagaaaaatcaactcactgttcagtgctgagaggggatgtaggcccatgggcacctggcctccaggagtcgctgtgntgggagagccggccactgcccttggcttttagagctgtgtttgaaaatccattttggttggttggttttaaacgccaaagtcatgtgcaattttttaacaaatacgttaaatgaatccaatgtcgagaacacttttgaaacacacatgaagtggatgacccctgcctaaagcataagattttgcagttaacggtgcgtggaatgccagtctgccagcccaagcctgttccccttcggggaaacattgagcgtggttggtggcgcaagacagacttgcgaatcaaattctgcattggtcacagtatgagatccccggcaactcgcttgtccttgggtacacccttgaattcccatagccatgtgcttgtcccctgttgctccca

SEQ ID NO: 710519 - DNA, 1540 bp, Homo sapiens
  misc_feature (1157)..(1157): n is a, c, g, or t
tccatggcctgctattctcgaactcctgacctcggtgatccacccacttcggcctccaaaagtgctgggattacaggcatgagccactgcgcccagctgaaggcagacatttttaaacgactgcacacagtgaggctgcacacaagcatgaagcaaagagtggttctctggctttgcagtccccttgtctgtaacccagaaatcagacagaagtctccaaaacctagttttcgctatgcacaccactaatcgctaatgcacaccactctactgagcagcatttacatctgcagtccaagaaatataaagcagaatccctgtgtcaggcaaaaaagaaatgcgcatcctcatggtgggcctggatgctgcagggaagaccacgatcctctacaagcttaagctgggtgagatcgtgaccaccattcccaccataggcttcaacgtggaaaccgtggagtacaagaacatcagcttcactgtgtgggacgtgggtggccaggacaagatccggcccctgtggcgccactacttccagaacacacaaggcctgatcttcgtggtggacagcaatgacagagagcgtgtgaacgaggcccgtgaggagctcatgaggatgctggccgaggacgagctccgggatgctgtcctcctggtgttcgccaacaagcaggacctccccaacgccatgaatgcggccgagatcacagacaagctggggctgcactcactacgccaacaggaactggtacattcaggccacctgcgccaccagcggcgacgggctctatgaaggactggactggctgtccaatcagctccggaaccagaagtgaacgcgacccccctccctctcactcctcttgccctctgctttactctcatgtggcaaacgtgcggctcgtggtgtgagtgccagaagctgcctccgtggtttggtcaccgtgtgcatcgcaccgtgctgtaaatgtggcagacgcagcctgcggccaggctttttatttaatgtaaatagtttttgtttccaatgaggcagtttctggtactcctatgcaatattactcagctttttttattgtaacaaagaaaaatcaactcactgttcagtgctgagaggggatgtaggcccatgggcacctggcctccaggagtcgctgtgntgggagagccggccactgcccttggcttttagagctgtgtttgaaaatccattttggttggttggttttaaacgccaaagtcatgtgcaattttttaacaaatacgttaaatgaatccaatgtcgagaacacttttgaaacacacatgaagtggatgacccctgcctaaagcataagattttgcagttaacggtgcgtggaatgccagtctgccagcccaagcctgttccccttcggggaaacattgagcgtggttggtggcgcaagacagacttgcgaatcaaattctgcattggtcacagtatgagatccccggcaactcgcttgtccttgggtacacccttgaattcccatagccatgtgcttgtcccctgttgctccca

SEQ ID NO: 710520 - DNA, 608 bp, Homo sapiens
  misc_feature (29)..(29): n is a, c, g, or t
  misc_feature (88)..(88): n is a, c, g, or t
  misc_feature (96)..(96): n is a, c, g, or t
  misc_feature (127)..(127): n is a, c, g, or t
  misc_feature (132)..(132): n is a, c, g, or t
  misc_feature (136)..(136): n is a, c, g, or t
  misc_feature (237)..(237): n is a, c, g, or t
  misc_feature (239)..(239): n is a, c, g, or t
  misc_feature (294)..(294): n is a, c, g, or t
  misc_feature (344)..(344): n is a, c, g, or t
  misc_feature (396)..(396): n is a, c, g, or t
  misc_feature (430)..(430): n is a, c, g, or t
  misc_feature (433)..(433): n is a, c, g, or t
  misc_feature (503)..(503): n is a, c, g, or t
  misc_feature (507)..(507): n is a, c, g, or t
  misc_feature (524)..(524): n is a, c, g, or t
  misc_feature (528)..(528): n is a, c, g, or t
  misc_feature (564)..(564): n is a, c, g, or t
  misc_feature (585)..(585): n is a, c, g, or t
  misc_feature (587)..(587): n is a, c, g, or t
ggatccccacggggatagtgcaataaatngaagccttaagacatttcatgtgttttataaaagaaactcagttagtttacttaattangacagtanaatagcagcaagtaccaagacatagtgcatntcttntatntaagacaagttacttcatttacatcagagttagaaatgttaagactggctttcttgaatacttaaatatagctcgaatcactggttagatatggacatatntncccaactgtacatcagggaggagtgctttcattagtttcagaaaatgcagacccncagacagccagcatgaccacaacattgagcaataagagaaatgaagcatntactttccaagcatttgccacagaaggtaatggagtctttacatttgtggtngtctcttccctccataagttaagggttgtgcttngtngaggcatttcagagaaattatttggcatgccactagtgatacttagggtcatgggtgtaggggatgattntgtngagctagtgaggcttgngttngtgaccattccatcttggagatgaatagttagagtngcagctgctgcttcatgtgantngatagtctctgtggatgtatc

SEQ ID NO: 710521 - DNA, 349 bp, Homo sapiens
cctctccagcacacacactaaactagaaggtagattacagaatacatgacctaaattcctggctggattaagggcagacaaaaaaatcttgaataaacagactgcccagctaaatcccaaagcatatatttcagtggtagagagactgagatgaaagaaaggtaaatccataggtattaacagtcaagaagatactgtataatagaagaataaaagatgacccaaacactagaatgttaacagtaaaagaatttgaatgagattatttgtcttgaaaaaatacaactcccacttctttttttttggagacagagtctggctctgtcgccaggctggagggggccgcgcg

SEQ ID NO: 710522 - DNA, 229 bp, Homo sapiens
  misc_feature (93)..(93): n is a, c, g, or t
  misc_feature (215)..(215): n is a, c, g, or t
agtccagagtaacactgatggctcagcacggatccgatcagcaccaggttcttgtctgtaccaagttggtggagccttccacgcccaggtggngtcccctgtacatcgtcctcggggaactccagcatcagcaaggacagaggctccgtggtgaaaggcgcgcgtgcttgaccttgtgttggaggggatgaaccttgcccttgttgggaacaagncatcccgggaagca

SEQ ID NO: 710523 - DNA, 175 bp, Homo sapiens
gcttcgcaggactttcgtggagtagtcaacatgagctgttggagtgaactcttcagcatgcctgcacacccggtaagaaactctactctagaaaatttatgggtcgactgttacagaagcctcaggagtacagttctggcttttccttgatgcttgtttgtagaaagaattggac

SEQ ID NO: 710524 - DNA, 391 bp, Homo sapiens
gagtatccggaggcgccatgtagggacaccagcaccgggtcgcactcttcatttctgtatttacccaaccaataaactgggtctcctggatagcctacaaatatagccctataaagaatgctatgtcgaagcatgacgagtagtagttgacaaactggaataagaacatcttcatggtgaggctgttctccatcaatccagtctgggtcctatgggcagttcgcaagttcagtaatccatcacattgcccactttttcatcatcatggatgttcagcaatcatgcatacattcataaagctgcatgatggcaggcccgtgcatggcacgtgcgatgatctgtggcagtccaggtcatatctcggcattgggtctagttcccatatacaagg

SEQ ID NO: 710525 - DNA, 549 bp, Homo sapiens
ggcgaagagtctggacagtagacgtagtcaacggccatcacacttgggaatgccagtgatcgctctcagtctatgagttctccgaactccatgagtgatagttggtctcaatagcactctgtcacactgagcccttcttggtgggctgacattctccagattggtgactggaccatccttgggtctgcttgtcaaagtgtccttaagagcatagacactcacttcatatttggtggccaccataagtcctgatacaaccacggatgagctgtcaggagcaaggttgatttctttcattggtccggtcttctccttgggggtcacccgcactcgatatccagtgagctgaacattgggtggtgtccactgggcgctcaggcttgtgggtgtgacctgagtgaacttcaggtcagttggtgcaggaatagtggttactgcagtctgaaccagaggctgactctctccgcttggattctgagcatagacactaaccacatactccactgtgggctgcaagccttcaatagtcatttctgtttgatctggacc

SEQ ID NO: 710526 - DNA, 130 bp, Homo sapiens
ctgatgtgctcctatgtactgtgacatatagtgcatgtgcatcatgcctgattcatgataactcattttctattatcccattgaaggtaggaggaaactgaagctcatagacgctaagttcatttaccca

SEQ ID NO: 710527 - DNA, 347 bp, Homo sapiens
  misc_feature (95)..(95): n is a, c, g, or t
ccgtatctctacattatctctaacattatgtgttcatttcccccaagtggcaaattaagacaataatccgctgggcgcggtggctcacacctgtnatcccagcactttgggaggccgaagtgcgcagatagcttgagctcaggaattcaagactagcctgggcaatacaacgaaaccctatttctacaaaaatacgaaaattagccagcgctgtggcacgagctgtagtcccagctacttgggaggctgaggtgggaggatcgcctgagcctgggaggtcaaggctgtggtgagccatgatcatgctactgtactctagcctaggcaacagatgagaccctatctcg

SEQ ID NO: 710528 - DNA, 123 bp, Homo sapiens
gaaccgcgtcccagggatgagaaagtgctcatggctaggactgcaagtatgagccaccacacctggcggattttgttcttaatcctgtgtatgtggtggatcacacttctgaacagtgacagt

SEQ ID NO: 710529 - DNA, 211 bp, Homo sapiens
ttgcacaatcagaattgataggcagtgttcctccactccatttagcaattatgtcacccttcagtcatgcagttggtttttgaatgtctcacatgcgttttaaggataaactcctttatggtgggactatgtgttattcttgtatacttgcagtgggtagatgtcactaaatgttacgtacacaaataaataaaatgtttattccttggta

SEQ ID NO: 710530 - DNA, 363 bp, Homo sapiens
cccgcggtctatgagcacagccgctctcagggctgcattccatggccagccctgggctccacccagacttaccaaactggacctgcccaccacttgccaagagatcacatctgcctgggctcaagaagcctcaagagcttcatcagactgatccaaccatgcagattcttcaaggagctcacttatgactctctcgcaatctattgggaatcacttcttctggagtccatgaatccggatccacaaagggaattccaaaaacatcataagcgaagaaaagcagttctttttccagtaggcttcgctgtcggtactccttggcactctcacggtggccgatggaactggcgtgttcttctccaa

SEQ ID NO: 710531 - DNA, 288 bp, Homo sapiens
gctcaagagcggattgagggaatgtcactaagaaggaggatcatgggattgcagtgtgtgcttagtaggaaatgaagccagtgctaccaaagtgtattgcttgtcagaatccaggttaacaaaatctaactacttctgcagtttcaacacctgcctcttcagagactagcaaggctccgaagagcggatttgagggaatgttcactaagaaggagggacagtgggattgcagtgtgtgcttagtaggaaatgaagccagtgctaccaaatgtattgcttgtaccgctg

SEQ ID NO: 710532 - DNA, 842 bp, Homo sapiens
ggggagagcagcgacaggcctccagcaagcaagcgcgggcggcatccgcagtctccagaagtttgagacttggccgtaagcggactcgtgcgccccaactctttgccgcgccagcgcctggagcggagagcagaggcggcccggccgcggcgcgccggctttgtcatgatggccagctaccccgagcccgaggacgcggcgggggccctgctggccccagagaccggtcgcacagtcaaggagccagaagggccgccgccgagcccaggcaagggcggtgggggtggcggcgggagagccccggagaagccggacccggcgcagaagcccccgtactcgtacgtggcgctcatcgccatggcgatccgcgagagcgcggagaagaggctcacgctgtccggcatctaccagtacatcatcgcgaagttcccgttctacgagaagaataagaagggctggcaaaatagcatccgccacaacctcagcctcaacgagtgcttcatcaaggtgccgcgcgagggcggcggcgagcgcaagggcaactactggacgctggacccggcctgcgaagacatgttcgagaagggcaactaccggcgccgccgccgccatgaagaggcccttccggccgccgcccggagcacttccagcccggcaaggggctcttcggggccggaggcgccgcaggcgggtgcggggtggcggggcgccggggccgacgggtaacgggttacctggcgccccccaaagttacctggcagtcttggcttcctcaacaactcgtggccgctaccgcaagcctcctcaaccattgccctattgctctgccagatgggggagac

SEQ ID NO: 710533 - DNA, 1111 bp, Homo sapiens
  misc_feature (416)..(416): n is a, c, g, or t
  misc_feature (574)..(574): n is a, c, g, or t
agcgagtcaccttgctcatcatgggcccctgtgtccatggtccatgtttctaccgaggcgaatggtcgtagtctggaaggatcctcctgagagggctccatgcaatggacagagtctgtataagtgatcagttgacgtagggtgacctgatgcatccaccacatcctggtcgttgtgcgactggaggaccagcacacgagccatcgatcatcgttggaacacgcgattaaacgactgatgtgatcagttatctatcacagcgggccggaggcggggatgcggcttccatggatcagattacttcctattcaaccaacgaaggaagctatcggtgacgtcgtgtcgaccatgtctgagcgctcgagcgcggatgtacccgtggcacgggtgaacggcagactggttggcgggcctgnatgcccgcagtacctgagaaccatggcacagcaataggaccatgcctgggccacaggaacgctcggcgcccgaaagtgtgtgcgcaccaatgcctacgtggcaagaacaagctcacatctaacagcgaggcttcgcgctgacgcaagcttctcgacanagttagtcaagcccgcgaaagaaagatcgtaatctccatgcaggtgtgaaccatggtagatatccccgtggctacatagcaactcccacgaagcgcaactggcaagggcaagctctaacaagagccctccacgtggggatccttgcgtgcgtagatggaaactggcgttgtcgtaactaccgacggggcacgtccatttggaacaggattcatggtcgggttgcaccgggaaagcgcggcaagagtagagcagaaaagactctgggcgtgtgtggttgagtgccacccacggtggaccttgaaatcttctacgcaacttatagggaacgcatgctgtggcaacaccttgtacacagggaaccccaccgtgagaatgtactcgccttagagaaaataggaccggttggagcactacgagaagagtcggggccgaaaggccttggaacccaggcgcttagccccaggggttagtgatgtggttccgcaacagagcgcaggatacgaagggctccttcctcaagaagctcgggagactgg

SEQ ID NO: 710534 - DNA, 204 bp, Homo sapiens
cagacaggtgaatgggattgatggacctgtgtcagagactgaacagaaccaacagaggggaacaagtgagaacaggacacaggaagaggacactggaatcaattcttgagagttgcactactttggttgttcttccagttccaagatttcgatgggacccagaagccctctttttcgttttaaaacgctaaaacaagcaaatgt

SEQ ID NO: 710535 - DNA, 353 bp, Homo sapiens
accaatcctggtgctgatcgagatctgccccgctgggccaccgaagctgataaagccgagcttgagccagaacagaaaagcctgaagcaaactgacaggctcagtacttggcagatcctgctctacaggtggcagtgtggtctcattcatcagaggtctcttctttcacgaatgccgcgagcagaccatcgaagatggcgcaagcagcggtcagcaggtggtcgtcattgaggatggtctcgcgcagcccagccaatacacgctcgatgccaacagcctcggcgggttgaacgccaccgatatccaggtaatgcaccaaagcagcgatgcggcttaggcctggctcgaccagt

SEQ ID NO: 710536 - DNA, 357 bp, Homo sapiens
gcaggagaatcgcccgaacctgggaggcaaaggccgctgcgagccaaggttgcgccaccgcactccagcctgggcgacagagcaagactaaaaaaaaaaaaaaggaaaaatttttgtttcagaaaacctacaacgcacacatttaggggagaaatgtgggaagcattctttttaaggaatgagacagggatggctgctattgccactttgtttaatggggggccttaggaaccacacagggaactaaagttttggttttcttttgcaaattgtatgactgtttatagaaaattcaacaagacaggggtgggggctaacacctgtaatccaagctctttgggaagaccaggcaggcag

SEQ ID NO: 710537 - DNA, 473 bp, Homo sapiens
cgaatccgtacttttgctcatagctcgtcccggtgtgaaaaaccacttccggaaagccgaaccagtggcctgagcgagtcagtgcgaaaaacgcgccgatactgtccgcttcttgactaatgggcttgagcacgagcgaaagtctaaacctgtcaattttgacagtagccaagatcttgttcacaggggttagatatctacacgctcaggaacagcatcctgtaatgctcgcctacgtgctacccggagaacgccatgtctagtaaaaacagcaagccggctaccactaacagcaaaaaggtgtcgtcgataaaacccaagtttcttgacaccccgcggattccagggatgtccccagcgtttaaaggctatgacggtggtatcgcgcagtggttgttgttcggaggattgaccgttgcagtggataaaaactgggcggccaagcccaaggataagatccaagtgcttgtcat

SEQ ID NO: 710538 - DNA, 422 bp, Homo sapiens
  misc_feature (110)..(110): n is a, c, g, or t
  misc_feature (185)..(185): n is a, c, g, or t
ctctagaggatcacattggacgaatgtgcgaggtagaggaggtgttgaccacttggaggggcccgtttgaacaagcccctggtgggcaggtgtggttagcaatgccaggnagggttgggggtgcaggctgcacatagggcaggacaactcagcatcccccactggaaggaggagggctgtggctntgccatccaagggatactgccacactttttattctccacatcagtgctcgcttccattggcacagataattaacaaacattgatggtagctcattagctaattatttctggctcatgtttaccaagtatactacaggtattttgggcagatcatcctgctgagagctaagttctggaaaattcctcagaaagatagacttttgatacataagcttcccccactttttgttttgcaaa

SEQ ID NO: 710539 - DNA, 424 bp, Homo sapiens
  misc_feature (32)..(32): n is a, c, g, or t
  misc_feature (40)..(40): n is a, c, g, or t
  misc_feature (74)..(74): n is a, c, g, or t
  misc_feature (257)..(257): n is a, c, g, or t
ccaaagtgctgggggattataggtgtgagccnccgtggcntggccaaaaaattattgataataccaattttatncctcaaatatagtgtagaaaaaccattttagagcttagttatttgaataatcaaaaataagtttgttggccgggtgcagtggctcatgcctgtaatcccagcactttgggaggccaacacgggcggattgcctgaggtcagaggtttgagaccagcctggccaacatggtgaaaccccatttntgctgagagtacaaaaattggctgggcatggtggcgaatgcctgtggtctcagctgcttgggaggctgagacaggagaatctcttgaacccgggaggcagaggttgcagtgagctgaagacgcgccattgcactccagcctggaaaacaggtgtgaaattccgtctc

SEQ ID NO: 710540 - DNA, 334 bp, Homo sapiens
acgacagggatacattctgagaaatgcagcactaggcaattttgtctttgtttaaacaccataagcttacttacccaaacctagagtggtgtagtctcctacacacttaggccgtatggtatagcctattgctgttaggtagtctacagacctgtacagcatgttgctgtactgaatactgtatgccgttgtaatacactggtatttggatatctaaacgtagacaaggtaatacattgcactgttatgttgtaacagctgtgacatcactagatgatagaaatttttcagctccattataatcttttgggaccactgttgtatatgtagttcc

SEQ ID NO: 710541 - DNA, 476 bp, Homo sapiens
tcttattacgcaggtgataagctctctctccagtgtgacttgctgatgttgaatgaggttacctttgaccaaaagatttcccacattctctacactcataaggcccttctccagtgtgaacaagctgatggctaataaggctgcccttctgactaaaagatttcccgccttctccacacttgtaaggcctttctccagtgtgaacacgctgatggttattaacgcagaatttctgacgatcagattgcccacattccccacagtgataggctctctctccagtgtgaccttgctgatgttgaatgagggtacccttttgaccaaaagatttcccacattctctacactcataaggcccttctccagtgtgaacaagctgatggctaataaggctgcccttctgactaaaagatttcccgccttctccacacttgtaaggcctttctccagtgtgaacacactgggttaagtaagca

SEQ ID NO: 710542 - DNA, 287 bp, Homo sapiens
gcaggactcgagaccagtctcgtcaacatggcgaaaccctgtctctacaaaaaaaagaacaaaaaaaaaatttagccagacttggtggcccacttctgtagtcccagctacttgagaggctgaggtggaaggattgcttgaacctggggagcagaggttgcaatgagctgagatcgcaccattgcacttccagcctgggcgatagagcgagaccctgtctcaaaaccaaacaaaaccaaaatgaagatacaaacttcacactttagcctaggcctaggcagggtcag

SEQ ID NO: 710543 - DNA, 163 bp, Homo sapiens
tggagcagagagggcactaacccaggctgacgccaagaatgaaggtggcccactgcatgcccctggtctgagcaggtcttcttgagatttgacatgctgctagagcaccccctatactcccacgatgtcctctcagcctacctctcatgcttacgtctgtcac

SEQ ID NO: 710544 - DNA, 515 bp, Homo sapiens
  misc_feature (382)..(382): n is a, c, g, or t
tactgatcccgagtgattcacgactctgagcaacctgtccgcatggatgtacaataaactcagtgacaacaccgaatgctggtgaggatatggagaaagtgaataatcagtgcccagattactctcttacatgtagaatggtacagccactctggaaaatagtgtgacagtttcttataaaaccaaacacataattaccatacaacgcagcagttgctttcctgggcatttgtcccagggaaatggagaattatgtttacataaaaacttgtacgagaatgttcacagcagctttattccctaatcgccaaacgctggaaacaacccagatattcttcaatggataagggattaaacaaactataatacatccataccgtgnacaattactcaacaacaaaaaggtattacctattgacacacaactcagttaaatcgtcagagaaattacactgggtggcaaaaaaatccacaaaggtaacttactgaatgattccattggtataacattcttg

SEQ ID NO: 710545 - DNA, 235 bp, Homo sapiens
acgccctgcatgggaatgtaggcccataagcacttaacaaacagactcaggaaactatacagtagacaatgacatagctaaaccagaactctgaaaaagcgatacatatttcagattcacactatgtacaaagcagaacagtcatgtctggcatgaccttaaggttcccataaacactaactgtgtttcatgttttcgacacccctggcagctgtgccacgtttaccagcatcag

SEQ ID NO: 710546 - DNA, 321 bp, Homo sapiens
atctagaggatccctttaacctaatcgcaagcatttcgtcacagaaagtctcaccttggaccaacctgacggcggtccctttggagttgcgatgaagctacgccgcctttgtgcattcgccttcgtccccacactcttccttacttcaatcaacctgcacgctgaacagttgggccaatatggcaacacctggaatattcaggagcaggatgcaatcgacatgatcaaaggtcggttaggagaaatggagaaaagaggggagctcacgaaatactggaatgactaccgcgacacacaactggccgggcgattagggttagt

SEQ ID NO: 710547 - DNA, 167 bp, Homo sapiens
cccccccccttccccccggggggggggggcctttttttttgggggggccccccccccgttggggcccttttttgggggggttggccccccccccccccccgtctatatgggacagaagcctaaacagataatgtccatgttttgtgtaaatgaaaccccccccccca

SEQ ID NO: 710548 - DNA, 563 bp, Homo sapiens
actcttgtatcgcaggtattgacttgaatagacaggcaaaggagaggtggaggaggtgtcgggctagacactattggaaattgtattccatccaaaagacaaaaaaatctcaggccgggcacggaggctcacgcctgtaatcccagcactttgggaggccgaggcgggcggatcacgagagttcaggagatcgaggccagagctgtacaacatggtgaaacaccatctcctactaaaaaactatataatacatatagatatgtgtgtctgtgtatttatatgtatgtatgtatgtgtgtgtctatatattatagtatatatatgctatgatatatataataatcgctgacattggagtcataaatcagacctaggacagaccaagagagaacaggaacaaacagcagagaatgaaaaaacagaatagcacgagacaaagcgaacaataagaggaacagaaaaagcacaagccagaaacagaaaagaagaaggagagacgaaaagaagcgaagaaagagaagaaagttaacgcaaccaagaggaacagagagagaagaaccaca

SEQ ID NO: 710549 - DNA, 159 bp, Homo sapiens
  misc_feature (22)..(22): n is a, c, g, or t
  misc_feature (27)..(27): n is a, c, g, or t
  misc_feature (32)..(32): n is a, c, g, or t
  misc_feature (46)..(46): n is a, c, g, or t
caaacgactgaagtcggatatnccaanagtgnaaatttccgagccnacggagggccaaactaggggggcccgagcgagctatctaccggactgtcgggaggacccaagtgtgaaagggggggccgggccctctccgggggcaaggcccaggctttccct

SEQ ID NO: 710550 - DNA, 900 bp, Homo sapiens
  misc_feature (8)..(8): n is a, c, g, or t
  misc_feature (900)..(900): n is a, c, g, or t
aacaccanagttcaagtgagaaagtatgagagctaagcgtactctcgttctctgcgtacggttcgagatatacgtagcccatatccctcccatattttctttttgctgcttgttgctctggaactttgctttgagcaggcaaagcaggtgtcgcctgagtgcttagaattgggaatatacccagtgtgtgttctcccccctcttacgaggctagataacacatctatgatggtgctttaggttgttagaggctatacctcaaagtagctgcggatttcgtctcctgcactgacaatatgcgagtgatcccgcttagatccagttcattgaagaagtacagcacgaattctcagagagatggagtatctagatgatcattaagtaaaccaatcagaaaagtccttgagcaatagttgtgtctttgtcagtcacagtcacgatcatctttagccattaagacttgcattaacattcctttgatataaagacgtgtatatgtccagctgaattcctatgtccacagttaagctttagagacgttcatcggggggactctccacgagagcggtcagggccccctatttccaaggtgaagcccgcacacgggcgggccaataacgggctctttacaactctccgtgccacggtctcaacacactcctcgagacccctctctttccacacagctgttgacccccccgtgcgacactctgtgggcaccctcccatccaccgcgctacaccaccccccacaaccgacacagcgacgcaccgcatcatacttgcacccacgtaacgcaccccgcctgagcacccaccccttcttttttttttttattttattttttatcttcgcacccaccccacctacacacactgcccccacagccgcaccccccgn

SEQ ID NO: 710551 - DNA, 134 bp, Homo sapiens
caggctggtcttgaatctaacctcaagtgatccgcctgcctgggcctcccaaagtgctgggattacaggtgtgagccaccgcatccgacttctaacgcactaggttttccgcgcccactaggttttccgcgccc

SEQ ID NO: 710552 - DNA, 221 bp, Homo sapiens
gcccccatcagaccgctctcccgttactccaaaagtatgcagtttacggaacacagaaatatgatcgaccccggcattagttcgagtgtcacttataaacaccaaaccctgttccaatctcagcgcacaacaataggtcatttcgttctctttacattcaacaagccagcacttgaaccacagacatcatattttcagtaccacccttttctcgcactccc

SEQ ID NO: 710553 - DNA, 438 bp, Homo sapiens
gcacaggagatggtggccggcacttcccatcagagagccaggccaaaggaaatctattgatgtaccatatgggaaacatctactctgactcatcaattgtttggattgtgaatcgatgactttatatagtgtacactttggaatacaaagcagaggaggctggtgggacggagatatgggacgactggctcattgtagatgatggaaacgctatcaaacacgtggttttccatttaccaagcttagtctatggcgtaaactaaatggtacctagaacgcatgcatttaccaagcttagtctatggcgtaaactaaatggtacctagaacgaatgcatttaccaagcttagtctatggcgtaaactaaatggtacctagaacgaatgcatttaccaagcttagtctatggcataaactaaatggtacctaggtcgacgc

SEQ ID NO: 710554 - DNA, 422 bp, Homo sapiens
  misc_feature (148)..(148): n is a, c, g, or t
  misc_feature (410)..(410): n is a, c, g, or t
  misc_feature (413)..(413): n is a, c, g, or t
actatagggaaaataagcttccttaagaaatatagtacttgttttgggttcctgtcattaacctatctaacatttcattgtgaatttggataagaaaagaaatatatgatgtatatggtgaaatgaaagtaaaagcggccgggcgccngtgtcacgcctgtaatcccagcactttgggaggccgaggcgggtggatcatgaggtcaggagatcgagaccatcctggctaacaaggtgaaaccctgtctctactaaaaatacaaaaaattagccgggcgcggtgcgggcgcctgtagtcccagctactcgggaggctgaggccaggagaatggcgtgaacccgggaagcggagcttgcagtgagccgagattgcgcacactgcagtccgcagtccggcctgggcgacagangcnatccgtctc

SEQ ID NO: 710555 - DNA, 158 bp, Homo sapiens
acccctcttctgtttgcacacagaaaagtgtctgtagactgttgctaagatgcattttgttaaataccccccgccccacaaaggctgctgtgtattgaatacgtagttggaatgtagtaaattgtgaaattaacgtaaccgaagcaagagccggaaaa

SEQ ID NO: 710556 - DNA, 274 bp, Homo sapiens
ggacccttagtggtaaacatgaattatgaataccgcaggcagccttcttaaatgacaaatgtcaaaaaaaaaaaaaaaaagattctatttcgggcagcaattggcttactctattacaaattggtcttaatttggaaaacctttgctgttacaaattgggcccttttatacatttttctggaacaacaagtgacaaagagttttttttaaccttctttctggcttgtaaattggtttccctttccttgttaacttgcccccggcacctgtggag

SEQ ID NO: 710557 - DNA, 794 bp, Homo sapiens
ggctattccataggagtacaatatatagaactcacactcttgtctcctctgtatgcttctagtttctagacgcagtctagtgctactcacactggtacgtgtggtgacagctccccgcagcggcatgacgctcccttacggctgcgcgctgaccagcactcctacacgtgcagcagagacctgagagcgacacgaattgccacgctgcctaggcagcgtgctaggctggccatagtacgagggagacagcgccgacgcatcccagcgccacagcactcctatctgccacgggctattacactaggaacgaccccactaaccgcggcgagacctcaccccgactagaacgcagccacgccgacctgcagcctgcagcaccagccacggtcactctgacatccagacctgaatcctcttcgctccaggcccttccctcctatccacgcacacgctgtacggcaggagacaattcaaggcagagaagcaacgccaccctatagctcccatgctacacctagttccttctagctctcaataatccctacaacagcatacgcatcttcctccactagccacccgacccaagggcacaccgagtaccccaccgtagacacaacctactcaaccgaccaggaactgggcgccccctagccaactccacgggccttgacctatgaccacgggccctggcaccagttagcatcttgacccatacccatcgtcacactcaacctctctattactacatttatcattggggaaacatactacttccttgcccccacacctgatga

SEQ ID NO: 710558 - DNA, 1087 bp, Homo sapiens
gctctgagacccagaaagccggagagtgcaactgtcatgaaggctatgcccctgaccctgttcacagacatctgtgtgtgcgcagtgactggggacagagtgaaggaccttgtgccgctacaccggcacagcttgcagagtgggctatgtatctaggtgactaggagcagcaagcccctgaaaagattctcagactttgggtcaatggtgcgtactggcttacctgtctaggcaagaagactatagatggttcccgacactagtaggtagctggtccagtcaacgcgccctgggccaggctgcgaagatcccgatgtgcgtcgctcatcggaatgaccctgcagattcgtcagggaatgaagcggatgctgtcccacactatcgtttgaaaaagcagtacaaattgaccattgcttgtcttttccctttgggggtgacccatgattcagttgaacatggctcttcggaggaaaacatagttgggcggcgggctagtcacttcgacaaactttcaaggtgtagtgtctagacgcggtcatgggtcgggatgccctccggaaaatgtgttgtagcccttgaaggaaggttgaaaacccatgcacagcgatggctctgggcttgctacgaaaccgatttccaagaatggcatttgacttggctcttgattagggttctataatcgggccgggcctgagtagaaggcaagcgtgttgccctttgcaatacatgaacggcttgacaccgttgacacctaacggaattgaccacggtatcaggaagcaaccattcgttggcacatagcttccatagcccggagtatagacaggtagggaacgggaaggttaacagaaaccgtggaacttccttggattgtgacaaaagtccgtggtctttaaaaggcttctcaagaaatggtcttgccggagggagcccccagagcttgcccatcaaaacgcctgaagtccgaagattcaacttgattacccctccttatgggagcaagaatggctaacaattgggtttacaaatcaaaccgggaaccccagacaatgtttgaaccaagggaccaaggtctacccagactgac

SEQ ID NO: 710559 - DNA, 158 bp, Homo sapiens
tgctaaaatcgtcaggtgtcgaaattaactgcgccaggtcgaaagtgggtcggctctgatctgggatcgtttcaatctgacagcaagcgatctgccgatcctgagtgcaccagcagatcaatgcattatggggcttggtgcgatatggctatatgccc

SEQ ID NO: 710560 - DNA, 1010 bp, Homo sapiens
  misc_feature (328)..(328): n is a, c, g, or t
gtccggacactggacttctggagtccccgtcgtacctggtgtgtcccctctaccttcaggaaagaagggcagatggtcctcttgcctactgaaaccgaggaggggcgcgtatacagcgggctaagaggcgctcaacagatccgcagtggaagaaagaagcagccggcacatcactggtaatgggcgaggtagatggcgagacaggagttgtgaaggctacttcggactaagcaaggtgtggtgtggcggggcggtacagccgtagaccttggcctagtttactggtcagatttcggatcctagctttgtccagtttatagccagcgtnagttcacccctctttagatcctcttgctgtggccgtatacgccaccgggttttctgcaccgctgtgcccctgtagaaacccatacctggacttagcacaggactttgcaaaggtagtgctggtgacggtaagagagctctagccgcttgaaagtaaggtctgatgctagtctacctgacagcttcgtgtactctagcataagcaagttagcctgaggattgtttacgttgtatggatcggcaatgcgagggtatagtaacgggacaagaatacgcgatggccaagataggacgtaggctggatagatggcacattcttagggtcggattgcagctcgaaccccgcgttttggagctgtagagtacgcctgctgtgccatccagtcgatcccgtgccactcgagatttaagccgtagagccgaatggatcggtctggcgttggttccgtggagttgtcatttaaccactgaacgttgggttgacatatgccgaccctgttcaggggtatccccggccgggctttcggaagccggatctctgtgggtaattgggtactctttgacgcttggattgcttgctgttagggaccacattcgtcagctcctgatcccggactgcccctccgggagatagctcttgaagtgagcatgtctccagccctcttgctcgtggtcattcccaa

SEQ ID NO: 710561 - DNA, 926 bp, Homo sapiens
  misc_feature (413)..(413): n is a, c, g, or t
taaaaaaaaaaaaaaaaaaagaaattggaaccaaccaaacaaaaaaccaaaggggccgcgcggtttccaggtggccctgttgcttgggggggtcaggaccctggtctccaacacccgccaagtgggtctgcggggggcccacgggaaggcgtggggcgcctttgggaccaggaggcccacggggggggccagtaagtctccaacataaagagtgctatgggaggccgactccttcttcccaaggcccgccgggaaaaggctccgccggggtgatgagaaagtcaaaaaagccgtgtgcaacttgccggaggacccaaaggggggcgatggtgttggccccccggtgtccccttgtttggtcctcctttgcccgagccctggaaggggggcggccagggagagtgtcctggggngctttcgtgtctgggcacacaacaggattggggggcccatcttttccggggaaggggggggcgggagacccggctagggaacatcggaggctcttgtgcgggggacccttgggggggaggctccttggggacacggcgcttgcaggagcgggccaacgccatcaatttgtctggtttagaaaggccacagaaagcacagggagtaatctgggattaggttgggagagagaaaaaagcactttgcgggacaagggatggggaggcccggcctcccgaccatggatggggtggtcagataggccaggcttgggagccagaaaataaacaaggggcttgggaggccccgggcagtgcacattaggaagtggcctcctcttgtgggaactggtcggagacgcggaagccgatgtgtaataggtacctcgaaggaagaagagtctcggcacacaggacgaggaggcccaaataggaccacatgtggcccaagcttggattgccacaacgcatactgtc

SEQ ID NO: 710562 - DNA, 1057 bp, Homo sapiens
aaaaaaaaaaaattaaaaagaaatgctcctcaagttggagagggcccactagcatcctggagaggacttggaagaacaacagtccaggctgggcacctgtgcgtgggttcttctgtgttccaaaggccagcccttctctttgtggtgttcagccgcagaatctcccttcaccttagggcattgacttacttggacttgccagcttcccacttaacacctgtgctgcagaattccagaacgtgaaacgccggtccccagcgggcccctaaagccccttaggaaagtgaccaccccccattccctgtggcacccagattccgtggccccgtgcacctcacacacaaaaacacattacagattgccatcttcttttcattcagtgttattttatttccttttattttcttgggaagcccgggaaggagtgtgacgggaagcaaattcaggacctgtggccggccccacgcctgagcctttgccacgaatatttggagaagttgtggcggtgaccagaagtggccgtggtggtggattcaggccgtgcaggtcgagcctgtgggaaattctcacaaagtggggcacttagaagaagcgcagcctggaagcgggggccccttcagaggttggaccgttaggtgagtcgcagtacgggcattggcaccttgcagaggtttgcccggggattcatagttcccgagcaccattcacgcggggattgagccggtttcagagttgtggcactctgtcacacatccaatttacattgagaggccactgagacattatcacaggggtacatgtacaggcacttccatggcataactcaattaaatcttcaacagcttgcatgatcgaggcatcggcttcgtatcattagctccattttaccgattggcgcaactggaggctcccaacaaccgtggctgtcgtttgcccagaccctctgggttccaagagatttggccccgtaggatccaccttgtgctcttcaaggcaatccttggaatcgcctcccgtcgcttgagaatgcctggaaaccggggactcagggcctcgc

SEQ ID NO: 710563 - DNA, 809 bp, Homo sapiens
ctgctctcccacgctgggggtctctgtgtggtgctcgtgagcctggcctgcctccagtgaatgcaggcgccgcgcggtattgccgcatgcagcctcgtgtcgtgggtgacccctgctgcagcagccctgtccacacgggtgaactcctgtgaggtgctgtgtggcggtggtggcaatctgcgctggtgtcatggcccctcggagcagtgctggtggagctgccctgagccatggcctgctcccacctgccagccgcgtggccaatgaatgctaggcctggtgatgtcatgccccgacctggaccctggtgacgaaagtccgaatgtcacccggtcagggaaccagcacagacccacccgctgggggttccagaacgtttccactgccgccgcaggagtgctggcctctgcccaagcagccttgcagctgtgctaccacgctgtcctgccgttctcagcagacagcctgcctgccctgcagccatgaggacccccgacagatgtctgctgcacacagccttcccttggattaccccaataccttcattcctacactcctacttggctcctaggagtggaggagatggggactgacagggaccggagactgcatgcaaaagcatgctggatgaccagggaggcaagttgcaggggcctgacatggtgggggcaataacggctctggaaggaacacaccctggaaggccacatgacatcttggcctatcctggagctaatccccctatatgacgggaagcacaaggcccgatgggacccccagatgacaataacaggcagactggaaacaaa

SEQ ID NO: 710564 - DNA, 740 bp, Homo sapiens
  misc_feature (23)..(23): n is a, c, g, or t
  misc_feature (116)..(117): n is a, c, g, or t
  misc_feature (153)..(153): n is a, c, g, or t
  misc_feature (185)..(186): n is a, c, g, or t
  misc_feature (208)..(208): n is a, c, g, or t
  misc_feature (212)..(213): n is a, c, g, or t
  misc_feature (255)..(256): n is a, c, g, or t
  misc_feature (265)..(266): n is a, c, g, or t
  misc_feature (277)..(277): n is a, c, g, or t
  misc_feature (318)..(318): n is a, c, g, or t
  misc_feature (338)..(338): n is a, c, g, or t
  misc_feature (343)..(343): n is a, c, g, or t
  misc_feature (373)..(373): n is a, c, g, or t
  misc_feature (381)..(381): n is a, c, g, or t
  misc_feature (385)..(385): n is a, c, g, or t
  misc_feature (417)..(417): n is a, c, g, or t
  misc_feature (419)..(419): n is a, c, g, or t
  misc_feature (431)..(431): n is a, c, g, or t
  misc_feature (451)..(451): n is a, c, g, or t
  misc_feature (501)..(501): n is a, c, g, or t
  misc_feature (505)..(506): n is a, c, g, or t
  misc_feature (524)..(524): n is a, c, g, or t
  misc_feature (527)..(529): n is a, c, g, or t
  misc_feature (532)..(532): n is a, c, g, or t
  misc_feature (534)..(534): n is a, c, g, or t
  misc_feature (544)..(545): n is a, c, g, or t
  misc_feature (564)..(564): n is a, c, g, or t
  misc_feature (569)..(569): n is a, c, g, or t
  misc_feature (579)..(579): n is a, c, g, or t
  misc_feature (593)..(593): n is a, c, g, or t
  misc_feature (595)..(595): n is a, c, g, or t
  misc_feature (604)..(605): n is a, c, g, or t
  misc_feature (617)..(617): n is a, c, g, or t
  misc_feature (626)..(626): n is a, c, g, or t
  misc_feature (631)..(631): n is a, c, g, or t
agcgggacgtcggcggttgccgnggagagacccgctcggtcccgaccgagagctggcgtcaggagccgcagggtcacagcgtgtctttgaagctgcctccgccgcaccatgagcgnncgaagtcggggtcgaaagtcctcccgcgccaaaaancggggcaaaggccgcgccaaagcccgagtccnncctgctccggacgacgccccgngcgnnccggacccttcacagtaccagagtctcggggaagacacccanngcggcacanngtgcaggctgncgcggggtggggtggcctggaagccgctgcgtccgcgcagntcctccggctcggggagganggccngctgccggctccccctggactgtggcctcngcgctgcngggncctgagctgcgggggaccacgggcaggccgcngncaggcccggccnggggaaggccgcatctctcntcggagcgcctggcggcagacactgtcttcgtgggaaacagcgggaaccngtgnngaaggccgacaaaatgcnccnnnggngnttggaaaccnngcgtggccctgaccggggnaaganagggcccagnaaaacctgtagcancngcaggggannggggccctcagngtcaatagnctggntggagaacggcagaacaccaaaagggggcgggaatggagaagaatacctcgtgcggccacctggcggagggcaacgtaaggagcagagggaatgcaaggtccgggcccc

SEQ ID NO: 710565 - DNA, 126 bp, Homo sapiens
aagacgcagtgatgtctagcttagtgtaacgaggcagtgcatgtctagctttagtgtaaacgacggcagtgcattgtcatagctgttagtgtaaaacgacggcagtgcattgtcatagcttgttag

SEQ ID NO: 710566 - DNA, 252 bp, Homo sapiens
  misc_feature (249)..(249): n is a, c, g, or t
agacagaacaccacgacggaaggagggagcagagccaaaggcggaaaacaggaaagagacggcagacagaaagaacagagacgcaagaacaccagcaagaagcagaagcacagcaggccaccacaaagaaggcccgaaggaagcaagcacgagacaccaaaagaggaagccgaaggcagagtgaggcattgagtattccaatatttgaagctgtagagcaagcatgatttggggaagttaatcattttnaaa

SEQ ID NO: 710567 - DNA, 406 bp, Homo sapiens
gatgcgccgggcgggcggtgcccactgacctccctcggcggtccggccgggcagcgcccggagcccaggcagccccgctcgcatacgcgttgtcagacatgaggttgtggaccgaccgcagttcgctaggccgtgataattgaatgactacagctgattcgggatcgatgaggtgacgagcaaagggtgggtacgcgtaaaagtcttgtggagtcggtcaggaggagagtagctcttaggaagtcgacccgtgcctattgtattacagtgaaggagcgcatataggataaatgagagtttgagtcggagctgacgaatagacattggccgtgatgagattggtagcaatagagattgtgtcaaagaactgagtatggaaggcctagggtgtggggaggagcagagg

SEQ ID NO: 710568 - DNA, 704 bp, Homo sapiens
  misc_feature (184)..(184): n is a, c, g, or t
atcggtgaacatctagggtggctggcgtagtctaggtttctcacaggaacataatgtgcctctatagcaaggctatctcttagatcagtgtctcaagtggaaacactcttcatggtgcttagcccttactggagatctgcctattaatataagtagagcaacgacacagtggacaagcttcgtngatcagacggtcgctgaaagtctttcatctgtgaatggtgctttgtagttaagagctgaatgtttctttgtacagctagacgaaagactcactaattttcacatgatgtagccggtgtacactccgtgcgaaggagatgtttatggtgattgaaagcaagatgtggaatcggtattaattttagaagagagtggcaggagtgacttgagactgatcattgcatgagtccctcgatccctgaagattgagtttaggtagtcattttagttattttattcattaggtaagtgtggtctatgtatatttctagatattgattaggtaatcgattataaagggatatctatcagaagtccaggggatgcatttggaaattatgattattgttctttggctgaagtattcatgttagaacatacaaaataaacatattttgaaacattgcgtttaccaccaaagaagaaatagaggaacatgaaataaggttataaaaagataacaggagaaataataaattaag

SEQ ID NO: 710569 - DNA, 342 bp, Homo sapiens
  misc_feature (317)..(317): n is a, c, g, or t
tacaggaatagaacattaaaataccaagcagtggcctggagcggtggctcacgcctgtaacccgagcactttgggaggccaaggcaggtggattgcctgaggtcaggagtttgagaccagcctggccaacatggtgaaaccccgtctctactaaaaatacaaaaattagctgggcatggtggcaagcacctggaatcccagctactcagaaggctgaggtggaagaatcgcttgaacctggagaggcagaggttgcagtgagccgagaatacaccactgcactccagcctgcgcaacagagcgagactctgtctcanataataaaatagaataaaaataaag

SEQ ID NO: 710570 - DNA, 778 bp, Homo sapiens
ggcacaatctcgactcactgcaacctctgcctcctgggttcaagagattctcctgcctcagcctccattacaggcgtgcaccaccgtctctactaaaaatacaaaaaaaatttagccgggcgcggtggcgggcacctgtagtcccagctacttgggaggctgaggcaggagaatggtgtgaacccgggagcggaggttgcagtgagctgagatcgtgctactgcactccagcctgggggacagaaagagactccgtctcaaaaaaaaaaaaaaaaaaaaaaaaaattgggggaggaaagggcgtttaaattaaggccccttctgtgggccggtctcaggaaacgtgcctacggggggggctcaattttttccccattattgacttttattttcctttatttttccacaactttttttggaagcggcagggggacgaggggacgacgcggtgggcgtttaccctgattatttcagggggtgggcccccctttccccaggcctgattgcacggtccattctagaaccgctcagatttagcctaggccatgcccttagggacacggctagggggagcggggctagagggggtctgccggggtaggggactcggtttggcctgaacctgcttagggaccgggtgagccccttggcggatgggcccagaagtggggcctgtattcccaggtgccggagctggccggggcggcgaggaggaggaggcttctccgggaaaaagtggggcgccttcttgacagcggccttggcctggaatgggttc

SEQ ID NO: 710571 - DNA, 134 bp, Homo sapiens
tattattatttttgggacggagctttgctctgtcacccgggttggagtggagtgacgcaatcatggttcactgcaacctctatcccccaggctcaagtgatcctcccagttcagcctcccaagtagctgggact

SEQ ID NO: 710572 - DNA, 241 bp, Homo sapiens
tcactcctaatcaaagaagaaagtgagtggcatatagaacagcagttaactaattttttcttcacctaatcttatagggagtaatgctagtagatataacctttttagttaacctgaaagattccaaaaatggttcttaagtgcttgagactggcaaccacacattaaattgtcacttcataaacatcctcttatcgcagttcactcttgccctagcattgtcaacattcaagttgggcat

SEQ ID NO: 710573 - DNA, 269 bp, Homo sapiens
caagagacgcctaggaagtagatacgaggcatcaggctacctcacgagagtcatagtacctcccgccgtgcaccagcgcttgattgaatatactccactgtgacattcacgagcactgggcagaaactcacatcgcgtcaacacccgccgcgggccttcgcgatgctcggttctaattacacagtcggattcccctggtccgcaccagtcctaagtcggctgctacgcgccggccgaggcgaggcgccgcgcggagcactccacgtccg

SEQ ID NO: 710574 - DNA, 155 bp, Homo sapiens
  misc_feature (37)..(37): n is a, c, g, or t
cgggctgtcggatgtgcgggatgtctggctcagcacnaacgtggcgttggagccatccaggctggcaattcaatgtgtcctcgcgggcgtcggcccagtagatgcgctcagtgacatagtccagcgtcaggccattgggccatgtgatcttggtg

SEQ ID NO: 710575 - DNA, 633 bp, Homo sapiens
  misc_feature (556)..(556): n is a, c, g, or t
ccttagtactataaggccgaacccccgatgctacgccaggcggtaagaagaataatctaataccccgcaatttcctaacaacccccggacgcgtcggattaccactcattataaataaaatctcctcattacgtactccgccactaaattaatgtacacacctcctaaaaactatatccgctacttaagtttccccgccggattgacatctataacctaagttatctacgccgatacctccaaaataatgcggccccgtacaccccttaacaacttataaaggaatccccctagagttactcgtaccgtagtaaacaataatcgctaattccctcccactccgcccctccttcctaagccgccctgcagtaagagaacgactagtccgcaatccgcaaaataaattagccctgcttacaccaaaaatactccctaacggaaaccgactcacccccctttcgacaatccttagtcctccccttacgctacgcgcactaatagaattatctctcctaaaatgatgaaaagatccgacattacgctgcaatccacatcncctaagttacttccgagaaaacagtcctatggaactccgcagagggcacataagccctaccgttccccccgttcccc

SEQ ID NO: 710576 - DNA, 677 bp, Homo sapiens
ctacccctaaaatgccaaaatgggaaagtgaaaagactcatatcaacatatgtctgtcattggacactgtagattctgtggcaagtccaccactactggccatctgatctataaatgcggtgtgcatctgacaaaatgaaccatctgaaaacttttgagaagtgaggcagctgagatgggaaatgtggctccttcaagtatgcctgggtcttggataaacttgaaatgctgagctgtgaacgtggtatcaccattgatatctccttgtggaaattcgagaccagcaatgtactatgtgactatcattgatgccccatgtgacacatgagactttatcaaaaacatgattacatgggacatctacaggcttgacttgtgcttgtcctgatttgttgctgcttggttgttggttgaactttgaagctggtatctccaatgaattgttgcaagaccacgagagcatgcccttcttggcttacaacactggcgttgttacaacaatctaattgtctagctgttaacaaacatgagattccatctgaagccaacactacagaccagaaagaagatattgacgtcaattgttacaggaacgtccatgcaacttacccttactaaaacttggttacaatcccctgaccacatgtagcattgctgccatttctgtgtgacatggg

SEQ ID NO: 710577 - DNA, 349 bp, Homo sapiens
ccagcgaagaacgggcagtgccctgtgtgacaagcattccaagctctttgaagagcctgaggatcccagtaagcgctcattcttctcgtgagaatcatctcctcgcgtgtccgacgtgaagtacagccacagtggctctactacatgctcacccgggattactcttacgagtcaaggtctggtacctgaacatggaggcaagagccatagagacctaccaggtccatgactaccttcggatcaagctctgttccctgtacgacagcgactgcattttccagcaagtttgaatgtgcctggatgcgggagccgacagtgtcatcatgaccggtgcctacaacagcttcta

SEQ ID NO: 710578 - DNA, 380 bp, Homo sapiens
ctcccccttatggacgctcatggactactcctcgctctagatggagccttactacatttgtacaggtccagtcccctgcagattgcgtctctgcagttaataccgtcctgatccgggaacaccgggcacgtgactcaggatgcacccatcccaggctcccctctgtacaccatcaaagcttttatcccggccatcgactcttttggctttgagactgatctccggactcacacccagggacaagccttttctctgtctgtcttccaccactggcagattgtgcctggtgatcccctggacaagagcattgtcatccgccccttggagccacagccagctcctcacctggcccgggaattcatgatcaaaacccgccgtag

SEQ ID NO: 710579 - DNA, 276 bp, Homo sapiens
agtgtcacatcagtataacatgatatcagcacattcccttgtcctcatcaaggtgttggctcagatttattcttactcggctgtctaaagcatgtactaccttgttacagtcggtaaagtgtagtggattattgacatgacatcatgagaagatgtgtacttttataccacatttataaaacatgattttgttttctacccttcaaggtaaacattaaaaataaggtggtacttgtgtacttgtacataacaccaaaattatagcggattgaagtt

SEQ ID NO: 710580 - DNA, 317 bp, Homo sapiens
gatagcgatctagaggatcccatccacagattcaggaagcagaaagtgctggcttccacctcgtaggtctccttaatgtccacttttgtagaagagtcatcgctgtgcagggacaggtggtgtgacgagcttggacgaggccccacctctagtgactgcagcttagttaattacgtctgcatcaagcctatttgcaaatcaggtctcattctgaggtaccgggaattccaaattcattataccttatgaactgtcggacgatgaccagtattcccgcatggcagctcgtcattcctgggtctccgctctcgcacatg

SEQ ID NO: 710581 - DNA, 456 bp, Homo sapiens
cgcaaatcaggcgcgccgaagatgtagggttccattgtggcgtcaacagtggggcgcggattaaatttcggtatgcgacaagctgcccggcaccttgtctttgtcgtcgtcatgccaatgtcacgttgttcgccttcaggagctcgggaaagtcgtcacccgcgagataggcatgctcgcgttcgcgcccatgcgtcagcgggtcgaggtcgatcaggatgtcgtcgacgaagccgggatggcacatgatgagcccgtcctccggcaatccggcgacgaacccttgcatcagcgcgccaaaatcggctccgcgcgtgaaatcataggcgccggcgaaatcgggattgaaggcgagatcggcctcgcgcgcacggcggcggaattgggcgctgaggacatcgagcaccagcgccttcggcgcacgcaatcgctccgcgagcggcttgtcgcggccgc

SEQ ID NO: 710582 - DNA, 229 bp, Homo sapiens
cttagcatgcttcaggtttagcaacagcacacaggccaacttccagacgatagccatgctgaggacttcactataagcatggtaccatctttggtgttttacatatgctacaccacttaatcttctcacgtgagctcatgagcatggccatcagatatctctagtttcacataatgcaggaaactagaggcaagtataagttccttgccccaaagtctcccctataaac

SEQ ID NO: 710583 - DNA, 885 bp, Homo sapiens
ggtctcaaactcctgacctaaggacatctgcccaccccagcactttgggaggccaagaagggcaaatcacttgagctcacaagtttgagacagcctgggcaacatgatgacatcccgtctctacaaaaaatacaaaaattagccaggcatggtggtgtgcgcctgtagtcccagctactcaggctgaggcaggaggatcgcttgagcccaggaggtggaggttgcagtaagccgagatggcaccactgcactccagcctgggcaatagagccagcccttgtctcaaaaaaaaaaaaaaaaaaaaggccaattttttttggggggctctcaaatttttctaatttcaccccagggattgcccaattgtcccaaacgcccgggtcatattcttacctgctttggacaacctaattaaccttaaatttttcctttttctttacactggaaactcacgttaaggaaatttttactcacttctgggattggaaaaaatacttccctttgtggttcccccaggaattgattcaaatgaggagggatgcggggcggtttattgtggataaccctttaattttcatgaactggccgtgtttttttccagaacgttttggacgtttaggaatttccctcacggttcctatgttttttcaaaatcctcttccctgaaagtcctgaaattttaaacggcttttacgcatttttagaagcaggcggcctacgggatgggcccaatctcctttcttaaaattctttaccacttggtctggcgggacctttggcccgatggaaacaggcattcggtaacacacacatactattacctcaatatggtgcaacatactatgcgtgagagaggatcgccctgcaccgtggagacagaatatc

SEQ ID NO: 710584 - DNA, 914 bp, Homo sapiens
  misc_feature (1)..(1): n is a, c, g, or t
  misc_feature (337)..(337): n is a, c, g, or t
nggaaagagagacacaccgagagacataaacggaggcgcccggtttcaccccgaagcctcctctcacgcataaggttcgcacacagggtccgcaaatgggaaaattcaccgggcggccttggcatatctgccgcgccaggacagtaatttggagatgagacgaatgcaaaacagggcgcagagggcacgccggaatgggaccacacacgggacccctggagccaatatagcggcgaacctctgtgggaacacacgggggaaaagggtgcgctgtgccaaacacgacgctggagaaaataatgtttggtccacagccacaagtgcccaccccacgctncccccggcgtggtgagacacaacggttgaattgatgtgcccgcgcggtttctaatgacccaagaaagaaacacttttttggaaaaaacgctaataatggaattgccccaagggaagccccattccaggagcacccagcgcgaccttgtttgaagcgtcttgtgggaaccacacattcgccccgcgcccccaatgaggccgcccttgaaacctgttatatggagtgagtttttcctccacccttttgttagaaaaaattctccccaggcctctgcgcatttaagagaaccccctttccaaagagggttaaaaaaacatggtggctgccacatccaacttcgccgcttgaggcgatataacactccaccacctttgaagcacttttcccccctctcctatcgtggattaaagggaagaaaattgagatccaccaaacactaattcaacctccgtttttttttttttccgtggtgttaaaccaccacccccgcttcttaaaaaacactaaaaattttttaacctttcccctttttttttggttccaattaaaaaaaaagggaaaaattttaccaaaaaaa

SEQ ID NO: 710585 - DNA, 111 bp, Homo sapiens
  misc_feature (1)..(1): n is a, c, g, or t
nccaaccgcatcaccccgctaaatcccctataatgtactcactccttaaacacactcccgtattactcgcatcatgattattaagtcacctgagctcaccatagatctaat

SEQ ID NO: 710586 - DNA, 418 bp, Homo sapiens
ttacaatctgtctctgacagtgaaaacccgttgactgagcaccatgtcccgtggtaccgatgctaaccctggaaaccgcccctgaagcgtgacaagccctttctggaaaatgccctgaagggttccgggttcatccccaatctgttggcggtgctggacaatgccccggcagcattggaaacctacatcaccgtgtccggcctgaacgccaagtccgacctgagcctggccgaccgtgaggtggtgcaactgattgacgacaccaaccatggttgcgatttctgcgtcgccgggcacactgccgtagcgcgcaacaaggccaagctgccggaagacgtgatcgacgccctgcgccagcgtggcgaactgtccaacgagcgttatgagacactggccgcgttcacccgtgaagtgatcg

SEQ ID NO: 710587 - DNA, 367 bp, Homo sapiens
  misc_feature (1)..(1): n is a, c, g, or t
ntgtataatgttcgaagagaggcatcctccatacgcggtcccctgtttcaatgctggcctcgtagagtttgttccagagccaggatgaattggtaaagaccacagtggcacgtgatcccacagctacatccatggcgcctgttaaggtggcggcattgagtatggccttcgggttgagcgtgtgtgcgtatcagagcgcatcagacagtatgagcctcccctcagcatcagtgttatcaacatgcatggtcatgccttcacacagaggggccagtcgtatactattgctgggcgcatgtcagctgctgcagcagacacgatgtactgagtatatagtcgcagctcgtcgcatgtgagccttcatgag

SEQ ID NO: 710588 - DNA, 1090 bp, Homo sapiens
  misc_feature (1)..(1): n is a, c, g, or t
  misc_feature (47)..(47): n is a, c, g, or t
  misc_feature (92)..(92): n is a, c, g, or t
  misc_feature (150)..(150): n is a, c, g, or t
  misc_feature (171)..(171): n is a, c, g, or t
  misc_feature (260)..(260): n is a, c, g, or t
  misc_feature (266)..(266): n is a, c, g, or t
  misc_feature (303)..(303): n is a, c, g, or t
  misc_feature (321)..(321): n is a, c, g, or t
  misc_feature (348)..(348): n is a, c, g, or t
  misc_feature (448)..(448): n is a, c, g, or t
  misc_feature (463)..(463): n is a, c, g, or t
  misc_feature (546)..(546): n is a, c, g, or t
  misc_feature (613)..(614): n is a, c, g, or t
  misc_feature (628)..(628): n is a, c, g, or t
  misc_feature (645)..(645): n is a, c, g, or t
  misc_feature (761)..(761): n is a, c, g, or t
ntctgttgcccttcgttgtggtgcgtctggactctgaaattttggtntgctcttggttggctcggtctcgccgggtggtctccctctccgancctaaacgttgtctgttttgtttcgcccgcgcgcgagtttatattcaccgtgcgcctncagttgcttcgtatgtggagngggatgaaacccggctcgggtggtgttttccgctcgcgccggccttaaactcgggcgtggtgggttttaataacgcgcgctccccgcgncgctcncctcgtgagaatgtatgcctggtttgttaaattagcnctcgcgcccatgctctcncaattagttttcggggggcggtctcangctatatatccgttgccttcgtctcgctcactaagcctcgacgtgtaatgcgatgctcctgttggtgcggcgcaacctcggaggtgctcacctgcttttntttagtccgtgagangcgaacccctacgccgtcggcccgctcatataacctatcttctgtgtgatatgagcacgaaacacgcttatagtatcgcgganatggtttcatcccacatgtctcgccgtcggttgtcttcccgggacagataattattcgccccggggnntatttctccgcgcnccccttctcctcgcgcncgcggtggtgtcaaatctatacaccgcgctggactgacgatctacgcccatattatgtcgtcgggtcgtgctcgattattgttatcctcctcgtccttctcatccctctctaggcngttacatgtctgaagttgctcctcccgtcgaccgcatttgtcaggctggcgagttttcaggcgtcacacacacaacttgttgtagaccaccactagcgtgtcccccgagaatgtctcacgtctcaaattttcggtggccacaaaccttctccccacctcatgttggcttccatccgcgcccgacatgaataatgttcgcacgtcagacacagcccaacagactccactggggtcttcgaacgccctcgtcctgaaacatcgcgccatttttaaaaaggggttcaaaaattttttaatttccccttttttatgggggtttttaaaaaaaa

SEQ ID NO: 710589 - DNA, 291 bp, Homo sapiens
ctttttccccttaaaaaaaaattttaattatttaatttaaaatattgggaaaattatgggattggtagggaacttaaaaaaaattgataaaattaattattaaaatttatatttaattaaaaggaaatttatacccctttgggcagaaggttttttgcagatccgattaatttttgatttttaaagaattttgttaaaaaaaaattttgcaaaaaacctagggaggtcctcctataaaggttaaattttttcgattacttataatccttaaaccaaggggaatggttttta

SEQ ID NO: 710590 - DNA, 115 bp, Homo sapiens
ttatgcatgtccctttatgatcgtggtgatttagagagtgatctcagctggaatggggatgcgttgcatgtgtaatcttactaagagctaatagtaaacggctagtgaccaaagc

SEQ ID NO: 710591 - DNA, 294 bp, Homo sapiens
gcatcttgggacacaacgcctgggattacagagtggatcacttgagcccaggaatttgaggccagcctggggcaacacagcgagaccccatctctacaaaaaatacaaaaattagcccagcatggcagctcgcccctgagattgcagctcgcccctgcagttagcggcagctcgcccctgagttacccgcagctcgcccctgagttacccgcagctcgcccctgagttacccgcagctcgcccctgagttacccgcagctcgcccctgagttacccgcagctcgcccctgagtt

SEQ ID NO: 710592 - DNA, 231 bp, Homo sapiens
cactcacagacattgcctgtctccagattggaactctggatctccttctcctctgcatagtctggtgaccctgctccaagtccgccgcaccgatgtcatgtttccgtggcttctccggatgccgctctgttccactggtctcagtctccaagtgccagctccacattcccctcggtcgccatatctattttaccatgcctggccgataaagccccaaactcatgccgactt

SEQ ID NO: 710593 - DNA, 356 bp, Homo sapiens
acacagtagagacctcgttggcagttaagaagatgtccgcctagtcaaggtggggatgctgaatggcggcaacgcatggcactatgtggcgtacaggatgcaagcctattgacagttttaatgagtatttatttgcttgacaaagtcatctatgctactgggcgtctgaagacacagtattgctcgtcctcaaagagatctaccaaacccaggctatcttccttgatcagcctttacagtaaaaatgacccatctatggctgcttaatacggacattgagggatccttccccagaaaatccacctgtttgttgctgcaattttcctctcctcagctgcgtcatttcctgcatgttg

SEQ ID NO: 710594 - DNA, 237 bp, Homo sapiens
atctaagcccaaaagtgcctgatattgcttaatcaaggcgcttttttggttctgttcaaaatgcgcaccaaatcagacaccgtcaattccttccaaaaccgtcacaattggcaagcgaccaataaattctgggaatcacaccaaacttgattaagtcttctgggttgcacatattttgagaacattgtcatcgtccaacgctgcggcatttttcattagcatgcgagccaaagccaa

SEQ ID NO: 710595 - DNA, 164 bp, Homo sapiens
acttctcacttggtcaccgtgtattatacttgtcatacattgctggatttaaccatgctaatattatgtcgagattatatataaaaaatctcagagtaactacattttattgtgacacttattacattttaaaatattttagaaatcatgaaattgctagacat

SEQ ID NO: 710596 - DNA, 330 bp, Homo sapiens
  misc_feature (232)..(232): n is a, c, g, or t
gagaagacgaagaagggtccattcattgattgacgaggggctctacggaggggtgaggatgggtgcaggatgcacagtgacaagggacatggggtgcgggccaggaggaaaaggctggaagttagctgacgcatgcttttggcttttatcccacgggcgggtagtggcccggaccctggcttgtggctgtcccaagtgagactgcaactgtccccttcctcctcacgtccgncttgtcttctgtttcttggcttgtctctttgcatcttctgggccgctattgtcagaggctgcttggccgagcgcgccgactcccttctgtcgtcttct

SEQ ID NO: 710597 - DNA, 408 bp, Homo sapiens
  misc_feature (26)..(26): n is a, c, g, or t
  misc_feature (35)..(35): n is a, c, g, or t
  misc_feature (91)..(91): n is a, c, g, or t
cctatactctggcggaaaaagggagnccaatgtcntcaattccctcaggtgtgagttagaatccaactgaaattaaattaagtggaatatnaaaatgcatggaattgccttattaataaagattggacatccctaatctgaaaatctgaaatctaaaatgttctaaaattcaaaactttttgagcacctacatgatgccacaagtgaaaattttcatacctgaccttatctgatgggtcacagtcaaaacagagtcaaaactttgttttgttcacaaaattatcaaagatactctaggaaattgccttcaggttatatgaataagatatacataaatgaattttgtctttagacttgggtgccatccccaaggtacctcattatgtagatacaaacatttcaaaatcc

SEQ ID NO: 710598 - DNA, 601 bp, Homo sapiens
tctaggtcactgcctccttttcagtactagatggttggtgccttaagcccaggttagcactggttttagtaaatgatcagagtgccacccatcctgaatgggagaggtcccaaagaggatatcccagtagtgtgggaaggccagccaggggtttttacccaggggacctgtgagatgaaactcttactgtgtggtgctgctaaacagccactttgatttggcgtctcctttggccaagatatagagcagagtttccagagataaggatggtatttctacctcaccactttggctgtggctttcctcagggatattctcccttctggtactctcaacacttcttgtgcattgaggcagggaaagatttctcaccagaaaactcaagattgtggagaagctggttgttcacctcagtctcactttttccactgtagaaactgggagttggggggaaattttccacacacttggtgtcaggcccactggggaaaaggatatcatgaaatatgaagttcgattctcttactcggttcttggcgattttttacttctctggggccccgcgaactggctaatattaatatatgagatttgggatatt

SEQ ID NO: 710599 - DNA, 1540 bp, Homo sapiens
  misc_feature (1040)..(1040): n is a, c, g, or t
  misc_feature (1417)..(1417): n is a, c, g, or t
tttcaaattcttcctactctgcaacagcctctcaagtgaattttcaatacccaagtctatttagattcatcacttctattcccccacctcttcccccaatcctgttcctggaggcagcattcttgaaattatctgtcttcttcaatctggactgagtactctctaagcttactgaatgaactagtcttctgaagcttcctttaatcatcataatgggaataaactttcatcatgcttgtagtactggatcttttgttgccaaatcccatgtctctcttacttagttaataaccctctagtgttggcagagcccattttccagcgacttcccaaaataggtccatatctgaaatatcttggctgaaaatcattttcactaagcattttaaaggcgttgctccttgttttctaacttttgatgctgaaaagtctaatattcctctatccaatctttatataggattaaaaaaatctctaaaagcttttagggtccctttatcactagtgttttgatatttcagagatgagccttcttgagagtagggctttttaaaatttctctcattaataggctttcagagggacgttgtaatctggagactcatggtcctcattttggaaaattgctttttttttttaaaatttggtattttagtattccacttaatctaaaagcatgattatcactataccattatgaaagaaaagatgctgtcaattaatatagtcatactatggattataataaccattctgatttcagagatattacaacgtaaaaaaaaatgtttcttatggtatttctttcctgctttcttccccttcatttcctctattgtctctttctggaattcctattagttagatgttagattgctcttctttctttttctctcctactttctactttctacctcttattgttctactttttgagagctttcctcaattttagtttgtaaatgttctactaaaatacaaaacattcctattattatttttaacttctaagagtttcttcttttatgatttcttttttntggcaagttactttttcttggggaatcaattttgtctcaacacagaggacactaattaaacttgctttttccctgcattgtttgttcctccaagatctcattcttttatactggaagacttcctcaaataactggtgatatttggctttccataaatatttgcgtgaggcattaggaagtggcctggaagttattggcttgtcaactgggaggctttcttataggttaactagccaaccaggcagcttttacactaaaggtctcccaaaggacagtatctgacatttcttcagtcacaacgctcatcctccttcctggaggatatggtccctagtggttggaatgggaccaggtcaccattcagtaataggttttcncttgacctccctgtttccagcccagtgccttaccctacttcttcctgtgtccaaggtgcccaagtatacagcttctctggttttctctgtgtgaaatatcttctgtctccagaggagagagga

SEQ ID NO: 710600 - DNA, 502 bp, Homo sapiens
tttagtttttgttttgtggaaagtgtaaagccttcccaccaagggttttaatgtagattttttttttttgccccccctgctgttgattggtaaatgtaacagtttgattgtgacgctgaataaaagttttttttttaatgggctggggaaaggtagtttacttttaagcccttttggtgaatttcccccccagtgtgaagttagaattccttcagggggatgccaggttttatttggaatttatatacaacccgcttgggtggagaagcccttgtttttggaaaccttggggtagttgaactgatagttactgttgtggcctgaagttccccctttaaagggatttccccagcaaaatcatggaatggttataaaagtgattgttggccccttttatgccatatattttaattgaataatggggcccgataaaattataaatgggaaagaaggttggggatcccttttcatgggtaatcaataaacgattttatttttttta

SEQ ID NO: 710601 - DNA, 291 bp, Homo sapiens
cgggcccctttttggtttttcggggggggggggggttttttcaaaacccccccttttcccccttttttccggggggggccccccctttttgggggggggggttttttttccccctttttttggggggggggggcccccggggccccccccttttttttttgggggggggggggggggggtttccccccccccctccccccccccccgggggggggggggggttttttcccccggggggggggggtttggggggttgggggcccccccctttggggggttttttttttttta

SEQ ID NO: 710602 - DNA, 756 bp, Homo sapiens
  misc_feature (714)..(714): n is a, c, g, or t
cgagactgaaatgtgttgctaaaataaatgtcagaacagatgtctttaaagttctattaaatatttaagaaacagattattcctattttatttaatctattccaacacataaaatggaaacaaatatatatttgtagcttatcaatttattcaggatttgtttattgtctgtcttccccacttgcctttatgcactacgaggacaaataccacttctgtctcattcaccattacaccaagcatagtgcccggccacagtagtgctcagtaactcctgctgaatgaatgttgctgaattccaagttctcgtatgagatcagcataacactgataccaaaaactgacagagaaaagagaaaaaagaaccagaaatgaaagcatatttaatttttgttgatccttgtttttagagacagggtcttgctctgaacagcccaggttggagtgaagtggcatgaacattgctcactgcagcctcaaactcctgagcccaaaagatcttcctgcctcagcctcccaagtatccgggactacaggaatgtaccaccacacctagctgattatttatgttttatccatacatacccaaatcctaattaaaatagtagtgaattaaactgcaaaatcctgactgtagcaacttttagaaaagtgattcagtttccttcaacacaaacaaagcaagattgaaagagaacctacgactgcaaaganttaggatatctcagcatagaattcaaactattggtccaccac

SEQ ID NO: 710603 - DNA, 849 bp, Homo sapiens
cccacgcgatcggaagatgatgacgatatggacctacagtccaataagcagaaagaccaacatgcaggtgccagacaagacagggagtgtaggtggtcttcaatggtgtggacgagctcgaaacacgttatagaagactgaagcttctacgtgggcaacagcggaacgtctctggaagcgttgctctatctcctgtgtgagttatgaattattccatgtgccacggagagaagggccctgtcatgccttggtgaacggtgtatgaacgattgggattgtatcgagagagtaaatgacattcttgcagactatatgggatactgtctgtggatcctgatgctgagtatagctgaagtacatgatgaaagggatgcctctgcactggtggatccgatggagtgcacagacagagacagacggagcagagaggtacacagtcctcctgcttcattagtgccgagaattcatgtgatctatagcccagacagttgcaaacacatcaaaaccattatggcctgcgctgaccttagacagaagaggagagcaaaaactagtaatcgaagtatcatgtacgcgactagtctccagtcagagacagaacttcttgggtatccattgactcagtgcgccttacaggggagatagtaaaggctgcgtgaataccattagtattacatctcatctccacagaatatacaaagaaccgagaatgtaccttccacataggcaacaattaaccagccacacctgaagaggtgccacaaggaatagcaccgtcacagaccaatgaatcggctcatcaaaccaaaggagccagcaaatacccagcagacgatatcgagcacagga

SEQ ID NO: 710604 - DNA, 275 bp, Homo sapiens
ggcgaggacagatgcgaactgaagatgaatgattatgaaggcaggtgggactaaccttatagggatggctcacatagctgagacatacaacagttgagggtatatagtctcactcatgctaagccctcgagctcctgtccaatatgttctactgacatgactggtacagccagaacattaatgaaaaattttccaccttcctttcattcacagggcttctcatctttgtgagtcttaagatgttttttaagacctgacagcaaagaccccaaaag

SEQ ID NO: 710605 - DNA, 374 bp, Homo sapiens
atcttggatctgaacagtaagtaacacctggcagttcccccatacacacacgcactttggaaattaagtggaagtagtaagcagctgatatgcatagtaccagaaataggcaagggtccctgcagcacacatagcaaagtctagttgttgtggcggcagcaagaggcctcctggatcctacaaataatactacagtggtgtagacttcaaactacaacggtatcaacagactgcaaccctagacagccagttcagcagtgtatgaggccatgcatactcttcctcagcctttctgatggtatctgtgagtgtctctgtctcattgaaatcccctcctgcctaaataactaagtcatttcttgcacggatgccag

SEQ ID NO: 710606 - DNA, 131 bp, Homo sapiens
tggcctcagcctctcaaaaggctcagttacaggtatgagctaccatgccgggtccacattgggtaatgagatgccatctactccctcgcaagagctagaagggactggcatcttcagagtttcaaaaggcc

SEQ ID NO: 710607 - DNA, 527 bp, Homo sapiens
  misc_feature (436)..(436): n is a, c, g, or t
ggcaaaggaagactctaccggcgaactgcacctcttgcaacgattggatagcagcgtggacgcccagccctgcagctgcctcagcgcgaccacgggcgcacggaacagacacgacagttgataacactgcagaacaagctgccgcgctctttgacggatacaagatgttccacgggccctacgagccgtctgacctcacttactgaagtgcgtatgggaaggacacaggcactgccttacaagaacgctcgtgggacatagcacggcgacttggacaggctaatatgtccgctatctggaacactaccatgttggtgacgagcgaactctgtattggaggacagtgggcttgacaactcccgctaattgagagacgcgatttgcccacagcttgaattgtctttggtcattcagcggtaaggtgtttaacgacaanggactgaagcgcgtacatatcaatgtgacccactggctgtgtccaagggagacactatcctagctttactgaaattgctgcttgatggact

SEQ ID NO: 710608 - DNA, 322 bp, Homo sapiens
  misc_feature (280)..(280): n is a, c, g, or t
  misc_feature (287)..(287): n is a, c, g, or t
atatgagcgcccgtgcaccaccattctcgtcgttcgaattctctttcgatctctctcggtcgagctgctgagattttctaaattgaaaatttgccccctcccacactccaggaatcactccagtcttagagcttgttaggaccgattgggaggcagcccccgaagtggacatgccccgtttggacacagtccgagtgcaatgggaagggaatggtcaatccctgtcctggttgtccaagtcgggatctcagaggaaattgcagtgattccacggttaggnccccctnggggggttgctttcccctcagcctctccccacacg

SEQ ID NO: 710609 - DNA, 186 bp, Homo sapiens
agtggtggttgaacaggtctctatgcccaggtgagtgcatgatgcaattatagctcattgcagcctcgacagtcctgggctgatctgttcttcctggctcagcctccctagtagctgtaccacaggtgtgtaacaccacgcccagataatcattaaatactaagtatagatgaggtacactaacgt

SEQ ID NO: 710610 - DNA, 268 bp, Homo sapiens
gttgctccagcatgggggactacagacatgcaccaccatgcccagctaatggtttttattttttatacatatggggtctcgttggtgttgcccaggctggtattgaactccgggcctcaagcaatcttccctcttcggcctcctaaaatgccggggttacaggtgtgagccacttcactcactttagagattttcactttatgaatggataaatacagcatggcatcacttaatagggatacattctgagcaatggggtaccgagctc

SEQ ID NO: 710611 - DNA, 205 bp, Homo sapiens
gtcgacatgctctctgctagcctccatttgcacttacctttgtgaactgcagcgctcatagattgtttttctgttgttttttgtttgtttggtttttgagacagagtctcactctgtcacccaggctggagtgcaatggcatgatctcggctcactgcaacctctgcctcctgggttcaagtgattctcctgcctcagccccccg

SEQ ID NO: 710612 - DNA, 478 bp, Homo sapiens
  misc_feature (33)..(34): n is a, c, g, or t
  misc_feature (355)..(355): n is a, c, g, or t
  misc_feature (455)..(455): n is a, c, g, or t
  misc_feature (458)..(458): n is a, c, g, or t
  misc_feature (461)..(461): n is a, c, g, or t
  misc_feature (463)..(463): n is a, c, g, or t
ctgacattttttgactacgatgcaccttttggnnctttactggtgaactctttacatgatgattatttatgatgtgcaaaatgtgagattagagaaaaaaaacaaaacaaaagcaaaacacctaaaacttaatttgatgctgagttacaattcctttgaaatttcaactgttaggggttcacagccatttctccaaactgatttcttggaactgcactaggagagcaggtggcttgtgtgtctttttcactcttgtatgcccagcacttggcatggtgtctggtacagagtgggctctccaactacttgcaggatgagtgagtggcatgcaggcctggctgtgggcctggcacanagataatatgttcatttccatattttgtaggtgtcacaatctgaaatctggttatttcagattgacccttccagaggcagagatttatctagaatccttnaanccntncaatttcaaaaaaaa

SEQ ID NO: 710613 - DNA, 1490 bp, Homo sapiens
  misc_feature (857)..(857): n is a, c, g, or t
  misc_feature (879)..(879): n is a, c, g, or t
  misc_feature (899)..(900): n is a, c, g, or t
  misc_feature (908)..(908): n is a, c, g, or t
  misc_feature (925)..(925): n is a, c, g, or t
  misc_feature (928)..(928): n is a, c, g, or t
  misc_feature (938)..(938): n is a, c, g, or t
  misc_feature (945)..(945): n is a, c, g, or t
  misc_feature (952)..(952): n is a, c, g, or t
  misc_feature (964)..(964): n is a, c, g, or t
  misc_feature (974)..(974): n is a, c, g, or t
  misc_feature (976)..(976): n is a, c, g, or t
  misc_feature (981)..(981): n is a, c, g, or t
  misc_feature (994)..(994): n is a, c, g, or t
  misc_feature (999)..(999): n is a, c, g, or t
  misc_feature (1013)..(1013): n is a, c, g, or t
  misc_feature (1015)..(1015): n is a, c, g, or t
  misc_feature (1018)..(1018): n is a, c, g, or t
gttcatgcttcattaaggcaggcattgcaaactagttcagaggagagaatccacgatgacagcacattctgtgccatggagaacattcttaaatcaagcctccagtggaggaaggactcaagaatgaaatagcaccagataacggggcatcattagacttgtaaagcaaagcttccattttctatttttatataaaccattattaatgcctttaaaacaactgtgatatctggacaaataaaatagaaatgacttcttaagatgattgcaacttttagtcttgatttataaaaattattctacataattttagtagggtaactgataatttttctcacttttttttggttttagggtgaaaatcctatttataagagtgccgtaacaactgtggtcaatccgaagtatgagggaaaatgagtactgcccgtgcaaatcccacaacactgaatgcaaagtagcaatttccatagtcacagttaggtagctttagggcaatattgccatggttttactcatgtgcaggttttgaaaatgtacaatatgtataatttttaaaatgttttattattttgaaaataatgttgtaattcatgccagggactgacaaaagacttgagacaggatggttattcttgtcagctaaggtcacattgtgcctttttgaccttttcttcctggactattgaaatcaagcttattggattaagtgatatttctatagcgattgaaagggcaatagttaaagtaatgagcatgatgagagtttctgttaatcatgtattaaaactgatttttagctttacaaatatgtcagtgttgcagttatgcagaatccaaagtaaatgttctgctanctagttaaaggattgtttaaanctggtattttgctatttgcnntgttaganatgactgatgacatatntgnaagacaagtntgttganaagttgntggtgtaaatancgtttgaaananttganctacaagggcctnggaanaatttcagaggttngnaangagaaaccaataggctttgaaacctgtgtgccatattgaagtagttacgtatgaatgttatggtaatcttttatggccttcactgttacaatattcgtagcctctagatcaagaggaaccgagcaatttgctgctatagaagtccttgattgtagcatctgatatatcatacaggccatacatttaggaaagtatttcgctgaatcggggaacttttgcagtcgaattcatttgccttgagtttttcatcttccgtataatgtactggcgctttctatcaccctcattctaatctttcatcgtatctgggtgtcgcaaatcttgggggtaagacctgagtcatgagtactttatgctttgaaagttttcacgcggacagaaaggccttttaaagtgaaccttgttgacgtttacggggggctattgcacagtgtcactagcgaagtttacttgactaagtgccaaaagaccg

SEQ ID NO: 710614 - DNA, 697 bp, Homo sapiens
tccaaatttcgctgtgatgataaaacctgatcatagaccttaagatctttggaatatgtttatatgtatgtatgtatgtatgtatgtatgtatgtatgtatatatatggagagagagataggttgttttcatgagaattaagtttgacttattttccaaagttcttttggtggcctactgtcctgctaaaatggattcatcactacacgtcaatattagaaagcagctcactgaggccagctggtggcctcattcctcataggcgtgaggaatgaaaccgagcgaaggccattttaagtaacagctgccttttatctggccagcgctgccagttctggcctagcaagcatcccagtccatgtagtacttccaaccgcacgaaagaccgccaattgactgtatctgtcttcctactctgttgctccatagcggtaccgccgttcatcgaagatcggtttataaccctctggcatgtatcgaaacagcttttcgaaccacacacacaagactacatccttccccacctcgcatgcttcgcggtacaaaggatccccctcttcccccgccaccgggctcgccccttccaccacagacctctacaaggagcccaccgcatacccatccgccaaccacatgtcctcccccccccgactccccctgtccaacaccagggactactcaactctccaacaaacaa

SEQ ID NO: 710615 - DNA, 262 bp, Homo sapiens
  misc_feature (45)..(45): n is a, c, g, or t
  misc_feature (244)..(244): n is a, c, g, or t
  misc_feature (262)..(262): n is a, c, g, or t
ccataaccattgttcccgccaaaccactcaccctgtcactctctntaaattagccagttggagttagtttggcctgtgtggtctaaccctagccaataggggaatgacacagcagcaggggccatgtgcatcagggataagaaccctttcccctcccttgtccaggtgtgcactcaaccattgctccatctgtaagggcgcacccttctgtagaagtacattgacttgctgagaattaaaaagnaaattttaaaaaacaaan

SEQ ID NO: 710616 - DNA, 154 bp, Homo sapiens
gtaagagtcagctaattatggatattgtcatctcggtaactttgtaaaaaaacaaacaaaactggcattgttaattccaaaagaaaaaaaaggcagtaaaaaaaaaggtcattggcaccaccagaggaacatggtttaatggattaatagtttt

SEQ ID NO: 710617 - DNA, 358 bp, Homo sapiens
gattgcttgaggttatgagttcaagaccagcctgggcaacaaagcacaacctcgtctctacacaaaatagaaaaaaatttaataaggcatgggtgctgtgcatctgtagtcccagctactcgggaggctgaggcgggaagatcacctgagcccagaagatcgaggccgctgtgaaccatgatcatgccactgtactccagcatgcatgcgtgtgtgtgtgtgtgtgtgtgtgtgtgtgtgtgtgtgtgtgtgtgtataaaagaatctaagacagctcactgcacttcattgtaaccgatgaattgctctcccaggaagcctggggttctgtggagagagcattgtatagcctgtcaca

SEQ ID NO: 710618 - DNA, 461 bp, Homo sapiens
aagcgattctccggcctcagcctcccgagtagctaggactataggtacactaattttttgtatttttattatttatttatttatttatttcgagactgaatttcactctttttgcccaggctggagtgcagtggcacaaactcggctcaccgcaacctccgcctcccaagctcaagcgaccctcccgcctcagcctctggagtagctgggactacaggcatgcaccaccatgcctggctaattttgtatttttaatagagatgggaattcaccatgtaggtcaggctggtctcgaactcccgacctcaggtgatccacccgccttggctcccaaagtgctgggatcacaggcatgaaccactgtggctggcattctttgttatcttttgtagagatcgggttcaccgtgatagccaggatagtctcgatctcctgacctcgtgatcccccagactatggct

SEQ ID NO: 710619 - DNA, 171 bp, Homo sapiens
ctccccccgagcgccgttccgcttgcaccgcgctcgttccgagtttcaggctcgtgctaagctagcgccgtggtggtcttccttcagtcgccatcatgattatctaccgggacctcatgagcacgatgggagtgtcttccgacaattacaggatccggggaatggggcggg

SEQ ID NO: 710620 - DNA, 1023 bp, Homo sapiens
ttcgctctcagggacgaatttatttcgtagggcccacggttttggtcaaccccgccgctctgtaactataacacactccgtttggggggggggggtccctcaaggtagaatgacactcgtgcttgggggtgaaacaccacatgagtggggcgcctgtataaccaccacctggttgtttgccgttgcggccgctcctatacgcgatgtaccaaatagtgcgtcttctcacagaggcccgccgccgcgtttattcacttatagttttgtaggtctcactaggggcccctattgcgctggcgcgacaatatttttcatcgttcgcgcgcaccatattcgtccagtgaaccgcgcgggttctcccacccccagagtatggtgcacacacacgagcttccctcccgacccgtcccgcgctcgtcgtttctgtgccgcgctcccggagagaatctggcggagtgtgttacaccgccccaaggaacgcaccgcctctcttgcctccgcggtgtaagtaattttaattgcagtacaataaacgcaccctctctggggtggactcgtgtgctaatcgacctagtgcttctactcattgaatctaaaacgaggatttgtgggcggcgccgacaatcaacttctgtttttgacttgctgactctgtttgataataagttctttattaagaagttagggcgtccccaggaatgccacccctactatgtgcgagcgatctgatgatactgtggctgcaccaccatatactgctgtggttctcaccatggagacacctctcattgtgcaaattatctctttactagatcagtgctgttgtattgccctcctctccgcaagctcccctcacctctcacgagtagcgcccccctccgctcatcgtggcacacagaccgcatctgtcaagctttcatccggcatagcccagatgggcccccaagacttcattttgggcccccttttttaaaaaaaaactatcttccaaaaaacaaaacaaaaaaaacacaaacataaaaa

SEQ ID NO: 710621 - DNA, 627 bp, Homo sapiens
agaaaacacctttgaaggatcggggagaggaagtctgagatggcaggagagcctttgctcttccttgcgggactgtgacaagagacaggaagaaagaaccaggaaagatttggccaggctgatgagtgtcctagagccaaagatgcctgtcagggagtcccatgtccacaggaacagctggcaccagaagctcttctgtgctccatcactgaccaggcacattctgtaacgtgcgtggccgtggcatgaacaggcagcagatcctgagggtcagcagatgcagggtcaggagcagcaggagcgttgcagaggagcacactttcctccctgcagtaggagctcggcagagcacattttcatggccaccacacttatccaatagaattgtgttttaggaatcctgttttttagctctagaaattctgtttggtgctttttatgttttccagttctctccttatgtttttcatttaattcttagagcatactgaacatttttataacagctgttgtaatgtctttgtttcctaattcatcgtctttgtcagttctgagttggcttgatattttccccttgtatgggttacattttcctgtttcacacacaaggaagtccggtccgagctc

SEQ ID NO: 710622 - DNA, 243 bp, Homo sapiens
ctcaattgggtttaagcacagggtaatatttctccaggtatcatccaaaattccccagagaaaaggctttggcctcattaggggttgccccagcctaaccctccaggacggttccattaaattgcgccagattttaaatccggttacctccactttctgaaatattctttactaatgttattgaaaccatttctacttcaaactgatgttttggaaacgagcaattaaagtttttcttccatg

SEQ ID NO: 710623 - DNA, 218 bp, Homo sapiens
cctcctcatgctgaccaagtgctgggataacgagcgtgagccactgtgcgttgacacctatggtgctatgcacttcattgtgctaacgaacattctgaattacatgagcttttgtatcacttcatgttaaaggtatcattcttatgtaccactgtatctcatttgaatttgtaatgaggctgatggtatatttcaattttttgctttgagggaggagg

SEQ ID NO: 710624 - DNA, 174 bp, Homo sapiens
  misc_feature (162)..(163): n is a, c, g, or t
cccaaggtataggagaagaacttacaatgtatggactaacttctctttgcaagaacgcagattaaaatatatgcgtaggacccattatgtattattcatgatgcacatgcagtactcacacatatatacacacacagtaatatatagtgcatacacacggcnnaagtgtgtgta

SEQ ID NO: 710625 - DNA, 404 bp, Homo sapiens
caaggcgagtctcaataagtttttaaaaatggaaatcatactaagcatcttctcagaccacagtgaaataaaaatataaaccagtaccaacaggaactctcaatactatgtaaataggctgggctcagtggctcacacctgtaatcccagcactttgggaggccgaggcaggtggatcacttgaggtcaggagttcgagaccagcctggccagtatggggaaaccccatctctgctaaaaatacaaaaactagccaggcgtggtggtgcacatctgtagtcccagctactctactcaggaggctgaagcagaagaatcacttgaacccggggggcggaggttgcaataagccaaattcgtgccactgcactccagcctgggcgacagagtaagactcctcaaaa

SEQ ID NO: 710626 - DNA, 934 bp, Homo sapiens
gcgtgcggagcgcggcgggggtcgaggctcgagctcgcgatccaccgccgcgcaccgagcaatcctcgccaccctcggcctgggttcagccctgggccgaggatgatgggggtcaggcggcctgcggtctggggaacgccccgaccatgaggctcttttcgtgccactggggggcggggcgtgagagcggctcagcaattccccttgctcataaggtgaaggcttgctcatccagggtgggtcaatagagccggagtgcccccaaccgtttggaacaagtgtgctgggggaggaaggtcctcaatctgcccgagcttttttcacctaacgccaatgtacattctgtgcaaggtggctgggagatcagggctgtcccgaagccgtgagtcccgggttgatgtccgaacggccctctctaatgtgacctcgcgggtagcatgacgaaaggtttccctccagatgaagatggaggcagggttcccaacaaggatgatatgaagactttccctgaagaaaggtggtgaaggagacctcctacgagaatgatgatgcagctgtgtgtccgcatgtgtgcccaccccgtgatgttatcctcattgcgctgcatggtcccagttgggtggcagggaggccaaggtacagggggtggtggagcccattgggaaagttacaacgacggaggggctcgggcatactcgcgggagaaaccgaaactcgggggcgaatgggaactagggggcgaacctggggccattataaaagccaccgggggaacggtgtggacccaggggggagcgacgaaacagggccataaacggccggcacgaggaacagtgggggggggggggcaggcacctcgggaggggcagggggaaagcgggggccccaccagatatgttggagaagagcgcagcgcgcgggatcgggaaaaacc

SEQ ID NO: 710627 - DNA, 1136 bp, Homo sapiens
ccacgcgtcgcggacgcgtgggctgcgatagtccactacgcttatttcgagagtgactcccgttgtcccaaggcttcccagagacgaacctgtgcggctgcaggcaccgggcgtcgagtttccggcgtccggaaggaccgagctcttctcgcggatccagtgttccgtttccagcccccaatctcagagcgtgagccgacagagagcaagggacccggcatggcccaaagccgcggcgatcggcatcgacctgggcacaactactccttgcgtggggggtgtcccaacagggaagggtgggagaatcaatcgccaacgaaccagggcaaccggaaccaccccagatacgtggccttcacggacaaccgagcggactcatcggggatgcggccaagaaccaggtggcgctgaacccgagaacaccggtgttttgacgcgaagcggatgatcggccgcaagttacgggcgaacccgggtggtgcaagatcggacccatgcacgcacgtgggcctttaccaggttgatacacagacggagcacaagcccaagggtgccaggtgagctacaaggggggagaccaagggacattctaagcccgaagggagatctccgtgccatggttgctgaaccaacgatgacagggcggatcggccggaggacgtacctggggctacccccgggtggacccaacgcggtgcatccaccggttccggcactacttacacacggactccgcagccaccagggccaccaaaggatgccgggtgttaaatcgcgggggctcacaacgttgctgcggataccatcacaaaggaggccccacgaggacgcggacgacccaaatggcctataggcgacttgtgagagccacaccgcgagaaccggggcggcatgcgtgcaacacagctggacgcacaccatatggaggcctggagaccagggggcacccacttaccgcagcggtgtgccccaataccgtgaacgaacctacagacacacgacactcttctcaagcgagaaagacagcaccgggcaggggcaaccccccacagggaaggggagcaggccacatgaaaccaaagcaggtagtagacagacaatacggagaaagagctagagaacaacaacaaaaaggc

SEQ ID NO: 710628 - DNA, 129 bp, Homo sapiens
aatcgccacgacaggagcatgtggaaaactgtgggtggcaaaccacccaggtgctgaggcaagagactgaggacacgagctgttccagtataataaaatataaaacaagaatagttgtaccagaatata

SEQ ID NO: 710629 - DNA, 539 bp, Homo sapiens
  misc_feature (112)..(112): n is a, c, g, or t
  misc_feature (291)..(291): n is a, c, g, or t
  misc_feature (512)..(512): n is a, c, g, or t
  misc_feature (521)..(521): n is a, c, g, or t
ccctgaggatcaccggcagaatacactcaaaggtttgcacagtcagcattgcatgtttttgtcaacactgagcactgattaatataaaacctgtgagctgatcagctcattnaccctgcaacaggagcacaatgctggcacccccaagtcacccagaggcactgggagctcccaagggtgctgcggtgccaggccatactccctcctccaactcagtcttcagcaactcctctcccacagcacagttgaagaggccaggccagaggcggagttgtgggggtgcagaatgcnttcacagtgaacctttttcagctacaaaacatttctttactaaaagctgctgagggggagcagggagacaataaaacaccaaggggatttcaaacgcgttaagcccactctgcctttgttcttatttgatgaatgcaaaaaccacccagcagttgacaggcaaaagaacactgctgcacgggaaagtgcatttcatcagtccagcctcggatctccagganaggtaagtntgagtgtgattctggccg

SEQ ID NO: 710630 - DNA, 263 bp, Homo sapiens
tgcgagtatagagtatcctgggatatagggcccagcgggctgtggacctcatccaaaagcacaagagcatcgaggagatcgtagcaggcgacttgaccccaacaagtaccctgtgaccagaaaattggctaccacaatggaggctcaccatgctcttctatggaacctagaggtgctaggacccaggagtactcgtggagctagaagtaggcagcgcgccaaatagaagcaagagcttgatcaagttacattgtgtgagtgaa

SEQ ID NO: 710631 - DNA, 150 bp, Homo sapiens
  misc_feature (14)..(14): n is a, c, g, or t
ccaatcctgatgtnccaccctggtcaggccacctgcaccattaaaattcaacacctgtggctttctgatatcattttcatttatttggtgaaaaattcttgagggtctcttgtgtgttgggctgtatggtgaggattcagctgggaaaca

SEQ ID NO: 710632 - DNA, 321 bp, Homo sapiens
ccccaccgtgatgagggttgctgctagccccggcagcagattgcagcggacatcccagaagtggttgtttcgccttgcatgggagcgataatgcttggctccagagcatccaggctcaaggaagaacatggcctgctattggagaataccagcgtgcattgcaggagaacgtcgctatggaaccgtgcatctaccagggtaagactcttgtggcattctgcgtgctgagcttgcatcacacaagaaaaatgagctcaaaatgtcgctttgagagctacagtgaattgctatggctcctgtaccttctgctcattttccttt

SEQ ID NO: 710633 - DNA, 336 bp, Homo sapiens
tggtgtgattccatttatataaaatgtccagaaacggggaaaccctattttaaacaacagaaacccaaagtcgatcagcagttgccaggggaggaggaagacgggaggggaaatgatggcttcacggggtgatcgacccgatatgtcccacgaacagttgacagagggtgggtgcctacgacaatgtttctggatgtactagaatgccgactgcatgtgtagcatttctcacgctgcatgagattgttaagagttagtctcggaacttccatctcaattaaataacacccgaagacacgcaatacgtgtttcccgccagcttcagccccgaccaga

SEQ ID NO: 710634 - DNA, 1028 bp, Homo sapiens
ctgctcccgccaccctgcccgccgacatgcgccggctgctgccctgacatggtgctcgacaggaaggagctggtgtcctgctgcggggagatgctccacatccgctaccggttgctccgacaggcgctggcgagtgcctggggaccctcatcctcgtgatgttcggcatgtaaggctccgtgagcccagtgttgtgctcagccgagaacacccacggatggtaaaacctcaccatcaacctggaccttatggcttagcatgacactctgaggcatcctcatcgaatggacaggtctctggaggcccacctgaaaccatgccgagaacctatgcacatagatgcattcctggcatcgtgagcccatgagatcaaagctgcccatactacacacctggccacagacgctgggagccatacttgaggtgctggaactagtataaagaggactgtaattactgaatgcaaacatggccacataaagcacacagaaaaaacacaagaccaaaaaaaagattaacagagagacccccaaaattgggcaaccaatgcgccgtgacaattcgttatgacataacccataaaaacacacatcttgggacaaccctatgagaattaattgaatccaaatgcgcactatacataattagacacaacggatacaaaaagagacaaacaagaaacaaacacacgtaataaaataccgaatgattgggaagaaaaggacatgagggcacgaaaataaagcaaggaaacccaccgaataagaagaaccaaaacaaccaaacaggaaccaccaacacagaaaaagaagacccaagaagaagaggcaccgaataaacgacgaactagatagcggagaccccatagatgcaatgagatcaacacaagggagcatgcaataatggagaaaacacaaaacaacaagaagaggaagcaataaacaaacagataacgaagaaaaataagcacgagaaacaaaacaccaatgagacacaaggagaaaaataaatgacgaagacacaacaag

SEQ ID NO: 710635 - DNA, 135 bp, Homo sapiens
tgcagaggaagttgttttctttcttctgatctgtgtctcaaaggccagcaaatggtttccaatacagtgcctgcagctgagggacacgactccccaggcaggctgagagtctgtctgtctgcaaggaacccactg

SEQ ID NO: 710636 - DNA, 145 bp, Homo sapiens
gccttcctcactaagcttaatcatttctagcttttgatttagagtgagagatgtgtgactctacctttcaactgaacacttacaggccactgtgttgaggtgggggttgtttattttttatccttgtttttttatttgtcgacgc

SEQ ID NO: 710637 - DNA, 256 bp, Homo sapiens
atccccgctcaatggcagccggcccaatggcagccgaaggcgagctcattttggacagaaacctcccgtggagcagaagggggggagttttcttgatcttgattttcactccgaatacagaccgtgaaagcggggcctcacgatccttctgaccttttgggttttaagcaggaggtgtcagaaaagttaccacagggataactggcttgtggcggccaagcgttcatagcgacgtcgctttttgatccttcgatgt

SEQ ID NO: 710638 - DNA, 595 bp, Homo sapiens
agacatgtgtaccccctgctgcagctgcagcacgggtgctgataggagtaggctgatagcggacatactcctcctttcacatagtcggcaacctgatccactccttcggctactagagtctcgcaccactgccctggtgaggaggggggacctgggctcccacccatgtgggcccaagacagtgtttcccctttcctggtttcccctccatcccttcctacctcccttgggtttaggttggcttgtttctcgttggtactagaggattcagcgtgtgcaagcagtggggagggtgtgcctgcagaggggacctgtcaagaaggggcaacccagccccaccaggacagagactgataatcctcctgtcagtcacctggtcactcagcccacctgttttctgtggagtctttagagtgggtctcaggggccaaacaacaccaagatggggacacactgtggaacaaacctctgtcctcccacgggatccgtgcacgttaacgattactaggctatgcggaaaccttgttgtgtttttttgtttgctgtttgtttgttctcttgtcttctttttgtttttgttcttgcttttttttct

SEQ ID NO: 710639 - DNA, 175 bp, Homo sapiens
gtgtggtacggtgcggggcatccatatagtcactccaggtttctggcagattcttctactattaggacttttcgcttcgaagccaagctatcaaatcatgaacattattaatattactgctgtcagagaaatgactgagcctacagatgataggatagaacatgtggtgtatgca

SEQ ID NO: 710640 - DNA, 734 bp, Homo sapiens
  misc_feature (123)..(123): n is a, c, g, or t
  misc_feature (167)..(168): n is a, c, g, or t
  misc_feature (172)..(172): n is a, c, g, or t
  misc_feature (184)..(184): n is a, c, g, or t
  misc_feature (189)..(189): n is a, c, g, or t
  misc_feature (222)..(222): n is a, c, g, or t
  misc_feature (246)..(246): n is a, c, g, or t
  misc_feature (255)..(255): n is a, c, g, or t
  misc_feature (268)..(269): n is a, c, g, or t
  misc_feature (325)..(325): n is a, c, g, or t
  misc_feature (333)..(333): n is a, c, g, or t
  misc_feature (357)..(357): n is a, c, g, or t
  misc_feature (360)..(360): n is a, c, g, or t
  misc_feature (362)..(362): n is a, c, g, or t
  misc_feature (389)..(389): n is a, c, g, or t
  misc_feature (411)..(411): n is a, c, g, or t
  misc_feature (655)..(655): n is a, c, g, or t
  misc_feature (662)..(662): n is a, c, g, or t
  misc_feature (668)..(672): n is a, c, g, or t
  misc_feature (676)..(676): n is a, c, g, or t
  misc_feature (687)..(687): n is a, c, g, or t
  misc_feature (694)..(694): n is a, c, g, or t
  misc_feature (697)..(697): n is a, c, g, or t
  misc_feature (701)..(702): n is a, c, g, or t
  misc_feature (705)..(705): n is a, c, g, or t
gggtttctgctgggtgtaggtccttgggtggtcgggcctccggtgtctgcttctccccgctgagctgctgcctggtgaagaggaagccatggcgctccgagtcaccaggaactcgaaaattantgctgaaaataaggcgaagatcaacatggcaggcgcaaagcgcnntccntacggcccctgntgaanctccaagcccggatgaggccaagaacagctctntggggacattggtaacaaagtcangtgaacaantgcaggccaaaanngcctatgaagaaggaagcaaaaccttcagctactgacaaagtcattgataaaaaantaccaaanctcttgaaaaggtacctatgctgntgncnagtgccagtgtctgagccagtgccagnagccagaacctgagccagaacntgagcctgttcaaagaagaatgaactttcgcctgagcctattttggttgatactgcctctccaagcccaatggaaacatctggatgtgcccctgcagaagaagacctgtgtcaggctgactctgatgtagtgcttgcagttaaatgatgtgggatgccgcaagatggaggcttgatccaaaccttggtaagtgaatatgtgagagaatatttatgcttatctgagacgacttgaggaagagcangcagtcngaccannnnnctantgggtcgggantcctggnacntgannccntctaatggctgctagtccgtcgatgaatc

SEQ ID NO: 710641 - DNA, 895 bp, Homo sapiens
  misc_feature (36)..(36): n is a, c, g, or t
  misc_feature (72)..(72): n is a, c, g, or t
  misc_feature (77)..(77): n is a, c, g, or t
  misc_feature (98)..(98): n is a, c, g, or t
  misc_feature (115)..(115): n is a, c, g, or t
  misc_feature (144)..(145): n is a, c, g, or t
  misc_feature (208)..(208): n is a, c, g, or t
  misc_feature (231)..(232): n is a, c, g, or t
  misc_feature (251)..(251): n is a, c, g, or t
  misc_feature (255)..(255): n is a, c, g, or t
  misc_feature (265)..(265): n is a, c, g, or t
  misc_feature (296)..(296): n is a, c, g, or t
  misc_feature (299)..(300): n is a, c, g, or t
  misc_feature (310)..(310): n is a, c, g, or t
  misc_feature (320)..(320): n is a, c, g, or t
  misc_feature (327)..(327): n is a, c, g, or t
  misc_feature (346)..(347): n is a, c, g, or t
  misc_feature (352)..(352): n is a, c, g, or t
  misc_feature (373)..(373): n is a, c, g, or t
  misc_feature (377)..(377): n is a, c, g, or t
  misc_feature (380)..(380): n is a, c, g, or t
  misc_feature (386)..(386): n is a, c, g, or t
  misc_feature (392)..(394): n is a, c, g, or t
  misc_feature (404)..(404): n is a, c, g, or t
  misc_feature (408)..(409): n is a, c, g, or t
  misc_feature (426)..(426): n is a, c, g, or t
  misc_feature (449)..(449): n is a, c, g, or t
  misc_feature (455)..(455): n is a, c, g, or t
  misc_feature (514)..(514): n is a, c, g, or t
  misc_feature (585)..(585): n is a, c, g, or t
  misc_feature (709)..(709): n is a, c, g, or t
  misc_feature (759)..(759): n is a, c, g, or t
  misc_feature (889)..(889): n is a, c, g, or t
acacacaaaaatgtaaaaaaaacaagcaggaaccgntccggaaaacccgggaaggactctctctgcagccanatcancttcctgagaaaagaccaacngccaaaacctcaatganagccaccctggaggacagggcacaacaanngtttctggagagaaagggaggattccaaaagggcaaaaaaagaacaaaggctgaaagaaaaanaaaaaaaaaaaagtctgcaaaannaacggcaaagaagaaaaancaanagggcaaaanaagcagcgggaaaaaaaccaaaaggaaaaanaannatggccaacncgtgtttgantccaaantgaaggcccaaacaaaaannaaaangtgccaagagaaaaaaaaaanaagnaangggaanaaaaannnggtggttganacgnnctccaactttgaatcanaagccgaaacccaaaaactgaanaaaaanaacggggactgctacctgctctctgaccccggggcacaccacgtcctgcttctggtganccagactggggcgtttacactgctacaagacacaatggccaacaagaaggagaaaaaagacattgggacangggccatgaaacaaatggtcaacctcttcaaccacaaaaaaaaaagggggccaggccctggatgactatgtagcaaacacggacaactgcagcctgaaagacctggtgcgggagtgtgagaganggtactgtgccttcaacaactggggctctgtggaggagcagaggcagcancaggcagagctcctggctgtgattgagaggctggggagggagcgagagggctccttccacagcaatgacctcttcttggatgcccagctgctccaaagaactggagctggggctgccaggaagactacangcagta

SEQ ID NO: 710642 - DNA, 133 bp, Homo sapiens
cccttttttcccggggggccccccccttttgggggggccaggggttttttttcccccccccccccccccccccccggggttttttttggttttgggggggggggggggtttttttttgggggttttttcccca

SEQ ID NO: 710643 - DNA, 162 bp, Homo sapiens
tttatgctgcgtcgtttctcgacggatccccgtgatccacctgcctggctcccaaatgctggcattcaaggtgtgcagccatgtgcccagttcaattagtttaaaatgcagcagttggccgggtgcagtgactcacgcctgtaatcccagcactctgggagg

SEQ ID NO: 710644 - DNA, 231 bp, Homo sapiens
acctgatgctcaaggacctgggccttgcgactgaggctgcgcgccaggcgcatcagccggtgattctcggcgcagtggcccagcagttgtatcaatccatgagccagcgtggggaagggggcaaggacttctcggcgatcatcaacagctatcgcaagcccaaataaatacctgtggcgagggagcaagctccctcgccacaggttttgctgggtcaggcaaacacaaaat

SEQ ID NO: 710645 - DNA, 934 bp, Homo sapiens
gacgggacattttgaaatattcaccatgctgctggcatccatgattctagtggacattttccaggtgaaggctgacgtgttacacatgtgtgataatgcatgtgatgatgaatacctgagatgtacggactggatggtaacactgtaaatacagttccccaactgctaataggaggaataagcaagccgagcagcgaattgagatacgtgtgtgggaaaatgcaaagagccaagatgtggcagccccgacaagactcaaatctttctccctatgaatttgaaggataagcatggaatatccctgatggcatatatttccgaagctcaagagcaaactcccttttaccgatctgttcagtgaagctgtgaagatggctggccaatctcgagaagattatatctatggcttccagttcaaagctttccacttttacctcacaagagccctgcagtctgcttgagaaaatcttgtgaggtcagttccaagaacgtgtggtatatagaatcaagccagggctttcatttacatttggagggctagaccaggtcaggttgggccattttaccttggcatattcaggcaaacgtcatgctgtaatgaacagctcactgtgttatccatctactgcatgccttggagttggcctttgcccactttgtctggttacagcacggggtcgatttctttacttctctgaatgacgtctcacttgtcccgggggggtggcaatacgttgctcaaggctaacaagaactgggcgttggtggggtctcagtggctcaacggacggttggaccaaatttcccttgtgttcgccgggtgacggtgtgcctgcaacggtttgctgggggccctgcgcgggtgccctcggatatcttcttattgttgtgccttctggtttttgtgtttgagcttttttgtctcttctgaaca

SEQ ID NO: 710646 - DNA, 180 bp, Homo sapiens
atacgctgtgcccagtacaagaaggacggagctcgactatcgccaagtggcgtatgtgtagctgaagatgggggaacacaccccctcagccctcgccatacatggaaaatgccaatgttctggcccgtaatgccagtatctgccagcagaatggcatagtgcccatcgtggcgcctgagt

SEQ ID NO: 710647 - DNA, 806 bp, Homo sapiens
gaccgaccaagatgctgtctcaggggaaaggaatgctgcgtcaatagattccagcaagtagaaagccgctggggttacagtgggacgagtgatcgaatcagattcacagttaatagaaggatctctatagttggatcttggcttgtatggatcctcatccatggccctacagattcatcaagtgcaatatacgagatcgattgcaatatgagcacacacaagcaaacccgtgggacagcaatgatgaccggcgcttttagtttgtgcattgcggacagcatcacacacattccagggctcattgtctccaaaggaacccataagagatcctgcccaaatgtcgtgctacacatgcctgtgcaacactcaaaggtccagattcccactatggcacaaacggattgcacgacaagtagtgcatgcagacaacctggcttgcaagcaagcacccgtgttcattctttcatcttagttcccctggcaatcaaataacatggcacttcaatagaacgatggacaccattccagaaatcatctttcatcacacttaattctagcatccacttcactcacatctttgggctaaactaattaccataccaatctagtgtccaaaaaacatcagatgggccccaacacaaagtagtccgcgtgtcactgccatcatctcaccattgtcacgatacagaaacagtttctctcgacgccgatcgcacaccgctctttacctctttgctgatcccccacagctttgcctctcctcacacttccgacaaaagacgccgtacgggtaacaccagcccctt

SEQ ID NO: 710648 - DNA, 184 bp, Homo sapiens
actgatatgtatacttttgaatgtcctagactttaaatatctgtcttctgcaagtgggataagagaagaatgaagaagaaaataaaagccaaaaaaaacaaaaacaaagaagggaacaaagtgaattgcccttaaaatcccttgcaagttgtttccgcctgagggaaggggttggcacttgtcc

SEQ ID NO: 710649 - DNA, 330 bp, Homo sapiens
  misc_feature (142)..(142): n is a, c, g, or t
  misc_feature (289)..(289): n is a, c, g, or t
  misc_feature (317)..(317): n is a, c, g, or t
  misc_feature (322)..(322): n is a, c, g, or t
agaagtggaagtgtcctcccttgagcctcaccaagctctgggaacgagagccacagagacggtgtacagtgagatccggaaggtcgaccctaatctcatggaaaacagatactctagaacgggaaggctcccttaatggaanttaagacagtcaaggcagtgcacgtccctgggaggtcgtccatgtcccgagaagagcagccgattcctggattgcgaaaatcctgtgcacgtatttatgaagcctgtccccaccgaaagcagtaatccttcagggcaaagccatccnatttttaaaaacccggcttggccttggntccangttttggg

SEQ ID NO: 710650 - DNA, 314 bp, Homo sapiens
ttagcacaacctagggtcagtcttgcaggtggtaagccatttaccaagatagttgtaggtaagaagggcagatttattagagaaattgtgaaaatatgttgcagtgggcagctcagcagagaaggggctacctgcaaagaggcaagggctggaggaaagttttatagggtcctgctgaagggtgctacgtgtggaatgaggtcattgtgcccgcaggttgtttgtgattagctgtctctaacaattgttcatacaataattgttcattattgttctcaacttggggctctccccaacctggggacccttcctta

SEQ ID NO: 710651 - DNA, 238 bp, Homo sapiens
gttatagtaagctatggttaatttactgttaaataattttttttaatgaatttagtgtaccctaagtatacagtgttcataaagtctatagaagtatacaataatgttgtaggctttcacatttactgaccactctgtgacacatccaagacaacttgctctatttaagctctattcatggtaaatgccctatacaggtgtaccatttttttatcttttatgtcatatttttacttta

SEQ ID NO: 710652 - DNA, 350 bp, Homo sapiens
gggtcttccctcctccctcctttccgccactggaggtagcacagattcatggtggagaacatggcttctagagcagatgacatgggtatggacctgactatgctgatgaaagctgtgtaaccttgagtagatgacctaggccccctgggcctcagttttcttcatggtaaaatgggggtaatctttgtgactacctcacagggtgctttgtggattaaatgaaccaatgcacataaagtgattaaactgcgtgagacataggcagcacaatgtaaatgactgctgctgacaattctatttttattacctcctccaagtattgactagaaggcattgtgctactgctctga

SEQ ID NO: 710653 - DNA, 1270 bp, Homo sapiens
  misc_feature (148)..(148): n is a, c, g, or t
  misc_feature (208)..(208): n is a, c, g, or t
  misc_feature (585)..(585): n is a, c, g, or t
  misc_feature (695)..(695): n is a, c, g, or t
  misc_feature (697)..(697): n is a, c, g, or t
  misc_feature (702)..(702): n is a, c, g, or t
  misc_feature (704)..(704): n is a, c, g, or t
  misc_feature (707)..(707): n is a, c, g, or t
  misc_feature (713)..(713): n is a, c, g, or t
  misc_feature (736)..(737): n is a, c, g, or t
ggtcgtcttctgtccaagttggtcgcttccctgcgccaaagtgagcagtagccaacatgtcagggtgggagtcatattacaaaaccgagggcgatgaagaagcagaggaagaacaagaagagaaccttgaagcaagtggagactatanaatattcaggaacgagatagtttgatttttttggttgatgcctccaaggctatgtttganctctcagagctgaagatgagttgacaccttttgacatgagcatccagtgtatccaaagtgtgtacatcagtaagatcataagcagtgatcgagatctcttggctgtggtgttctatggtaccgagaaagacaaacaattcagtgaattttaagaaatatttacgtcttacaggagctggataatccaggtgcaaaaccgaattctagagcttgaccagtttaaggggcagcagggacaaaaacgtttccaagacatgatgggccacggatctgactactcactcagtgaagtgctgtgggtctgtgccaacctctttagtgatgtccaattcaagatgagtcataagaggatcatgctgttcaccaatgaagacaanccccatggcaatgacagtgccaaaagccagcgggtcaggagcagaagccggtgatctccgagatacaggcgatcttccttgacttgatgcacctgaagaaacctgggggntntgacntntgnttgttntacagagatatcatcagcatagnngaggatgaggactcagggttcattttgaggaatgcagaagctagaagactgttgggaaggttcgcatccagtgagtatcctagggaaatggtagcagtcatgaggttaaaggtgatgctctacataacgataagtagtgatctctgtgggcattttttatcttggtccagaaggactctcatgcctcatcgaataaagctctatcgggaaacgagtgaaaccagtgataaactgttgataccggactttaactatcgagtacaggcggttttggttctgcttagcagataccaagagggtctcgagatcctatgggagtcgtccagaattattacttgagaaggagggactgaacggagtaaacggtttgatgatccgaggttcgatgtcatggtctcaagcgttggtatgttgagaaacacattattgcggtctccagtcgtgtacggaggagcagcgtgaagggatcaaccgtgcggggtgaataggtcggaagcatggggtttgcataaccgaggatcctatgggtcggc

SEQ ID NO: 710654 - DNA, 1590 bp, Homo sapiens
gctgcctccgccccgcgagctcagagcctcgcgcatttgcctgatccggcgaccagtgacacacccgccggcattttgacctatggatgatgtctgtcgccagcgcttcgttcgtcagaatgacgtgctccgagcgctgtgcaatggtccggccttcagcggaggctgacgtattgccccaccggagctctgtcatctcgcgccgtcctagtcagtgggggcgcctcccagtgtgccgcgaggaggctgtgtatgtcgtgggactactggcgtcgaaagagggcattcgcatagacgtgggtagaaagcatgggccccaagtaggcaatccgaggagggtcgggtcgccactagactcgtagaaagatacgcgcccaattctgcaagtcaccggcggcattctgttcagcccaaacatggagagaactgaacgattgcggagaaaacaatcgtgggctacgcaaaaacccatttgcttaacataagtgggagagacttcggtcgtagctaggggagctccccaggaaacgggcaggggcagaccccaacccggttggacctttggcatggagagccccgtagtggagagcaccccccccttaggaaacctcgccacaaaacggtggttcgaagctctggcggagagggaaacacgcacactgggaaagccctaacagcgatagtctcatatggtgctcccgggagaaggcgaacaccgtatttcataaaccgacccacaacacaagttggcgcaattggtgtaacgcgctactggtccatcagatctcctaagtgtcgcgttggttgggacataaaatttcccgcggtgggtaaagcagaccccttccatggggggcctagaaatcgcagagcgtgaggccaacttccacggagggacttggggcatcgttccctcagcttggacacacggaaacgggtctctaaaactcaatacacccagtgggtttgccccacgaattccataacagtaactggtagtgtgtagttagacgcccatatggcggcccacccgatttgtgtcaccaataaccccatgggacaaggttccattaggagacagcgcctatggtgtcatatcggggcgccttgtgtgcaccccttaggaactcgtggtgaatttaaggccttgcaattgggacacgtgaatctcccgtaacacccgggaggtcggccgtgaccttaaacagaggggttttacatgccgaaagccataggtgggacccggaaaacgcagggggacaaaggattcgggcggccgctgcgccctaattacaaagggtgtggacgcacactgcactagggtgggcaattatcaggtgttggcccctctcttagaggaaacttttcacggaaggccaacacggaagcgaatttgggcaccacatccggggcattgaggacataacaaacaagagattacgctacacccattgagaggaggcaacagaaagggcttaacgaaggcttagcaccttggaacgtgagccacagggtacaacatacaacagcaagtctgcgggacacagatgaagctcgcgggtaccccaggctagagacaccttagattgg

SEQ ID NO: 710655 - DNA, 208 bp, Homo sapiens
  misc_feature (185)..(185): n is a, c, g, or t
ctctccttctcacctggccagtgtcagctcaaggtcatcaatgtctttcttgagtactagaacattcatcctccagtttcctctatcttggctgtcagctcagcatatgatactctatcctcatcctacagctctctacagtcacctactttgattttaggcttctagctagaataatctcaagngggatcctactagaagtcgacct

SEQ ID NO: 710656 - DNA, 172 bp, Homo sapiens
ctatcctggactgccccgcacgcttaactcggacgtaccccgagtgcatacaccatataaacatcctagtcatctgtaggctcattcattctctctgacagacagtattattcatgattttcattgatttgagaagccttcgcttcgaatcgaacagtccagaattgccccg

SEQ ID NO: 710657 - DNA, 115 bp, Homo sapiens
cgcaaactcggatacactggatccaggatgtgactcactgggaaaaaatgttggactaggcatgttcagctgaaggagccagtgaagttatataaccaccacggatacacatcca

SEQ ID NO: 710658 - DNA, 1304 bp, Homo sapiens
  misc_feature (619)..(619): n is a, c, g, or t
  misc_feature (729)..(729): n is a, c, g, or t
  misc_feature (731)..(731): n is a, c, g, or t
  misc_feature (736)..(736): n is a, c, g, or t
  misc_feature (738)..(738): n is a, c, g, or t
  misc_feature (741)..(741): n is a, c, g, or t
  misc_feature (747)..(747): n is a, c, g, or t
  misc_feature (770)..(771): n is a, c, g, or t
cacccaaccaaccacacagctagacagccggggtgaatcggccgaggctcttgtgaagatgtgcgatgcagctgccgaggcgttcggtcctggctgttgcggtcgctgcccaggctgcggggacgctcccggagccctgcctgtaccctgtccatccaggtccagcagtctgaaggagcctcaccggcactcccttctctgagtaggcacggatttgaggagaagcagcgagagatgtccagcgagccatccccctccttatcctgggggccccacagccgcgcattctggaagagaaacagtggagcccgcagtcgataacgcaagtgatcgagatctcttggctgtggtgttctatggtaccgagaaagacaaacaattcagtgaattttaagaaatatttacgtcttacaggagctggataatccaggtgcaaaaccgaattctagagcttgaccagtttaaggggcagcagggacaaaaacgtttccaagacatgatgggccacggatctgactactcactcagtgaagtgctgtgggtctgtgccaacctctttagtgatgtccaattcaagatgagtcataagaggatcatgctgttcaccaatgaagacaanccccatggcaatgacagtgccaaaagccagcgggtcaggagcagaagccggtgatctccgagatacaggcgatcttccttgacttgatgcacctgaagaaacctgggggntntgacntntgnttgttntacagagatatcatcagcatagnngaggatgaggactcagggttcattttgaggaatgcagaagctagaagactgttgggaaggttcgcatccagtgagtatcctagggaaatggtagcagtcatgaggttaaaggtgatgctctacataacgataagtagtgatctctgtgggcattttttatcttggtccagaaggactctcatgcctcatcgaataaagctctatcgggaaacgagtgaaaccagtgataaactgttgataccggactttaactatcgagtacaggcggttttggttctgcttagcagataccaagagggtctcgagatcctatgggagtcgtccagaattattacttgagaaggagggactgaacggagtaaacggtttgatgatccgaggttcgatgtcatggtctcaagcgttggtatgttgagaaacacattattgcggtctccagtcgtgtacggaggagcagcgtgaagggatcaaccgtgcggggtgaataggtcggaagcatggggtttgcataaccgaggatcctatgggtcggc

SEQ ID NO: 710659 - DNA, 1306 bp, Homo sapiens
ggtcgtcttctgtccaagttggtcgcttccctgcgccaaagtgagcagtagccaacatgtcagggtgggagtcatattacaaaaccgagggcgatgaaacaaaaaaaaaaaaaaaaaaaacaaaaaactttttcggcgccgcgcctctggcgccctctcaaaaacgtttctcttaacaccttccgtttgggcgcgccgcgcgggccccaatggggttccggtcgacacctggggccatatacgcgtggtcccctatagagagagaacaccccgggggccatctggagacataagcgtcgctgggagattctccctccccacatatattaaaaaccgcgcccccgggggggagcagccccgagacgcgcttctcttggagacaccacatctccccagagattggagcgtctcacctgagaggcgccgactacccgggggcgatcctcatctatcaccaccacaggggaggagcgtcgccaacagcggagaaccctccgagaaatctctcgacaaaatttataccgcgccccggctaccgaggtggggaccaactgcgccagcagcacaaccggaagaacaaactaaccgacaagtgccacgcgcccgcaaacgaccgccagcagcaccaaaatacgagaacacaacatatcactgcataacgccaccacccaacagactacagcaaaagaggcggcaaagcaacaccccagggcacaaacaaatagccggcacgcaaacccccgcaccccctgggggccaaacgccccccacccacaccacgcggaagccgcagcaccaccacgcccgcgaggccccgcccgcgcggacaccccacagtacaccactcccaccaacactaccagcgacccaccacacgccggagcacaacaccgagtcccgaccacgacgacaaaacccaccacggcagggccaccaccccactgcgcgcagccacccggcaccgcgccagacaccacgcacggagcacccaagacagtcagacccgaacaacacggtagcccagcaacgccagcacgaccctgcgccgcagcagtcgcccacgaaacgacccgcgcgacgcgaggcaccacctaacaaccacacgacgcgagcgcacgcccaggcaccgcgacaccgaccagacgcgaccgagcacgacagaccgacaaaacaaacacaccacccaccacaacaacgcaacggcgcaccgacagcaaacccccggccaaccaacccaatccacagagacgcacccagagcaccagcgcactacccccaggaccgcgcgacccccggcagcccgccg

SEQ ID NO: 710660 - DNA, 201 bp, Homo sapiens
ttatcaagtggctgaggcggacgaatctcttgaaccgggaggtggaggttgcatgtgagccgagatcgcaccactgcactccagcctgggtgacagactgagattccgtctcctaaacaaataaaaatgaagaagaagaaaaatgaaaaataaaataaagcaaccctgaaccctgaagattgttgctggccctaaagattg

SEQ ID NO: 710661 - DNA, 123 bp, Homo sapiens
  misc_feature (76)..(76): n is a, c, g, or t
  misc_feature (101)..(101): n is a, c, g, or t
gtagagacaaggtctcactatgttgcccaggctggtgtcaaactcctggcctcaggcaatcctccagtctcggtcnttcaaagggttgtgaccacaagggngagtcaccacacctggccttat

SEQ ID NO: 710662 - DNA, 102 bp, Homo sapiens
tgtgaaatggcagtgaatcgagctcggtaccagcctgattgtcacaaccctgccatcgcgcttgccgacactgaagtcctggttcgatctggcggtctttga

SEQ ID NO: 710663 - DNA, 525 bp, Homo sapiens
  misc_feature (29)..(29): n is a, c, g, or t
  misc_feature (59)..(59): n is a, c, g, or t
  misc_feature (130)..(130): n is a, c, g, or t
  misc_feature (243)..(243): n is a, c, g, or t
  misc_feature (485)..(485): n is a, c, g, or t
agtacctttcccctgtgggccaaccaggnaggtccccactggtggttcctcgagtgacnagaggaaccatttatagaatttaaaaatttgtattgtaaagcaagatcccttcctggctgcaagcatgganctgtatttagagggggaccagaaatggagggagggagatattccacagttataaacaccccactatgtcccccaggcatgtttcctagagactagaaatagagcaaaagaggncccaggcacagtggcttatgtttgtaatcccagcactttgggaggccaaggcaggtggatcacgaggtcaggagattaagacaatcctggctaacacagtgaaatgccatctctactaaacttacaaaaaattaccctggcatggtgatgcgcctgtagtcccagctacttgggaggcagaggcaggaggatcgcttggacccgggaggcggaggttgcagtgagccaagattgcgccactnactgcactccagcctgggcaacagagccagactccatctc

SEQ ID NO: 710664 - DNA, 137 bp, Homo sapiens
cattcaaatatcacacaatacactacaatctgataggagtggtaaatccagccaatggaatccagcgtaagtacaaaaacgccaccttttattgccctgttcttatttctcgggaaggagggttctactttacacat

SEQ ID NO: 710665 - DNA, 178 bp, Homo sapiens
cgagaatgtactccagaataggacctctttatctcacaagatgaaatacagtcatttatgagctaatatcaagtctttggagaagtcatatcattgaggaactcaatgttcgaaaagttacactgtctacagatcaaaacaaggaggcacacagtgccaaggtatggctcacagtgct

SEQ ID NO: 710666 - DNA, 789 bp, Homo sapiens
ctggatgttttcactccagaatgcttattaacggagtgtgagcttgaaaactactatgtgatctattgctctccacactgtaccgccagtgagaataaggccgagcttggcttttgggactcagtatgaaggtcatattatgagggggaacagagtgaagaaaaccaagccctcattatattttgtaccgaaacctattgaagtgtgtatgtacaaagaaccatagttacatgaaatgggagaaaaacaagggtgttcaaggaaaagctctggaacaccaaccatgattggaggctaagttgagaatcaagattcaacatagctgagaactctccaccttattacctctgtcattccttgcgcttaccttacttcccatttacccattttcttccagtaaatgcacccaaggagaggaaaataaaatgactacgcaagacctagtggataagattctgcactgaaaatcttgctttgtgtaggacaagaaaattgaaccaaagcttgcttgttgtaatgtggtagaaaattcacgcgcacaaagattatcacacttcaaagcaaaggaaaaacctaacctcacctcctcaatgttaacactcactgttttgttgataggagaaggctacattggctgaagacatcttttaagacaaaaggaacttattactttagacggaagagaaacccatcttctagcgtgctctcttgcgcctacttgccgcgaccatccgctcactgcgcttatattgggtatattgttattctggatccctactgtcgcgcact

SEQ ID NO: 710667 - DNA, 658 bp, Homo sapiens
gtcggtccgcaggatgttggctatgaaactagtaactactctcttttaggtagcacagccagccaggcacagtagttcacacctgtaatcccagcacttgggaggccaaggtcgggggatcacctgaggtcaggagtttgagacaccagcctgaccattatggtgaaatcccatctctactaaaaatacaaaaattaggcctggtgcagtggctcacacctgtaattccagcaccttgggaggctgaggtgggtggatcacaaggtcaagggatagagaccatcctggccaacacggtgaaaccctgtctctactaaaaattcaagaattagctgggcatggtggcatgtgcctgtagtcccagctactcaggagggctgaggcaggagagtcgcttgaacccaggaggcagaggttgcagtggtctgagatcaagccatggcactccggcctaggcaacaagagcaaaactccatctcaaaataaataaacaaattttcaattatcaattaaacagtaaccaaagaataaaagtaactattggtttctggatttataaataagattggtacttgaaggtttaagacaaatgactacttgcaattctaatagagcagattctgattcagtataaatacttttagtctgtcctcaccag

SEQ ID NO: 710668 - DNA, 300 bp, Homo sapiens
tacctaatatggtgccaggctttgtagtagatgctgacctgtagaagtgaaccataaaccctaagccaagggctataaaatactttaaaattcatgtagaatcctctctcaatcttacccccctttcatttttcagtgtgttctctgatacttttgtacttttgccaggtgataagtccaccttgacttggctattttaaatctttttttttttttttttttttttgagacggaggttgcagtgagccaggattgtgcgactgcactccagcctgggtgacagggtgaaacgccatctca

SEQ ID NO: 710669 - DNA, 699 bp, Homo sapiens
ggtggtaatcccccatttaaaagatcatgattgagcaaatgatttaaattctggtgtctcattaactgatgagtgagtttcttcttcatatgacactagtaatacagcagagttccactcaggctcagtacttatttccctgcacacaatgtttactaatgtgctgatttcttaaagttagagtctattggtgttcaggaatatacgtacaagcatgccagttggtaatacatcagagtgtgtaagggtgtactagtgcaatcttatcgtggcatctctcatttaccctcctaaatacctcagtataaacacttccctaggtgtgtgcgtacaatgtatatactccaaatggaggagcacagcacagcagccttatggagagagccttataagtgattacatggggcatgagctcatacttcagtcacttgtgctgccttgtcctgtttgagaatctcattatattacaacacacccgtaaacgaaaggggggccagtgtgctactgacctgccgaatatccagggcggacaacacgacccacacaacgcttcccgctaaaggaccccttgcactcgaactcagaaacggcaccacacgggccgacacgctaaagctcaaacagagcacacgggacggcagcaacagcccaaagagagggaccacgggacaccccggaataggcaacggcacaggcggc

SEQ ID NO: 710670 - DNA, 1611 bp, Homo sapiens
gcagcaatcattcactgtgcatttatccataatcaatgcacagcacaccatgcaatcatacttcttcattcatcatcatcagttccagcacatggacctgcaatcagcacagcaacccaggacacccatcatccagcaaatgttatactcattgttatgtcaattcattatgggtccatttgcacaacattcaacatccactcattcacattcacatctcaacacacatccaacatctggcatcaacacacccacatgtatttcttattcctgtgctccagcgccatcaatcacaccagcagcaaccacagcacaattctattatacagcaattctagcagccatctatcgcacagcatatccacacagctatgccgcaacaggcagccacgacacacacacatcatctcagagatcaaacacattcattagggccccaacatccgacatcactatgcacacaaagcacacttgatcgttgagcacgacacatagggacaaccacaccgcaaaaacactcataggaggacccacacacacatagatggacacacactggtatcacaccagacggacaacacccacaaagacaccacacgtaggagactacacacagatgatagacactacaacatacgcgaaacaacaagaggacaggcccacaaccacttcacacctacatataagatagagctacaccccagaggacaactccaaaaaaaaaccagcagggacacagccccgaacgccaaaggcactagatcagccctcccgtggcaaaccacacacgaccaaccatcacgattacaaaaatcacacagaaaagcacgtacacaaagaggacaggcacacaacggaaggagcacaatccaacaatgcacacaggaaacatcccaaacagggatctcagacgacaaaacataagacacacatgtcaacaacagtgtaccacaaacagggaattaaggataacacagtatattagggaacgcctattgacaccatgagaattccaatatgtcagatagatacatgtgattcacacttatacctcatatcataacccattaacaaggagcctagttaagcatatgagaaagcattaatatacacacgtcaaacttccgacagacacacgttaatggaggcaagcaaggcaaattagtatattatcactgtttggtgagacctatcactttaatagacacgaacaagtgacaatataagtgcatgtgaataaggacaagaacattctcactgtagaagcaacaaatatgaatattattaaatggcagactgagactgagatcgaggtgatatcacagaactagatacaagtcacccaaaggggaaaaatgaagctgaacaaatgacttcgccagacagaagagatagagacaaggagagagagaacaagcagtgcagcatagaaatcaatatataatagatcgtgccaagagaacggagagtaagcaatgccatcaaggcggaactaccatcaaggacactagaagccacatgcagctaagaaaataagaaaaacaatgagcattccaaaggagcggcgtaagtcaggaatctcattccggaggagttcggaactagtaagat

SEQ ID NO: 710671 - DNA, 444 bp, Homo sapiens
gctctcacatataaatactgttgggcacaaatatactttgtcttcagaaaaaagcattcttagttaccatgaattatatttattcatatctggtagttggaagtatttctctattagatctgtttagaaaaatgtgtaatttttttattagaaaagttttagtgttcagaagtctttgggggataagtaattgcagtaacacaatctccgtcttactctccccccatatagatcaaatcataggaaattttattaatttcagccagcttacttccccccttaatttccttttatgaatcatggcattaaaatagacaaatccctttttgctctcctgtgttttagtacaacaacagagaaccatctttagtcctctaaaaggcaatgtgagataggattttataaagtacattgaattaaaatatttttcagaataaaaaatag

SEQ ID NO: 710672 - DNA, 368 bp, Homo sapiens
  misc_feature (339)..(339): n is a, c, g, or t
caaacaatggtttgaaacaactactggaatattgtccacaataagctgggagtttgttgtagtatgcctcaaatataactgactgtatactatagtggtaacttttcaaacagcccttagcacttttatactaattaacccatttgtgcattgagttttcttttaaaaatgcttgttttgaaagacacagattccccgtatgcttaacgtggaaagaaaatgtgttctgttttgttaagggaccttccagtattgttgtaaatacctggaccgagggtgctggacttttaaaaaaattaaattaataatttaatggccctaatttattaatccgaagantaaccatttttttgttttattatttcaaa

SEQ ID NO: 710673 - DNA, 307 bp, Homo sapiens
tatttggatgaatgtgataagatgcttgaacagctcgacatgcgtcgagatgtcacggagggggttcgcatgaccccccacgagaagcaggctcatgatgttcagtgctatcttgagcaaagaggtccgtccagtctgccgcaagctcatgcaagatccaatggagactctcgcggatgatgagacgaagctgacgctgccatgggctgcggggcagtactacgctgaaactgattttacaccgacgaagaaccgcaagcctccttgacctctctgccatgctccttgagctccaacccagggggct

SEQ ID NO: 710674 - DNA, 113 bp, Homo sapiens
atgctgagcaatcacggataaggtggcagactgggaatccagatttgacgatgcttctagatcagagagggacgtcttgggaaggagtgtaggcatctgtcgttgtgattacg

SEQ ID NO: 710675 - DNA, 149 bp, Homo sapiens
  misc_feature (132)..(132): n is a, c, g, or t
ccaaaatcacaccactgcactcttgcctgggtgacagagtgagaccctgtcccaaaaacaaataaatgaataatttatcagtgtttcatgctgtcaataaatctggcttaaacatctcctgtcctaattaanagcagctgctactactt

SEQ ID NO: 710676 - DNA, 307 bp, Homo sapiens
ggcccccccccccccccacgggggctgagggtttctcccccccgggggcccgggagagggggcaggggggcccccccgggggggggccccctggggggtttgggccccccaagggccggggcctctctcccccccggcccccgggtggggggggccggggccccctttgggggggcccccggggggacggggcgttttaggattggggggggggggccccccccccccccccccccccaggggccttggtttggttttttaccccggattgggggggtttttttttttttttttttttttaggagga

SEQ ID NO: 710677 - DNA, 850 bp, Homo sapiens
agcggatagctctggagatgaggcagaaagtccttctcaaatgaagaggtccaagggaatccatgtattcaagaagcccagcttttctaacaaagccggcacacggattttaagaactaaaacgacgaaacccaagagaagaaaacgacatacacagaccagaacaccaggcacaaacgaagaaacacaataacacgacggacgaccacgtcaaaacgaccttgaccagcagactgactggtaggttaaaccagatggacacggacacagacagaaaaaagaaaaacgccaagttcaggacgcctagaagagtggctccaagcaatatgagtgataccaaaaatcatcaaaacccccactatcttaaggaaatatccgtttgagacatgaactgcacgctaggaagaagagattccaatgcactggatatagaatagagacaatgtcggcactgcacaaggccaggtattatccagatgtaaatggctactagaaattaccgatacggaagaacaagtcaatggaccaatagaaaagcagtagaaggggcacttcttaccaacgccggctcagtaccaccgggcacactatgacacaaaatccacaacaagcgctaggcgaccttgcaagtccttaacaaacacgggaccacgagccattaccgaaggaacccggcgagcaaggagcgacgccaagtaaccaaagaaacagactcgaagcaacaagcaaactaaaattagacgacaccataacaacaacaacaggcgaaacgaagcacacgcagccacgccctgaccaccgccaacggaaacacaaagagcagcacgcaaccctagcccccacgaaacga

SEQ ID NO: 710678 - DNA, 133 bp, Homo sapiens
aagaggatctgggtgattagcaggatctttgtgctcctttcagccctgtcagtaccccacaatctgagccacaggctggtcacaggcgaaaaaccccgtgcaggcacaaaagaggaagcggcacagttatttg

SEQ ID NO: 710679 - DNA, 467 bp, Homo sapiens
  misc_feature (23)..(23): n is a, c, g, or t
ctgcctggcacatagtaagtgcncattatatatattaatttattaatttgtttgaaaagtattttaaaaggatgttcttcccaagttgaaatgtatagtataatgatatcatttgatttcagaaatgaatcataaaacagtgcttcttcaactttaatgtccatctgaatcactggggatcttgttgaaatgtaggttctgattcagcaggtctggggtggagcctgggaatatgcattcttaacaagcttccaggtgatgctgaagctgctgatccagggatggtactttgagagccaagggaatataagaggtattcaaattgtcttttattataaatttcaaatacaacattgcaatctccatatatatttgttaaatatccactaggttccaggagctatgccagacaccaggggagtgtgtgatgagcaaaagcagtcatgctccctacccttgttgagctt

SEQ ID NO: 710680 - DNA, 687 bp, Homo sapiens
cactgcactccagcctgggtgacaagagcgaaactccatctcaaaaaaaaaaaaaaacacccaaatgtgaaacccctaaaaatttccctattagattttttcccagggaaattatttttaacttgggggcgtgatttaacacttagcggcctgtatccatgggatgacttaactgggaactccgatttatagtggtctttgggctatctttagaaatccacctttagagttctaattccaacccactctggcggcaaaatgtgcgcacattttgtggaccacaagagattttacggcattttgtgtacacacacaaaccagagatctaccctggtggcgtcaagaattttcctagagacagatttcccttgtccaccacattttttacaggagaccttcctacacaattgggacattaatctagcgccctttcggttcttcacagtagaggcattatttcgacaccccctattattgaatttaccagcattttaaaggtttcaaaaattccaggtaacctttgaacatctagggaaaatttggaaaactttatttaatgttggcaaagcgcaaaaaaagggtatttttctcttgaaaaatacctatttaaactggtttaacctagatctattagggtagtcccttaaggggttgtttggacccttgaagtggagtgcgggtttggga

SEQ ID NO: 710681 - DNA, 970 bp, Homo sapiens
gaccctgtgccgtttgagcctcctgacaagattgccgtacttgacgaagaggtcgcagatctgtggacgtgtgtctggaacaagggttgatgtattgccgcatgaggtttctagtgactgatagagtctcatgagatcttcatgatcatcctggctcttctgttcgcatggtcctgcaagtacactatatgctgacacacattgcaatcgtcgcaacccgttctattggctaggatcgtggaattctaactcgtgatcgttcctgcataccgcgccaggacagtgtagaggaccctttgtgtggtatgcgacctaaggagccctgggccgcaggaacctctttcaggaactgactagggcagtaagctctcgtgtcgtatctcatgcaccgaggaaagcctccctgtctcatcatcgttaccaagcgcagtaccactggaaatgctagtccaaaactcttgtccagatgagcacttggctggctccgagtggcttgccctgttgcctccgagcggcgctactatgctgtggctcactgtgatggtgtggctgcgatagtccctggccagtcattgatcgtcctatgtgctggtgtccgaccgctggcaaaggcgctcttggacgatcttggcatcctctgtgttgggcactgtttcggtgtccctctttttgtcttttgaatgctctctcgttaccaatccctccttttgcgcaaaagagaatataaagagcccaaaggagcaacggaacgctagtgagtcgattggtcctaccctcttgacgatgaagtgcaaactagatcatacccagtcaaaatctcggttggcggtacgtcctttccgcctgggggaatcgggccgatcctatatcccgagggacgactaatgcctacgccttcggggtataattcctctttgtagggcctttcctggaatatgcaccatttttttccagcgggaattctgcttct

SEQ ID NO: 710682 - DNA, 879 bp, Homo sapiens
atgtttctattgggtgtttcatgtccgtgtaagcgcccttttggtgtgaaagcatctcaactccgagctgtgtgatgttaaatcgcttgccggaccgctcccttcgggaggatttatgaaaagccctctgtgggggatatttctttgtgccgccccgcttacttatgctgggtgggcgcttcctttggcgcgcctcgctcgcactataccctctgttgcagcatctatctctttgatagactgcaccaggcagcgaggggagttctaattacggggatcctcctctccgctgttgtccgactcctagatactcgttgtgggtcccaccacctgtgggtgttcgtaatcactcctcggtcggtatccccccgcgcttttcggcgcgcgcgcgactatattgttgtacggactcctccgcagacattagtgtgtgcccccccacgcttttttcttttgtagacaccaccgcggcgactctctgcgtgtctctctctcttagcgctggtacccacctcggtggtggtgttactccctccggtttggtagcccgccccccttctgtagtagattgataatactctcgcaacaagaaattgttttgtgtcccacttagggcgtggtctcacccaccacatggggggttgtataaacaagagtggcgcacattttctcggagggtttgatgcacaccacgccaatgttgtcccacgcgacaacacccccggggggtgaattatcagtgtcgtagtattgttcaatattttggggacgaaccccccttttttcccccttttctggatttttcccccctaaattttttaaaaggggcccttttttcccctttgccccccctttcccccttttgggccccttgtttta

SEQ ID NO: 710683 - DNA, 295 bp, Homo sapiens
ggaacttcggtgagccagctcagcatcatatcccttgtgacctgcacatatatatccagatggcctgaagtaactgaagaatcacaaaagaagtgaaaatggcctgttcctgccttaactgatgacattaccttgtgaaattccttctcctggctcatcctggctcaaaagctcccccagtgagcaccttgtgacccccatccctgccagccagagaacaaccccctatgactgtgattttccactacttacacaaatcctataatacggaccgagccctatctcttttcactga

SEQ ID NO: 710684 - DNA, 130 bp, Homo sapiens
accctggaaactgctttggatgctagcccctaccccccaattaggagggcactggcacccaacatggcatacccctgctaaatccccttagaatgtcccacttccttaaaccacattcctgaatgcatgt

SEQ ID NO: 710685 - DNA, 2064 bp, Homo sapiens
  misc_feature (1042)..(1042): n is a, c, g, or t
  misc_feature (1075)..(1075): n is a, c, g, or t
tctgtctctcttcttctgctctcgtctttgtttctcttctttcttttgcgttttattttttttgtgtgtgctccgatttgatcttttcatttagttcttgtctttcgtgcttcgttctgtttctttgtctgttcgttcgctctctccttacattctattttttgttctcttctgtgtgtcttcggtatcttcgtttgctctttctttctgtttcctcttgcttctatcatgctttgtcactgtctttctggcatgtcgttgcttttctcctctcttgtctctgtctcgtgtgtgtttgtcgttctttattgttttgtcattgtatataagggtgttgtgacgtgttgtaattaattagtatatagttgtttcttgtgatttatagtggttatgagtatattgattagatgctgtagttgcttagtctatgattttgttgtgtttatattatgaagtattgtgttgtgtgtcattatattgtgagtttgttgtttatagtttttgtttcgttatattctttatatcatatagtgtgtgtcagtagtatgttttgttgttagtacttagttagttgttttagtgcttagattatgtgtgttaatgttaagttatttattgataatttaggtttaggttagtgtttatttgttattattgagttctgttgtatgaatgtgtaattgctgtatttatagtgtgatttagttaatatgtatattgtatcttttgtcatgtctcaagatggagtttagatgattgaattgtgcatgtgtggtatgtggtatgatgtgagaatgaatgttagtatgtagagagttgtgaagttaattggagtgttgtgtagagtttagttttttttttatagtaactaatattaattataaattttgatatcatgattatatcaatgtgtgaactcttataatagatatgtattattttttgttttcgttgctttgttcttttttgttgtttatgtgtttgtgttgatgggagatggagcaaggagtgggacgaaaagtgagagaggggagagagcacnatgcaagtaggttactacgccgctttgtgttgntcactaaggaccagttttgtagtgtgttagaagtctttcctgtcgcgtagtgcgggggtgcctgatatgggggcgagtttcccgctgttgtgttgctcccgtatctcctgtgtgcgcccaccgaaggcccgtttctttcgtccagagagagccccctgtctgtgagatcccaggtaccgaggcacttgggccgaagaagctggcttggccccgcgagaggtttggaccacgcagggaccgtgggcaccaagttttggggccacgatgagatgtatcgtaccttatcggggttaccacaggaccaaagcgtactcaaggggtcaacccatcggggccaccaacacaggaagctgcccccggctagaccccccgagggcccttcgcaaggtggcccctgtattggggccatggccatcctgctttcgtgtacgcctttttcttgttggcacgaccctgggccagaaataggcgttcccatctcccgcccgtgaggatcttcaccagagagatttaataagagttggcccagggctatctccttattcaaaggaccgccatacttgagtccagaacacatgcgctctcccctgagctattgagcctattcttgaaccagagcaatctaaccccttttgggtggcgtttgtcccactatatggtgagaaatgagcccaaggagcgtttgtcatgctgtaaaggctgttgtggtgggaacccagaaaacgggtgctctaccctctcgcagagatcccttgctggtgccagacgaaacggcgggctctggagaagattgacccttaaattctcattgaccaccaccctcccaatttggccctggcccgcttcccagaccctggaggagaaaaaagacatttatgggacccctgtaagaaaagaacccaattgccaaagaagaaaagagcttatattcccgggaccagattttgcccttggtggggtttccaatataaaggttattttccccctga

SEQ ID NO: 710686 - DNA, 965 bp, Homo sapiens
  misc_feature (14)..(14): n is a, c, g, or t
  misc_feature (70)..(70): n is a, c, g, or t
  misc_feature (73)..(73): n is a, c, g, or t
  misc_feature (93)..(93): n is a, c, g, or t
  misc_feature (97)..(98): n is a, c, g, or t
  misc_feature (102)..(102): n is a, c, g, or t
  misc_feature (105)..(105): n is a, c, g, or t
  misc_feature (111)..(111): n is a, c, g, or t
  misc_feature (114)..(114): n is a, c, g, or t
  misc_feature (134)..(134): n is a, c, g, or t
  misc_feature (136)..(137): n is a, c, g, or t
  misc_feature (141)..(141): n is a, c, g, or t
  misc_feature (157)..(157): n is a, c, g, or t
  misc_feature (206)..(206): n is a, c, g, or t
  misc_feature (297)..(297): n is a, c, g, or t
  misc_feature (330)..(330): n is a, c, g, or t
  misc_feature (339)..(339): n is a, c, g, or t
  misc_feature (353)..(353): n is a, c, g, or t
  misc_feature (356)..(356): n is a, c, g, or t
  misc_feature (399)..(399): n is a, c, g, or t
  misc_feature (489)..(489): n is a, c, g, or t
  misc_feature (500)..(500): n is a, c, g, or t
  misc_feature (517)..(517): n is a, c, g, or t
  misc_feature (553)..(553): n is a, c, g, or t
  misc_feature (555)..(555): n is a, c, g, or t
  misc_feature (569)..(569): n is a, c, g, or t
  misc_feature (605)..(605): n is a, c, g, or t
  misc_feature (617)..(617): n is a, c, g, or t
  misc_feature (621)..(621): n is a, c, g, or t
  misc_feature (623)..(623): n is a, c, g, or t
  misc_feature (683)..(683): n is a, c, g, or t
  misc_feature (685)..(685): n is a, c, g, or t
  misc_feature (776)..(776): n is a, c, g, or t
  misc_feature (811)..(811): n is a, c, g, or t
  misc_feature (866)..(866): n is a, c, g, or t
  misc_feature (872)..(872): n is a, c, g, or t
  misc_feature (930)..(930): n is a, c, g, or t
aagtctttattttntctttcaaattccaggtattgacttatttaattaatccatcaacctctcatagctnatntttgagaaaacaaatttatnttcnntttnttnttttcngtnggggtgtaaggtgttggagntnngtgngctgtaaagttgtganagagatggagacatccagccccacctctctggaacaagaaagatgagtngggaggaaacacaggtcagcatgggaacaggggtcacagtggacacaagggtgggctgtctctccacctcctcacattatgctaacagggncgcagacactttcaggtgcctttgcagaaaganatgccagangctcttgaagtcanggngggggggcgtgaagaaatcctgcatctcagtccctcacaaganagctgtctcaggcttttcaagctgtgagagacacttccgggccctgggctctgtcgctgcgcgccgcctgtgtgttgctccctccttttncacctgatctnttcctcctacacatcanagcagcgaccacagctccgatgaccacaactgctangncggccaggccagcnacaatgcccacgatggggacggtggtctgggaaganggctctcatctnatgntnttgtgcttcggcagcccctcatgctgtacatggcatgtgtatctctgctcttctccagantntaccaccacagctgcccacttctggaaggttctatctcctgctggtctggtctccacaagctcagtgtcctgagtttggtcctcgccatcncgctgccaggtcagtgtgatctccgcagggtaganacccagggcccagcacctcagggtggcctcatggtcagatatggggtggtgggtncgtgtnttttttgggggtcagcgcgctccagcttgttcttcccgttctccaggtatctgcggancactccacgcactcgccctccaggtaggctctcag

SEQ ID NO: 710687 - DNA, 151 bp, Homo sapiens
  misc_feature (1)..(1): n is a, c, g, or t
  misc_feature (111)..(111): n is a, c, g, or t
ncagggtgcccgaaagcactcacgtggacggcacgttggcgtaccacacaccgcgggctatgcccgtaggggccgtctgagcggattctctacgctggggccgattaacgnagacgtactcgtgctctccagttatgctacttcgtatccc

SEQ ID NO: 710688 - DNA, 299 bp, Homo sapiens
  misc_feature (150)..(150): n is a, c, g, or t
  misc_feature (165)..(165): n is a, c, g, or t
  misc_feature (167)..(167): n is a, c, g, or t
  misc_feature (170)..(170): n is a, c, g, or t
  misc_feature (188)..(188): n is a, c, g, or t
  misc_feature (205)..(205): n is a, c, g, or t
  misc_feature (212)..(212): n is a, c, g, or t
  misc_feature (227)..(227): n is a, c, g, or t
  misc_feature (233)..(233): n is a, c, g, or t
  misc_feature (271)..(271): n is a, c, g, or t
  misc_feature (293)..(293): n is a, c, g, or t
aaccaggctttttatgtgtttagctggaggtgagtggaccgggggctgtgttttaaactgcttccttggcatttggcatccctgccttttgtttccgggggagcatggattttttgtcccccctgctttttaatggggaggggtgagggntccctgtccccccancnggnatgttggggtttgccccngccccccccttgctttnaaaaccnagggtcagagccccntccccntgtttttttttttctgttataataattattaacttccntgtaataaaaataaagtttggncttgga

SEQ ID NO: 710689 - DNA, 829 bp, Homo sapiens
gagctctgtaggaacagtacctgctgcgcgcgcgtctacagcttactgatttggaaatgagccattagctgtccactaagaagatcctggatgcctgatctatctagcagtgggagagattgatccatctacaacagatcgtcccgtccgggcacagcgagaacgttcgtgaacacacatattacgcataatttgcaagctccctgccaggtgcattttgggcaagtagtttcatggttatcggatggaaagcttcaaaagcgtatggcattcattggtcataccctatacacggcaccaggctttcctgctgttgcaggaatcccagaaagggggcctggctttgcctctccggctgacttaccatgaaattgtccccagttgccccatgcccttgcaatttggaagggcacccaattgtttgggccgaggaaccattccagggaagcttgggatttacctggaccaagcaattggtttgttccgccgtggcaacctcccccaaggggggcgcttgttctttctgacttacttgcattttccccgtcgccaaaggaaaagcccccttaccggggaaccacccgtgggccttaattccaaaaaaactggctttcgggggattacttgggggcaccttgacacgcaccttgcactttgcacacaacttggcttctcggaacacatttaccaccacggcgcttttttcccaacaccaacggcaacgcccaacgcaacttctttttaaccgcggacttggctttaatcaacccaggcggcttaaccccttgtggccccctttcccaaggcccccaaccaaacacacgggctg

SEQ ID NO: 710690 - DNA, 530 bp, Homo sapiens
ggcacgatcccagtttacgtgcagcttcagacctcctgagctcaagggatcccacatcgcctcagtccgccaagtagctgggacgtacaggcattacgccgcacatgcctggctagtttgtggtattttcgtagagacggggttttggcatgtttcccaggttactcttgaactcctggactcaaacaatctgcgcaccttggcctctcaaggtgctggggattgcaggcatgagccagcaggcctggcctgagtgagttttatctatactgtattcatgtaacccagcaagcagagagatccatttacgacgttgtttgaaacagtaaagtgactcagtgacatccaccacagaatttgcacatatctgatacatttgtgagttactcctagtattaagtactacggaaaaggaccgaggcatctaccttcacttctttaagcttttattgaatgctatctccaagcatgctctgggagagctactggataacacatttatggaacgtcatagtaggagacgccatggc

SEQ ID NO: 710691 - DNA, 195 bp, Homo sapiens
tagacggctgcagtgagctacgtaaaatacaaaaaattagctgtgcattgtggcacatgactgtatccccagctacttgtgcggctgaggcacaagatatcgcttgaacccaggaggcacaggctgcagctgagctcgagtttgtgccactggatttccagccgtgcgtgacagtagtgagaatctgtctcgaaa

SEQ ID NO: 710692 - DNA, 230 bp, Homo sapiens
  misc_feature (60)..(60): n is a, c, g, or t
  misc_feature (63)..(65): n is a, c, g, or t
  misc_feature (109)..(109): n is a, c, g, or t
  misc_feature (133)..(134): n is a, c, g, or t
  misc_feature (148)..(148): n is a, c, g, or t
  misc_feature (150)..(150): n is a, c, g, or t
  misc_feature (164)..(164): n is a, c, g, or t
  misc_feature (184)..(184): n is a, c, g, or t
  misc_feature (207)..(207): n is a, c, g, or t
  misc_feature (216)..(216): n is a, c, g, or t
tttacaccaaaaactgaactgtgtgtaaccatagtaacaccaagcacgtatttatttatnagnnnttgccattataatttcgcgccataaattcatttgacccatactnctcttattaatagagaagtaaaannatgtacgttcagcntncgctagagttatgntcaatgaatattgtaaatgnttaagtattgttaatgaatagantaaatacantattgcattcccat

SEQ ID NO: 710693 - DNA, 532 bp, Homo sapiens
  misc_feature (463)..(463): n is a, c, g, or t
acgtctgtaccgtctatcttaaatatcaagttgtctgaaaaaacaaaccatgtatacgtaagtaggctaatatattacatgaatcttaacgtccatatcactataagcaggttataaagaaaacccaccttgatttattgctagagatttaccagctaaaagcaatcactcgcatgatttagaacaataaatgtttagtctcaacaatatccacgtgaagcagttcagtaagtggtggttttataaaacccagccagctccatttctagctctgtttaaaggggagtggttgtatgaagagttcctcagtcaaaggtgtgcagctgggaagcccaccccacctaagagggaggtctgacaaagtgtccacactgaaccactcagacctgcatcagggccccgtttcttccataagccgccaagtacaggcctgagtcaactgaactcaggcctgggaggcttnccaaagctgacttgactcagctttgaactgaaatgaccgtaccatgacaaccctgatgaaaagctaaac

SEQ ID NO: 710694 - DNA, 787 bp, Homo sapiens
  misc_feature (321)..(321): n is a, c, g, or t
  misc_feature (787)..(787): n is a, c, g, or t
tctatttttggggtggggggggggggtgtgggggccagggaaaggaagggacccgggggccgccctcgcccccgcaccctctctaccagttcccccccagccccgggtcccgggagaagattgtcgccgggcgggggggcgcccaggtgttcgccgacgcctgaaggaagaagacccgcgctggggccagaccccaagagcgggctgctgggacagttgtgtcaggctcattgagcaggctaactttttgggggttttcttccccaacaaatattgagtataacgcctatccaccaaaatctccaggaaatatgcgaacanaatattctctgtgttcaccctggagaaatgtcctggtctggagtgagaaaatgttttgcgccacacaaaaaaaaaaagacaaggcgatttgtttttgttgtgtcccaaataggagcgaagttccccccacagaggttaaaaaaacgggcgaggtgtgcccttgtgtgaatctcctgtagaccctcaatctcaaaaccaaaacacgcgttgaaaaatttccccgcgactcccccgtttgacggagtattccccacaagatagtgatgcattgtttgggaacccccataagattaaaccacgcccaacagtgtgtgtgtgaaaggactcctataacacaccgagtaggaccataatataaagaaagagtggactctccgttcccaaagagaaaagcaaagaagaaagcttacataaagtgggcagcgtgatcttaagggtggggaggaaacacccgtaatgaaaaatn

SEQ ID NO: 710695 - DNA, 786 bp, Homo sapiens
  misc_feature (11)..(11): n is a, c, g, or t
  misc_feature (77)..(77): n is a, c, g, or t
  misc_feature (168)..(168): n is a, c, g, or t
  misc_feature (200)..(200): n is a, c, g, or t
  misc_feature (202)..(202): n is a, c, g, or t
  misc_feature (204)..(204): n is a, c, g, or t
  misc_feature (208)..(208): n is a, c, g, or t
  misc_feature (243)..(245): n is a, c, g, or t
  misc_feature (248)..(249): n is a, c, g, or t
  misc_feature (252)..(253): n is a, c, g, or t
  misc_feature (255)..(255): n is a, c, g, or t
  misc_feature (268)..(268): n is a, c, g, or t
  misc_feature (272)..(272): n is a, c, g, or t
  misc_feature (284)..(285): n is a, c, g, or t
  misc_feature (288)..(289): n is a, c, g, or t
  misc_feature (291)..(292): n is a, c, g, or t
  misc_feature (302)..(303): n is a, c, g, or t
  misc_feature (306)..(306): n is a, c, g, or t
  misc_feature (311)..(313): n is a, c, g, or t
  misc_feature (347)..(347): n is a, c, g, or t
  misc_feature (352)..(352): n is a, c, g, or t
  misc_feature (368)..(369): n is a, c, g, or t
  misc_feature (407)..(407): n is a, c, g, or t
  misc_feature (419)..(419): n is a, c, g, or t
  misc_feature (421)..(424): n is a, c, g, or t
  misc_feature (428)..(428): n is a, c, g, or t
  misc_feature (430)..(430): n is a, c, g, or t
  misc_feature (433)..(433): n is a, c, g, or t
  misc_feature (437)..(437): n is a, c, g, or t
  misc_feature (439)..(439): n is a, c, g, or t
  misc_feature (453)..(453): n is a, c, g, or t
  misc_feature (459)..(459): n is a, c, g, or t
  misc_feature (481)..(481): n is a, c, g, or t
  misc_feature (497)..(497): n is a, c, g, or t
  misc_feature (517)..(517): n is a, c, g, or t
  misc_feature (522)..(522): n is a, c, g, or t
  misc_feature (524)..(524): n is a, c, g, or t
  misc_feature (532)..(532): n is a, c, g, or t
  misc_feature (534)..(534): n is a, c, g, or t
  misc_feature (545)..(545): n is a, c, g, or t
  misc_feature (551)..(551): n is a, c, g, or t
  misc_feature (555)..(555): n is a, c, g, or t
  misc_feature (557)..(557): n is a, c, g, or t
  misc_feature (562)..(562): n is a, c, g, or t
  misc_feature (567)..(567): n is a, c, g, or t
  misc_feature (589)..(589): n is a, c, g, or t
  misc_feature (631)..(633): n is a, c, g, or t
  misc_feature (635)..(635): n is a, c, g, or t
  misc_feature (640)..(641): n is a, c, g, or t
  misc_feature (645)..(645): n is a, c, g, or t
  misc_feature (647)..(649): n is a, c, g, or t
  misc_feature (655)..(655): n is a, c, g, or t
  misc_feature (658)..(658): n is a, c, g, or t
  misc_feature (662)..(663): n is a, c, g, or t
  misc_feature (670)..(671): n is a, c, g, or t
  misc_feature (683)..(685): n is a, c, g, or t
  misc_feature (687)..(687): n is a, c, g, or t
  misc_feature (704)..(704): n is a, c, g, or t
  misc_feature (710)..(711): n is a, c, g, or t
  misc_feature (722)..(722): n is a, c, g, or t
  misc_feature (784)..(784): n is a, c, g, or t
acctatttgtngtttagaaccaaacaaaactacaagaaaacattttcaaaacctttttttcaggctgaagaaatcgnttaatccattttaaagaaatctcacatgatgttctgtcgggattaaaaatatacacggaaaaaataaaacaaaatatatacacagaaagangctcgcacagagtcaggcgtgcagcaccgtcncncnctcnttcctttctgtttcctctggacactcaaaatgtgnnngcnngtnngnggggggtggtttnccgnccttttggtccnnggnntnngatttctttnnaanatttnnnacgtcaaaacctgccagaataagacaatagaagngcgtntcgtcgggcgctgggnntggcaccacgacaaggcattaatgtggattcacttgcncagctgctctcntnnnngctncncgnttcngnggtaaccctaactntccgcnatcccaaccaaagtcatgttcntgccgctgttcttgtntggtcattctctgttactcntccancncagttatntncagaatgcgcngtcccngccncngtgtngattncggcaggcgttctctacctggnctcatgattggatttcatttctaaattacatcagagctttcnnngnttganntacncnnntctgcnctncccnngcctccnngcctgtacgggnnncnaatcagaagagcatttnttgggnnctgacacgtcnggcctccccggtgctgggccgggctccccgcggcttgctctgcctcctgtcttccgtttccntg

SEQ ID NO: 710696 - DNA, 566 bp, Homo sapiens
tgggggggggggggggcccccaaaaatctattttcaacacccccggggcacgcgggggggcgaaataaacccccgcggggggggggggggagagagaggtcccactggtgaggggcgcgcggaacaccaaccactccgaggaggagagagagaccacgcggcgtccggggagagagaagaaagagggcacgcggcggtgggggggggctactccccctaaagaggcatcacatcacgagagggagaagaaaccgagcgacgacacaccacgacccgcgatgagggggacaaagaagagacagacaaagaagagaggaggccagcgagagagggtataccaacacactctcttccactcactactagagagaacaaacagagcgcagactactatacgagcacgcggagcgagagagagagaagagggagacacacactctcactctccgcgcggcggaggagaagagagagagcggccgaccgatgaagtggagaaccactctcatcctcgcgcgagagcggagcaagtctcgatcattaaaacaccgcacggggtcaaaccgcac

SEQ ID NO: 710697 - DNA, 419 bp, Homo sapiens
  misc_feature (325)..(325): n is a, c, g, or t
gacagcctcccaagcccaggctttggcactcagaatgggcccagtgggggtgggcaggcccatttagggccccccccgaggtttttcctagggctgtttctggggctgggttttacaggcttgtcccccaggcctgcccttttccactgccccctcctgtgtttgggtccccccccccttcaggaagggggagcccttaaaagcccagcccagggggtcagcctgggatccggtgatggtttgggcaaaggctgggtcaggagtcccaaaggtcagtgacagtttttcaaaaaaggcccagggtccccctttttcccagggccanacacccctttctgggtcccccatccccctatggggtcccagccccttgccccctcattgctgttcagattaaagcctttgttttgcccctgtca

SEQ ID NO: 710698 - DNA, 280 bp, Homo sapiens
ttcaagacacacaatatgcacagagcacagacatagacagacacacaatacacacacacaatatatatgcacgagtgtcacatacacacattcgaggagagaagtgaattatgtaacacatcgagctgtacatatacacagagcccacattgaaaatggagctcaatcattataatgtatatgaatgtcttggtggtgacgctgtctatggatatttcacacatgtgcactgatgaaatattgcccatctcttgaatgcacatgaaccattggccttgtt

SEQ ID NO: 710699 - DNA, 954 bp, Homo sapiens
tcggggtttcctgacttcaacagtgcttgggtacggaacccggcgctcgttccccaccccggcggtcgaccatagccatgcacctctgttcacctcttcatcgcgtcactcctacggtactgcacccagaaggtctcccgtacgccgttccaagcgtccgcgcgaaccaccgacgccgcctgttcgaccctaatccttagatcgtcgcccgtgaagactcgagttaccaccgtgcgaatggatgcgcctagaattttaccacccagtgactcacgtagagctcagtcattctaatccgtgcatcatcaatcctggatcgtcgtacacgctcctacttatctacctgattcatgtaagttggaaaacctaacgaaggttggccggtaaatcttccttcatgactatctaataacaccaagaactgttgaatagagcttggtgagcagcgcgcttgagagtgcaaatggtacgatgttgcgaattgacgattttgggaaaataaactgtgcaatccatatccacgtactggcacactgcatagaacatggccactgactaaaaagtgatcctcccataatggtggtgaccttcaatagagaccacaatccatctgacatgagcctgtgtcctagccatctcatgaagtgggttgaccactgttgagcaacatttgcagcaagtatgggatgctcacctgcattgctcggccttgggggggaaataatctctttgactaagcaataccctggcgatacacgagataaatgcaccagctcagccttgaggtcataactttccccagtaagccgtgcggggtgacttctctggtaaccaatggtagaggatgcactgtggggtttcctttagactttctataagtcgtccaatcttccattacggttcttgattggaccattcctacaataagaatttggttcccaataagaaaaaaaa

SEQ ID NO: 710700 - DNA, 644 bp, Homo sapiens
  misc_feature (644)..(644): n is a, c, g, or t
aaaaattttttttgaaacccttttccccaaaaaaaaaacggcccccccaaaaaattttcaaaaaaggggagtttccccctttttaaaaaggaaaccagggaaagggggtcccctttggggggtcccttaaagggtggggggacccggtttttttaagggaaaacccccctgggcccagggttcttttaaaaggggtttttttctaattaaaagggtaagtctgcccaaaacaaaggggaaaaaaatgggttttaaaaaaaaaaaaaaacctggggggggggcaaaattttcgccccccttttttccccccggttttttgaaaaaccctaaaaaaaaaaaaatggggggggcaacccgattttttttaatattttgccgaccaattttaattgggttactccgtggggaagggggcccttcccaactttctcgttgtaaaaaaaaaattggagggggtggggtttatttcggggcccccggggggggaaatagggttttgtgaaagaaaaaaataaaaaaaaattcctttgtcctttatcccccaagtaaccccggttgtgaaacccgggagaccccccgggcacattttttcccccaatttttgcgccccaccccacaggggtttttccttttgggcaaaagan

SEQ ID NO: 710701 - DNA, 449 bp, Homo sapiens
acgctctctctgttgggggcaactgggagaagaataggagaagctccgtgaaaggggcctcagaggatgcacatgaaattggcgaagtgggaacagagaggcccaggagggattgcagtgtggggcagagtctcaggtctggagtgagaaagcttgagttccagtcccagctctgccactcactaggtgtgtgatcctgggcaggtcacttgacctctggtgagtcttagttgtctgtacgtgtccatgcaggagttgtcctgacaccacgtttaaaggtggttggggatggtcaggctagataatacttttgaaagtggttttaaaagtgtaaacaggaggaagtgtcgagttcttagttgctggggattaagaatcgcaaaggctacgctatgtgacttccagcacctccgggggacgcaggcagataacccccacagagagagcgt

SEQ ID NO: 710702 - DNA, 1216 bp, Homo sapiens
  misc_feature (757)..(757): n is a, c, g, or t
agcatcaagagagaggatttggattcttcagaaattgacagaagtaattcattgtgtccattaaccagattggtgcaaggacagcaacaagccaatctaattgattgagaaatgtacttatattctagtgttggcgtatataaccttactgtacggggtttaggtgattatggcggaggggtgctagtgtagttttggtctggcgttggtattgccactgaagggctacgatgctggcgtggcggagaatgacacaagaggctagctttgcttcgtggcttatgatgtagatggaacctcagtgagattgatgaggcttagcaatggtaattatctctctagagggtgacgtgaacgtttatcgcatatacagctctggagcacctcaggtcgctgaagcagttgtcaggaaccttctagtgccaagccacgggagcagcaggtggatcagcggagcaagcccaggccggccacacaggcaaggcaggtcggagaaaagaaccggctcaccgggactgcacattcacaccatcctcagaggtgtgagcagtgggggggcccaaacccaagtggcctgtctcatgggtagctgagtagttgccacgtttgcggcctcgccatattttgcttgaggggaaggcggcagtggggtcctaaagtgactagctggatggggagaaagccataagtatcatccccaggtcagcgtagggatgtaggcccatatggggggcgatctttggtgtgcttcacgcanattcttcttggtttcaaacccgggaggttgtgacaagacttccagtgggacaaggggtcgggggccgctcaagccaaagtggccttcaaggtggtgcccttggtttggacactttaagggttggtaatcccagcaagcagagtcgaaatgggcttgtagggccccaaagggaaaggaacattgcatctcacgacggccgagcatatagggggggcccccccgtgtgtaccaaagaagggggggtaataggaggtagcaaactacgatgggggagcgaggcggtcgacccgtatagagagacgtcagcaggagcacttgggagcggcgcccagaataaaaaagaggaagatcgaagcaacacaagaaggggagaacatgaaaacagaagagcgagcagagcgaagggcgaaagcatcggagggcacgatcaaggaagaagtaggaagaacgtgaagaagg

SEQ ID NO: 710703 - DNA, 337 bp, Homo sapiens
tctagcaggatccccatgctgttatgtttgcttcatctcctcttatctactgttctatcctggctcctggagtcttctggctctagcgtccactgctgacccctaccaggttgttatccttgccagtccacactagcatatgccggcctttagtgagaccggcagtgtgtgcggagtagcggcctgaggcctgttttcctttgttcttcttcagaatataccagcaaacttgcttttgtcctgtatggttatgtttctttgagcataggttctcacctctgtcacccagactggattgcagagtggcaacctctgtctcactgctacttctgcctcc

SEQ ID NO: 710704 - DNA, 161 bp, Homo sapiens
aatgcgtccggacttcctggtgtgtatggtgttcttgcaaatgaccacaactcagtaaagaacacatacacaacaaggaaaggccactggtatatcccaaatatcctaaatttctaaacagcgacaaaggaagaatgaccaccaacacaccaatggaaggt

SEQ ID NO: 710705 - DNA, 407 bp, Homo sapiens
cttgaatgagctgctgtatggatttattcgaatatcggcagaattccattcctcccaaggtggcaaaattagctctactgatgtaattatcattttcctcggtctgaattccctcacacacactcttgtcctacatcattgtatgacatgatagattgacggaccggcttcgtggtcctacacttgtactgatggagagaggccctagactgtgatagctaggtgggggctgcgcatcatgtgggctctggcagatcatggtgacggagtttgagtttcataaggattaaagcaatgcagggctactgtcacttttgcctttttggaatttcctggctgctcatgtcattcattgtgtaccgtgctcgatctccgtatctctgtcttagctctttcctgtgttgaaa

SEQ ID NO: 710706 - DNA, 284 bp, Homo sapiens
cgcccgtcaagtgcccgagacctagggagcgcagacggatccatgcctcgcaccgtgcccggctctagcatgaagatgggctccctgagtagctgatagaaattacgcgctattcacgacctgtgcgactttgagaagtgtgatgcgctactccggaaaccggctttcagatactctatcgcacgatgctcaacctagaagttcgcacacgtgttcgaccgcgtacactgcaggccagtccacgggcatggagggaggaagcggtggagtgtgtcctcggcgtg

SEQ ID NO: 710707 - DNA, 1710 bp, Homo sapiens
  misc_feature (1250)..(1250): n is a, c, g, or t
tggagcccagaaagcagattaatttttctttagaattaaaggtctcaatacagaaatagtgtgttacagtgctcgagggagtattcctcaggtttaacaccaaagagggtcgagaaagtttagtggcaggtgaggtgcccgagggtgataggagtggaggaaagggaaactttcatagaacagagcgggcgcgggggtctcacagcagacaagggcaaccgtcacacgaggtttccaagagttggtggcggcgcgtggccactggcgaacagagggagtgtcaccacagggggcacgagtgtcaaggcagctcagaggaaaatagaggagagaacacaggggcgcgcggatagagggggggcgaaaaaagggggtggcgccatgggagctatgggcagcatcggctatgggaaggggggatgggcactccacaataacccgggggaaagggccaagtgtcgcgcggagggcacaatcaaggcgcccaggagcacccgtggcgccacaggggggaaggacaagtgcaaaaagaacgaccccgagggagggcacaaaacagggggagatcgcgcactagggtgagggcaacaaagccactgtgacgcaagacacgagaggaggagacacctaaaaagcgccacccgagcgcacagatgaaagatgcgcacgtgagacaagagcacagtgagaggtgaggtgaacgacaaacaaataataacacaacaccaaagaagcagatgcgaaggacccccataacaacaagagtggggcgccgaaacaacgaagaggagacgatcaataccacgacagatactccccaggagggagagaacaccacatcagaggagagaaacacgaggaggagagaggagagaagtggagggaagaggccgaaggcagccaccagcagtaaacaccgacatacacacaacacacattgtaaatcaatcaaaccacaatccaatcacagccggaaggaagagggaacaaaacaacaacaccccatcgtcaggaggaacacccaccgatggtgagaagacagacgaagggaggcacgaagacgaccgacaccagtgcacccaaccaaagaagagggggcatggtggtcacaccacaacacgacgaggagaaaaggaggaaagatggggcacccccccagccaacaaccgccgataggatcgacgaacgaaagactgatatgggacggggcaaccccacaagggggggacacaccccacagtggaagaaanagcacgcggacgtagtagagagccacacaagggggggacgccccggacgacaagataggagaagaaaggataatataacacagaggcgaaggaacaaccagataggagatgcaacacggagtaagatatgtgaacacatcacacaacaaccacaacgccacaccacagcagtggagccgccacccagctcaaacaaagcagaatgctaacacatgcacaacacagacaagaagacgaacgagagaccaacatggttgagaacacacagaagagagacaacaaaacaactaagtgatgcacacacaagcaagagatggaaggatatgaatatacccacagacacacaaaaccaagtggggaggaagaaaaacgacggcgacagacaaaaacactgaaggagcacacaaagaaacaagaaaacgagaatagaattcaacaaccccacaacagatgaaagaaa

SEQ ID NO: 710708 - DNA, 143 bp, Homo sapiens
ccagctacggatgtggaggagaatatgtgtcctgctgcagtgacaagaatgacctgtcagctccaagtgcaggcggaacaagacaacctggcagatgctgagtgagcgctgtgcatcagctgtatcaaacaactagtattcag

SEQ ID NO: 710709 - DNA, 274 bp, Homo sapiens
cacgaggcctcgtgccggcgccgccgccggcagcgccggctgtgaccggcgccgtggccggcggcgcagcgctctgcgtctgacccgaagcgccggtttgcggctgtcccgcggtgccggtttgcggctgctgcgcctgcgcggaaggctcgggccgcgccttgccgcgcagcctgttcaggatttcgccaaagatgctcattgcagatcctccggttgcgatgtgctgccaagtaccgaaatgtggtcgtggtgtgcagcccgaagtgggtgg

SEQ ID NO: 710710 - DNA, 675 bp, Homo sapiens
cgtctttgtgtcatgcgtctcatcattagctcccattataagtgagaatttggtttctgtacctgcgttagtatgctaaagataatagcctccaggtctatccatgtacctgcaaaagacatgatctctttttttatggctgcatagtattccgtggtatatatgtaccacattttctttattcagtctgtcactgatgaacatttaggttgattccatgtctttgctgttgtgaatagtgctgcaatgaacactcacatgcatgtgtcttatggtagaatgatttatttccctctgggtatatacccagtaataggattgttgaagtgatggtagttctgcttttagctctttgaggaattgccatactgctttccgcaatggttgaactaatttatactcccaccagcagtgtataaatgttccttttctccgcaatcttgccagcatctgttatttttttggctttttgataatagccattctgactggtatgagatagtatctcattgtggttttgattgcatttctctcatgatcagtgatattgaactttttaaaatatgcttatgggttgctgtatgtcttctttgaaaagtgtgtgtaatgtccttgccccttttatgagtaatcggaggggaccacccatctactggctactcttttttaactccc

SEQ ID NO: 710711 - DNA, 234 bp, Homo sapiens
aagtctcatgcttacagtcgaaaggcacatatatccacacatgcacacacagcacacacacaaacgcacagcacacacaaacgcacagaacacacacacacacagcacacacacgagcacacagcacacaaacgcacagaacacgcacacacacgcacacacagcacacacactagcacacagcacacacacaaagacacagtacacatggaatgcacacacacgactggtagg

SEQ ID NO: 710712 - DNA, 277 bp, Homo sapiens
aggtacccagtgccacttcacttccagaatgcttctctgctgaactcacagcactactatatgctgcagaatttcctgcagacagcctccacagctgcgcacgcctttatacaatatggtgataataaagacatataactggatacatggaacactacccctatctccccatataacacgctacagtaatttatttccacagctgctagaaagagccaagtggggaaaccaaacatagacctgttgtccaaagtggacacaaacaggagctgcccac

SEQ ID NO: 710713 - DNA, 184 bp, Homo sapiens
cgcgtggcgtactacgacactgaacgcgcgtatcacaggacctggatacacagactgtcagtacctgttgtatagcgacaaaggcgtgctgcgtcgcctgcatgcccaccatttgctcagtgaggggcatgccaatgtgcgcgtttatcgacccgccctaagacgcgggccgcgggtgacactt

SEQ ID NO: 710714 - DNA, 986 bp, Homo sapiens
ggtccggaggatctggaaccgagcaatacctctctgggagctgcctggatcaggaggaggttcagctggctgatacaatggtttggcccttaccaagggttacagcatgagcgacactcaagcgtttcagtgtgcgatatctgcgacctgctcgcagatcttgtcttcccttgggttctcccctgggggctcaggagttacgagtgccgtgaaagcgtccgtagaggcgtaatatgccagggggatggagtgagcgtacgagggaaagccactaattccccgacccagcgcctaccacaatctgtttggattaccactggattagtcgtcggagatgctgaggtggtactgacgattcgtgagcttgacagcctggccttgaaccagtccacggggctgcctacccttactctaccccgaggacacgacctgcttaccccctggcttactcccttacctggaccagttccggcggcttgtcttctggttgggggatgagcttcggtcctgggaagccgccaagttgtttgcacgatagctggaacccaaacgatgcttcttggtgcgaccaggagagcaagcagcccgtccctggaggcctgaacggaggcttcaatcttctcgtattcttcgtaccgtccttgcttgctggcacacgtccatcgtatctttccggcagcttcggaaggaggtgctaagaaaactgtcaatgtggggcaagcagtggcatcccgcggaggccgcatttcagaacgctaatcggaatcttgaaggggaccttaaaggggcaaaccggaagagcatcacagagggccaacaggagaggtgacagacgacattcaccaagagagatattcccaggaattgtgtccccgggagtgacccccacggcgtggcaaacgggagagcacgcagagataaccgggttacgcacgcttatgaacgggagtagaaacacaggggaaaagatcaagagacacgaagac

SEQ ID NO: 710715 - DNA, 1303 bp, Homo sapiens
ctcccgccttttttcccggcggcgggagaagaaaaaaaaaaaaacaaaacaaaaaaaaaaaactttgttgggcggccttgggacccctgcggaaaaggctttcttataaaccattctcgctgtgggcgccgggggtccacagtacaggtataccgtggaacccgtgtcggccaaaagcgcggttaccccagagaggagaacaccgggcaccacgcgaacaacagggcccgggcgaactctctccaccacaatataaacaaagccccgcgggggcacaaccgaagcgcgttgcgggaacaaaaatctccaagaagggcggagagtcccagagaggggcacaactaacgcggggggctcctcttcaacacccgaggggaggcccaaaggcgagaagccccagaatactagaactatacagcccccgggggcggggggaccaacgcaccaacagcacccaccagaggagaggagaagacagagcgcagagagacggcagaaggagagagggaaagggcacgaggaacggcaggagggagagaaggaggagggaaggacggaggagaagggcgcgagcgaagaggaaacggagacaaagagggaggagcgaaggcaagagggagaaggagggacaggcgagaaaagacagcaagcagagtagcacgcggcgagaacgagaaagagaagaggcgaaaacgagaggagcaggagtgcaaggagacggacgccacacgaggagggaccaggtaggcaggaggagaggaaaagtgactaaggaagtaggggggagagcgagagagagagcaagcaggggaagacaccggggagcgaggagggcgcgaggaccgacggagggcggaaccgcgacgaggcgccggcggccgcacgggaccggcggcggcggagcaccgcgagaggggggggagggcacaggcgagcggacgggcggcgccgggcggcgcgaggggcggagggaagagccagcggcggggacgggcgggggtgagggcgcgggcggcggaggggcgcgggagacaggagagacgacagagcaagcacaggccccagagggccggccggccgagcgagggggaggcagagccgcgccagcgaatcagccggcgcaggcagcagacgacgggtgggaggaggagactgcggcggacgacggacgcgcagcgaccaaccgacggggagcgtggacgaccgcgccgcatacgaaaggcaaagagccaccggaccgacgaagacacacggccgacgcgacgatcgagcgcgcagcggggcaaggcgggagcagaggaaa

SEQ ID NO: 710716 - DNA, 310 bp, Homo sapiens
tggctcaggcctataattccagcactttgagatgccaaagtgagaggttcacttgaccccaggagttcaagaccagcctgagcaacatagcgacaccttgaacatcagtgatcattaaagaaatgcaaatcaaaaccacaatgagataccatctcatgccagtcagaataaaagtcaagaaacaacagatgctggtgaggctgcggagaaataagaacactagaaatagggagaggtggctgttttttcacatgccaatttttcaacaaaaggtacaaagaaggcaggcatgttagcacacacctataat

SEQ ID NO: 710717 - DNA, 166 bp, Homo sapiens
cccgactagcccgacagggcttctaggaggaagaacaggaaggggacatgagagtgtgtcaggaaggggagaaggggcatcagcgccctgggtgggcccagcccacctgcagtctcactgctctattagaggtgatgggctgtcgggctagtcgggctagtcgggg

SEQ ID NO: 710718 - DNA, 102 bp, Homo sapiens
atatatttatctggttttcatattcttttgcactaaagaattgtatcacttcttgcagtgcaacgttgcaggctatgacattcccatcaacttctgaggatt

SEQ ID NO: 710719 - DNA, 104 bp, Homo sapiens
agaaacgggggcagtagccaggcagtaaaatcatgtggggacacttgaggggtgcattcaggggaggaacagccccatgtctcagtctggtgcatcccacacac

SEQ ID NO: 710720 - DNA, 150 bp, Homo sapiens
caggtgatctacaggatcttatcccggatctgggtaattgctttgcagtattttttttttttgaaacgtatttggctcttgtgcccaggttggagtgcaatggcgtgtactctgctcactgcaaacctccatctccgtgggtaacaagcg

SEQ ID NO: 710721 - DNA, 370 bp, Homo sapiens
agggggtggcaggcctagctgctacaaagaagacttgtttagacaaatactcttgtgtatgggcaaaaaaactcgaggactgtattggtgactaatggtataacaggttattttagtttcggtgcgggggaaagtgtaaagcattccaacaaggggttttaatgtagatttttttttggccccccatgcggtggatggctaaatgtaccgagtcggatcgtgacgcgtgaaataagtgtctttttttttttttttttttttttttttttttttttttttttttttttggggggggaaaaaagagttttttttttttcccaaaaaacccactgtgtggggccgcggcggggggggggggggggggggcccc

SEQ ID NO: 710722 - DNA, 165 bp, Homo sapiens
  misc_feature (2)..(2): n is a, c, g, or t
tnttttcaaactccggacctcaagtgatctgctgcctcgtcctcccaaagtgctgggatggagggcgagagtcaccgtgcccggcctgcttcgatcatgtaactaagtattggtgaggccctcaggctgtgttcagccggaagagacacaggaacacagatggag

SEQ ID NO: 710723 - DNA, 290 bp, Homo sapiens
tgaaaatggttcaccatctgcagaaatgaccctagagttgttgctacccgatatggttcggctgcgtaccccacccaaattacatcgagaattgtagttcccataatccccatgtgtcgtgcgagggacccggtaggaggtaatcgacatcatgggggcaggtttttcccatactgttctcgtgatagtgaatacatctcactaaatctgatggttttataaagggcagttgccctgcacgtgctctcttgcctgctgccatggaagacatacctttttgctccttcttt

SEQ ID NO: 710724 - DNA, 148 bp, Homo sapiens
aaggtcgacaagggggaacggccgacggaacttaagcgcaaatttgaacagatgaaacaagataggatcaccagataccatgggctgttatatcttatatgtgaagaaatcttgactgactggtattgtatgtatgagacgtctccgg

SEQ ID NO: 710725 - DNA, 1155 bp, Homo sapiens
  misc_feature (1)..(1): n is a, c, g, or t
ngtggggcgacagttgtgtgggttgtgggccccacaaaaagaccgatgatttgcgtaatcgcctgcaggtcctgcctggacagcttcttatcgagctcggtgggtagaaagaattatgtttgtgtaaggcagtctgttgtgtggtggtagccatgtgagatcggtgtggggcagcccctcgtgagtgttgtgatgtggttgggtttgttgcatacgactggtagaaggcacgtctgattggtcgtgtcaactacgagcttactcacgtactgtgtggccgcaaggtccttcaacgactcttgggggttgtacttctcatgaggagtgtgcgccaccacatcctcttgtgttggtctccctctgcgggggaagtcctcaacgacgcgtcgcgcggttgtggggcgacaccgctcctgtggagagtgttcttgtgggagtaccctctgggggagtagtcctcctctgtggtctctcatgctcagcttgtggacaacgaggggaagagtaggactagtggtgtctgtgtcaacactcctcggcgtcacttctatccacagggttgtctgcgctcacacacgcgaggagttgttgtgcctcctacagagaatatgtgtggggcgccgcgcccactagtgtgtgtcacatcgcacaattgtgtctacacacacacagtgtttaatctggtgagagggagacacacagggctacagatactgtttgtcacgagtgtctcactgtcactctggcacttgtcacagcggctgttcttttctgaagatactgcgctcacatgtatacggagaggtcctctgtctgggtgagacacaccacacatgtgtgtgtcttgtcctgtgtgcgtgtggtgtgagagccactctctcctcgaggtgaggccctgtctcttgtgtgtgcgtggcctgaggttctccacggaagcatgttttggtggcccctggtgagtggcgccctgagggctggagaccccccatggccctgcccacgccctggcgtcttgtttgttcttgtctctctggtctccccccttctcccccgccccgtggtggcctgactcccactccctggtggcccccatccccccggttcctcacaatatggtttttacattctggggatttaataaaaacttcacccagt

SEQ ID NO: 710726 - DNA, 273 bp, Homo sapiens
  misc_feature (22)..(22): n is a, c, g, or t
agttcgacggagactctcctcntgcaacagcaaagttggcagaggagagacggcggagaatttacaggaggaaaaggaaaggaagttggaatgcgtgcccctgaaccttcccctgatgaccctgaaagtgtcgagatcatcttcaaattacctaatgtgttctcgagttgagagacgattccccttttcaccgtctctaacagtaatccacgagttcttattctccttgggagggaaggccagaaaagtttcagattggaggggggttaccgg

SEQ ID NO: 710727 - DNA, 423 bp, Homo sapiens
tgtgcatggaattctgtgcttgtaagatctgagctgaggaggcgtgtggcggagagtacaggtggtccaggccagtgcatgagtctggtgacatggtgcacaaacccagaggatcctgtggacagtgggttgggggaggcagaggtgacgctgggtgaggctgtggttgaagctggggaagtgcacccttgcaaaggtgcctgcaatcacaatattgattatgccttctgggtagcagctggaaccaagggtactgagggtcaatggagaacttgccatgtaagtaaaggtctggtttctaggttgcagagacgggagcaaagctgctggggatatgggagatccaacgacctcttctctccagtcatgtcaatattgaatcatgacatatccggacaatccgttcatctggtcaaaggggcc

SEQ ID NO: 710728 - DNA, 1212 bp, Homo sapiens
tggtgtttaaacaagttcgatttttcggccggcgcgcgggggctcacgccgtgttagttcccaggtgtttgggctctacttgtgaattgtgtaaagacagggtctccctcgtgttacacccggaacgtggagtgtgccagtggcctcaatctagtggctcacacagcttctcaacctccgtgggctgaaggtgatctttcccaccttcagccttccgcgcagtgtggctctaggacataccagggtgtgtgcgcatacccacacccagccttacaatttctttatactttctgtgctcacaagacgggctctgtgccagtgttgtgcccaggctgtggctctggaacattgccgtgggccctccacagctatattccttctcgcgccctctcagtttctcccaccacagtatacgtgggaaatatacaggggtgtctgagcccatgtgcccaggcccacagccaattggctaccctgtgtttcccttacgaatgacacaattcaccagagtggctggcgggtggctccactccctataccccatctaaagggctctccctctcccgtgcggtggctatgtgctcccctttgtctctgtctgcgttgacctttatcgcgtggcatagcgcaaatccatttggacccagcactccttaggtgtcaactcgtggggcctcttggggcaaaagagcccccccaatctccccggggttccctctagcgggacccaggggccctctatgctcaccctggcccgagcaccgggcgcagcctggcgcccaaccccaataagggcggggcacggccccgacggtccccacgggaattggcccgacctcggcaggggcgcttaaccctccacttcgccgcacccctcatcaatttacccaaccgtgccccttgccccaaatcttctctcttactttcttcacgcttcctgcgcccctttaaccttgcaaccttccggcgaatggtacttcgttgtcatcccacgcgcctgtggcttccatgcctgcgcgtctccctgaggccgggcgtcaaacaccccgccccccccctggcacaccgcgtctacccagcaacccccacacaccgtggggggcacccctgtactcccgccccagggcggacccggcgcccccccgcgcaaaccgctcccacacacgggcacatggcgatgtgcaaccacacgaagatatatgacgccaccgt

SEQ ID NO: 710729 - DNA, 111 bp, Homo sapiens
tactggacgtagtgtaaggaaaggacaatattcttattatgaaagagattatcttaagaaaactaactcaaagttcagcaagatttatacatcatgatgtgtgacaaacat

SEQ ID NO: 710730 - DNA, 181 bp, Homo sapiens
gctcgacgacagcttgtccagtgagacagggaacaacacagatgcagcattaaggagttttttgtttgtttgttttttaaggtaggggatattattggacttcgtatgtgatggcaatgactcaacagaaagaaaaattgctgatgcaagaaaaagagtgtcttgcctcgtccagtcgacg

SEQ ID NO: 710731 - DNA, 785 bp, Homo sapiens
ggctgcgctcccgttgctcctgccgggtgatggaaaaccccagcccggccgcgccctgggcaaggccctctgcgctctcctcctggccactctcgcgcgccgccggccatcctcttggggtgagagtccgtctgttccgccagagcccctggccatatacagcatcaccttcacgggcacgtggagccagactggtcttccaccaagcagtaccccctgttcctgcccccctgagcagtggtcttcgctgctggtgggccgcggcatagctccgactacagcatgtggaggaagaaccagatacgtcagctaacgggactgcgacgcactttgtcgggagacgcggcgaaggccatgggcagctgatgaaggagatcgaggctggcgggggaggcgctgcagagcgtgcacgatggtgttgttcggcgcccgccgtccccatgcggcaccggtgcatgacgtcggcggagctggaggtgcagctgcaggcactcgctggtctcgtttgtggtgcgcatcgttgcccagccccgactggttcgtgggcgtggacaggctggacctgtgcgacggggaccgttggcgggacacaggcggcgctggacctgtacccctacgacgtcctgtggacggactagcggcttcccttctcctcccccaattcgccagcatcccgggggacacggtgaccgagataacgtgctcctctcccagccacccggccaacgtccttctactacccgcggctgaaggccctgcctcccatcgccagggtgacacgtgtt

SEQ ID NO: 710732 - DNA, 103 bp, Homo sapiens
gcagtcgggatcttctgccaatcctctaatacctgcagcaagcatgtagacttaccttagccggtcgcgcttgtataaggattaacccttcatcgggggcgac

SEQ ID NO: 710733 - DNA, 186 bp, Homo sapiens
tgagatggagtcttgctctgtctcccaggctggagctcagaaacagacccggtccaggataaataatttttttttttcttgagacagagtctcactctgtcgctcaggctggagtgcaggggcgcgatctcagctcactgcaaccaagcaaccccggggttaccgagctcgatttcactggccgtc

SEQ ID NO: 710734 - DNA, 282 bp, Homo sapiens
agctcggtaccgctctcgtgagatgatgacagtgatgatcatctgatcacgacaaaccgtcgtttgtggacgcacctggttgagcgcgacctgaccacgtatgagttcgatcgcatgttcaatcaggttagcgaaaacgtgagctgggctgatgtttcgctcatggctcgcgaattcggcgttacggctgctgatgtgtcgcagtggatcctggagcgacatggcgagctggtccccgatggagcaggggcacaggatgacgaaggctctcgatttggatag

SEQ ID NO: 710735 - DNA, 718 bp, Homo sapiens
  misc_feature (101)..(101): n is a, c, g, or t
aaaattccagattgtgttttagttggttcagcccattatgaagccaagtgccactccccttctgctatagtctctggaagcctagcaacagtcggctctanatttgatagcactctgcaccataataatgtcctgctcatacactattctatctgtggtgctaaacagtctatgtgatagcataagagaacgtcagtaagttcggtagctgcccatcctgcactaatagcctcgttgaaagtcgtaccacgagtctaagctgtggcagtccatgtcccatgcgtttcgtatcactttagtgctgccacggtccccttccgtctatacatacgggttcatatttagaaccagagccgcatccattctcccattctccctggtgacctcgtgacgcgcatgtctctcgctcacatagtgcacgtaggcgctgtcattatgatcatagcagctttcgtatataacttcctcaagactgatttcatgcacatctgctttcttgaccacggtagtgttcttgttccccatagacacactgcagttcatgtatagcgtctctgtcatgttggtctcgctcctgcctatagtgattaatggtaaggtttcgcccaaagcttattctgcagttgatgatcatcgttgtcgcacaagcagcgcactgtctaaagatcgtattctgcgtcactcactttccgtctctgcgtagagcttccatttctta

SEQ ID NO: 710736 - DNA, 454 bp, Homo sapiens
gaattcaaacattcgattccaagagctacctaaattaaggtggctttaaaaaatatttaaattatcaatgatttaggaacgaggctggaagagtaatataaagatgtatatttacaatgccacattaggaaatgtagttccctactctgcactttggaaagacatgaatctgtccagagtcaatactatcatatggctgcttcctactcttccactggaaaaaccctctccacttggaaaattcattttatgcatgctcccactgttgatactctgcatctctcatatgagttaggcaaaatgaatctaataggttacttttgttttcaaaataaaccacccaaacaggttttttaaaactttcaaaaatggaacatttaacccttcacacaaacttccattactgagtacctagtctaatggcaagtacagtattaaggattattgcttttat

SEQ ID NO: 710737 - DNA, 632 bp, Homo sapiens
atcttctttatgcgatcgccatgcctgagccacatcgctgagacaccatgtgtgaaggtgaaggtctggagtcaacggatttggtcgtattgggcgcctggtcaccagggctgcttttaactctggtaaagtgtgatatatgtttgccatcaatgaccccttcattgaccatcaactacatgtgtttacatgttccaatatgattccaaccacaatggcaaaaaatttcccaatgtgacaacactgatcaaaggggcatgagaactgtggaatgctttgtcatcaatgtgaaatcccatcaccatcttcacagtgagctgagatccctccaaaatcaagtggtggctgattgcatggagcttgagtacgtctgtggagtccactggctgtacttcaccatcatggagaaggctgggtgctcatattgcagggtgagtgagccaaaatgggtcatcatctactgcccacatcatgctgattgcacaccaatgttacgtcatggagtgtgaaacagtgagaaggtatgacaaacaagcttcaatgatcaatcatgaaatgactccaagtaaacaacaacatgattaatcaatcactgtgcacaatgtcatccaatgaaaaattttgagaatagt

SEQ ID NO: 710738 - DNA, 912 bp, Homo sapiens
tggcgagggctcgagcctgggtagcatgcagctctggatgcctcggcccaccccttggtgggggcctggggcatcatcaaccaaaggaagcttggccaggatccacgagaccaacctgaagacagacagggcctgctgctctgaaccccttttcggcgttgaaaccgtgtgcgttgaaacattaaccaaaacgcagatgcatgtccatacacgccttgtgggacacatgctttgagccattccatgggtccctcgcaaggactttccagcccctgtgactataggccccctgtacatgttgcatttccaatttccaaaatgtgtccaaagccccccaaatattgggggacccctgaggtgcatgacccaagtcccgtttcaccatttgaaaaagtgcctaaacggaacgccagttttccagaaaccttggaatggcaaaccgcccaagacaagttttcgggacacgggttcggggttttccccggtggaccagaaggccattttgatggagccaaaggtttgtgggccgccccgtttctctagaccgcacggccagcattcgcacaaaaccgcgtgggcaaacaaccccttttttggtggccccaaataacacccgcaactcggctactgttaggcccaaaccgcagagtgcagggccccccaatcggggacgtttcgggccccaccaccatagtattttcccaccccagcccagccgatggaggagttactcgcctcctcacacccaggtggagcaccccccccagtagtgagcccacttggagagagccccccacgagtattattctcaaaaaaccaagcaggggaagtttttctccacgacaaatgtgtcacccgttttttccgtcaccacacaaaaaccctctaggcacgtttgggcagccgatttta

SEQ ID NO: 710739 - DNA, 103 bp, Homo sapiens
  misc_feature (101)..(101): n is a, c, g, or t
ttcggacaattgtcgaacgcgctgctgcgcgattgccgctatctttctgcgatcgggatgcacacccagggcatgacacaggagcaatcgcgcaaaatgtncg

SEQ ID NO: 710740 - DNA, 409 bp, Homo sapiens
cataaaaacttggtgttcaaaatgtacaattcactttaatacattattaatagtagataaatttggtgtaaaatgtatcggctgctgtccagcatgcttttcttctttttatccaaacatgaggccaggaggataattaacttgaggaatagacaacttacattcactacatatttaatcatgcttaaaatgtttgtatttactgccatgcaattgatatagtaaatcgactagaaaattagtatgccacttaattaagataaaaatgcttagttatttatgttagtatctagcttttaaagaactacatgtgtctttaaaagtatttattgtgcaaatgtactatagcagttcatcttcatgttccagccttactctgtgttaatactgcttcacaattctgaatggc

SEQ ID NO: 710741 - DNA, 305 bp, Homo sapiens
tcgagcccctacgcttagcctcctgactagctgggcttacaggtgacgccgccacatccagctaacttttgtatttttagtagagatggggtttcactgtgttggccaggctggtctcgaacgcctgacctcaagtgatccgcctgccttggcctcccaaagtgctgggattacacgtgtgagccaccgtacctggctccctccctctctctttccttcctttctttcctttctttcatttttcttttttttttctttttctttttttttcctgagacagtcttactctgttgcccaggctggag

SEQ ID NO: 710742 - DNA, 581 bp, Homo sapiens
  misc_feature (372)..(372): n is a, c, g, or t
  misc_feature (468)..(468): n is a, c, g, or t
  misc_feature (470)..(470): n is a, c, g, or t
gttccactatcctcaatatgtggctcccaaagtagcccagtgaatgaaatacactaaggaaagtagagaagggaggtgtttgggcacacatcccatttgcccacatgccattggttagaactcaatcacacagtcttacctatatgaaaaatatgctgaaaaatgtactgattgtatacccacttgtcagcagctccatactatgaaagcagacaggaaatttcagtggatagctagccatctctgccagagcagaaagattttgggttctcaccctctctctctttcaacacccgacacttgtttacttgttatagggatcacaaaatgaggcaagacttttgataaaaataaatgaaaagagcaaataanaaaacttttattttgtggaacttgcttgacgttttgaattaagcagagttctttgactggtttagctttaagatagtcagcttgttaatggctaanantttaaggattgatgaatgtaagtatttatacctatatccattttccctccaccctccccaatcaccaaccaggctgcgctcatagagtgaggcacattattcttcttgtgt

SEQ ID NO: 710743 - DNA, 383 bp, Homo sapiens
aagcttagtaggccagatgatcctacaactgcgacactatcatgcgcgctcgctacttgataagtcactcgacagtgctatattgtctgacgtacgatcgacatcgttggactatccagagtcattgaccagtaacctatcaagacctaggctcagcctgcgactacgatcctcggatccgccagttgtgcggaaagactaccggatacgacagactgataatgaggagccttggatactactacgacgtatagataccagtcagtgataagacaacgagctgcgacgttagtagcttgcatgtctgcctaagtgtctcattaaggcaccggtacggcaccgcagtatcgacgatatatggagtacaggacttaatcacggta

SEQ ID NO: 710744 - DNA, 194 bp, Homo sapiens
accggccagtagaaatgggtggagatgtctgttcttccctgttcgccgtcatttatgcaggtcacgccgcatcgtggcgatcttcccgctcattaacatctatgtcgacaaccagaccgccaagcttctgctctgcgcctggatcgtcgccttcttcccgatcctgtccaacacgactgcttggattacaagga

SEQ ID NO: 710745 - DNA, 738 bp, Homo sapiens
  misc_feature (480)..(480): n is a, c, g, or t
ttacaaaacccttttttctcacaccagtgagttttcccctcacagggatgggtccaaaaaaaaccaaaaactgcccttgaaacccccactggtgtattcttcttccgcgccccaaactaatatctccagtccccctctattgaaattcgcaaattccatgggaacacccaatctgggccacacaccgtacgcatctgaattctagtctattctagagaaggtacacacccgcgaattttctataagacagctaacaatattttggtagcacccactcattcctgtgcattccgacaatacactctccgtggtaagttgacacaaataatcattgagttacccccccaacactagttgtccctgactcatctgctcctttcttctaccacacaaattccgattttacagacaaaaatcgcaccgagataagacaacacatcccccggtgatggacaataggtaacaccctactaatactgncccacgcgtataccatttttcatatcaccccttgcacctctatatacactacgcctgtatccaccttatgctgtttaattttccagtagaacttcctgcgcccccacaatattccttcttcataaacccccccaatatttccacgtttctcctgaagacccccacgatacctgtgatacattcaatccacgcctctcaaaaaaagttcttcgtgcgatcaccacgccacataataaaaacctctttcaacaaaacaca

SEQ ID NO: 710746 - DNA, 900 bp, Homo sapiens
  misc_feature (457)..(457): n is a, c, g, or t
  misc_feature (897)..(898): n is a, c, g, or t
tatcgaatgcgaagcattttggagcgccttagttctacacagcaggctgcaagattgctcctatgatgtgtctctaaatacatctgtgttcacatagagcaagaaaggggggttctgagccagtaaggccccactgggaaatgtctcacaggattgcactctacagctctggttgttcattgtttcattttctccaccagcgtctccaagtcagagaaaacagttttgaattgatacagcaagttgagatcttaatcttctggtcttacaagggcatgcaacggctttacccaggggcacctcaccagggagaccagaaaagtaccaaactgtacagtctttgcttttcacacaataagtatacgaacggtactaagtgtacaaaatgggcaaaccagtacacaagatatatcttcttcccccaggttcttccccagaatcaattgcagatactaantttcttattcattcttccagagatgttctatacataacaaagtacaagcaaataacatataacttcccccttctttacaagtggccattgcagagcatgtcaccattagcttattttgcccttattacaattcagtccgttaaaaaacgcaatttgctttcatgaatgtgttagtactccactgcattgatggtccccactgtttttaacatccctcagtggtgctattcaggtgtcccaggcatcctctcccagggactgcaagactacctcacaatgtgtccttaagggctgagctctaggatgatcctaagaaatgggaagatatcattagccaaactacaggcccagggcatacagatccaaactggaaagagagcaatcgcgaacaccgcacgaataaaaccaccagacaaactctctccttccacgtttctcgnngt

SEQ ID NO: 710747 - DNA, 145 bp, Homo sapiens
tctcaatatgttcataatttcctgctgcttctcccatcgttagacatctgccagtaggcctgctgagagaggcctcagcccactcatacctagagacggtgcttgggaaggtcaacacacccaagactttgggagtttgtgtctg

SEQ ID NO: 710748 - DNA, 279 bp, Homo sapiens
atatagagtatactagagtagtcaaattcatagagacagaaagtggataggtggttgccagggctgtgggagagggaagaacaggaagttattgtttaatgggtaaaagtttcagttttagaaaatgataaatgttctggaaatggataatggtgatggttgcaaaacaatgtaaacttggagcaaacttaatgctactgaactgtacacttgaaaatggttaaaatggtacattttatgccattgtgtacttggtttaaatcatgcttaaccatgatt

SEQ ID NO: 710749 - DNA, 555 bp, Homo sapiens
  misc_feature (352)..(352): n is a, c, g, or t
aagttggcaaagcaatttcttcccttgggccttaaaaaagtaacccctataaaggtttcacgcggtgggttcttattgattcgctgtgtcatcacctcagctccactgttgcccaactttgtcgcctgcataatgtatgatggaggcttggatgggaatatgctgattttgttttgcccttaaaggcttctcctcctggagggctgcctagggccccttgcttgatttttcttgagagaagaggagagagagagagacttagccctaggagtgtgggtatgtgtgggtgtgtgggggggggtgtgggggtatgtgtgtaccgggaaatgtgggcggagcgagagcaaaaggnctgcggcctgatgcctggtggaaaaagacccgcttttcctttttggtccgttgggcttcctcctatatcagccccgcggccctacttcgccttttcaggattttgggtgggggcctgggggggggggccgtttttcttaaaagcctttccgttaattttcccggggttcctccccggggacttaaagcaaagccctttttgta

SEQ ID NO: 710750 - DNA, 201 bp, Homo sapiens
ccagcctgggtatatagtgagacaccatctctataaaaaatacaattacctgagtgaggtggtgcatacctgtggtcctagccactcgggagactgagacagaaagatcatttgaacctaggagttagaggctgcagtgagctagaattgcaccactgcattgcaccttggacaacagagtaagactccgtcaccaaaaaa

SEQ ID NO: 710751 - DNA, 192 bp, Homo sapiens
cgcatctacagggtcactgtgtcctcacctcagtcagggctaatactcacctctacctctatatgtggcgtgtcacatgatacactccgaggtagtcatacatccatatagcacatatctataatacatcatatgtgtcaagcacagtcctattgcacacagaatacagcagtgaattaaacagggaaaaat

SEQ ID NO: 710752 - DNA, 208 bp, Homo sapiens
  misc_feature (119)..(119): n is a, c, g, or t
  misc_feature (122)..(122): n is a, c, g, or t
  misc_feature (151)..(151): n is a, c, g, or t
  misc_feature (193)..(193): n is a, c, g, or t
  misc_feature (200)..(200): n is a, c, g, or t
tgcttagcacctcacggaactcggggtcgtcgtggcttgtagcggcagccgaaacacacggcactcatgacgttgccacggccacgacggtcagcggcctcgggtcgaggaaaggcgcncgntcctgccgcgcaccagcagcgccacccantcgcgcgcctcgctcagcacgtggccctcgaggacttggcgntgcgcgntggcgcgt

SEQ ID NO: 710753 - DNA, 523 bp, Homo sapiens
gttgcctggaatgcctccaggcatacctccattaatgccagagtgttcctcctctgatgccaggaatgccaacagtatattgccagggtatggcacctggattgcatcatcagagaaaatacagccagtcattttgcggtgaaaacataatgatgccactgggtggaatgatgccacctggaccaggaataccagctctgatgcctggaatgccaccagagtatgcccccatctgttccacgtcctggaattcctccaatgactcaagcacaggctgtttcagcgccaggtattcttaatagaccatctgcaccaacagcaactgtacctgccccacagtctccagttactaagcctctattccccagtgctggacacatggggacacctgtcacaagctcaaatacagcttcatccaattcagaaagtctgtctgcatcttctaaagctctgtgtcctagcacagcacaagctcaggcagctgtcccaggacctgtaggtacagatttcaaagccttaaata

SEQ ID NO: 710754 - DNA, 266 bp, Homo sapiens
tccgttccggagcagtgtggagcgcgtgcccgcgatagtgacttggccctggattctatgagctgcgtcgatcacccctaagtctcactgcttgatctcccctctagagttcacgaggatcctggagggcttcacatctcggtgcatgatctgatgtttctctcgaaggtacgccaagccccggtgaaccgcgatgctgagttaccccaggatctcctctgtaatcctcttggcctctttcagcacctagtccaggcagccgccat

SEQ ID NO: 710755 - DNA, 192 bp, Homo sapiens
attttcccgaagcctcctcagcgatgtgactcaagttaaacctacttctccgtttatcaattacccagagcgacagtggttcacggccgggtaatcccagcactttgggaggcatgaggcgggcggtatgatgagttcagggagttccaggaccatgcctgtaccaaatactggtgatagaccctggtctct

SEQ ID NO: 710756 - DNA, 503 bp, Homo sapiens
acacttctttcctggaatggcagccacgagagagggaattgtatatggtcacggagaatggcaggcaagtcaccgaatatttcctatgatggtgtggtagcatgctcagagctgctgggggtgggaggtggatgctgtgagcaacgtctcagactctcagcatctcttagaagcaggagagtgagcttgatagttctctgggactcaaaggaaaaaagctttttctaggaagctaaatcaggagaagccatactcatgtgagaagtacgcccatctcatctgtggatgagaaaccagatggccaccactgaattactttcctgaaaactgaaacatccccatggaggaaaggagggagggggaggctcataagactctggaagtaaacaaaacctattagcctggggaagctcagaaagctaccaagctcacagggcttttccccaaggttgtatgagcagtgagtggtatgactagggagaaaagacctctttggtcgacgc

SEQ ID NO: 710757 - DNA, 509 bp, Homo sapiens
gtgatctagaggatccctggccagggctctctaccggatgcgtatcattgcttcttctcctccttcaagggtgcaaccctccggcgaattttcctcatcctcggcggccacggggccctctctcctttgattggttcagcatatggatctctctccagcgggacttcttaaagcgactccttcaacggggtcacgtgtcctttcagcagtatctgctcccgtatggacggctctaactgccgctggagaagtgcttgagggcggctcgagaacccatcgggcttcttcttcgggggggcggcgacagcacagagagaccattctaactctcctataggcggcgatgaacgtggcgggcggccggccagatcctgggactcttcttcaaggtatcggagagaatggtttcaggtgatacgggtccgtattaagtttctttggctcggtgtccaatctcgggattggaccctctagctccctttcagctttcggtatctcatggttaactt

SEQ ID NO: 710758 - DNA, 355 bp, Homo sapiens
gaggatcccccatcggatgccccgtgagcccagctgtctctctaccatacaatagaagaatatattataatctttgaagaagaagaagtggattggatcagtgtgcctgtttccatagttcgcagatagtgatcctgccaatgttgttcatgactttaacatgaaacttgcagcctattttgatctttgcctggttgagtgctatttgatccctctgaatacttccattgttttgccacccagtaaagcttctggagttgcttattaccatctaggctggcaactatttgcctcagtcctctctgattcatgagcacatagttcttactgatcgcattgaatactcttatcacct

SEQ ID NO: 710759 - DNA, 575 bp, Homo sapiens
gagcagatctctcaggaggagtgtatcagtcaggctctgcgacaggagactgcagacaaagagcagaatctcctgcagttacgcagcgctatgaaggagctctcagtgcagaaccaggagctgatggagcataatctaaccctgcaggagcgtcttcagggcgaggagccatccagtggctgtggtttgctgcctgccggagctcgactcacccagaggctgcatggagagatggcggcctgtctgtgtgacttgcgctccctatgcaacgtcctcacgcagagggctcagggccccgacccaaaacctctccatgctgctcggcattgcatcagctcctcctccagtagcagagcagtgggacgactggctcagtcctgaaggcctgcagaagaagctgaatgaagcccaacagctccgtcgagacgtggaggaattaagaactacagtctcagacagatacgctcaggatatgggagaaaactgcatcactcaatgagaatgtgttcaacgagggtaaatccacatcacacgtgccttcaaaaaacactacagaaacaaacctcgaaaaaaaa

SEQ ID NO: 710760 - DNA, 299 bp, Homo sapiens
  misc_feature (182)..(182): n is a, c, g, or t
aatataattgccttttttctcacctgcacttagaggaaatttgaaccagttgggaaaaaacaatttttggttcaattctaagaaacacttgcagctctagtaatcacttgagtcctcctgtttttcctgtaccgggtcatggtaaattttgggtgttttggttgttttcctaaaaaacaagntaaaacctggcgatttctgcaggctgtgtaagcatgtttacctgttggcttgccttgtgtgtctgttaaatgaatgtcaaatgtaaatgctaaaataaatcgacagtgtctcagaaa

SEQ ID NO: 710761 - DNA, 129 bp, Homo sapiens
tgtgggtagcagcaactgtgtacatccgagatgaagtggacctgatgctgtatttgggtatttttctcctctacctcctaaaaaaaaataccataagaagaatctagaatgtacgcataagcaaatcaa

SEQ ID NO: 710762 - DNA, 285 bp, Homo sapiens
gaggaagaatggactgtgtgttaaggggaagggcagcagggactaagtgaccagatggtggactgtagctctggggactggcacaggtgcagcaatggactggctccctctcactgtgaaacgaaatatgccatccctgcaagagcctacacagcacttcttgatacctgggcagtcagtatctatcaagcagcggttagggggatacaacatagggcaccggatcatgatactggggcaggagccaggctaaactggagacttggaccatatgactttgctctt

SEQ ID NO: 710763 - DNA, 105 bp, Homo sapiens
tctcagggtcttcccagctactcacggaggcgacgtgagagtatcctaacctggagatcgaggctgagtaagccaagattgcagcactgtatctccagcctgtgt

SEQ ID NO: 710764 - DNA, 179 bp, Homo sapiens
tgcgagatgaggcaggaggctcacttgagctcagaagtcaataccagcctcatctctactaaataacaaaatatggctcacacctgtaatcccagcacttgggagcccaaggcagggcggatcacgaggttaggagatcgagaccatcctggctaatagggtgaaaccccatctctact

SEQ ID NO: 710765 - DNA, 159 bp, Homo sapiens
  misc_feature (9)..(9): n is a, c, g, or t
tgctgacgntgtggacttgaccacttatgccaaatgatattgatactgacttctgttgggagctctccaaagaaactggttggttttaagaaaatagtttcaagaagttcaactatatttcttttagaatattatgtataggttttactcctgaattag

SEQ ID NO: 710766 - DNA, 559 bp, Homo sapiens
ggggggctgagcgcagaagcggctcgaggctggaagaggatcctgggcgccgccaagtctttagcaccagttggtgtacggatgttgagacctacttcacagtatgttctggtggacaatcacaatgcggaatccaaggagggtctgtcctgttcgggctgctgctcgtcctggctggtcttctgccattcaggtcatagcctgcagtgctacaatggtcctaacccaattggctgactgcaaaacagccgtcaattggttcatctggatttggatggcgtggtctcattaccaaagctggtgttacaacgttgttttcacactgtgttggcacagttgtgagcattgcaattttcaacgacggtcaacaacccggttgaggggaaaaatggagctaacgtactactgctgcaagaagggacctgtgtaactttaacgaacagtttgaaaatggtgggacatccttatcagagaaaccagttcttctggctggtgactccatttctgggcagcaagcttggagccttcatccctaagtcaacaccaggagagcttctcc

SEQ ID NO: 710767 - DNA, 191 bp, Homo sapiens
taagagtcatagtctggaaaacttgtgccttgtatcgtgtccccatgggtctcccactgcagcctcgagtgcccgggtcccacctggctccccctgctggatatctagtgtttttttatgtctctgttttattctcaggaaaatttaattctaggagtgaacattttcttattcatctttagaaacagttc

SEQ ID NO: 710768 - DNA, 466 bp, Homo sapiens
gacagtccctgctgttgactatatgttgggtgtacgtaatgactgggaatgtctagtgctgtccatgcactacactttactttgttctttatgacatgttctatatgattctgattttaaagatgaaaaaacaaacacacacaagttaactgtacagatgagctggtggcacaatcagcgggtcagcgctagaatcaaacctcagcagctaggttggaacactcagtgactgaataaccttggcaagttacttgaccttcctgtgcctcagttttcttacccgttaagtagggctgatattgataactacctcgtaaagtttctgtgaagactaaaagagatatgtaccatgttcgaaatagtgcctcgaatgtggtaagtcctctgtgtatgaaagactaaagctggccttcatcttctacagattagttgaaaaatgcaccaaatagtcaggagcacggaaccg

SEQ ID NO: 710769 - DNA, 110 bp, Homo sapiens
ccaggatacacccactagtgcctcaggtgcccggccctgtgacttcagccatggccacaggcgttagctgtttaacgggaaaggttgaaaggatttttgacaaaaaggga

SEQ ID NO: 710770 - DNA, 425 bp, Homo sapiens
agcacgcggggcatcgcgtcagtccagtgattccagttacctcctggagagcagcgagttgaccccagcgggtctgagatgtccaagactgcccgcgagaaagcagtgtcccgcagacaggcgcgggaatggtgacagagacgtcccgcaggcggaggtaggccggggaggcgggagacggccccggcacagacctgaggaggccggggaaggcgcgataggcggcggccaggagagagcccggttgccggaggccacgaaagatctcggagtgacagcgagagtcgcacaacatagcaggaacggacgacaatcggccccaaaagagacccgaggaaatgagaaccacagaacaagacaagagaacaaaaagaacagaaatgacaatgaaaaagaccataagataagaaagagagtcaatcaaa

SEQ ID NO: 710771 - DNA, 520 bp, Homo sapiens
tggaaggtaacaggggcagaggtaggcagttctccatccaccgggaatcctggctagaaacacccagtgaagggaacaacaattctcagaagagaagcttagccccagggcaacggcccaagggctgggcaacgatggacagggttacagagccctggtatagtgaagaaggtgcgggaagggaagtcaggaggccgggggggtagtctaggctctctattaattggaaaggactacttatggtatgattccaactttacaacattcgggagaaggcaaaactagggagacagcgaaaagaccaggggtggccagaggttagagggaggcatgattaggtgaagcagggaggatttccagggcaaggaaactactcggtatgatactatgatgccatcaggcattggtagaaacccacagaaggtgtgacaccaagagtgagccctaaggtgacctagggatcggggtgatactgatgtatcagcgtaggtccgtggagtagaacaaatgccccggtctg

SEQ ID NO: 710772 - DNA, 769 bp, Homo sapiens
cacaccgtgttagggggggcactacagactctatttttccccgtgttgtgcgccaccgcgggactcgtgcgccacagccagtgttcgtatttggggtgcccccgccgcgccccgacacgtttgttgtagtcccacagcgagtctgagaaataatgtggggcccccctcattaaccccttctgccaccccctttgttgtacaatcacagccacgggagaccgccctcgtgttgtgtatctctcccccccgccctctctggtgcccctgcgccacacatagtttgtgggtggttgttgtcccccgcaccagctgcagggtggccacccccacacccaccctttgttcgctctttccaccaacaggggggtctcgcagaactatattttttcagggggtgtctcacaacttctgggttattccccccagcgcccttctcccccattttttttcataaccgcggaaacaccacaacaaatttttgttatatagaccaccacctcccccccctccacaatctgttgtctggggaaacaaacacatatgagagcaactcttctccactacgacacttgtaccacaaccattttttgtgttgacacagacaccacttttaacccaccccgtttttatgatatctccgccgccagcaactacccccctttcctgcccactaacacccccctttttaattttctcccccccccccccccttttttttaaaaattttccaaaacccctccattttcccccattcccccccaaaacctta

SEQ ID NO: 710773 - DNA, 156 bp, Homo sapiens
  misc_feature (1)..(1): n is a, c, g, or t
ncctaggtgtcacagatattgagccctggactgcgaccacgggttctggagtccattcaattcccagccttggttattcctggctgtgtaacctcaaggaaattacctaaacactctgagttttgattctatcatcaataaaatgaaggaaatgct

SEQ ID NO: 710774 - DNA, 486 bp, Homo sapiens
ggagggtggggggccagaccgggacccgatgaaggggggttagccagatcaagaagaccacctcccaaaagcaccgagacttcggtggcagagcccacgggggagaagccagggggagccggctgggaatggtgaagtcctgggcaagaagctggaggacaggggctccgacaaggcctatgttgtccttgggcagtttctagtgctacagaaagatgaagacctcttccgggaatgcctgaaagaaacttgtggcgccaacgccaagcagtcccgggactgcttcggatgcctacgagagtgatgcgacccctacttgtgatgctctctgggaagctctcaatccccagccctcatccagagtttgcagccgagtcgggactcctcccctgtcctctacgcaggaaaagattgctattgtcgtactcccctccgacgtactccggggtcttttgggagttttctcccctaaccatttcacctttt

SEQ ID NO: 710775 - DNA, 884 bp, Homo sapiens
  misc_feature (884)..(884): n is a, c, g, or t
gctcacacctgtaatcccagcactttgggaggccgaggcggttggatcacctgaggtcagaagttcgagatcagcctgaccgacatagtggaaccctgtctttactaaaaatacaaaaattagctgggcatggtggcggcacctgtaatgccagctcctccagaggctgaggcaggagaattgcttgaacccagtaggtggaggttgcagtgagccaaagtggcgccatgtgcactccagcctgggcaatgagtgaaattctgtctcaaataacacaataacaactaaaactatttgtgaccttgtgtttcatttagtttggaacagactatttgcaaaagtaccagagttactcttcagccaattacttcacaactttagattgttaccaagagtgacacggagatcttgttttggcagaatcattattagatgccaacaatgggagacccaacgtgttgatttcttgtaacctatttgtggggaacaaggacctaatgacctaatatgcaatttctgcctcgtgttcttttttctcctaacacacagcatgggtggaacatttcagaaacctcaggcaggcctatggttctaatgtgagactacctttcattaaaaaaaggtgaagggtggagccctggtagttggtaaactttttatacaaattcgcctggaagtgaaaaatttgtataactgattaggtggtacgtatatagggtaagttggtggatgtcaaagaaatctaaagggtaggcgaggaagataactggtagggggtcctaaaagagaaattataggatagggggtgtgtaacatttaagaaaaaaaagggtggcagatatggggagaagggagtagatgtatacagtttgtttttatatggn

SEQ ID NO: 710776 - DNA, 404 bp, Homo sapiens
ttcggcacgagaattcctcacatgaatacagaatacttgtgctactgctgatgatcaacactttatacagtgcctggtataccacaggtctctgcattaacagcaagatggcaaagccagcccacagcagctatgtccttcagcagctaaacaaccaaagagagtggggttttctctgtgactgctgtattgcaattgatgacatttactttcaagcacacaaggcagttctagctggctgtaggtcctatttggctgttttcctggaccctacagcctaagtacgcccactgattccaggcccatgaccttagtgcagatgttttgtctcatttgcagttatgtatttagggccttatgacagctcccccagttttgagccgtttaaggggcatgaacaccac

SEQ ID NO: 710777 - DNA, 584 bp, Homo sapiens
ctgtttgagcctgctgaggggcagtgatgcaatcatagctcactatagcctcaatcacctgagctcaagcgaaccactctcacctcagtctctgcagtagctgggacctcagatgtgcaccaccacgcccagctaattttattttttcatagaaatggagcctcacgatgttgcccaggctggtctcaaactcctaggctcaggtgattctcctgcctcagccttccaaaatgttgggattacaggtgtgagccaccgcgcccggccgcttgtatttgttaaggaacaaaagatgtgaagctcttattcttgtgttactgtttagtggtgctctgctctgccactggagtatggtaacatcttcatatcttatccagacttgttaactgtacacctctcatgcttaataacagtttagctttctgctcatattgctggtattttgaacacaagatacttcttggacgcttgagttgtggttttccatttctcattggagatgatgagagtttgagcagcattatggaagaataatgttgtaacaactttctcctggaaatcacttcgagttctaaaccatcaca

SEQ ID NO: 710778 - DNA, 810 bp, Homo sapiens
gctggctctgggccttgaacattccgaaactgtcaagatgggcaacaggttgattgtacacaggactatgaactctgctccggaaaccaggtgcgtggctatcccactctctctctggttccgagcatgggaaagaaaggtggatcagtacaagggaaagcgggattatgcgatcgtcacttgaagggagtaccgtggagtcgcacgctgcagcgcagctagagacatggacgcgacggaagaccacgccctcagaggccccggtgctgggaggctgagcccgatggttgacaatgggccactgtgtaggcaaacgtcacttgaacataatcgttcgatgagcaccagttcagggaaggaaataacacttcaatccaaggtttgtatagcctccatggtggtcggtacatggtagcgacattctggctcctactatgaggaggaactctctacatacaaggaattgccctgagtctaggcggggggtcaagatcgccgaagtagattggcactgctgaaccgtgaatatctgcgagcaagtattcggtacgaggcctaccccaagtaattgcttttgcgaggaggggaatgaaagtcagtgagcacagtggaggcagagaccttgactcgttacaaccgtttgtcctgagcccaagcgaaagacgaactttaggaacaccagttggaggtccactctcctgccagtcccgacctgcgttaggagtcagtcccacagaggcactgggttcccagtggttgggtgtcagaaagcagaacattctaggcgtgaggaatcttcttgagtgtgtg

SEQ ID NO: 710779 - DNA, 307 bp, Homo sapiens
tcggataaggcgagacttctagaattaaatcactctcctggataggcggtactgaggaggctgctgagtctgtgtgcaccattcgcccggccccccagctgctggaacctggtgaatggcactgtggtgccacttggcgagatgagaggctacgcccccttcagcccggacgagaactccctggttctgtttgaaggggacgaggtgtattccaccatccggaagcaggaatacaatgggaagatccctcggttccgccgcatccggggcgagagtgagctgtacaccagtgatactgtcatgcaga

SEQ ID NO: 710780 - DNA, 1136 bp, Homo sapiens
cgctacaacaatgtcttccacaactcaaactcccaccgcgctcacacaaccggtccactcctgccttttcactcacacagctcccgactgcttcttgcagaggctgagagtccccccccccccacctttttttttccattttagattgtaacaaacctagtagttaatgtccactcaatgggtcgggaattatctcataatatttatatccagtgtactctttggagtgtatagaagtagttgtgcaaactcatggttcacctgtggggctaaagtgaccgagaatgctgccacgaggacctgagacactgcatgaaagggtgctatcttgggcactttcaacatgctcctgttgcgaaggtagctcgtgatggaagttattctttaatttcccatggtcctacaaaaggtcgtcgggcacactctggtatccctgaaatgtggtcctactaagacctgggatttcgacttggttttacccataggatggtcatcacagtagtgcgcataatcatatccctacagagaggtagcacaggtttagagccgaattcgcttaccagaagttgtgagaagaccaatggtcctcagtgagcgcatggacgcatccacgggacatctgccagagcacgcgctacgcagggagagcaaattcacacaaacactggtcaatttcaactgtcacacaaaattctctcttaccatatacaccgggatggtccactccgccagttgcactgtaacactttatcgcaacaagacgaaaactgcccaacgaaaatgttgaaccacgggcaatttctagcaggacgatgactatcatatgggaggggattcactatatcaccgtcggtgctgtagaccaacggcgacatacattcgggtcgcgcaaacaaaaacagacgggagcacaaaaacacagcgattagttagcagaagcggataataacactgtccccccccctggggaaatgaaatcaacggcgtacaaaaagcacttgggcaccaccacttggacatgttacgcccacgatttttcttaaaacaagaggacacccctgctgagcgcaccaagtatttttcaactcttggtgcaacaacacaaggggttctagacgaaagttaaccgtgaaact

SEQ ID NO: 710781 - DNA, 654 bp, Homo sapiens
  misc_feature (26)..(26): n is a, c, g, or t
  misc_feature (83)..(83): n is a, c, g, or t
  misc_feature (108)..(108): n is a, c, g, or t
  misc_feature (129)..(129): n is a, c, g, or t
  misc_feature (144)..(144): n is a, c, g, or t
  misc_feature (163)..(163): n is a, c, g, or t
  misc_feature (165)..(165): n is a, c, g, or t
  misc_feature (167)..(167): n is a, c, g, or t
  misc_feature (186)..(188): n is a, c, g, or t
  misc_feature (206)..(206): n is a, c, g, or t
  misc_feature (212)..(212): n is a, c, g, or t
  misc_feature (215)..(215): n is a, c, g, or t
  misc_feature (235)..(235): n is a, c, g, or t
  misc_feature (303)..(304): n is a, c, g, or t
  misc_feature (308)..(308): n is a, c, g, or t
  misc_feature (310)..(310): n is a, c, g, or t
  misc_feature (315)..(315): n is a, c, g, or t
  misc_feature (318)..(318): n is a, c, g, or t
  misc_feature (327)..(327): n is a, c, g, or t
  misc_feature (346)..(346): n is a, c, g, or t
  misc_feature (374)..(374): n is a, c, g, or t
  misc_feature (392)..(392): n is a, c, g, or t
  misc_feature (401)..(401): n is a, c, g, or t
  misc_feature (403)..(403): n is a, c, g, or t
  misc_feature (406)..(409): n is a, c, g, or t
  misc_feature (423)..(423): n is a, c, g, or t
  misc_feature (451)..(451): n is a, c, g, or t
  misc_feature (465)..(465): n is a, c, g, or t
  misc_feature (477)..(477): n is a, c, g, or t
  misc_feature (483)..(484): n is a, c, g, or t
  misc_feature (491)..(491): n is a, c, g, or t
  misc_feature (533)..(533): n is a, c, g, or t
  misc_feature (654)..(654): n is a, c, g, or t
gagacccactaatgatgggcccatcnctccagtgccgcaccattccctcccgacctggcacaagagattctaggagccacggncctagagtatacagaacagcccggncaaacctcgtaccacgacggngcaagcgaagagccnggcctccctccctgcctgncntnggcaccggccacatcactnnntgcgtatcttcttcttcnccggcnccnggacattggccgcctttgcncgggcactggtcaggaggccagaggtgtcctccttctctggcgagcccctctctggccacggcccctnngctnanctcgnagnagggcccgntcagctgatgactggctgnacaccagcctctgcacgcgcctcggggncggcccctacacccctcntccagctcntntgnnnntccatgcccgggcncgggggctccttctcacctttccctctntactgcagcaaccngagaaagaagcnactgcnngctgcgncttcttctgccgcctccctacaagcaggcgcatgcaggcctnctctgggatctcatcttcagggaaaatgcctcctgccaagtcctgcagcttccggatcactctgtagagacgctttctgtactgagaaggggtgcactggcggctggccatttcaaacagn

SEQ ID NO: 710782 - DNA, 164 bp, Homo sapiens
ccacgaataagcaggcagaaaaagaagataagaaaaagaaaagaaaagagaagcaagtacacaacaaataagaagacgaatatcaataacagaacacagaagaaagaaaagaaataataaagcgacaaacatgaaagaaacaggaaaaagataaaacgataaaa

SEQ ID NO: 710783 - DNA, 664 bp, Homo sapiens
  misc_feature (21)..(21): n is a, c, g, or t
  misc_feature (37)..(37): n is a, c, g, or t
  misc_feature (350)..(350): n is a, c, g, or t
ttgcattaacttgatgagacnttgttggcatttggancatctagattggcaatttcattgataaaaacgctgtgcaatggctgtatagaaacttctgctacaccactgccttctcctggttcatccttaaaggtgactttgactctgtgcacagccattggcgtggtagcacatcttcggccaaaatggttgttaagctgtctcatagtctgctgaatgagaagatcccgatcgcgatcgacctctagtgataaatctcttgattgctggtttctcagtttttccatctctctacggaactttgattcttttacctcaaaaccacccaattcagttaaaatcgatccagntctgcaccaacatcttccatgaatactctgccgaacagttctaaagacaggcgccagcgtcccagcagcatgtcatgggagataaccatgcccatgaaactgcactgaggcctgaaagatgtaagggggggcccttcactttccgtgagtcctatctctgctagtaaactgcttttcaactgggcagcaacatcaggagcggatggacctggctttgaactgtcagcttcttcggccagcaggctctgttcttccccttctttcttctgccggttttgcatgttcattacattttttagattggcagcataaga

SEQ ID NO: 710784 - DNA, 382 bp, Homo sapiens
  misc_feature (145)..(145): n is a, c, g, or t
ggatcccggaaattgtgtggtgttatgatttttggaagctttatctgtttgcagcctttatccgttcctgagtggaagtgggatcagatatctatggacctcatcgttggtttactgagaacgaggagaggtcatgactctattngagtgatagtagacaggcttacgaagtaggcgcactccttgcctgtgaggactacttatactgtggataagctcgcaagactctatattcaggagattgtatgacttcatagcgtacctcattacatcatctcagatcgagatttgattttcaccttgagattttagaggaggttacattcagcttagggcactcagttggattattgcataacaccacacaattccgggtaccgag

SEQ ID NO: 710785 - DNA, 604 bp, Homo sapiens
acaaatcaaggtatggacgagatatgttctcgtagacaatcttatcgagttcacactatgacaatatccaataatataaacaaagatgacatattctcaacaattattatatgcatgctgcagtatcactcaggcgagcatacgttctccacgttctacattcgagtagttgtgtgagtaccgtgtgcattcctgcaacgtcataggaacaagatcaatcacaatggggattcttaattcatacgctcgttcacgttgggcaaagcaaagttcatacgacgacgcatcgctgggatcttgacactgcgccagtgacaacgacacttcttctttataccttgacatatattgcgttgcttcagcttatacccgtccataatactgtcgtacacttacagtgctcgatccaagttttaccagaggttcacctctctcgcgtgttccctaacccattccagtccacggacattcacacacatcatcgcgccatctgtcattaacacactggtggcacagacagctccatacgtggcatataacacattcagcacgtcagcatacatcggggtcaccctttgactcgccctctgtctacatctactcg

SEQ ID NO: 710786 - DNA, 222 bp, Homo sapiens
gacgcaggaagaagtcagagctctatgtataccatagactctaggatctttggtttgttttttaattttaagttccaggcacatgtggaggatgtgcaggcttgtcacataggtagacatgtgctgtgatgtttggctgcacttatcaacctatcgcgtaggtatgaagcccagcatgcattagccatttttcctgatgctattgaaacttctaaaactagg

SEQ ID NO: 710787 - DNA, 272 bp, Homo sapiens
ggtcatactagaaatttatctttggatattgcaaagctaaaggaacaagtatttcaagcctctcagatacatctgacactaatgccaggaactgaagtgcttgaaggagctacaggcggattagcagctattaacctgctaaaatggatcaagacacttggaggctctgtgatttcaatgattgtgcttttaatctgtgttgtttgtctttatatagtctgtagatgcggaagccacctctggagagaaagccaccactgagagcaagcaat

SEQ ID NO: 710788 - DNA, 750 bp, Homo sapiens
  misc_feature (228)..(228): n is a, c, g, or t
taggatctgagctttacaaagtgttctgggtgagggcaaattacgagaaccaagtggaaacgtacggggggccattataagtcctgggtttttaaggttcgtgccgatccggcagctgcaagaggggctcctgggactccgagcaggccctaatccgtgcttggaccacacttcccagcagccttcacgccgcggacgggtcctttgctgggggaagggggattcctntcgaatgcaggctggtcggtgtgcagaggacgtggagctagtcacgagtcagtactgcacggcagtgctattgacttggatgacgggaacgtcctctaagtaggtgcctaggaatgctgtgcgtgcaggtgcgcatgagagatcggcgtctactatagtcgaggtctcgcgtaaggaactaacagggcaagacatgcatcatttgctccaaagtgtgcacagtcaaatcctggggagaatcatgataaccctgatcactgagcagctactgaagcagactctggatgagctgaaatgcacacgcttcagcatcagtctgcctttgcctgatcatgcagacatctccaactgtgggaactctttccagcttgtgtctgaaggtgcttcctggaggggcctgccccactgttcctgtgctgagttccaggacagcctcaacttcagctaccatccctcaggcctgagcctgcacctcagaccacccagtcggggaaactcccccaaggagcaagccttctccca

SEQ ID NO: 710789 - DNA, 361 bp, Homo sapiens
agccgacaggcgtactgaccaggtactgacccattggaggagggccatggcgcccaccagggagggggccctggttggtcttttttgggggttgcatccaccggggtgggggaacatcgaggtctgagctcatgcgatttaccaccatgcccacctgtcgggctgggtaatgggtgggggaagctgtgggggccacctccgggcccaccaggaccacctccatgcatgccttggtagggccgactctctgaagggccaaaattcatccagggtgggcggctttgggtggaaaacatgagaaacggtggaggtgggttgttggcgggagcagcacgacaaggtgccctggccaggggtgagg

SEQ ID NO: 710790 - DNA, 386 bp, Homo sapiens
gagaacgctccgccgccgctgctgtcgcgacccggactgcgcgccagcacccccctgccgacagctccgtcactatggaggatatgaacgagtacagcattatagaggaattcgcatagggattcaggatcaacgcgagcgagaatcagcaggatgacggttaaacgtttattggaggcttgagctgtgatacacagccaaaagatctgacacgagtacttgtctcgagttggggaaggcgaatactgcacaatgtcaacagatcccgtcactgggagagcaagaggagttggatttgcgcttttcaaagatgctgctaatgatgatacaggttatggaactgacagaacacaaactggatggccttgatagtcccgggccgcttt

SEQ ID NO: 710791 - DNA, 322 bp, Homo sapiens
  misc_feature (165)..(165): n is a, c, g, or t
tatacacatctgtgtgaggcctcaaaagattgtgcactttcgaggctgaggattacaggcacccactaccatgccagttaattttttgtatttttagtacagacggggttcaccatgctggccagctggtctggaactcttgacctcagctgataccacctcggnctcccaaaagtgctgggattacaggcatgagccacagcgcccggggcgcaatgtacgtatttctaataatagtctgtggtcattgctgtcattcctattttgaggtgattaagtgccctcctgggcctgactcgaacaagatcacggtggtatagct

SEQ ID NO: 710792 - DNA, 338 bp, Homo sapiens
tcccggatgaggaacgtcactgtgaaccgagtgcaggacctgaggaggagacccgcgctccagcaggcagcctggatctaggaagtgatccgtctccacacagagccgggtctgtctcagcgagctccttacttggctgagctctgcccaggtgaacctcgcaggcctgggaactccgatacacggggcggagctggggtcagagttcatttcttcccaaacgggcggctccagaaacgctccaaacttttcttccgttttccactggcaagggacccagcattttactgggagcctaaggaggagaaaggtctaccgggcttgtccctgcggtgagg

SEQ ID NO: 710793 - DNA, 216 bp, Homo sapiens
gacgcacagacaggatccaggaaccagtgttctgatgaagcttggactgagcgacgctaagctagcaagcagcagttcgtggtgaatatcggaaaagagtccaggagccagtgcgatttggtgaaggaagctaggaagaacgaaggagcgctaactatttggtggatcaagctaggaaaacggattcccggatggagcgagtgctacaagtgtgct

SEQ ID NO: 710794 - DNA, 956 bp, Homo sapiens
gggatcccagggtggatctggattcgaatcccgttgccgactcgcgctctcggcttcgtgtccgggtgcttcttccctggctccgaccggcggtacctggacgcgtggcttcttccccgcggctgatctgcgcagaccggagggcgccctgcaaggagctcgcggcggcgggtgcgcgctgagcgggggaggcgtgcggcgcgcattctgcggggcggtggcgtacgttctgccggcgtgatgcactgctcggtcgacctacctggcccgggcggacgtcgatgtctactaatgaccaatgtcggctgtaacaatgggagcgtatctagtgtgttcgtcttatctccgtccccatcggctttcctctttgtgcatcacgctggggtcctggcgactgcactgagatgtggcgagtcagtctgttggtggcgtgctggggactcactcgtgtatcagcgtgtgaggctgcaccagttctgtcttctctgtattaccatcgctcgtgtacctgggccctcgattacacggccacagaccctgtgtcgcatgcctagcgcctctggctctggcctggattttttcttatctcctgtacttgcgattccctgaggcgcctgggctggcccatcccacgcccttaacaaatgcgtgccaggctgctgctgacgctgaagctggtgagcctggcagttgaagttccagtgactgtgtcttggccagaggagggagatggctcaggcttcaggaaggggccaccttggggttgttgcccgacgtgccctccttggtggagacactcagtacaggtacgtgtacggggggctccttgacgggccgttttccgctaccggcctaccttggtgggtgggagccttcccgggggattgccagctggggccctgttgggccggctggggcccgctttggcggggtcggccctccccttcggggggggg

SEQ ID NO: 710795 - DNA, 167 bp, Homo sapiens
cggtaccgatcatgggttctggacgtcatctgctccagctccatgtgcggtagagctgctgcagctgcgggggctagacgctctgtgagctccgtgaagttgttctcggcgaaactctcgaactcgctgtgcacgttgtgggggtgtgaagtcccacgtaatggtcg

SEQ ID NO: 710796 - DNA, 278 bp, Homo sapiens
  misc_feature (38)..(38): n is a, c, g, or t
tcgagaggatccctgtgccaggtggagtacagatcatnagctcacgcaccttgaactcctgaactcaagcaatctttccatcttggctcccaaagcattcggattacaggtgtgaaccactgcacctggcccgatgctgcagtcttgaggcagaatttcttcttctctgagaaacctcagttttactctgaaggctttcaacagacccacattatcaagagtaatctcctttatttaaagtcaactaagtgtacatgttacccatacctataaaaatg

SEQ ID NO: 710797 - DNA, 919 bp, Homo sapiens
gcacccccaacccggtcatcctccaggactgcatgtggagcggcttctccgcccgcgagaagctggagctgcgcctgtgagcgagaatgctgcagcacggccgcgggccgccaaccgccggttccacctgcccagtcccctgggagccggcgcctgccagccctgcgggtcgctgggcactggctggggctgcgggagcctggcctgcgcctggtggccgccctgccctgcctgagctctgcccaccctggcctgccgagtgcgtggatccctgcctgtggtcttcccctttccctgtgaacaagctgcgagccagtgcccgtgccctgcagcccctggccagtgccccgtgcggctgggcccgtgcggtctgcctcgtgggtgctgtggtatttgcctgcaccagcctggtggcccccggtggtgtctgcccctcctgctgccccagtgctgtgctgccatgaccagcggctggcgaccacataggcccctcagtaccctccggacgaggacaccctcgagcgattcagatgatgaagatgatgaagaggacgatgaagaggcacgacactcgacgtagagcccagacggaacacagcgagcgaccatccctccccaccacgcaacggatcgacaccaagagtacagccagcacctagaggtagcaaacaacaaacgacctaggtcccgagagaggagccacacccaccagagcagatgcccacagacgaatgccatgccgagctccacaccagcgacgcaaaccacatacgcaggaccgttaccaccgacatgcgcgcgctgaaggatgcccacaaacagacgacgataaagcaagcagaagaaaaagatcagaccacaagtgcacacccaccacagctcacagctctgagcgcgcacaaccatccaccgccgcggc

SEQ ID NO: 710798 - DNA, 279 bp, Homo sapiens
  misc_feature (171)..(171): n is a, c, g, or t
aggctgacttagaggattcgtttcatccctcacagatctggcaacaggtctttcaaacctatttacctcgccttaaacagctcgatcaaggccctaaagaacttgaagactttatggctcagttgaaaagtacccgtctaggtctacgctttgaaatgttcatgtggtttnggttacgggatcatcactatcatgcttatgaattattgggtcatagtatccaaatcattgatggtgcacgtactacgggtgaactggactttttaattaaaaataccg

SEQ ID NO: 710799 - DNA, 269 bp, Homo sapiens
ataacgcaaaatgacttatggagacaaccactgacggggcaccaggaatggaaataccaaacctctggttatcaaatatgatgccacaacattatatattggcctttgttctggcacgcttctagcaatagaaaaaggtgtctttgaatttcatgattcacaaacattacaaatgctacaccatgacaaatattattgaaacctgtggactcatcatcctggatagagaagctgcttctttttagttgatgacacaaaaccttttttga

SEQ ID NO: 710800 - DNA, 151 bp, Homo sapiens
gaattgtgacgatcattagtgtatagggaaggttaatggttgatattgctagggtggcgcttccagactaggtgcctgagtaggtcgcctgtcgttaatgttagcggttaaacgtacggccagggctattggttgaatgagtaggctgatg

SEQ ID NO: 710801 - DNA, 167 bp, Homo sapiens
tgggtggagcagggttctcatttggtgcttcacctgccttgggctctttgccatcttgtgaaggagcgttaggaggacgcggcgacacccgtaattgtagggacgcccgtatccacggcgaacagacggctggtttggaccactggggggttgctgattttctttat

SEQ ID NO: 710802 - DNA, 205 bp, Homo sapiens
agatcctgagggggggtggctctggtgtaggccggcggctacagctccgattaaacccctagcctgggaacctccatatgctgtgggagcagcccaaagaaatagcaaaaagacaaaaagcaaacaaacaaaaacaacaacaacaaaaactcctagggtgcatccagtagaagattcgtcagaaaacacaatactgaggataacc

SEQ ID NO: 710803 - DNA, 113 bp, Homo sapiens
acggccgtgtattactgtgcgaaagaaaccctcgggcctaagaaggcatattgtggtggtgactgctatgataacgactactactactacggtatggacgtctggggccaagg

SEQ ID NO: 710804 - DNA, 382 bp, Homo sapiens
  misc_feature (371)..(371): n is a, c, g, or t
aaacctccttagaaggaagacccagttaaagttgtttcaaagggtcccatagagaagccttaaaagtatgaatttagggccgggtgtgaattgtcacgcctttgatcccagcactttgggaagtcaaggcgggcagatcacctgaggtcaggagttcgagaccagcctgaccaacatggtgaaatctcacactactgaaaatacaaaaattagttgggcacagtggcgcatgtctgtagtcccagctgctcgggaggctgaggcgggagaatcacttgaacctggaaggcgggggttgcagtgggctgagattgtgccattgcactccagcctgggcaacaagtgcaaaactccatctcaaaaaacaaaangcaaaaaaaaa

SEQ ID NO: 710805 - DNA, 266 bp, Homo sapiens
cgcaagaatgatgagaccaaaagcagactgtacatttacaaacccatataaaacaatatttatttacatcacctcccactagggcaatggcagctctaaaatctgtgtataggagggcttaggagctggaaaatttatcttgaagttatgcttcacataatcaacccaccagtttttcagctcatgttagcctcattcattcatcaatcagcaatccatttttatcagcattttatttggtactttcatgtacaagcattgcagca

SEQ ID NO: 710806 - DNA, 127 bp, Homo sapiens
ctgttctgccagcgcgacttatctccaactatgtagcaactgcccatgctgggtcggcgccctgggtccccggagagcaagtgcagccgtggatgccctgtatcactcggcttttccatccttggtg

SEQ ID NO: 710807 - DNA, 355 bp, Homo sapiens
  misc_feature (185)..(185): n is a, c, g, or t
  misc_feature (275)..(275): n is a, c, g, or t
  misc_feature (280)..(280): n is a, c, g, or t
  misc_feature (311)..(311): n is a, c, g, or t
  misc_feature (316)..(316): n is a, c, g, or t
  misc_feature (334)..(334): n is a, c, g, or t
  misc_feature (339)..(339): n is a, c, g, or t
agttgactctgcggaaggcgtggcggttacactgcgaattgcagcccagaaggtgatgcagagcctgctcacttaaatggaaagacgacagatggccagcttgacatcagcatctccctgaagactttctcgcaccatctcccctgcggaggctgacgttttttgttaacgacgcgaggcaatanaatccccaacccatggagtacggggccccaccactttacttctgtgccctaaacctttctttatcgcacgcagcccccaccatatccagnacggnttcgcctgcctatcgcaaagtaaacacatgncccgncctcccgctttgagttgntccgnaaaccccgcgcccatt

SEQ ID NO: 710808 - DNA, 189 bp, Homo sapiens
caggaaatgcgctgactccaaagctggccccggtgcaaattaaggttgaggaaaactttggctttgaaacaaatgaggccctggattccagttgggtttttcggggtccaaacaaaatgttgccctacccgaccctggccagcccagcctttgattgacgcatgcccaataaactggcccccccctcca

SEQ ID NO: 710809 - DNA, 247 bp, Homo sapiens
gggggtcgtctcttcggggctggtttggtttactctggtccttctgggtctctttggtttctttttctctgtttgctctcctgttcttggtgctcgtctctgggctccggttgcttgttctatctgtctgtttctcattctctagctccctcagtttctggttgggtctcctggtgtctcgccctctcccatttctttctctggtgtcctctctctttgtcttggtttctggctccccctttctctg

SEQ ID NO: 710810 - DNA, 119 bp, Homo sapiens
acaagggggcaagagcccaggctgtagctctgggccctcgatcagcccccatcatgggaataaactaattttcgcaatgtaaaataaaacaaaaaaaacaaaaataccgcctgcggccg

SEQ ID NO: 710811 - DNA, 419 bp, Homo sapiens
ctaagtggaacttcttttgaggttaatgtttatatacaattactttaacattggatttgggaaatggaacaacatactgcggatctttctgctaccgatgaaagaagaaggttgagttttaccttctagagctttacagtgtaaacaagcagtattagggtttgtttttaccttctcccctttggcccggtcacagaagcactggcctttgtctttacagacacaaccctaggaagagggaaagagaaagggttttgtttagaaacagctgaataaatcccaaccggcagggtaaaagcaaatgcatttctctgttcttcgagtattggacactatctgttaggagccaggtgaccttgtagcaatatatcaatagaaatatatcaatatatgaatagcaataaagtagaaaactgaga

SEQ ID NO: 710812 - DNA, 1207 bp, Homo sapiens
ggagagagagagagaatcctctccgagtttttattttttctatttctgtattttcatgtaaacggcaaatttttccccatgttggccaggatgttctcgatctcctgaccttgtgatccgcccacctcggcctcccaaagtgctgggattacgggtgtgaggctaccgcaccctgccaatataacactattcttaagctcaggggctatgcaaagcctataggctgacccctgatccagaactgtcttctgagacaagcatttctgtgagctgccccatgtgcatacactgcagttgtgcagtacgctagatagtggtataatggcctatcccatctaactgcattgtcagaccaaaactgactgcacagtgaccatgtgtggagggcgcggctcgcatatgccaaccataactcttcaatagagtgtccttacatgaagctcatctcatactctctcatatactgactacctcagtgtagaaaccctcatattattatcccccagaacactatcccttgtcaacccaattgttcgccctctgattatcccctggagttggggaatacaacttgcaagcgcagcagcaatttcttagagtactccacaaactaatatgttgtccccagtcaatttctcccctaaattatacttgaggtaagcgacgatctccccagccattttgttacaccctttatacgtcgcctcatacactactactccaagcagtaaaaagcggctagacgcttggaacaagtctcttgaggcgagcgccccgagtagccccaatgggggatttcccccagtactacaggaccttagagatcaattctcctctgtaggagggaaaatacacagccaacatgtaacccccaagacggagcatggtcatatctgaaacacgccgcttcgcaacgttactcgcagttgttatacacccaggttgtcaccaataatatgttgcaccgcgcttgtggtacccgcagtgggctcacataagaaacggtatgccacctttcctgcatatacgccgacaaacacactcagattgtaggtgtgcgtggcaacggaaatatctctgggcggccgcagcagaggttatatacgccggtgcgttattatggacccccttgtaggcgcccccgtgagcaagtggactctctggtatggaagctaggcgcataggcacacaacagcagggccgacga

SEQ ID NO: 710813 - DNA, 833 bp, Homo sapiens
ttgttgatcagtctaggtgcagctgcgaatccttcagcgtctgatctcgggtcgcccggtaccgtcgcccgttctccgcgctctccggggggtcgggcattggtccacagtctggtcgtgttcaccttcccctgactgagtagtcgcatggcacagggtctcagaggcatgtgatggattccctgattggatgaggggtggatgaaaacttcttcgaaggctatgaaggctgggcacagatgaggagagcatctgattcttgtggaatccggaagtaatggtcaggcaggaaattctttggaggtttaaagaactctgtgggcgcaggatctttgtggaatgaccttgaattcagattaagtgggaaaattttggaacaattcatgggtgggtctgatgaacccttctgcgggttaatagatggtaatgaatgaacacttgctttgaagggaggtggcaacacttggacatgtccttgacagaattatgggtcaaggacacctgaagaagtgagagcatcaaacaggttatgacgcagaatatgggtcaacgctgacagatgacgttgtggcgaccccttccggtactaccaggggatgtgggggtccttcaggtaacaagaaaccctgattgtggattggtgaacgtccaagtttgacaagatggcccaggttaattcagggtggaagctaaatggcgcacggctcaacaaattttcaccctttgggaacacgagggttcccttggacacgtctgtgccggacatctatccggtactggcacactgcccgagttggtaacacacccttgggacaacgaacgcctgagcgcta

SEQ ID NO: 710814 - DNA, 940 bp, Homo sapiens
gagacgcggctgtgagaagccatgagccagcaatagtctctcgccgacaccctgtacgaggcggtgcgggtaagctcctggagggagaagcagtcgtcgagctgcacggcaagagtatcgctggaagacgagtgagtatgttgacaagatctagtcgttgacagaatctagtgaatcccactagcataggtacaagtcggcattcatcgaggccacgcgtcagggcattgaatgtcgcgagctcgcgccgcccacgtaatggttactcctgatgatgtgttccatgagaggtgacctagacagcaatcgtgtgacggaggtctaatggccgtctggtattatcgcccctgctatggcagatcggagggcgcctgcacagaaaactcaagactagcaagtacacatacacacctggtgtgcaacgtaacgactgcggccataggaagctatgactgccgctgttttcgggcctcagcagtctctgagtccaatggcagatttccaacgcaaattgcatcgtgtccacggttctagtagtgaacgcggcatggagaaaggtgtccacgttaccactggctccagcagctacaaagcggagaaaagccatgggtgggctcatagggttggatgaggtgaaagtccacgcaatcagagttgtccataattgaacgaaagggtgtttcactgttctgggtctgctatgactggtttgtggtcacggtgaaagattgaagcagaacgaatgagggctatgatgtaataatgatttaacggtggcgcatgttcaatcgtatcctggggtgtcacatatgcgttcaaggcaaaaaagttggggaggaaattgttccgggggggcttagtattagtgctaggaggcaacccaatcgggggcacaaggccccccaggctggccttatcattcacaggggaccatttggcg

SEQ ID NO: 710815 - DNA, 117 bp, Homo sapiens
taagctggtacggtgttatgatgcacggtggtggcatgcgcagacagacttcgctcgtactcgtgcgctcgcttcgcttttctccgcaaccatgttgacaaacccgatattgctgag

SEQ ID NO: 710816 - DNA, 286 bp, Homo sapiens
  misc_feature (14)..(14): n is a, c, g, or t
  misc_feature (82)..(82): n is a, c, g, or t
  misc_feature (95)..(95): n is a, c, g, or t
  misc_feature (113)..(113): n is a, c, g, or t
  misc_feature (116)..(116): n is a, c, g, or t
  misc_feature (126)..(126): n is a, c, g, or t
  misc_feature (128)..(128): n is a, c, g, or t
  misc_feature (139)..(139): n is a, c, g, or t
  misc_feature (141)..(141): n is a, c, g, or t
  misc_feature (146)..(146): n is a, c, g, or t
  misc_feature (153)..(153): n is a, c, g, or t
  misc_feature (155)..(155): n is a, c, g, or t
  misc_feature (164)..(164): n is a, c, g, or t
  misc_feature (166)..(166): n is a, c, g, or t
  misc_feature (169)..(169): n is a, c, g, or t
  misc_feature (171)..(171): n is a, c, g, or t
  misc_feature (173)..(173): n is a, c, g, or t
  misc_feature (179)..(179): n is a, c, g, or t
  misc_feature (181)..(181): n is a, c, g, or t
  misc_feature (186)..(186): n is a, c, g, or t
  misc_feature (190)..(190): n is a, c, g, or t
  misc_feature (195)..(195): n is a, c, g, or t
  misc_feature (200)..(200): n is a, c, g, or t
  misc_feature (206)..(206): n is a, c, g, or t
  misc_feature (213)..(213): n is a, c, g, or t
  misc_feature (224)..(225): n is a, c, g, or t
  misc_feature (227)..(227): n is a, c, g, or t
  misc_feature (239)..(239): n is a, c, g, or t
  misc_feature (245)..(245): n is a, c, g, or t
  misc_feature (270)..(270): n is a, c, g, or t
  misc_feature (284)..(284): n is a, c, g, or t
ctaattttcacaanccatcccataacacacaatctaatttttataagtacttgctttgcaaattcagcttcaagataaatcnccctccccctgcnccacaaccccatataganatnttgaattgtntntggggggagananggggnggggaangngccagagcngnggnangngcgagngngatgngtcnttaanaactnacaggnaaatgcnaaaaaatagtnnanaacaataatacngggganacacacagcttataaaaagggtcanggatctacaaatgngg

SEQ ID NO: 710817 - DNA, 265 bp, Homo sapiens
  misc_feature (149)..(149): n is a, c, g, or t
gtcttgactgatgattcataacattagcttgaggaacttcctcctatttccagtctttgggagtcaagcttctcacctggggcgggtgggttctgcaccaccctcccacccgccttcctccgtagtggacgatagtagccacatccagncaccacggcacagctcccgggtcgccttcatctcctcgctcctccagggcagcacaaggccacttgtggaatctccaccagggtgtacaggaacggtgcctctagcgtcctgccac

SEQ ID NO: 710818 - DNA, 422 bp, Homo sapiens
catggccacatccaacatttcctcaggcaattccttttgattcttttttcttccccctccatgtagaagagggacagtataggctatgaaagctgcttctgggggatttcaagggactgggggtgccaaccacttctggccctgttgtgggggtgtcacagaggcagtgccagcaacaaaggatatgctacttcgtgtgctcgggaaacaaaaggcaggggatgtcaaccccgtgtcagtgggctttggttggggtggggcgggaggccacgggggagcccgaggcaggggctggccagagggcagaggaagcacaagaagtggcagtgggagagggagccacgtgatgaagagtagacatccccctccttgccgctgggagagccaaggcatatgccacatgcagagtaagagcggccgct

SEQ ID NO: 710819 - DNA, 141 bp, Homo sapiens
gctcaccgacgagttgtccgagttaggacgagcgaactttaacgaaagaataagtgtgcggctcaacaagctttaaaccaacgaaaggctacgaccgggttggggaggaagcattgactgagagaagagggtgatattgaa

SEQ ID NO: 710820 - DNA, 362 bp, Homo sapiens
cccatttggataaaaacttgtacaaacctccagctcactcagataaaggaacaagaacgacctagcacagaaatgcctttgtttggccagccacggtggatcatgcctgtaattccaacaatgtcggaggcagctgtgggcggatcatctgaggtcgggagtttgagaccagcatgaccaagatggacaaaccctgtctttactaaaaatacaaaactagccaggcatggtgctgcatgcctataatcccagctacttgggaggctgaggcaggagaatcgctagaacccaggaggtggaggttgctgtgagccgagatcgcaccattgcactccaggctgggcaacaagagcaaaactgca

SEQ ID NO: 710821 - DNA, 575 bp, Homo sapiens
  misc_feature (330)..(330): n is a, c, g, or t
gaaaaatgaacggagctggtactcatgtcaaaaaagtgaaggagacttagggggaataactagattagctcataaaggctaggatccattcagaaaactgggaaccatagccatggaccatacaactgcaatatcaaactgagctgcacatagtggtacacacctgtggtccgagctactcaggaggctaaggataacctaagccgacgagttgtaggctacagtgcccaatgagtgaatgtatcactgcactacagcctgggtgatagagggagaccctgactctaaaaaaataatgaggctgggccctgtggctcgcgcctgtaatcncagcacgggacgccgaggtgggtggatcacagggtcaggagttctagaccagcttggccaacaaggtaaaacccagtctctactaaaaatacaaaaattagccgggtgtggtggtgcacgcctgtaatcccagctactgagggggctgagacaggagaatcacttgaactcgggaggtggaggttgcagagagccaaggccatgccactgcactccagcctgggtgacagagcaagactcgtctc

SEQ ID NO: 710822 - DNA, 111 bp, Homo sapiens
agcagttaatacagactcagtctaaacaaacaaaacttgcttcagcgagcaaacattagcaggtttgccccacattttgagaaattggtatgagtctgtattaactgcttg

SEQ ID NO: 710823 - DNA, 1880 bp, Homo sapiens
  misc_feature (15)..(15): n is a, c, g, or t
  misc_feature (19)..(20): n is a, c, g, or t
cctcgaagtaacgtnagcnngtcgacgcggggcttttctttagccgggtcccgctaactcggctacggtgtatctgcgtctttggtcaggttgttccttggctaagagggcagtcgtcgcggacccacgcggttagcaaggcttagtgctcgggccggccgccttcacttccctcccggcttttcctcccgacttatccactttaggggcgtctcggagtgccggaggcccccggggaagagcggggtgccggtgtccgctccgggctcggatgggaagtggtgggaggagcgacccgggatgttcagtctgatggccagttgctgcggctggttcaagcggtggcgggagcctgtcaggttggcaaataaacaagataaagaaggagctttaggagaagctgatgtcattgaatgtctatctctggaaaaaattggtccatgagcacaagtgcctgtgtcagatagaaccatgttcagcaatctcggggtatggaaagaaaattgacaagtccattaaaaaaggcctttattggctgctacatgtttattgcaagagactttgatgccttaaatgaacgcatccaaaaagagacaacagagcagcgtgctcttgaggaacaagagaaacaagaaagagctgaacgagtgcgaaaattacgagaagaaagaaaacaaaatgaacaggagcaggctgaactcgatggaaccagtggtctggctgagttggacccagaaccaacgaatcctttccagccaatagcatctgtaatcattgagaatgaaggaaaacttgaaagagagaaaaaaaaccaaaaaatggagaaagacagtgatggctgccacctgaaacataaaatggagcatgagcaaatagagacacaaggccaggttaatcacaatggccaaaaaaataatgaatttggactagtagaaaattataaggaggcattaacacagcagttaaagaatgaagatgagacagaccggccatcattggaatcagctaatggtaaaaagaaaactaagaaactaagaatgaaaaggaaccaccgggtagaaccacttaatatagatgactgtgctcctgagagtccaacgccacccccaccccctcctcctgttggctggggaacccctaaagtcactagacttccaaaacttgagcctcttggtgaaacacatcataatgatttctataggaagccactgcctcccctggctgtgccacagcgacctaacagtgatgctcatgatgtgatctcataaacaagacgtatggaggagttctcttaatatcagcaaggtgaactgggacattcttctttctcagaagaagaaacatcttgtaaattgatgactggggcaagataaccataataattttagtgagaagattaatactcaaggacctgacttgataattacttatttgtgtttttcatggttacaaaaataaaagaagcacaatgaccagtacatgaaatcagcatttggaccaaattagcaagatttactgttgactctgggtttatacatccccactcatgagcatacttctgaaggaaaacttacaaaaagagccatggactcagcacttttctttactatttgttcataggctatattctcgatttcaatcttttccgccagaatttgcccttgaaaggggcctcgcgtttacccaattccaacctcttctcttgctcacctcaacattttcccggcttggttcacccttctgacatctgttcacctctctggaaacggtctccccgacgtcaaggaatcatgcggattgacacgcacagcgcgcgcgcctaaattagcggacgctttcactagagcagcaacagccgctacaaagaacgacgaacatga

SEQ ID NO: 710824 - DNA, 350 bp, Homo sapiens
caacagcctgtaccttttgctcggcactactgaagtataagccagagacatctgaacatcacgcattacttatcgtacctcatggcaaagatgattataaccttgcgtgatctaggcaggactcacccctacacaccttgcttagggcatatgctaaacataactttttactgtaagccgaagcttatactcccgaacctcaacgagctacctatgatcagctagtagagctcacccgattatctagctcaggttgtccaagatatagtctgagtacatctcttaatgtgcccacagagacctctatataccctgggcttaactgatagcacgaagaggcatctctttgg

SEQ ID NO: 710825 - DNA, 2202 bp, Homo sapiens
  misc_feature (15)..(15): n is a, c, g, or t
  misc_feature (19)..(20): n is a, c, g, or t
cctcgaagtaacgtnagcnngtcgacgcggggcttttctttagccgggtcccgctaactcggctacggtgtatctgcgtctttggtcaggttgttccttggctaagagggcagtcgtcgcggacccacgcggttagcaaggcttagtgctcgggccggccgccttcacttccctcccggcttttcctcccgacttatccactttaggggcgtctcggagtgccggaggcccccggggaagagcggggtgccggtgtccgctccgggctcggatgggaagtggtgggaggagcgacccgggatgttcagtctgatggccagttgctgcggctggttcaagcggtggcgggagcctgtcagaaaggtgactcttttgatggtgggacttgataatgctggtaaaaccgcaacagcaaagggaatccaaggagaataccctgaagatgtagctcctactgttggattttcaaaaattaaccttagacaaggaaagtttgaagtcaccatctttgacttgggaggtggaataagaattcggggaatctggaagaattactatgctgaatcctatggggtaatatttggttgtggattccagtgatgaagagagaatggaagagacaaaagaggctatgtcagaaatgctaagacatcctaggatatcgggaaagcctatattggtgttggcaaataaacaagataaagaaggagctttaggagaagctgatgtcattgaatgtctatctctggaaaaaattggtccatgagcacaagtgcctgtgtcagatagaaccatgttcagcaatctcggggtatggaaagaaaattgacaagtccattaaaaaaggcctttattggctgctacatgtttattgcaagagactttgatgccttaaatgaacgcatccaaaaagagacaacagagcagcgtgctcttgaggaacaagagaaacaagaaagagctgaacgagtgcgaaaattacgagaagaaagaaaacaaaatgaacaggagcaggctgaactcgatggaaccagtggtctggctgagttggacccagaaccaacgaatcctttccagccaatagcatctgtaatcattgagaatgaaggaaaacttgaaagagagaaaaaaaaccaaaaaatggagaaagacagtgatggctgccacctgaaacataaaatggagcatgagcaaatagagacacaaggccaggttaatcacaatggccaaaaaaataatgaatttggactagtagaaaattataaggaggcattaacacagcagttaaagaatgaagatgagacagaccggccatcattggaatcagctaatggtaaaaagaaaactaagaaactaagaatgaaaaggaaccaccgggtagaaccacttaatatagatgactgtgctcctgagagtccaacgccacccccaccccctcctcctgttggctggggaacccctaaagtcactagacttccaaaacttgagcctcttggtgaaacacatcataatgatttctataggaagccactgcctcccctggctgtgccacagcgacctaacagtgatgctcatgatgtgatctcataaacaagacgtatggaggagttctcttaatatcagcaaggtgaactgggacattcttctttctcagaagaagaaacatcttgtaaattgatgactggggcaagataaccataataattttagtgagaagattaatactcaaggacctgacttgataattacttatttgtgtttttcatggttacaaaaataaaagaagcacaatgaccagtacatgaaatcagcatttggaccaaattagcaagatttactgttgactctgggtttatacatccccactcatgagcatacttctgaaggaaaacttacaaaaagagccatggactcagcacttttctttactatttgttcataggctatattctcgatttcaatcttttccgccagaatttgcccttgaaaggggcctcgcgtttacccaattccaacctcttctcttgctcacctcaacattttcccggcttggttcacccttctgacatctgttcacctctctggaaacggtctccccgacgtcaaggaatcatgcggattgacacgcacagcgcgcgcgcctaaattagcggacgctttcactagagcagcaacagccgctacaaagaacgacgaacatga

SEQ ID NO: 710826 - DNA, 388 bp, Homo sapiens
  misc_feature (178)..(178): n is a, c, g, or t
gtgtattcaccactgcggtgcatgcctccctgttcgagatccgtcgacacgtgagcaccgcgctgacctccaaatattgttaagctggagcctgctggactcttgtggatgatcctgtaccccaccatgcttgcttgcttgctggtcgacgagtattaaccactgctgcgcatgcctncctggacaagatgcgtcgacacctgagcaccgcgctgacctcctaaaaatagctgatctggagcctgggcgacgtgtatttaccactgctgtgcaggcctctctgtgcaagtttcgtcgacacgtgagcaccgcgctgacctccaaatatatttaagctggagcctgggcgactctataggatactccactaccccagcatgcatgcatg

SEQ ID NO: 710827 - DNA, 157 bp, Homo sapiens
atgccgtgcttgaccgcctcgtgcaggtccaccaggaagatcgacatgccctcggacttgcgcgtgacctggtccagcggcgtggtgcgcgccagcaggatcatcaggtcggagtgctgcacccgcgagatccagaccttctggccattgatgacgt

SEQ ID NO: 710828 - DNA, 707 bp, Homo sapiens
  misc_feature (307)..(307): n is a, c, g, or t
aaaaccaacgcttgtttaaaaacctacttattcgccccttatgaaagggaaaaggttttttcaaggggaattccaagaagaaaagtagaaaagtgaagaggagggttccaagtgggctttccctgggtccaagtaggggctcaagaaacctgtgaaactccctcatttcctgcatgcggactacttttggtcctggatgaataatattaaggatatgtgcttaaaacattcctaacatcagaattggcgcctgtgttttcttccccaaaaaagctataaacagcgaaaattttgttgtaagcttccntgtgtcctctctccctctctcccttccccctcccctgaaactaaaaggaatgttaaaagcccacttttctgtgaccagcagaccttatctatggtcccaattccaattccttgtaaacacaatttgtaaaatcccgtgagatcctgtctcctttgccatcccgctgcaaggttataagtagagaaaacttaagttacaattccagttttcctcaagatctgagacatgttaattgtctttgtttctccctctggtaacatcttcccaccacacatatttcctgccttagagagtttaaaaggtgataaaaaaatctaacactggctaccccgctcgggaccccttccacgctgtgaaagctttgtactgtcactctgcttaataaagcctacagcttttt

SEQ ID NO: 710829 - DNA, 2257 bp, Homo sapiens
  misc_feature (15)..(15): n is a, c, g, or t
  misc_feature (19)..(20): n is a, c, g, or t
cctcgaagtaacgtnagcnngtcgacgcggggcttttctttagccgggtcccgctaactcggctacggtgtatctgcgtctttggtcaggttgttccttggctaagagggcagtcgtcgcggacccacgcggttagcaaggcttagtgctcgggccggccgccttcacttccctcccggcttttcctcccgacttatccactttaggggcgtctcggagtgccggaggcccccggggaagagcggggtgccggtgtccgctccgggctcggatgggaagtggtgggaggagcgacccgggatgttcagtctgatggccagttgctgcggctggttcaagcggtggcgggagcctgtcagaaaggtgactcttttgatggtgggacttgataatgctggtaaaaccgcaacagcaaagggaatccaaggagtccatggaaaaattgtcttctgcaaaactggtccctggtgctgctgatctaaaggaataccctgaagatgtagctcctactgttggattttcaaaaattaaccttagacaaggaaagtttgaagtcaccatctttgacttgggaggtggaataagaattcggggaatctggaagaattactatgctgaatcctatggggtaatatttggttgtggattccagtgatgaagagagaatggaagagacaaaagaggctatgtcagaaatgctaagacatcctaggatatcgggaaagcctatattggtgttggcaaataaacaagataaagaaggagctttaggagaagctgatgtcattgaatgtctatctctggaaaaaattggtccatgagcacaagtgcctgtgtcagatagaaccatgttcagcaatctcggggtatggaaagaaaattgacaagtccattaaaaaaggcctttattggctgctacatgtttattgcaagagactttgatgccttaaatgaacgcatccaaaaagagacaacagagcagcgtgctcttgaggaacaagagaaacaagaaagagctgaacgagtgcgaaaattacgagaagaaagaaaacaaaatgaacaggagcaggctgaactcgatggaaccagtggtctggctgagttggacccagaaccaacgaatcctttccagccaatagcatctgtaatcattgagaatgaaggaaaacttgaaagagagaaaaaaaaccaaaaaatggagaaagacagtgatggctgccacctgaaacataaaatggagcatgagcaaatagagacacaaggccaggttaatcacaatggccaaaaaaataatgaatttggactagtagaaaattataaggaggcattaacacagcagttaaagaatgaagatgagacagaccggccatcattggaatcagctaatggtaaaaagaaaactaagaaactaagaatgaaaaggaaccaccgggtagaaccacttaatatagatgactgtgctcctgagagtccaacgccacccccaccccctcctcctgttggctggggaacccctaaagtcactagacttccaaaacttgagcctcttggtgaaacacatcataatgatttctataggaagccactgcctcccctggctgtgccacagcgacctaacagtgatgctcatgatgtgatctcataaacaagacgtatggaggagttctcttaatatcagcaaggtgaactgggacattcttctttctcagaagaagaaacatcttgtaaattgatgactggggcaagataaccataataattttagtgagaagattaatactcaaggacctgacttgataattacttatttgtgtttttcatggttacaaaaataaaagaagcacaatgaccagtacatgaaatcagcatttggaccaaattagcaagatttactgttgactctgggtttatacatccccactcatgagcatacttctgaaggaaaacttacaaaaagagccatggactcagcacttttctttactatttgttcataggctatattctcgatttcaatcttttccgccagaatttgcccttgaaaggggcctcgcgtttacccaattccaacctcttctcttgctcacctcaacattttcccggcttggttcacccttctgacatctgttcacctctctggaaacggtctccccgacgtcaaggaatcatgcggattgacacgcacagcgcgcgcgcctaaattagcggacgctttcactagagcagcaacagccgctacaaagaacgacgaacatga

SEQ ID NO: 710830 - DNA, 277 bp, Homo sapiens
gaacgcttcaaacaacggaggagtctggatagaaagaacccacgggagaaatacactagtcactgtaaagtaacagaagtggttccgatgtcactgcagtgcacaggcagggaggggagcgtgtccccagtgagagaccggagtggaagcgaggtccaggcttacatgcggggactttccagacagttcagatttattccaagagctgcaagaggctagctagaaaggttaaaggcaaataggtggtattggctgggcacggtgcgttggcccaacg

SEQ ID NO: 710831 - DNA, 757 bp, Homo sapiens
  misc_feature (15)..(15): n is a, c, g, or t
  misc_feature (19)..(20): n is a, c, g, or t
  misc_feature (489)..(489): n is a, c, g, or t
  misc_feature (503)..(503): n is a, c, g, or t
  misc_feature (509)..(509): n is a, c, g, or t
cctcgaagtaacgtnagcnngtcgacgcggggcttttctttagccgggtcccgctaactcggctacggtgtatctgcgtctttggtcaggttgttccttggctaagagggcagtcgtcgcggacccacgcggttagcaaggcttagtgctcgggccggccgccttcacttccctcccggcttttcctcccgacttatccactttaggggcgtctcggagtgccggaggcccccggggaagagcggggtgccggtgtccgctccgggctcggatgggaagtggtgggaggagcgacccgggatgttcagtctgatggccagttgctgcggctggttcaagcggtggcgggagcctgtcaggtaggctggagccagctgtcctggccgtcctaggggttggagatggctgcgccccagggcgaggcgccgccttttccccgcgcctggacgagtctatcccaggccgcaagggatgctttcattcccaggntgtcccgggagggngagatnggaggatgtagccttgttgtctggtcgactttctgttgcgattgacaatgcttaccgttgttatattttaaataggtttgaatttgttaaaaagtgtgtgtgtgtgtgtgtgtgtgtgtgtgtgtggaattgcaaaactatccagtgtgtgttacctctgaagcttgtgtagtggacacttcttttaacaagagggggacatggaatatagtttacataatatccgatattccattcaagatacactc

SEQ ID NO: 710832 - DNA, 180 bp, Homo sapiens
tgagatcatgccattgcacttcagcctgggtaacaagagcaaaactccgtctcaaaaaaaaaaggagagagaaaattaaaagaaagaaatgggcctcttgagtccacaggtctttgaaatctgggatcatctgggatgtacccctggttcaaagtggttacccatcctgtaaaagggccc

SEQ ID NO: 710833 - DNA, 486 bp, Homo sapiens
ccatatattcagaacaaggcaggatataaataaatataattaattcatcttataaaatcatcttgaaatattaagtcctcataatttgggctacaggtctcattgtcccaaatatgcatctctgtgagtacaggttaaattcactcaactaataaataagttctaagggcccaccatgtgtcagtcactgttctcaacactggggaaatacctatgaagagaacgccaatcagagataagtacaatggagaacagtaaagcagagaagactagggatgccatgtagtgaggttacaattttaaataagatggtcaaagagggcctcactgaggtcacataacctgaagggcctaaagaagatgagagattaaaccagatagatatctaaggcaagggtattccaggcacagggaatatcaagtacaaaggtcctgaggcagaaggaagcttggcatttctaaggatcagctaagagatctgggctg

SEQ ID NO: 710834 - DNA, 264 bp, Homo sapiens
  misc_feature (215)..(215): n is a, c, g, or t
cctcccgggttcaagcgattctcctacctcagcctcctgagtagctgggattacaggtactcgccaccacacccggccaattttggtatttttagtagagacggggtgtcaccatgttggccaggctggtctcgaactcctgacctcaggcgatccgcctgccttggcctcccaagtgctgggattacaggcgtgcaccactgcgcccagcccanaaagcccagtttttagaccaacactcccatttctgactcaagggtctgg

SEQ ID NO: 710835 - DNA, 776 bp, Homo sapiens
  misc_feature (48)..(48): n is a, c, g, or t
  misc_feature (113)..(113): n is a, c, g, or t
  misc_feature (119)..(119): n is a, c, g, or t
  misc_feature (162)..(162): n is a, c, g, or t
  misc_feature (204)..(204): n is a, c, g, or t
  misc_feature (232)..(232): n is a, c, g, or t
  misc_feature (238)..(238): n is a, c, g, or t
  misc_feature (246)..(246): n is a, c, g, or t
  misc_feature (248)..(248): n is a, c, g, or t
  misc_feature (255)..(259): n is a, c, g, or t
  misc_feature (262)..(262): n is a, c, g, or t
  misc_feature (338)..(338): n is a, c, g, or t
  misc_feature (376)..(376): n is a, c, g, or t
  misc_feature (399)..(400): n is a, c, g, or t
  misc_feature (402)..(403): n is a, c, g, or t
  misc_feature (405)..(407): n is a, c, g, or t
  misc_feature (445)..(446): n is a, c, g, or t
  misc_feature (449)..(449): n is a, c, g, or t
  misc_feature (482)..(482): n is a, c, g, or t
  misc_feature (484)..(485): n is a, c, g, or t
  misc_feature (492)..(492): n is a, c, g, or t
  misc_feature (500)..(500): n is a, c, g, or t
  misc_feature (508)..(508): n is a, c, g, or t
  misc_feature (525)..(525): n is a, c, g, or t
  misc_feature (541)..(541): n is a, c, g, or t
  misc_feature (566)..(566): n is a, c, g, or t
  misc_feature (570)..(571): n is a, c, g, or t
  misc_feature (576)..(576): n is a, c, g, or t
  misc_feature (578)..(578): n is a, c, g, or t
  misc_feature (627)..(627): n is a, c, g, or t
  misc_feature (629)..(629): n is a, c, g, or t
  misc_feature (657)..(657): n is a, c, g, or t
  misc_feature (773)..(773): n is a, c, g, or t
aaagagctaaaagtggtatcatgattccacagacagtgattgtaaganagtgagccacagggtaatgggaaaacgtgaaaagaaacaaaaatcaggaccaaattagagaaganatgagnagggccatcactagaggtgaaaatggagaaacctaagaaaaanagtgttggcatgaattatgcaagtggaaaatacatctgtagngggacgagatagaaggacctagatctanctccangtgcttgntnggcgccnnnnnggnggtagagaatttatagaattaactgtatagaagcctaaaaaataagattatcagcctagtcatgtaaagtctagangttcctttatttgctcatcacctttcctttttctatangactattaagcagaaggtcagtnncnnannntttaccctttcctctcctctcttggtttatattttatnnggnttctgatgaggctatggttcagttggcattgcngnnggtggtncttattgnagcaaggntgacaataggtcttgtnattctgctccctgaanatgccctttgacaactgtgtggggngggnngcacncncaaagtgctgagggtggggcttgtaccccatagcactgatacaacggcnantgatgggctgcccacacccatggcagancgttccccggcggtgatggtaatggagctcacagaatggacgtccatccagttcaaagaaggagccagtagaaaaactggtgaagcagtccccacaaacaaagcactctgggtgcngag

SEQ ID NO: 710836 - DNA, 197 bp, Homo sapiens
aggccgtgtagtgcgccatgctaattcatagaagtaaatcagagtggcgtacctcgggtcacgcaggaaggagccaggagcttctggaggtagactccagatccttctccctctctcaccaagctcttgagttttcccaattatctttttgggcggaagcaggtttttatcaaaactttctcaactgacaacggcct

SEQ ID NO: 710837 - DNA, 119 bp, Homo sapiens
  misc_feature (93)..(93): n is a, c, g, or t
ctcctggccgctcgtcccccgccgcagtgccatggctgcccgggcgcccgaccttggccgtggacaccttgcggtgcgtgctgctcctccccntctgccactggaagatgctggggcga

SEQ ID NO: 710838 - DNA, 156 bp, Homo sapiens
atagaggatcccgaatatagctagtctcaggcaagtcacttaacatttttgagtttcatatttctaccatatctagtaaaatagaatcgactaggatcagtagtattgtaggataataacctaatgtagagatatagtagtgtgcatatattacct

SEQ ID NO: 710839 - DNA, 152 bp, Homo sapiens
cacctcacaagcctcagagtactacgagtctcacttcaccatttcctgactggcatctacgagatcaacatttattagtagccacaggcttccacggacttcactgtcattattggctcaactttcctcactatctgcttcatccgccacaa

SEQ ID NO: 710840 - DNA, 601 bp, Homo sapiens
  misc_feature (343)..(343): n is a, c, g, or t
  misc_feature (539)..(539): n is a, c, g, or t
  misc_feature (550)..(550): n is a, c, g, or t
  misc_feature (564)..(564): n is a, c, g, or t
tttagcgagctgctctgcatatttgttgctgcaccacttcttgaaagcctgatatccttttatttttgttatcacaaagcatttattaaccattcatatgaatgtaaagctgagtcatctcaaaatatatctcagtgtagtcatagttgacactctaataactttagtatgaaaagatcatataaaattatgtaagatgccacttaattgaatttacttttcttaatttatccttgaatgacatggaatattttttctatatttttccctacattaaactaaatgtaaacatataaattgccccattttgtttaatctctaaagttagtgaaaacattacatnggcatttttggttaataaaattgaaaagaaatttagtagtcattgtctagactacctatctgtgtgaaacttctttgaccatatccctgatacttgactaataaatcagcctctgcttgagaagccttagggactggggcttcagatacttatgacagtctatacttatcttaactctgcctttctgtgaccgacntcatggctctngtacgtttcacttngggcttactaggcactacctacgctggaatggaattg

SEQ ID NO: 710841 - DNA, 458 bp, Homo sapiens
agtatagcactgaccactgcgcggaacacgtctagtgtatagattggcctctgtgtagacgatgaatgcctggccagtgctgtgactggccgtgtctaggctccgagttgcaaactgccgtttcagatttgcgggaacatctcgctgtatttgcttgggtaatcagatgcgaggtagcccttcagctgctccaggttgctggctgtcaaaaagccatcttcaaggtcaaaagtgtaggtcagcagcagactcaccctgcagagcaaaccatcggatcgaccttcactgatcagaacggcagctgtcaccaaagcctcccgtcagcctcctcttatttcttcaaagcagttttcataattgacggtggccttaaagccctagaatggagcaggtgaccaatgctggcaaatattgggggtgaaagctgttgatgagggacacgaatatagcgtgctcct

SEQ ID NO: 710842 - DNA, 132 bp, Homo sapiens
gggtccagtaagagatggagatgtcattgcctgaagatgaaggacatactaggacactgacacagcaaaagaaatggagattacagaagtagagccaccacggcgtttggactccagtactcaagacaggct

SEQ ID NO: 710843 - DNA, 299 bp, Homo sapiens
tggtcgacctagagatccccctccatcacagaacaggaactagttggctctgccatatactgcatgtacaggttcttttttttgattaacatgtcatagtcaggaaagaaatgaatacactgcgaaacaaggaacaggaacctcaaattttccaaaggtattcggggatagggggttatagaaagatttccaaagcagcgtgacagacaccctgtgaaaaccacctcaaagtttgccccctctcgtggcatgaagacccaatgccgtgcccacccccgacaaaagacaaatcaatcctc

SEQ ID NO: 710844 - DNA, 148 bp, Homo sapiens
  misc_feature (91)..(92): n is a, c, g, or t
ggcagccaagatggagccggcagtcggcgttccgggcccactgatcgtgaacaacaaacagccccagcccccgacacctaacacgcctgcnngccgcactgtcaccacccggggcaccgcgttccgccgcgggcctcctgcctggggg

SEQ ID NO: 710845 - DNA, 85 bp, Homo sapiens
cgaattcggcacgagtttctttatcttccctccctcacttcccttttctcccaccctctttccaagctgttcgcttgcaatatat

SEQ ID NO: 710846 - DNA, 155 bp, Homo sapiens
gcgcggctggaggtgtgaggatccgaaacccaggggtggggggtggaggcggctcctccgatcgaagaggactttgactaccggccgcacgccaatgagggccctctgggtcctgggcctcttctgcgtcctgctgaccttcgggtcggtcaaag

SEQ ID NO: 710847 - DNA, 1110 bp, Homo sapiens
  misc_feature (7)..(7): n is a, c, g, or t
  misc_feature (34)..(34): n is a, c, g, or t
  misc_feature (593)..(593): n is a, c, g, or t
aggaagnccctatttttccaagcacgaagccacnagtctcccccagggagcatcaggaagggacatggatgtgctcctgccacagggcccttcctacctttggatctgtgagaaggtgaatacaaagcagcaggcagagtaaaatctgctgggactgcctggagatttgtcaggagctgcagacaagtaccttggagcattctgttatttttggaaagttcaaatatgcagggacaaggaggttgctgactgtactgacaggctctaagtcattttctccaaaaactatctattcaattatcaggggctggtcttgaggaaggaaaaaaaaaaaaaacgttcccagaattcagtttccaaaatctctttttaaagggtttacacacacacacacacacacacacacacacacacacacacacacgatcattaaaaagtgtatgctctttaagaagaaaagtaaaatatctcaaaggacggtttcaccaccgtcctttattgaatcaatttttctacatttcagagcaagtgtagattctgagggactcctatttgccaaaaagacaaaactagcaaaaaaaaaaacaaaaaancaaaaaaaaacccacttaaaaggtagcaggaaaagaaggtagttttgagtgtggttcactcagtgtctgtgagtctggtgtagtgtcaggagtaaggccgtgtctagctcaagtttacatttggatgtcctacaacactaaacaaaatttttcataatccatggtggggagcacactttggagctacatttcttgtctcctcattgttgacattaattaaacatttataggccaggcacagtggctcacgcctgttatcccagcactttgggaggccgaggcaggtgaatcacctgaggtcaggagtttgaaaccagcctggccaatatggtgaaaccccatctctactaaaaatacacaaaattagccaggtgtggtggcaggcgcctgtagttccagctacttgggaggctgaggcaggaatctcctgaatcctggaggcggaggttgcagtgagccgagattatgccattgcactccagcctgggcaacaggagcgaaactccgttgtaaaaaa

SEQ ID NO: 710848 - DNA, 1121 bp, Homo sapiens
  misc_feature (604)..(604): n is a, c, g, or t
ctgaactgaaccctgaagatcaaacaggaattcagtggtgagaggttaaaagctgggcattctagatgaagggacatggatgtgctcctgccacagggcccttcctacctttggatctgtgagaaggtgaatacaaagcagcaggcagagtaaaatctgctgggactgcctggagatttgtcaggagctgcagacaagtaccttggagcattctgttatttttggaaagttcaaatatgcagggacaaggaggttgctgactgtactgacaggctctaagtcattttctccaaaaactatctattcaattatcaggggctggtcttgaggaaggaaaaaaaaaaaaaacgttcccagaattcagtttccaaaatctctttttaaagggtttacacacacacacacacacacacacacacacacacacacacacacgatcattaaaaagtgtatgctctttaagaagaaaagtaaaatatctcaaaggacggtttcaccaccgtcctttattgaatcaatttttctacatttcagagcaagtgtagattctgagggactcctatttgccaaaaagacaaaactagcaaaaaaaaaaacaaaaaancaaaaaaaaacccacttaaaaggtagcaggaaaagaaggtagttttgagtgtggttcactcagtgtctgtgagtctggtgtagtgtcaggagtaaggccgtgtctagctcaagtttacatttggatgtcctacaacactaaacaaaatttttcataatccatggtggggagcacactttggagctacatttcttgtctcctcattgttgacattaattaaacatttataggccaggcacagtggctcacgcctgttatcccagcactttgggaggccgaggcaggtgaatcacctgaggtcaggagtttgaaaccagcctggccaatatggtgaaaccccatctctactaaaaatacacaaaattagccaggtgtggtggcaggcgcctgtagttccagctacttgggaggctgaggcaggaatctcctgaatcctggaggcggaggttgcagtgagccgagattatgccattgcactccagcctgggcaacaggagcgaaactccgttgtaaaaaa

SEQ ID NO: 710849 - DNA, 151 bp, Homo sapiens
gtactgtggtgtaccgtgaatagttttcaacgatatgtaatcattcttggtctggctgtacaggacaggtcgaggccatgtctgcctggggcacagctggctaccctgttgtagacgtgtgggtggtgttttaccatcaatccatagatgt

SEQ ID NO: 710850 - DNA, 1014 bp, Homo sapiens
  misc_feature (7)..(7): n is a, c, g, or t
  misc_feature (34)..(34): n is a, c, g, or t
  misc_feature (593)..(593): n is a, c, g, or t
aggaagnccctatttttccaagcacgaagccacnagtctcccccagggagcatcaggaagggacatggatgtgctcctgccacagggcccttcctacctttggatctgtgagaaggtgaatacaaagcagcaggcagagtaaaatctgctgggactgcctggagatttgtcaggagctgcagacaagtaccttggagcattctgttatttttggaaagttcaaatatgcagggacaaggaggttgctgactgtactgacaggctctaagtcattttctccaaaaactatctattcaattatcaggggctggtcttgaggaaggaaaaaaaaaaaaaacgttcccagaattcagtttccaaaatctctttttaaagggtttacacacacacacacacacacacacacacacacacacacacacacgatcattaaaaagtgtatgctctttaagaagaaaagtaaaatatctcaaaggacggtttcaccaccgtcctttattgaatcaatttttctacatttcagagcaagtgtagattctgagggactcctatttgccaaaaagacaaaactagcaaaaaaaaaaacaaaaaancaaaaaaaaacccacttaaaaggtagcaggaaaagaaggtagttttgagtgtggttcactcagtgtctgtgagtctggtgtagtgtcaggagtaaggccgtgtctagctcaagtttacatttggatgtcctacaacactaaacaaaatttttcataatccatggtggggagcacactttggagctacatttcttgtctcctcattgttgacattaattaaacatttataggccaggcacagtggctcacgcctgttatcccagcactttgggaggccgaggcaggtgaatcacctgaggtcaggagtttgaaaccagcctggccaatatggtgaaaccccatctctactaaaaatacacacaactaaaacaagaattttttttttctttttttgagatggagtctcactttgtcacccagg

SEQ ID NO: 710851 - DNA, 801 bp, Homo sapiens
  misc_feature (12)..(12): n is a, c, g, or t
  misc_feature (66)..(66): n is a, c, g, or t
  misc_feature (84)..(88): n is a, c, g, or t
  misc_feature (96)..(96): n is a, c, g, or t
  misc_feature (125)..(125): n is a, c, g, or t
  misc_feature (127)..(127): n is a, c, g, or t
  misc_feature (187)..(187): n is a, c, g, or t
  misc_feature (204)..(204): n is a, c, g, or t
  misc_feature (226)..(226): n is a, c, g, or t
  misc_feature (351)..(351): n is a, c, g, or t
  misc_feature (364)..(364): n is a, c, g, or t
  misc_feature (386)..(386): n is a, c, g, or t
  misc_feature (699)..(699): n is a, c, g, or t
  misc_feature (705)..(705): n is a, c, g, or t
agtacagagggnattggttaagtgtcccaggaaccacacaagcagtgactcctaaagaagttcccnggaaggagagaacccatnnnnngggggtgnagtgggggtgggtcagggtgggctccctngnggggagaatggtctaggcaaggatgcagactggccagttaggtgggtccatgcaggaagntgagggaggtggaaggnccgtgggtttcgagcgcatttncccgccctagttggggaagagcaggaagccggagaagacgctgttagagccctggatgcccaccatgtcgtagtagttattgacagccagccacacctcctcgcccacctgcaacctcagcagcncaccgcccgagtngacctgattggttttggacgtntggccacagaaggtgaccactttgacgccgctgcggtacaggagctggtacaggttggctgtttgcgacgcgtggtagacaaagtagtagagggcggggattttgcaggtgaacttgccagtgctcgtgtgataatctccctgggggttggtgaggaccgcgttgaatctgatcaggctgttgggtgcagggggctggtgggtctgccgagtgaccgtgtacactgactggaatttctgcttgtatctgccctcctcacctggctctccagggatgcccatgggccagggcaccactgcatcacagggggtcncatggnccatttttcacggatgccgggtaagccagggttctcccttctgccatttggtcatgatcaccgggaatggctgggattccgtacgtcccacccggt

SEQ ID NO: 710852 - DNA, 117 bp, Homo sapiens
caagtttcctctgcgtcttttttttctatagacggtttgtcattcgatgctccgaaacgggtaaactgatttccgagatttaaagacaattcgattaaaaaaaaattcggataggtt

SEQ ID NO: 710853 - DNA, 576 bp, Homo sapiens
  misc_feature (545)..(545): n is a, c, g, or t
cgtctccgcgaccgcccggccctcgggcggagggggccccgggctccaaagtgggggggaccgggcgcgagtgggcaggttggcccgagggcgggtgcaggctgggagcggggggccgggcgcggcccggggagtgtgacccggccagcgaccaaaacctggggtgacggagctgaagagcagggcatccagattctcctcagaagtgagattttccaagggaccatggattcggtgtccggcgccctttctttttttcctactcggtagttatgtctcgatcccggcaggcaaggccttccaaattagtcgggagggaagatgtaaacaaaaaacagaaaaacagccaattacgaaagagaagcaggggagccaacaaaattgtggcttcagtcaagactttaggcccgggaaaattaaggcatttaattcaggaaggagatgtcaagaaaaaaacagaacctaaaccaccggtgccagtcagaagccttctgacaagagcgggagcagcacgcttgattggggataggacggaggttcttttncagaacccagagtccttaagcggcaatgggt

SEQ ID NO: 710854 - DNA, 545 bp, Homo sapiens
  misc_feature (525)..(525): n is a, c, g, or t
  misc_feature (545)..(545): n is a, c, g, or t
ctgggtcacattgcgaaatgaagtctcgctcggacagccgggctggagtgcacaggcgcaacctcagctcactgcaacctgcacctgctgggatcaagtgattctgctgcctcagcctccggagtagctaggactactggcatgtgccatcacacccagctaaggtttgaatttttagtagagacagttttcaccatgttggccaggctgggactaaactcctgacctcaggtgagtctccctgctaggcctaccaaagtgctgggactacaggcatgagccaccagggacagccgtgtcctaacttttgttgcttggctcatacagccctgctctgatctccacccatatcagtctctatgcccatcctccccatacggacacccgagaggatgggcatttgtttctgcacactcatacaatactctgaagacatgggtgagtgcaaacagagtcatacaaagattttgccattgtatgatctatacaagtggcaatgtattatgcatacttcaatattggtcntctcacttaattatacttan

SEQ ID NO: 710855 - DNA, 828 bp, Homo sapiens
  misc_feature (429)..(429): n is a, c, g, or t
agcggagtgtaatcttgaagcaaggtgcttgtctgagtatctgaggacagagtggaattttccagaccttcttgaactggaccagtggatgcctgtgtggtttcgaatcaaatctgctcatgcttatgaatcttgctggtatagaagccctgccattcactactgtagggatgatccccatgtggagaaactgacgaaagccttttttctggagtggagctggaagttactcctaactatctcagtgttaaagcagcaggggatgaggagaaattcttgaaaatgctgtcacatcaaaaccaacttcttatagaatgccacagtgaagagtggacttctcaggacaacccacttactatagatgctcagattctgaaacaattttgaaatacttcaatactctaaattacaggcgggaatcattatttngttcaatacctgctgacaagaagtaaaagcactttttttttttttttggagacccagtctcactctccaactcaggcaggagtgcaggggcattatctcagctcaatggcaacatctggcctccggggttcaagccattctccggcctcagcctacggattagcggggattacaagcttgtgccaccatgcccgggctaaattgggattcagtggagaactgggtttcacccatgtgggccaggcgtggtctcaagactccggacctcgggttgatccacccaattcccaaagtgcggggatatacagggcggggagacaccatgcctgggaaaaggcctttacacacgtgtgtcacatactagcaagaaaagggaacccaactgtagaagtgtccctg

SEQ ID NO: 710856 - DNA, 150 bp, Homo sapiens
  misc_feature (75)..(75): n is a, c, g, or t
  misc_feature (102)..(102): n is a, c, g, or t
  misc_feature (113)..(113): n is a, c, g, or t
catcccaggcccccccctccgaggatgaaaaaatggctgcctgcagcttccccggaatccctccctcactgccanagcagcattttttttgtgtaccccctntgctgtttcanatgcccccagcaaataaacccttttttcgttggtcag

SEQ ID NO: 710857 - DNA, 513 bp, Homo sapiens
  misc_feature (513)..(513): n is a, c, g, or t
atacaaaagggggcatagtttctaaagcccagagctgtagagctgtggcttgagcctggattaaaagcaatcgagatctttacacagtaagagggtctgaggctgacaaacagctaataagaagcaggtgccggagccagccaccttgcatggtcacttggtgagttgactgtataacccgcataaaacgacgttggccaacagggctggataacacgggtgctggggaactccattgaatgacgagcacaaggtggtgttatttccacatttgaagaaccggctctgggcattcattcctcatttaagcgggaagatgaccgaccatttgacatatgtggccaaagaaggggcaaaaggctgtgcagaccagtataaatgtgctcagcgagcctatcaccttggcaaaggtccaccccctggtgaagacaagacttaccggtgtcgctgctggatctggagcttcagaacagtttagaaccacaagagttatggcgggcttggaaaacttan

SEQ ID NO: 710858 - DNA, 439 bp, Homo sapiens
cgatcaaggatcgcccggagccttaccctctaccgtgatctcaaccgggagccttaaccctccggacccttaccctcctccagttaatctttatgcttagggattaaacgtgtggttcttttttttgtttttttttttgggaaacggagtctcgctctgtcacccaggctgaattgcagtggcgcaatctcggttcattgcaacctctgcctccggggttcaaacgattctcctgcctcagcctcccaagtagctggaattataggcgcccaccaccatgcctggctaatttttaattttaagtagagatggggttcaccgtgtgggccaggctgttctcgaactcctgacctcgtgatctacccacctcggcctccccaagtgctgggattacaggcgtgagctagcatgcctggccagggtaaagggctcgcggggt

SEQ ID NO: 710859 - DNA, 218 bp, Homo sapiens
gtagtaagctgctaggggcatatcagacgacaatttcacagacacgttaaatgagaggcagcaggatgtgatatgtaagtagcactcatatgtatgctgaggagtgttccaagggcatgtcctatcactgagaaaataaaaggcactaacagattggctctaatcttccatctctcttccgaatggccttgtatgctggatacctgacaccttagttt

SEQ ID NO: 710860 - DNA, 583 bp, Homo sapiens
gggggcgcgcgaggtgggtgcgtcccgggacacgtgtgggttgctgtggttcttggtgctctggggcgtctgagtcatctttgatcttgggttccgccgcaccctgcttcgtgttgtcttctcctgtcgacgccctgtgcctgcccccccactgtcgtggcttttgtttgttcctcccccccgccggcattgttgcggccgctcgtttcttctccatcgctcctctctcgctgcacaacgctgatccccttcctgattggtgtgtcaccaggtgatcttcttactagctcttttcgttcctgcgcaccgcgcgccgcttttctgtgctgcgtcttctccccctccttcttcttccccctttttttgtgctgctgtgctggggaagttttaaaggcgccctttttctccgcgtgctttcggttggtggcccatctctccagggagctcccccccctcccccctttgggtacatcggagaaaccccttttttttttcttttttttttttggagagaccacacagcgggtgggggggggccccctttcttttcccccccctcctttttaacccccccccccccaca

SEQ ID NO: 710861 - DNA, 246 bp, Homo sapiens
  misc_feature (60)..(60): n is a, c, g, or t
  misc_feature (118)..(118): n is a, c, g, or t
  misc_feature (132)..(132): n is a, c, g, or t
  misc_feature (138)..(138): n is a, c, g, or t
  misc_feature (151)..(151): n is a, c, g, or t
cctcaatataaggtggagccaacacaccattatgagaaaggtgtttttaagctagaagtnatcattcctgagaggtacccattagaacctcctcagatccgatttctcactccaatanatcatccaaacatngactcngctggaaggattngtctggatgttctcaaattgccaccaaaaggtgcttggagaccatccctcaacatcgcaactgtgttgacctccattcagctgctcatgtcagga

SEQ ID NO: 710862 - DNA, 1017 bp, Homo sapiens
  misc_feature (82)..(82): n is a, c, g, or t
  misc_feature (138)..(138): n is a, c, g, or t
  misc_feature (674)..(674): n is a, c, g, or t
  misc_feature (678)..(678): n is a, c, g, or t
  misc_feature (687)..(687): n is a, c, g, or t
  misc_feature (692)..(692): n is a, c, g, or t
  misc_feature (695)..(695): n is a, c, g, or t
cccagggctaggagctgcgcgccccacccggcccgcgagggatggcaactacccggggtccggaggcggggctgcgagtgtnggggcggggggcgcgggccgggtcgagcaccgccccgacgagggcccaggccagtncggcccgccccgggttccctccgtgcctcaggtcccctccgtgccccgcgtctcccgcgcattccggtcatgcctcagccgcgccaaggcctgggacacggccggacagaccgcggggcagccctcggagaagtgggaagaggggagaaaacagtggcgaaaagaaggtctcctgggaaggagcgccctgggaagctggacgcggtgggtgctcttgaggggcctcaggagtggacttggggaaaccgcccgccctgaaaactgactcagcggcgcgttactgaggccgttcctagttggaagagaattaatagcacttgtttgagaattacaagttagttccagaaatgaatcgagtgacctcacagcccgtaggcaggggtgggagagccaggtgagcccctcacctcaccccgcccccgccccggcagcgctctggaaagcctcaaagcccagcgctgcgcggaaatgttagaggcccaaggcaggtggcctgtctggactcagacccgacccagatgtccccccaggcccancacncagtcccanctgcncgncgcaggagacagtaacccgactggaacaccagcctttctgaggccatggaggccctgaactcgtgagcacggaaacgtgccacactgcgagcaaccgggaaagagagacactgcaggaggaccaggcaagctctgactctgaggttggaaggctgaacattatgctcttgctgtgtcctgcacggcacagcgcgcgatgccccactcgtcgctgtgcaactgactgacgcatcgtagagttggagactcttcggggctgccctagaagcaagatcggcctccacctgggccccagcaatgcgctcccgtttaggaacactac

SEQ ID NO: 710863 - DNA, 485 bp, Homo sapiens
atctgctccctgaatgtggtgagcccggtgtccacaggactgtgtaggagggacagccagcatctgccctttccagagacctttctcctggcactcgtgtctgggcgctagggatgatcttgtttctgttccttggatttttacttctcttcagctccatctgaagcttttcccctctctcatttcattgtaatcataactcgcacatcaacctcaaattaccctctatcaatcactctcttgcctagaaacttgctgggctcctcctcttctgctgccctgggtgtgtcatgcagagtgccctgcgcctgccaccaactcccaccgcccttgctctcccactgccagaaagttagcctccaggcctctggagtccgagttgggctcacggttccatctgagtgtgtttgccctgagctgtttgtaaatgggacttacaaccacagccaagctcttcaaattatggagttccgtttaaaaaaaaa

SEQ ID NO: 710864 - DNA, 153 bp, Homo sapiens
ggactcaggcagcaagcagatttggtttttaagagacaggctctgctgtcacccaggctggcgtgaagtagcacgatcaagggttcactgcagtctcaacctccggggctcaagtgatggttccccgcgtggtaccgatgctcgaacttcgta

SEQ ID NO: 710865 - DNA, 310 bp, Homo sapiens
  misc_feature (53)..(53): n is a, c, g, or t
gacccaaacaaacaacactagaactagactctgctgaactggcccaagacctncacttcagcatataaggcaatggagaaccagagggatagtgtctgctctaaggtcacacagcagacatgtcagcccagatttcaaccaaggttttcattccagttattgccttggttctttaagattcaaaccccactgtttttatttaggagagaacaagctgctctcttgtgattcttatcctatgactcacttctgccatctctggcgtctcaacgcaccaacacgcttagcaactctcctctcccccggtctc

SEQ ID NO: 710866 - DNA, 429 bp, Homo sapiens
ggctcccaaatagcgttggactacatgcgtgtgtgcaccatggtaggtagttatcgtgatactcgggagagacggtgttcaccatgctggcaagggcttggtctggaactcctgacctcgtgatctgacaaagtgctgggattacaggcgtgacccactggtgccggctattgtggtacagaagttcgtaagagttccaaattattggtgtagagatggggtcttgctaatggttgcccaggcttgttctcaaactcctgggctcaagcgatcctcccgcctcagccttccaaagtgttgggatattcggcggtgaacccactgcctccagcctggtgtattcacctagcccaaaagtagatagatacatagaaggtacttaaaatgtttctccttccccttgtaaaaattcatgtggtaaataacaga

SEQ ID NO: 710867 - DNA, 596 bp, Homo sapiens
  misc_feature (20)..(21): n is a, c, g, or t
  misc_feature (28)..(28): n is a, c, g, or t
  misc_feature (98)..(98): n is a, c, g, or t
  misc_feature (159)..(159): n is a, c, g, or t
  misc_feature (161)..(162): n is a, c, g, or t
  misc_feature (180)..(180): n is a, c, g, or t
  misc_feature (208)..(208): n is a, c, g, or t
  misc_feature (304)..(304): n is a, c, g, or t
  misc_feature (331)..(331): n is a, c, g, or t
  misc_feature (360)..(360): n is a, c, g, or t
  misc_feature (367)..(367): n is a, c, g, or t
  misc_feature (380)..(380): n is a, c, g, or t
  misc_feature (397)..(397): n is a, c, g, or t
  misc_feature (437)..(438): n is a, c, g, or t
  misc_feature (449)..(449): n is a, c, g, or t
  misc_feature (462)..(462): n is a, c, g, or t
  misc_feature (470)..(470): n is a, c, g, or t
  misc_feature (473)..(473): n is a, c, g, or t
ctgcctctatcttgtttttnntttttcnttctggggggggtctagaacagtgcctggcacatagtaggcgctcaataaatacttgtttgttgaatgtntcctctctctttccactctgggaaacctaggtttctgccattctgggtgaccctgtatttntnnctggtgcccattccattngtccagttaatacttcctcttaaaaatntccaagaagctgggtctccagatcccatttagaaccaaccaggtgctgaaaacacatgtagataatggccatcatcctaagcccaaagtagaaaanggtagaaggtagtgggtagaagtcacnatataaggaaggggatgggattttccatnctaaagntttgggagagggnaaatccaggctattcanagtcactaaatttctaagtatgtccatttcccatctcagnntcaagggaggngtcagaagtatantctccacnttncaactctcacactccaagactctagtcgggaaggagctctgtcccacatcgggtcaagttggaactccttcccatttccaacatcatacctcccatcactcagactccctttcccaaggatca

SEQ ID NO: 710868 - DNA, 169 bp, Homo sapiens
catcgcctcggcccgactcacacctcatctgctatgcattttcttcacgtgcagcttgcagtccgttgctgaaaatgattataggccctgcatcctgttaagctttattgtgattacgtgtatgtttcttctttcttttctctttttctttcttcttcttttttttttg

SEQ ID NO: 710869 - DNA, 270 bp, Homo sapiens
ctacatgatagaagacaatgcacatgtacagcaagcattcagaaaatacttatcattactcaatgaatgtctaccaagttcaaagtactttatcttgtataagttcctcaagaccaatctccctgtgcttagttctttacgttattatccatggaatgtggctgcagagtgaagtggtaaatagcagaattcacacttgcacgaatcagcatcatcactcccaacagtaattcagcagctccacacagtcattgttaccatttcacacca

SEQ ID NO: 710870 - DNA, 308 bp, Homo sapiens
cattagagtgcagatatctgaagacttggattaatgtctctctccaaaggtctcttggaagaaaaatacatgatgtctctcttcaggaagttgcagggcctacagaaatgtgtgaccagaggcggctgggcctgtcacttcattctgccctccagatcccccggcagctatgtcaagtagcagcttttggaggcagtaatattgagcctcgtgttcgccgcttcttcctgcctcaataacgctgcacctacaactaagtttgcgcagagttcatggattgggatgcatttgtgaaccggccgtccatg

SEQ ID NO: 710871 - DNA, 968 bp, Homo sapiens
attctagaagccgaggcggccgacatgtttttttttttcaaatcaacgtagtgagtgctaccaccaccatttgaaattagagaaaagattaaagaaatatctgaaactttgggccaggcatggtggctcatgcctgtaatcccagcacttagggaggccaaggcaggcagatcatgcggtcaggagttgggagaccagccgtggccaacatggagaaagcctgtctctactaaaaatacaaaaattagctgggcgtggtggcaggtgcctgtaatcccagctactcaggaggctgaggcaggagaatcgcttgaattccaggaggcggaggttgcgtgaagccaatgatcgttgccattggcacttccagcctggttgacaaggacacaagactccgtctcaaaaaaaaacaaaagataattcttcggaacccttttaatagtttacacgaattttaccaggattggagggcatcttcacccataggaatattacccccaaatttcagcgttcacaagggctggaagggaattcttcttgcccaactcttgtgttgggaaacgtcacacaaggttattactctggataaccacagttttcccccggtggcctttgtgggcggacaatctttcaatttagcgtggcattttgcccacatcatatcccctgggccacaacagtgtgtcaacccgtggaaccctacattggggagaccagggaggcagaacgataagctaagcagcaaaacaccagctggtgcaccagaggcacaacccccctgccgggggatattgggattaggggaacgctaccctgttgacggggtgtctgatcccgacctgtgtatgccgcggaccagaggatgtataggatacccggcagccggatacaattccacaaccacactgtggaggtacataattcaataaagaccaaaaatgtgtacaggacgtgatagtaaactcaag

SEQ ID NO: 710872 - DNA, 118 bp, Homo sapiens
tggttctcatacaggggtgtgggcgatgcatgctatattagggctcttgtatcacctggcagtgtactgtatcaacgtataatacagaaaaaacatctctttaccggtcctccttaca

SEQ ID NO: 710873 - DNA, 1579 bp, Homo sapiens
tcatatcactgtgctacagccttggatgacagacgaccctgtctctattacacaacacacacaacaaaaaacaacaaaacacacacaaacaagcacaaacaaaaacacaaccaaacagaaaccaaaacacagaaacaggaagaggcaaaccaaaatgggccaaacccacaatgacaagcaacaggacacccaacatacactgcagaggagggagacgaccataacaagaaccaaaacccgagaaaccacacgagacacaacaaccaacaagagagcaagagaaacaaccatcacaaatgtgagacacacacacaaggacaccaaaacgccacagaaaaacaagacaacaccaccagagcacacgagccaccgaaagccacacacacatcaacgccacatacaacgcgacccacaatgctcaatacacccctacgagcgaccccacaaacaacgacttccgaggcggccaccgccgaacaaacagcaggcaggaaaccacacccacaacaccaaaactaccaccccccttagaacccaggtgagcccaccaacacccacctccaaaccacaactaccacaaccgcagccgaacaaaccaccgaccaaacaacgaactaccaccgtccggcaacccaccccccaccactcgagagagaacactacgaggcagaaaccaccacacccacgaccacaaaaccacaaacacacaacaacaccaacaccgcgacgcaaacaaaatcgcacaaccacacgacacagggaccacaaacacacaacgggcccgctaaccacaaactcaccacaggacacgccacacccaactgggaccacccaacagcacgacacaatctcaccaacaccacccacccacggatcaaacagcaacaacacggctacaaccaacaacgacgcggcaaacaaagttgtcacgacccccccgacgacagaacacccaagcacacacccaagaaaaacgcggaaacaaacgcccaccaaaacccaacaaactgcgaaaacaaacaggaaaccaaacaagcatgtgcaaacagcaacataccaacccaacaaacagcaaaccacagaacgaaaccccccagacaaacaaacaacagatagcaccgtgggcaacaaacgccagtggggtgaaccacacccacacccacaagaagatacaacacacaacacccaaaacgaaccagcctcaaccgacagacaacaaccactacagcactacacaaacaccacgagacgaagaagaatagagcgatcgtagcacaccagcagcaaccacaccccatggaacatcagcccacaccacgcgaaacaaccagcccccgaggacacccaggcggatcagacgacagcgcacacgacaagcaacaactagtgggcaagtataaacacccgcagggagtgaccaaaggcttaggcacgcacacgttgtacaacagcaggacgcagccagcaccgaaaaactgcaaggcaccgaccgtaacgcacacacgcgacaacgtgttgtacagtaaccacacaccacacaacagaaccaacacaggaaccaacaaaagaacagaacacc

SEQ ID NO: 710874 - DNA, 217 bp, Homo sapiens
aactctgaagaccggctagttgctgacacgaaactgaaccttctaagcgagttgacgtaacacgtcaggtccagctagctggtctcaactaagctgttgttataccttgccttttggtagacttgcaactcacgcactggcgactttgcgccactcttctactggccacacacttcacgcacttggcgctacccgagccctcgcaacttcgctaact

SEQ ID NO: 710875 - DNA, 315 bp, Homo sapiens
tgtactttaacagggctgtatttatagtccagcaccgataagtcacatagcctggtcataacctgagttgtctgtcagaactagccggccatctgcagccgcagacctcaatctatggcacatctcaatgcaattcacttttttttttaatgttgtgaccttctctgcttcttgcaaggacttccggcatcaccagtggcacttttatctgggtcccatgatggttattcaagacttatggtactcacactaacctcagtgaaaaatacatgggacctgacaacacagcttgcgacacgcgacgggtaccgagct

SEQ ID NO: 710876 - DNA, 1466 bp, Homo sapiens
tgtggcgccacagggttgtttttctgtggtgcgcgcgcggggaggtgttgctcgtcttcgcgcgtggggtggacggttgtcgcgcgttttgcatactgggggggttgtctcgtgttgtcgcttccgcggtggttgtgtctgttgcgttgttatgtcggctggggtccgccggcggtgtttgtgtcggtcgccctctgcgctggttgtctcgttgtgtggttcgcgtgtggtgtttttcgggggtattttgtccgcgggacgctttctggggtcgcctgtttttgcgagtgcgtggggatcgcgcccgcgtgggggttcgcggagggggcgcggcgcggtgttggtgcggcgcgtgcgccgggtgggggcgggggagtgtccgctagggcgggccggttgttgggggggccgttggggtgtcgttgtggtgcaagccgtcaggggcggcgtggggtctatctgcgggctggggagggggcgtcgcgtccactggggggggttgctccggttttctcccgcgatagtgggtgggtgtgctcccccgcgtacaatttccccctgtgtagtggccgccgccctcgtagggggtcggcctcgtctcgtacgggcgtccccccgtggtctttggggagacgcctgtgtgtgggcgcccctattgggcggggctctctgttcggtgaggctggtggggatggggccctgaggcgcgcgattttcgtggggttagcactccgctcgctttatggagtgggggcagtctggggtgtgtttggccgccgcgcgtcgccggggccgggttgacgccccacgtgtccctctcttgtcctcttttccgccggagaggggtggtttttcgcacgcttcccttatcccccgagcgagagggggttgttgtatagagtgtggcgtgtcccaggcttgttgtgtctctcacgcggccttggcggacattttctctctccttggggtggggcgtctctcgggggctctgcgcggggtgtgggggagccccccacgcgctctttctctgggcgccccgacccctctgttcctctcttgggagttgattgggcacctcgcctatatccacccgctttcttgtccacgcgttggtgtttattttggagagggttttgtgtggctgttttttcaaaaaaaaaaaggtccctccaaatcacggaaagaataccacctccacagagacacaatgttcctatgtggaggggaggtaatcctaacacccccggctggcccccacgctggcaccctgcctctattcccacgacctgccctcgtcccacgcttctctgtcccacctgttgattaatgtgatttttttgatacgtcccttttccaatgcccgtgtgttcacatcttcgctctggcccgccccttctgtatttaaagcttttgaggcccccataaaatagtacgtgccgtcctgcctaacaaaaataaaaaataaa

SEQ ID NO: 710877 - DNA, 780 bp, Homo sapiens
  misc_feature (20)..(20): n is a, c, g, or t
  misc_feature (83)..(83): n is a, c, g, or t
  misc_feature (90)..(91): n is a, c, g, or t
  misc_feature (94)..(96): n is a, c, g, or t
  misc_feature (99)..(99): n is a, c, g, or t
  misc_feature (117)..(117): n is a, c, g, or t
  misc_feature (119)..(119): n is a, c, g, or t
  misc_feature (213)..(213): n is a, c, g, or t
  misc_feature (265)..(265): n is a, c, g, or t
  misc_feature (327)..(327): n is a, c, g, or t
  misc_feature (353)..(353): n is a, c, g, or t
  misc_feature (385)..(385): n is a, c, g, or t
  misc_feature (395)..(395): n is a, c, g, or t
  misc_feature (408)..(408): n is a, c, g, or t
  misc_feature (415)..(415): n is a, c, g, or t
  misc_feature (483)..(483): n is a, c, g, or t
  misc_feature (520)..(520): n is a, c, g, or t
  misc_feature (530)..(530): n is a, c, g, or t
  misc_feature (584)..(584): n is a, c, g, or t
  misc_feature (590)..(590): n is a, c, g, or t
  misc_feature (604)..(604): n is a, c, g, or t
  misc_feature (630)..(630): n is a, c, g, or t
  misc_feature (699)..(699): n is a, c, g, or t
tggtaggtttgatccctgcngttcagtttcccggggtaatcactccccagatagcagttatatttttgcacttatgtccggtnttttggnnctnnncancagctacccaggcatctntnccccacaaaccagttaatgggcatcgttaagctgccgtgcaacacccaggatgtttttggctcctttgctcagcaacaagttggccaggctgangcccaagttctgggcagccaactggggccctcgtggaatgttacgagcagtnatgcctaccaactgtgggttatcctcagggccatcttcatgctgggcagggacatggatggnagcctgcatggtctcttgtatgctanctgagccgtctagactccagattcctccagtnaggtacagtngcccatccttcanagctgtntgcacggctactggcacactgcagcttccttccaggtgccttaggaaggccctttcagcgatgcagcnaagagagtttcgggatcgtgcagcacacccaccaganccaagatgtnctggtccttggctcgcacttccacgcccaaggccccctgccccacccggttgtnccagcncatgcgctgcaggncagctgttgccaggatgatggcactnaacttctgctgctcgttcagcttccgaagccgggtgttgaggttccccgaatactcctgaactccagangcgggaactttctctgcagctgggctctcttcgcagggagctggttcccaccacactcttctctggcagggtttctagggt

SEQ ID NO: 710878 - DNA, 743 bp, Homo sapiens
  misc_feature (20)..(20): n is a, c, g, or t
  misc_feature (137)..(137): n is a, c, g, or t
  misc_feature (189)..(189): n is a, c, g, or t
  misc_feature (251)..(251): n is a, c, g, or t
  misc_feature (277)..(277): n is a, c, g, or t
  misc_feature (309)..(309): n is a, c, g, or t
  misc_feature (319)..(319): n is a, c, g, or t
  misc_feature (332)..(332): n is a, c, g, or t
  misc_feature (339)..(339): n is a, c, g, or t
  misc_feature (407)..(407): n is a, c, g, or t
  misc_feature (444)..(444): n is a, c, g, or t
  misc_feature (454)..(454): n is a, c, g, or t
  misc_feature (506)..(506): n is a, c, g, or t
  misc_feature (547)..(547): n is a, c, g, or t
  misc_feature (553)..(553): n is a, c, g, or t
  misc_feature (567)..(567): n is a, c, g, or t
  misc_feature (593)..(593): n is a, c, g, or t
  misc_feature (662)..(662): n is a, c, g, or t
tggtaggtttgatccctgcngttcagtttcccggggtaatcactccccagatagcagtaatgggcatcgttaagctgccgtgcaacacccaggatgtttttggctcctttgctcagcaacaagttggccaggctgangcccaagttctgggcagccaactggggccctcgtggaatgttacgagcagtnatgcctaccaactgtgggttatcctcagggccatcttcatgctgggcagggacatggatggnagcctgcatggtctcttgtatgctanctgagccgtctagactccagattcctccagtnaggtacagtngcccatccttcanagctgtntgcacggctactggcacactgcagcttccttccaggtgccttaggaaggccctttcagcgatgcagcnaagagagtttcgggatcgtgcagcacacccaccaganccaagatgtnctggtccttggctcgcacttccacgcccaaggccccctggcccacagcatanatgcatttctcagggtgcaggatctgccccacccggttgtnccagcncatgcgctgcaggncagctgttgccaggatgatggcactnaacttctgctgctcgttcagcttccgaagccgggtgttgaggttccccgaatactcctgaactccagangcgggaactttctctgcagctgggctctcttcgcagggagctggttcccaccacactcttctctggcagggtttctagggt

SEQ ID NO: 710879 - DNA, 141 bp, Homo sapiens
actcctgactcgttggatcttgcccacctcagcttcccaaagttctaggattacaggcatgagccagtggacccagcctccatgtttctgactattaagggaaggttttcacattcatccctgtcaaacatggacgttctc

SEQ ID NO: 710880 - DNA, 117 bp, Homo sapiens
cgtccacagcttctcaagctgctggggttacaatcattaaccaccacacctggcgaaacaatttttttagagattgtggtctgtcaatgttgcccaggctggtctttatactcctga

SEQ ID NO: 710881 - DNA, 505 bp, Homo sapiens
tgtgctaagagatgtgcctgcgtggcagggtggatttgcaagttcttattctcacaggtggcctgacctgatggaatggggagtgcagctcaaggcccagacagagacccacactctttttccataattatataaatgtcagaagtaaggctcagatgcttgaagtcattcggagtcaccaagccggtatccaatgctgatggcttgtacattcttctggattttgtgtgggctgcaattgcactgcatttattttagagatgtttgagagatgcatttattttgtagttgttagatcttctgctttcctaagcagatggaagagggcacagaagtgcacacacagagtgccgtgccgtgggcagggctgaggagtggaacgtacagtctcgctgtgggggttccttttgctgttggagcttcttgatgaaattctagacatttggggcagttttattgggggagaaatttggggcaggttgagaggagaggcccgtctagcccc

SEQ ID NO: 710882 - DNA, 247 bp, Homo sapiens
tgaggtgctctgaggatccctcagagagagacagatgctggtggcaggcatgaggacagcatggttgtatcagctataagagctcgttcgcatggtgctgaatggctgaggaccttcccagtctcgccagagtccgtgcctttccctgtgtgaattttgtatctcgcctagagtttcccttggctttcttgtctcagctactttcccttctcctctcttctcttgtacatctcgtctctttctcttg

SEQ ID NO: 710883 - DNA, 912 bp, Homo sapiens
tcacagtctagctgctaggcatcaactatactactaataggaactgaatgtctacacctcttatgctccctcggcggaggagaagacctacatgctataccatgcaccgtattctgactctctcggaacaacctcttgaaacgatttatatgcttaatagctaccagagtcggtcgcaatgaagtctgactgattgtaagctgactgctccggatctacacggcaccattcggtagatcagtaggcctatggtctgagctttgtggtctccaatctgccttactatgggttgatcgctgatgaggaagccatatattcaccaggcccgtgactagatgttgtacttagcgaggataatgtcatcctccgtataacatatgtacagcgatatacggccaatgggagtcagagatattttgttggagtcgtcgaaaatttcgacggtaatgattatgtgaaacatgatcttgctgtcagagtgatgagtaacttaggactcctatctattctgaaggaacctaagaagggttatgacttaaaactaattaatcttgttcattatgtccctctgaggaacctttaaaaaaacataaatgggaggcgaagtgagaataatttaaacttgttcgataatcgtgataatgaaatttgggggtatcagggggtgcgtttcaggtaaaagtcgagggagccttatgttaagatgatcagagagagactgagctaggaggggtaatgaaggcccaagggggaatgatcccagggggtttagacggaagtaatcaggaattaatttaggaaagatttggcggaagggggattctaaaggtgccttgggtgaaaaaagagtgtgcccgaaacaataggcgtctatgattagagagagtaagggaccatatatttgacaatagt

SEQ ID NO: 710884 - DNA, 872 bp, Homo sapiens
  misc_feature (27)..(27): n is a, c, g, or t
  misc_feature (87)..(87): n is a, c, g, or t
  misc_feature (104)..(105): n is a, c, g, or t
  misc_feature (114)..(114): n is a, c, g, or t
  misc_feature (117)..(117): n is a, c, g, or t
  misc_feature (135)..(135): n is a, c, g, or t
  misc_feature (140)..(140): n is a, c, g, or t
  misc_feature (167)..(167): n is a, c, g, or t
  misc_feature (169)..(169): n is a, c, g, or t
  misc_feature (219)..(219): n is a, c, g, or t
  misc_feature (234)..(234): n is a, c, g, or t
  misc_feature (236)..(236): n is a, c, g, or t
  misc_feature (271)..(271): n is a, c, g, or t
  misc_feature (280)..(280): n is a, c, g, or t
  misc_feature (289)..(290): n is a, c, g, or t
  misc_feature (317)..(317): n is a, c, g, or t
  misc_feature (353)..(353): n is a, c, g, or t
  misc_feature (639)..(639): n is a, c, g, or t
  misc_feature (687)..(687): n is a, c, g, or t
  misc_feature (725)..(725): n is a, c, g, or t
  misc_feature (730)..(730): n is a, c, g, or t
  misc_feature (792)..(792): n is a, c, g, or t
  misc_feature (806)..(806): n is a, c, g, or t
  misc_feature (846)..(846): n is a, c, g, or t
atttttcttaaacagaacctgtttgcnggatctcagttaagtacactttgcagttttcaaacacaatgactcaaattcaactttacnctttaaagaatcaaaannttgaatccnganattacctctttaagacgnatctnatgtcatcttccgacatcatgtatatngntaataatattcgcctcttctcttccgacgacgcgattcttttaacgccangccctcttccctctngngacctgacttagattgtggcggccctagaggcgantaagagatntggggcagnngagggggccttaggtaattgttaagantagaagtatttttaaaaaactgtggagagtggtttnggaggggattttgtccctggctgaagctggtccatgcctgggtaaactttacttataaaagaataccaggaacacacaaaatattcttctcctctttcttttgcaatccagttttggagccaaaaaataatctgtgtgcacatgtgttttgataatactgtctcgacttaggtggggaaattaaattcaggagttttatgactttcttttgttctgagtatcactttagagtataaaaagtttttcaaaagttctttatcagaaatagtttcaccctatgttgaantaacaatacccaggattgtgagacataaatcaacatgagttggaaaanccatctgagtttcatcattgtttgtctatcttggcaanatttnttcagaagcaccataatggggggcaatccttttgcaccaggctcaggcagctcaggaggcanctgtggtgagtgangctctctaccaagcactttggcttctagggataaagaacncatactccactaccttcaaatgccaa

SEQ ID NO: 710885 - DNA, 287 bp, Homo sapiens
cccgctgtaccagttgcgcagacatcagctggctgaggtcgtacaagcaatacaacatctcctgggagctggacgtgcgggaggtgcgcaattcctcccttcggcgccggctcatcctggccaagtgtgacatcagcaagattggggatgagaactgtgaccccgagtgcaagcacacgctgaggggccacgacgtctgtgaattgtcgccatactgcgccagcctgcgcttcgtgaagaagcagcacaacggggtgtgtgacatggaccgcaactggtacggcggg

SEQ ID NO: 710886 - DNA, 624 bp, Homo sapiens
  misc_feature (66)..(67): n is a, c, g, or t
  misc_feature (80)..(80): n is a, c, g, or t
  misc_feature (91)..(91): n is a, c, g, or t
  misc_feature (175)..(175): n is a, c, g, or t
  misc_feature (226)..(226): n is a, c, g, or t
  misc_feature (236)..(236): n is a, c, g, or t
  misc_feature (246)..(247): n is a, c, g, or t
  misc_feature (257)..(258): n is a, c, g, or t
  misc_feature (262)..(262): n is a, c, g, or t
  misc_feature (266)..(266): n is a, c, g, or t
  misc_feature (283)..(283): n is a, c, g, or t
  misc_feature (294)..(294): n is a, c, g, or t
  misc_feature (298)..(300): n is a, c, g, or t
  misc_feature (306)..(307): n is a, c, g, or t
  misc_feature (310)..(310): n is a, c, g, or t
  misc_feature (320)..(320): n is a, c, g, or t
  misc_feature (327)..(327): n is a, c, g, or t
  misc_feature (396)..(396): n is a, c, g, or t
  misc_feature (399)..(399): n is a, c, g, or t
  misc_feature (501)..(501): n is a, c, g, or t
  misc_feature (534)..(534): n is a, c, g, or t
  misc_feature (539)..(539): n is a, c, g, or t
  misc_feature (620)..(620): n is a, c, g, or t
aatacaatgaaaaatttttcattttttttggtaaatcttaattttctgaaatttcttcttctttcnnaacttttttcctnctgcatttgcngctttttcagccatgatctctgagtacttccttcggttgtatcttctgaattcagaatcagccagcagttcttccacaatagtncttttcctttgcttcttgggaattcgtgaatggtagaaatcagctggattntcaacaattnttccaatctnnaattactttnngaanccanccccatcacttttcctntaaaaagcctntgcnnntgccannccnggccgcgcancccgcanttgccttgagatcatttttcagttgcatttgtcatttctggagctttcataccaaaccagccatccccngcngtcttttgtcgttcttttctgcgttttttctgaagttgatactttgattcactatatggtggaacacagtggtttttttcaaaatcaggtgtaatgacggcnttctgcagaagctcatttttctttttctccttnatctntgttagggttctcttgttagactgtagtttatctgcattgaaattaatatacaaaccacgcgcaactggctttatactcanacat

SEQ ID NO: 710887 - DNA, 695 bp, Homo sapiens
  misc_feature (21)..(21): n is a, c, g, or t
ttatctcatccaccacagacnccccacattaaaacatgaattcctccagagccgccgtttagaatatgcacactaacccctccagagagtgactcaagtatattccacttctatctgtaaaatacataacgcggtggtctggtcactaataaattacccccctccaaacatacaatctacaaacacctctatcttgacacctcccacattaaacactaataccactacatattcaacctcaaacattttaaaactaatcccacaacccaatccataaattttaaaaattattacaatctcaatactaatacacgcttcataacctaaccccccttaactacaactactccaattcactcgaccactcccattcttacttttcaaacacatactcacatattacaactctctctatccaatttccctatttcaaataacataacaccaacctattattacatacaaacattttctacacactctaactccacactcgaatcttctcttcacaacatacctcataccacataatatacttctacacaactacttacataacatctcctatattactatctacaacaaactattcttatatctccttcatccacaaacaactcttctcaatctattctaacaatcatcatcactacaatttatcatatatcacttcccactctcactcaccctactcc

SEQ ID NO: 710888 - DNA, 474 bp, Homo sapiens
acctgattctgcacccacagcagcatcttcccggtaagaactcatcttcttatggaccgccttttcttcctgtactctgaggctttatatcttagaactcctcttgttaatagaacattcttacaaattgtctatatgagtttgatgattcatgctagagaaaatgaatgggaatagggttatgtactatgttaatagtttatccattttagataaaatttgagaatatccaaaaactttactgaaataccaacccatagacaagacacaggaacaaaacagcaagtttaaagaaattttaaacagttgttttaagaataattaaaacttgtgaacacagctcactgcagccttgaactcttagcctcaagtgatcctcctgcctcagcctccctggtagctgggattacaggcacaagccactgcacccaggcagaagacacattttagtatgtaacagtgtaaggaagaaat

SEQ ID NO: 710889 - DNA, 720 bp, Homo sapiens
ggttcgttgggcggtgttggtttctacgctcgtcgactgcggttcttcctcgggcagcggaagcggcgcggtggtcggagaacgctggcctaaaacttcggcgttgtggtgacagacaaatggcccgataccaagcagactgttcgtaagtccaccggtgggaaagccccccgttaaacagctggccactgaaagccgctcaggaaaatgcgctccctctacctggcggtggtgaatgcaatgcctcatcgctacaggcctgggaccgtggcgcttcgagtagattcgtcgtttatcagacagtcgatccgatgctgctccattccgtgaagctgcccttccagaggttggtgacgggagatcgcgcaggatttcaaatccgacctgaggtttcaggagcgctagcatcggtgcgctgcaggaggctcagccgaagcgtacctggtgggtctgttcgaagatacctaacctgtgtgccatcctacgctatagcagagtcaaccatctatgcccaaagacatccagttggctcgccggatacggggagagagagcttaagtgacaggcagtcatttatgcgcgcttttgtagataaagttctgttaacacatacctttgggcttcaactaccgtgacctaaatcgcgtaacccacaacacgtctatcactactcgtggcattttgtcaccttaaagtccattccatccttcactcacggag

SEQ ID NO: 710890 - DNA, 382 bp, Homo sapiens
  misc_feature (209)..(209): n is a, c, g, or t
  misc_feature (225)..(225): n is a, c, g, or t
  misc_feature (251)..(251): n is a, c, g, or t
  misc_feature (292)..(292): n is a, c, g, or t
  misc_feature (297)..(297): n is a, c, g, or t
  misc_feature (358)..(358): n is a, c, g, or t
  misc_feature (366)..(366): n is a, c, g, or t
tccaatgtgtcatacgtgcacacacatatgtctgcacatgcacgcatacatatacacataaacacacacatacatccctacgagacacaggatctggatccaactctcctagaaccaggattcctgccatgtttctctcccatcagcttacatctcccacccccagtgctgttcagctgggctctggggcaagataaattcccagctgnaagagggctcaagtgnaaatggggcctggaaccaggcatctnaaaagttctggagagtaaggatgttggggataagccagaangcaanctgaagactagtcttcccatacccaaggaaggacttgggcctctcagggttttgaaagaangccttttngcaaagcagctgggta

SEQ ID NO: 710891 - DNA, 171 bp, Homo sapiens
ccctggcaggggggggtgccaggcccctggaaagcaggggttcccgttacgaggttgtggtccggggcaagccaagtacgaagcagcagccttcgggggttgcttcttcccccagccgggtcccccccgggcctgtttcccagggtttgtttaataaccgcccccctccta

SEQ ID NO: 710892 - DNA, 1274 bp, Homo sapiens
  misc_feature (348)..(348): n is a, c, g, or t
  misc_feature (360)..(360): n is a, c, g, or t
  misc_feature (373)..(374): n is a, c, g, or t
  misc_feature (382)..(383): n is a, c, g, or t
  misc_feature (390)..(390): n is a, c, g, or t
  misc_feature (397)..(397): n is a, c, g, or t
  misc_feature (403)..(404): n is a, c, g, or t
  misc_feature (409)..(409): n is a, c, g, or t
  misc_feature (413)..(414): n is a, c, g, or t
  misc_feature (421)..(421): n is a, c, g, or t
  misc_feature (427)..(427): n is a, c, g, or t
  misc_feature (432)..(432): n is a, c, g, or t
  misc_feature (437)..(437): n is a, c, g, or t
  misc_feature (444)..(444): n is a, c, g, or t
  misc_feature (452)..(452): n is a, c, g, or t
  misc_feature (464)..(465): n is a, c, g, or t
  misc_feature (471)..(471): n is a, c, g, or t
  misc_feature (476)..(476): n is a, c, g, or t
  misc_feature (480)..(480): n is a, c, g, or t
  misc_feature (486)..(486): n is a, c, g, or t
  misc_feature (488)..(488): n is a, c, g, or t
  misc_feature (499)..(499): n is a, c, g, or t
  misc_feature (514)..(514): n is a, c, g, or t
  misc_feature (517)..(517): n is a, c, g, or t
  misc_feature (520)..(520): n is a, c, g, or t
  misc_feature (522)..(522): n is a, c, g, or t
  misc_feature (530)..(530): n is a, c, g, or t
  misc_feature (543)..(543): n is a, c, g, or t
  misc_feature (546)..(547): n is a, c, g, or t
tttttctttaaagaggttcccaggtttcacagggtgtgggacacctttatggggttcccccttgttggtgttggtgcccccttaacacctaagacacaccccgtttagccccaggggaatgtccctttctctcccacccaaggtctaataggagcccccagggtctcaggtccatatacaaattccccccagcccatgggttgacaggcttgggttcggttgtcccttcagggaaaagcagaattgcacgccatcataagctttgtgaccccaccgcatgggggtagtgacattccaggcattcattgacttcatgtccggcgagacacctgtctcagatctagcagnccaagtcatggnttccttcaagatnntggctggnnacaagantacattnccatgnncgagntgcnncgcgagntgccanccgancaggntgagtantgcatcgngcggatggcccnntacacnggccntgantccgtncnaggtgctctgnactacatgtccttcnccncgncnctgtacgncgagagtgacctntannccaccccgcccggccgccctcgtcattgtgcgccgtgccctgccttgcacctccgccgtcgcccatctcctgcctgggttcggtttcagctcccagcctccacccgggtgagctggggcccacgtggcatcgatcctccctgcccgcgaagtgacagtttacaaaattagttttctgctaaaaagaataataaagttacgttcaaaaccaaagactacatattttattatagaaaaagatatttttttctccaccagacaaatggaaacaaaagaggagaagattaactagtttgcaccgaaatgtctttgttttgttgcgacataggaaaataaccaagcacaaagtaatattccatcctttttctactgattgttttttcttctatctgttccatctgctgtattcatttcgtccaatctcatgtccattttggtgtgggagtcggggtagggggtactcttgtcaaaaaggcacattggtgcatgtgtgtttgctagctcacttgtccatgaaaatattttatgatattaaagaaaatcgtttgaaatggctgttttctaagcgaagagaactttatgtggcttctcatttttgaatcccctcaagaggtgtgaacgtagtcctctgatcagcacacacatttggcaattgttaatattgtctactgaaatagacaacttggagagtatgacacttatatttagccagtgtataaacctccttt

SEQ ID NO: 710893 - DNA, 208 bp, Homo sapiens
ggtcatagctgttccatacatttaaattcagaattgcttgcaaaagctgggccgggatagatcgacatcctagcataacgatagtaccatcttaaacgtatgtggaaaggtcaaaataaatcatttcaaaatacttaactttcctcataaggatgtcaggttctcttctctttcattagcgggccatcagtcaaggtccttataacac

SEQ ID NO: 710894 - DNA, 326 bp, Homo sapiens
ggcccgctgattggcggacgatgttcttcagcaccggcagtacgccgccatcggacatgagttcgctgcaaaccacctatgtggtgatcgccgttctggtgttgctggtggcgctgttgatcgcccgcacaccgctgccggatctgcgcgcccaggagcaagcactgcaaccggtggccggcaaggggctgtggcagtatccggagttcgttggtggggtgatcacgcagtttttctacgtagcggcccaggtcggagtcggcgcatttttcatcaactacgtcaccgagcattgggcacagatgggcagccagcacgcagcctac

SEQ ID NO: 710895 - DNA, 726 bp, Homo sapiens
  misc_feature (23)..(23): n is a, c, g, or t
  misc_feature (49)..(49): n is a, c, g, or t
  misc_feature (241)..(241): n is a, c, g, or t
  misc_feature (280)..(280): n is a, c, g, or t
cgggccgggttcccacgcggatncggggccctgcaagttagctcgcganccccttgtttggagtgacaacagcgagtcagggcaagcgggccggcccagctcacttgcggctgcagtcagcccggacgccgagacccgttcctaagcccccgtgccccaggcctcccaggggtgctgagcgcccccaggcccagaatctccgggggcccgggcaaggctgtcaggtatgttccctcccgtngcgaagccggggctgggcctccaacagacccacccggantcgcgtccctgggcagaaccacacagcctgctcgacccccgggtgaggacttccacttggggggtcccaagatgcgacgtcacacaccgagggacacgaggcgggtggggaatagccacaagcccctccatcctgcgttcaccccacactacgttctgctccgggccggccggggaccctgcccctccgggtctctggtctcctccgaagcttctttgtctaggaagtgcggggaggtgccggccccgggcgcgcgtccccgtcccccacctttcttccccacgttgcggacccgaggccgccagggtcgtgggggcgggggcgaggctggcgcctcgagacccccgggttccccgccacccgcagggcctgagccgcggggaggggcggggaggggacgccgccgcgggccgggggtggagagcgacttcctcctccgcggccgc

SEQ ID NO: 710896 - DNA, 769 bp, Homo sapiens
  misc_feature (423)..(423): n is a, c, g, or t
gggcggaaccggcgagccccgtgcactgtgtctgctgccgaggccccgaccgccaccgtctcggagaaagaaccgtttggcaatgctgcaactctcctcccgggaccctccgggttctctgtccgccaagaaggtccggactgaggagaagaaggcaccgcggagagtgaacggagaagggggcagtcggcggtaacagcatggcatgctgcagtgcgtcctggcagcaccttcgtcctctagagctatggcatgccccgcgttcttgtgagctttgccctctctgtactgctgcgtccctccccggtccttcttctcggatgcagtttctcgtttctccgactggcagcggccgattccctcactcaggcctccgacttcacttgtctcagaccgtgtgccgacgcaacactgcatgtgtcncctcctactgcatgtctgcactgctccagcactctactcaatctcctccgtgcccagcgcgccgaccggcctgcttgccgtcgtggctagacgccatagtcgccgcgagtaacctaaggaggaagcagcggagaaggacgaggaggacggcacgggtgctctggtcggggccctggagaggccaggccgggtggcttcccgggcacggaggaacggcggagcgctgcaagccgaatgacccgagcataccgtcagggactagcagtgtccagagagagtagaccgaactcggagaagtagagatccgggagccagtgacgctagagtgacatgaggatcgatgaaa

SEQ ID NO: 710897 - DNA, 234 bp, Homo sapiens
attaggcgcgtctgcgtgtggcccatgagtagacactccagtactgagacctagagtcatatgcttgtaggagccgagtcgtgtactaagtatttatttaaaacaaaagaatcacgtcttcccatttgtacttcagcgctagcccctgttttgcacagccgagtactggccattatgtctatgttgggccccctgctgcaaaacaataaacagaggacgcagaacgcgcctaat

SEQ ID NO: 710898 - DNA, 758 bp, Homo sapiens
tttgtcttctccgcacgactgttacagagggcttgcagagccttctctctccatgtgcaaaatggcaactcttaaggaaaaactcattgcaccagtagcggcaagatagaggccacagttccaaacaataagatcactgtcgtgggtgttggacaaggtaggtatggcggtgtgctatcagcattctgggacaaagtctctggctgatgaacttgctcttgtggatgattgttggaagataagtcttaaaggagacaatgatggatctgcagcatgggcagcgttattatcttcgagcatcacctaaatattgtggcagtagtaatacgatatatctgctgtgaccgtcgcagattctatagatctgtagtggtgaactagcaggagttcgcgtcatgcaagtaaggggagagtcggctcaatctggatgcaggatgaaatgtgtaatgtcgttcgaaattcattattcctcagatcgtcaagttacagtcctgacttgtcatttcataattgtggattacgcaacccagatggacagttcttacgatagtgttgacctggaagactaagatggatgacccaaacacgcgcgtgattggaagtgcgatgtaatctgggatactgctagatttcgctgcttatggctagataactaggcattcatccagtcagatgcatggatggtaaggggacttgggatcagtgtgtgtggaggtttatggtcagttcctccggattgatcgactggagcatgtaaa

SEQ ID NO: 710899 - DNA, 1552 bp, Homo sapiens
ggacagctagaccctgtctcccaggctggagtgcaggggtgtgactgcaactcactgcactccagcctgggagacagggtctatgctgtcactcgtgccgacattcgccaccgagggcgcatcgcgaccatctaggagccgatactagtgactggccacgtcgttaaacgagagcgcgagacaaacatccgagagacgcagaggagggcacactcgaccggaacaagaggaggcgcgacaacgaccagagagcgacgcgacgaaaaacgagaaaaaacaggcagaagacggcgacagagaagagaaagagcagaagcacaagaaggccagcaaacgcgacgacccaagacgacaccgaagaacagacgaacaaaacagggaacacacacgcagacgagcacagaggagagcacacacacagaagagacagcgagcaaaaaaggcgagacagacacaaagccgaagagacaagaagaacaaagagggcaggcagacaggcgaacaggcggacacacaggcagagcaacaagcaacacgacgaggagagcggcggaagcggacaggagagagagacgaaaaggccaaaacggagaaagaaagagaaagcagaagaagaggagacaagaggatggaaagggacgaacagggaacgggcaccaggaggacagcggaaggcgaccagcagacccacagcccgaggagcgacacaaaaggagacacagggaggagcgagaggcgcgaagcagcggcgggagacacagcggaagggacggaggagagagacagacaggcagagcgagaacgagacaggcagggcagaagagagaccgaaaggcaggaaggcgcgcgaggaggaggagacggacagcgcgcgacggagaagccaagcgggaaaagaagacgaggaggaggacaggggagcaagagcagcgacacagagggcgaagagaggaggacggagccagcggaggagcagagagaagaagaccgaagagagggaaagacacgagcagaggcacgagaagagcgagaggagagcggaggcgacgaggcggagcacgcgcgagcggcaagcgagaaagagaaggagagacacggagcagagaccagagacaacagcgggaggcgaagcgagcgcacgacgaggggcgcgtgcagacggacgacggaagcgcaggcaaggcggaggagcggaggaggagagggaagcacggagcagggaggacaggagagaaagagagcgaggcggacgcacgaccaggacaaacgaaggacgcccgaggaacgagaaggaaggagagggcaggagccgccgagacccgcgccagaacagggaacgcagaggcagacgggaagccggacagacgacggaggagcgcaggggcagaagcgagaagccagcaagcagagcagggagagagacgacgcgccagcgagcaagaagaagcagacacggaggagagcaacggaggggagagtagcgaggagagcaagcgccagggaggaagcagcggcgacgcggagcagcacgacggagaggagcgaagcagcc

SEQ ID NO: 710900 - DNA, 212 bp, Homo sapiens
cttccaagtagctgggattacaagcgtctagcaccacacctggctaatttttgtatttgtaatagaggcgagattcaccatgtggcaggctgcgccgaactcctgacttcaagtgatttacccgccttggcctcccaaagttctgggattgcaggcatgagctaccactcccggctctagatcgcattttgaatattgaaccggatagcttg

SEQ ID NO: 710901 - DNA, 540 bp, Homo sapiens
  misc_feature (225)..(225): n is a, c, g, or t
tggctggggatgaggggaatacctgcagaaaagggagatgccaaaacagaccaggcacagaaagctgaaggtgctgggagatgccaagtgaagtgtgtgcatttttggataactggtgtacttctgggtgacggtacagtttggaaatactattttttattcaagttttattaaaaaggcagaatttggttttacttttttttttttttaaaaagctatgtggtnagcacacagaacacttcatggtggctcgggggggagggggcatatgtcactaatagaaggtctccaaagcgggatggagggggagaaaacacctttcccttctagtttggagagacttcctctgggctcccaggaggagggatccccggacttggacacacagggccacctgggcacaaaagcctgggggtatagaaaaacaaatgggttttaatgtcctcttctccctttccatctttcagcatagacttaattcccttaagcccagacttcggtggagaccggacccctagtcttgggttaccagggtgtcag

SEQ ID NO: 710902 - DNA, 243 bp, Homo sapiens
atctagaggatcccttgccagctctcaacgggctcgggccttcctcgggacacggctgggtcccacggccatgatgtgctagaatctgcggtaagaacaaggtgctagaatgaggcccagcaaccagcaaaggggtgggaaggggttgctacagccccagtggtgtgagatggtgccaagacgagtcttctgggggtcagcctatgatggagagcgtgaggggggtacggagctcgagatcgt

SEQ ID NO: 710903 - DNA, 484 bp, Homo sapiens
  misc_feature (82)..(82): n is a, c, g, or t
tcaatcacggttctcttggtatctgctacgatggactgataggtcatagggactctatgtctaacattctgaaaaactgacnaacgttttcaaagcagctgcccattttacactccccagcaatgtacgaagggcttccatatgtgaggttatccacattcccaatgtgtaagggtatcctcatcctcaccaacatttgttattatcttttttattcaaaccatcctagtgagtatgaaatggtatttcattgtggtttggggtttgcctttcctcttgtctaatgatgctaagcaccttttcaagtgcttattggccatttgtttatcttcttcagaaaggtatctattcaaataatttgcccattttaaaatcaggttgtcttggccaggcacggcggcccacacctgtaatcccagcactttgggaggtcgaggtgggcagatcacctgaagtcgggagcccgggaccaggccgaccaaca

SEQ ID NO: 710904 - DNA, 1305 bp, Homo sapiens
  misc_feature (9)..(9): n is a, c, g, or t
  misc_feature (100)..(100): n is a, c, g, or t
  misc_feature (304)..(304): n is a, c, g, or t
  misc_feature (335)..(335): n is a, c, g, or t
  misc_feature (371)..(372): n is a, c, g, or t
  misc_feature (381)..(381): n is a, c, g, or t
  misc_feature (443)..(443): n is a, c, g, or t
  misc_feature (453)..(453): n is a, c, g, or t
  misc_feature (460)..(460): n is a, c, g, or t
  misc_feature (468)..(472): n is a, c, g, or t
  misc_feature (478)..(478): n is a, c, g, or t
  misc_feature (481)..(483): n is a, c, g, or t
  misc_feature (487)..(487): n is a, c, g, or t
  misc_feature (489)..(489): n is a, c, g, or t
  misc_feature (497)..(497): n is a, c, g, or t
  misc_feature (692)..(692): n is a, c, g, or t
  misc_feature (832)..(832): n is a, c, g, or t
  misc_feature (847)..(847): n is a, c, g, or t
gcaaatttnttttttattttaaaaaattctttgaaactctaaagtctttgtgtctgcaatgaaattgtactccttgacagttgatagattatatattctnccacccctcaaacttgcattccactatatttattttttggcaaaagatgagctgtatttgtttgaaatctgagacactatgttcaattggatgtatctgttcaaatttattcccacgtgacgtggaagtccttcgttggatgtcacaacactacatttaaggttggtaaggatgacttggaggtccatggttttcattaccaanattttaagattctgaatgtcgatggagtctnactgaagagtcaccaaaggtgcctgccccccccccnngctgggaantgtcagttggagactgtcccaagggcgctgaagaacccagtggcaggggttctggctgcttnccatctgagngtgggangggagggnnnnncatgancannnggananagcaatcnactctgagaaatggaacacaaggagttacctatcactttcacttataattccaaaagatgactacaaccatgtccatgctcagattcaaacagttttccatatcacttttgggtggtaagatgatttacagtttttttttttaattggcagcaccactaaccattccttacattctttttggtatgtgtggtttnctttttatttaacccgcagccgacatcgtagtttctggttttgttttgttttacagagctgttgcatgacttatgttaccatcctaaaaaacactatattaaacatggaataaatggtctttttatgaattaggcttttngaacatcctggtgtngggattttttggtttttcaattggcaacaaaagctctgtagggctgcagacatttaaagttcacataatcatctgtaagacattatgtattttgtggaaatactagaatttttttcctgattttgccattatatggatttgctatttttggattaatgcaaaagtatatgactttgtgttttatgtgatacaccataaatattcaacggtgttgaatactaacagtgctgactacatattgcctgtgtgttcgcagagaaagatggtttctaataaagagtaggaaagcgtgaaattacacagtacgagtctcctttaaatgcacgtttgtgggggaatgggctctcaccaatatccttagacatacagtgtaagaacggtggaccgccacatatgagtccaacagaagtcaccatgttccccattagacaccggggccacaaagcggggggaccccc

SEQ ID NO: 710905 - DNA, 235 bp, Homo sapiens
acgagcccggccggccgccgggggaagcccgcggaggagacgcggggccgggcgagaaggtccggagagcggggggcacctgagcccgggcgggcccgccgcgctgagcggcgctgagagccgcggcggagcagcgaaggcggccggccgaccccgcgcgcccggaacaggaggcgcggcgcccgagcggcccgggcgagacaaaggcgccgggtcggagccctgcccgcggccg

SEQ ID NO: 710906 - DNA, 100 bp, Homo sapiens
aaaatttttgggtccccccggttttagggaaagggtccccccccctttcccggaaattttttccccccctttttttccccccaaaaaagggggcccttta

SEQ ID NO: 710907 - DNA, 857 bp, Homo sapiens
  misc_feature (9)..(9): n is a, c, g, or t
  misc_feature (100)..(100): n is a, c, g, or t
  misc_feature (304)..(304): n is a, c, g, or t
  misc_feature (335)..(335): n is a, c, g, or t
  misc_feature (371)..(372): n is a, c, g, or t
  misc_feature (381)..(381): n is a, c, g, or t
  misc_feature (443)..(443): n is a, c, g, or t
  misc_feature (453)..(453): n is a, c, g, or t
  misc_feature (460)..(460): n is a, c, g, or t
  misc_feature (468)..(472): n is a, c, g, or t
  misc_feature (478)..(478): n is a, c, g, or t
  misc_feature (481)..(483): n is a, c, g, or t
  misc_feature (487)..(487): n is a, c, g, or t
  misc_feature (489)..(489): n is a, c, g, or t
  misc_feature (497)..(497): n is a, c, g, or t
  misc_feature (692)..(692): n is a, c, g, or t
gcaaatttnttttttattttaaaaaattctttgaaactctaaagtctttgtgtctgcaatgaaattgtactccttgacagttgatagattatatattctnccacccctcaaacttgcattccactatatttattttttggcaaaagatgagctgtatttgtttgaaatctgagacactatgttcaattggatgtatctgttcaaatttattcccacgtgacgtggaagtccttcgttggatgtcacaacactacatttaaggttggtaaggatgacttggaggtccatggttttcattaccaanattttaagattctgaatgtcgatggagtctnactgaagagtcaccaaaggtgcctgccccccccccnngctgggaantgtcagttggagactgtcccaagggcgctgaagaacccagtggcaggggttctggctgcttnccatctgagngtgggangggagggnnnnncatgancannnggananagcaatcnactctgagaaatggaacacaaggagttacctatcactttcacttataattccaaaagatgactacaaccatgtccatgctcagattcaaacagttttccatatcacttttgggtggtaagatgatttacagtttttttttttaattggcagcaccactaaccattccttacattctttttggtatgtgtggtttnctttttatttaacccgcagccgacatcgtagtttctggttttgtttaagggctttgatactatgaacatccaaagacaattaacatggtaattgctttatgatagctttgacacgctggatattgttcatgacaagcgagctcagcattagtcatatactgagat

SEQ ID NO: 710908 - DNA, 1501 bp, Homo sapiens
  misc_feature (9)..(9): n is a, c, g, or t
  misc_feature (100)..(100): n is a, c, g, or t
  misc_feature (304)..(304): n is a, c, g, or t
  misc_feature (335)..(335): n is a, c, g, or t
  misc_feature (371)..(372): n is a, c, g, or t
  misc_feature (381)..(381): n is a, c, g, or t
  misc_feature (443)..(443): n is a, c, g, or t
  misc_feature (453)..(453): n is a, c, g, or t
  misc_feature (460)..(460): n is a, c, g, or t
  misc_feature (468)..(472): n is a, c, g, or t
  misc_feature (478)..(478): n is a, c, g, or t
  misc_feature (481)..(483): n is a, c, g, or t
  misc_feature (487)..(487): n is a, c, g, or t
  misc_feature (489)..(489): n is a, c, g, or t
  misc_feature (497)..(497): n is a, c, g, or t
  misc_feature (692)..(692): n is a, c, g, or t
  misc_feature (832)..(832): n is a, c, g, or t
  misc_feature (847)..(847): n is a, c, g, or t
gcaaatttnttttttattttaaaaaattctttgaaactctaaagtctttgtgtctgcaatgaaattgtactccttgacagttgatagattatatattctnccacccctcaaacttgcattccactatatttattttttggcaaaagatgagctgtatttgtttgaaatctgagacactatgttcaattggatgtatctgttcaaatttattcccacgtgacgtggaagtccttcgttggatgtcacaacactacatttaaggttggtaaggatgacttggaggtccatggttttcattaccaanattttaagattctgaatgtcgatggagtctnactgaagagtcaccaaaggtgcctgccccccccccnngctgggaantgtcagttggagactgtcccaagggcgctgaagaacccagtggcaggggttctggctgcttnccatctgagngtgggangggagggnnnnncatgancannnggananagcaatcnactctgagaaatggaacacaaggagttacctatcactttcacttataattccaaaagatgactacaaccatgtccatgctcagattcaaacagttttccatatcacttttgggtggtaagatgatttacagtttttttttttaattggcagcaccactaaccattccttacattctttttggtatgtgtggtttnctttttatttaacccgcagccgacatcgtagtttctggttttgttttgttttacagagctgttgcatgacttatgttaccatcctaaaaaacactatattaaacatggaataaatggtctttttatgaattaggcttttngaacatcctggtgtngggattttttggtttttcaattggcaacaaaagctctgtagggctgcagacatttaaagttcacataatcatctgtaagacattatgtattttgtggaaatactagaatttttttcctgattttgccattatatggatttgctatttttggattaatgcatactaacagcgctgactacaagaaggatgtagtgttttggctttctgcattacaacgtcttctggaggaagggagcaggatgggtttcatttgaatctagcgtgtgtcttaacatctttctaaatcggcggtggaactgcatagttcaacttcctgtctgtctccctcattatactcttccctccttggcttatgtttcggcttttgtgtataagagcatctttctttgcagcatcctaatcttgcttcagtttctgggggctcttttatcctgcttgaagatccggagtgtggaaggaggctagaaagtcttgggcagtatgtgagcagacctcttgctgaccagcccaaggatggtggtgcccacacctgtacttggggcatgccaacttgatacccctggcccatctttggagagccaacccatggaaaggtctggagccttttgctccccttctttcccggccatcctaccaggtaaagtaccttggttt

SEQ ID NO: 710909 - DNA, 133 bp, Homo sapiens
cacgaacacgatggtcttgctcagcttgcgttgcagttccagcagttcatcttgcaggccttggcggatcagcgggtcgagggccgagaagggttcgtccatcagcaggatatcggcatccatcgccaaggcg

SEQ ID NO: 710910 - DNA, 824 bp, Homo sapiens
gtttataattgggatgtaaaaagaagaaacaaggatgactctaccaagaacaaagcataatgctggcaattaaaaatgtggtttagttttccaaacatgttatcttaaatacccctttatccttacaggttgacataactttgaatgttttaacagcaagaattttacgaaaagataaagcaccagttttcatttactttataaaagagcaaagagttcagctcttcaacactagttgttgtgaacagtgtggtccacttcttcagtgtgttccaacatgttctcagacgaaagcctacatggtattgtaagtcattatgtttgccgtgtcataagaaaactcttagctgacaatggccgaaaactgtgagacatgctatggaagctgaatgccggacgctagcaccagtatactttgtccctttactaatcggctgatgttactctcacttgatgtggttaaaccatttcagaggtagaagaagacagacgcagtttgaatcatcgtgaaccttgtaagggctagggtatatctaggacttagtggtcctctgaaggctcaataggtcttctacttaagctggcaagttccattgaccttaactgcttaccccacataacctaacctactactgattctccctggaccatattacggaaactgggtcaaaagggccttggacgaacacatataaaaaaggggctcatcacagaacgtaccgtgagaagactaaacccagcaggaatcagtggcaaggagggaaagaacaagaggacaaaacatacaagggcagaacctacggaccaaagggtgaaaactaaga

SEQ ID NO: 710911 - DNA, 868 bp, Homo sapiens
caccctgtacctaatcctcaccaccccctccctgctttatcctgccaggagccttggggaaacagtctgtgacagaggattcactaaggacaagtctctcagttcaatctttaacattgaggtggtaaaagaaaaaactgcagaagaaataaaacagatttggcagcaatattttcgcagcaaaagatacagtctacgcagttattcctgcagaaaagtttgatttgatctggaaccgggctcattcctgcccaacagtacagtttctggtgatcacttcccggttgcttctcactgttgtccaccatgaacttttcacgcccatcacgtcatactccatactggctgaaatgagatagcagatctcgccgctcagtcactaggctctacatgttcgatctgttatacctaaactccaacatcttgagtggccttcgttgaccttcctcgatagcgcctttccgtccccctttctttaaagcgaggacttatttcctgaccctccgtcgctccccccaatcgtctgcgtaggcaatgccaccatcaacgtctatcaacacgcatgtcacgcgcaaggggagttaccttccacacaccccattgtggccgctgaaccaccatcatctctctcccccaagtccgttgctcccccctcccccctcactttccgcttcccacgttatgttcttccaattcttcccccctctttcactatactactcctccgcttccacctcccaacactcgaccacgcttaccccccccccgcccctcctctcgttactttccccccggcgcagtggggatccggtgtcccctattaccgcagatcgccgctctcacccgcacttaagtactagcactctgg

SEQ ID NO: 710912 - DNA, 812 bp, Homo sapiens
tcgcccctagctgtctcctactcaccgcaagagccccgcacccgccttttgctctctctcctctggcaggatgaggcgtgcaacgcctgggtgaaggagtaccatcctggcaactatgggaactatggttatgctagtacgtggggtatagtgcctgtgaacgaccagaaccatcgagaggtctcactgaaagtctgagaagcaacagtaactgctataaaatctctttccagtgagactaggccatgaagttaaaatccagaatagattatcagctgaaatggattcacaatttgattcctacaactggatttctaggtgaaactataggccaactgaagatttgatccagagggagcccaacaaaagctgctgtgctatatgatgctgttttcttcatttgtcttttttatcatttcttgccattgattacgcctgaggtgatgcggtgtaaattgtgaatccggaatgggttccaacttaatggcttgcaggtaccactttgataaccagctcagcatcaaaaggttcctagtgtttcaaaatactgtggcgtttccatggaaaatgctgagtttggcttattctataaatcacattagttgaatacagagacttgaacaagaggcaaataagacttccaaaaaacaattgttcgccggccggcgccctgaaaagttttttcaccctcgttgggcgccggcccaagaagggatcgtggcttcccttcaagaaatccggcccaagggggggcccccaaaaaccgcggcccgccttcacacacaagggctgggcccggcaaacggcccgca

SEQ ID NO: 710913 - DNA, 1702 bp, Homo sapiens
  misc_feature (124)..(124): n is a, c, g, or t
  misc_feature (553)..(553): n is a, c, g, or t
  misc_feature (621)..(621): n is a, c, g, or t
  misc_feature (632)..(632): n is a, c, g, or t
gctttctgtgtcgtcgaggtgcgtcgtgtttgtctgcaccgctcgtttctttgctcgcgcgtggtgtggatgtggtatgtctgtgccgtcttactcttatcttgtgggatgccctcgcctgtgncgtcgctgcctcctctccttagagtggggtgggtcctcggtgggcaatcttcttctccctcgattgggtcctctgtgtgtcgcctgcagcagatcgaccgtgcggttgttttttttcggggggccggacgctcacacacccccttgttgttgttgtccgggcgggccactttgggttgtggtcaccgcaggaggatcctctcgaagccaggggggtgttgttctctcctcccgtccacctggcgggttgctcctctcctctgttcgccctcttgtggtgggtggtttcctcagaggttgtgcttgttttgcgcgctcctccctctctctccgcgtggggtggtcgcatatgatttatttcctccccgcggcgttgtgtgtgataattatcatcgttgggggggccatcacaactacatgcgcgtggggnccgcatcatcaacatctgggggtggtccacaactcgtctgctccgacgcgccgcagagtattggtggnggagatttttngccatcacactcccacgggggttgtttgcttcttgcctcggtgtttcttttgggggcaccctcctctcctcatcttgtgttggtgcgtctcccctcccgccacaatattggtgtgtcttttgtattatcttcgggagctgcttcctcgtcccgcgaggagatggcgcggtagtggcccatctgttttgtcgtgtcgcaacactcgggggggtattatattttgtagagaagatatagtagagaaatatggtggtggcggccccctcgggggcgctatatgggccccatcccacgctctctctctcggtcgtatagcctctccctctcgcgcaatcttctcgcgagaatatatagctcctctctcgcgagaagtagagaagatattgtgtgtctccctctcgagagagagcctcttgtggatatgtcttgagatgatatatccgcacactctcgtcgagatagtggtatagagacactctgtctgtgttctgcgagtgttgtggggcccctctctgtgtgtttgagagagtgttacactctgtgtgtccccctctcgggtgattgtatacacgcgcgtgctcacgcgggctgtgagagtgtgtgttttcgggagtgttgtctctctatagagagggtggggcccacgagacacaccgcagttggtgtgtgtggtgtctcttgacggggaggtctctgtctccagaggtgtggggaaaatgtccccacaccctgtgaggcgccccctgtgttcctctctgtctgtgtagcgtgggagagtgtctcttggcgcgccagagcacacccctgcgggcgtggtgtgtactcttgctttgggagtgggacaccggtgttcgccatttacaccccgtgaaataggatctccattctttaatattatattgaagagtgtttttttgtacacgcccatatttctgaatatttttgtaaaagaatagcacccaccccaatttgggttttttaccggtaaggggggcaccctgggcccccccccccccccccttgggtaagggaaaaaaaaagggcgccccgaaccccacaaaaaaaaaaaa

SEQ ID NO: 710914 - DNA, 114 bp, Homo sapiens
ttgcattgtagcggcttgcttgtacccttgcattctaccgggaagtacgtacacggggtatgtgccatgcatcctcgtgctgacctgaacagccggggagcggttcccgcgctc

SEQ ID NO: 710915 - DNA, 894 bp, Homo sapiens
tgcggtggctcatgcctgtaatcccagcactctgggaggccgaggtgggcagatcacctgaggtcaggagttcaagaccaccctgggcaacatggcaaaactccgtctccacaaaaaatacaaaacttagccgcgtgtggtggcaggcacctgtaatcccagctactcgggaggctgcggcaggagaatcgcttgaacctgggaggcagaggttgcagtgagccaagatcgcaccactgcactccagcctgggtgacgaagcaagactccatctcaaaaaaaaaaaaattttgaaccagttggggataatttgattttgaaaattggtttaagatactttctaaggaattatagcagttacactctaaatggtgaggctatggatgctttaatctcccggactatatttctaatgtcctaagataaacgtatggttttaaatatcacaaattatttttcgaaaaaatttttgacacctagaaaacattaaaaagttatatattcttaaaagattttctaaacagtggtacttttaaattactcctcctcaaaaaattagttactttagcaaacttgaccaagtgatagacgaacaaaatacagggtcttgacgaccggtgttcatttaattgcttactaacacttaggtcagtcaaaccctcgcattggacgatggctaaacccggcgaaagtagctgcaggagcgaaataaggccgggcaccgaccggggacaccggggaccgtgtctcaaatatactatacagcagataagaagttcccatagtgctttcaccgagtactaaggtggccgtagaaatataaaaaaagtgtgggccgccgataaattacactgtgccccgagaaagatataccgacgagaagagatacacagg

SEQ ID NO: 710916 - DNA, 335 bp, Homo sapiens
  misc_feature (25)..(25): n is a, c, g, or t
gagacagagtttctctcttgttgcncaggctggagtgcagtgacataatctcagctcactgcaacctctgcctccctggttcaagtgattctcctgccttcgcctcctgagtagctgggattacaagcacccaccaccacgcccgactaaactttgtatttttcagtaaagacagggtttcaccatcttggccaggctgatctcgaactcatgacctcaggtgatacacccgcctcagcctcccaaagtgctgggattacaggcgtgagccaccgcgcccggccccttttcatctctttggggtgctgatgaggcagggactcaggaagaagcct

SEQ ID NO: 710917 - DNA, 379 bp, Homo sapiens
aagacggagtttcacttttgttgcccaggctggagtgcaatggtgcgatctcggctcaccacaactccacctcccgggttcaagcgattctcctgcctcagcctctcgagtagctgggattacaggcatgtaccaccatgcccagctatttttgtatttttagtagagatggggtttctgcatgttggtcaggctggtctcgaactcccgacctcaggtaatccacccgccttggcctcccaaagggctgggattacaggtgtgagccactgcacctggccgaaaacggctgttttaacctgcccagctgggtgtaagtttgaacagagtgaaaatgtgattgggagcataggcagcttctcttatcccctcttccctc

SEQ ID NO: 710918 - DNA, 457 bp, Homo sapiens
gaggatcccccgagaggagaggacttggctgactggtgcaagcgagtttcctgcgcagcagcatccatgtcaacatcactgcgagagcggagcacgttctctgcctttcaagaccgtttcatctcttaccggccctagaggctttcagagcggtccacgcgaatctatgagcgtgaactgtcactctgcagcaggtgctcaggaaagctactggtcaagagtcgcagtgtcccaggctctggggcatcatactgctggttgatctcaaagcagctgaatgatgctcctcacattgcctggtttgacttccacacgggacaaggggatatgaaatgtgctttgagaagagcttactggcttcccaatgtatttgaagatagggttgccatttttgtcctctatgcgttccaaacgcagagaggagcagcaagcatgattatgactttcttggttaacg

SEQ ID NO: 710919 - DNA, 611 bp, Homo sapiens
tactgggaaaaggaccaattgcaagggctagtctttactggaaaaaaaaaattttacagcaccatttggagtaattaagtgcagggtgccacatgtgtgccagctgttgggggcaccagtttgtacatggggctccacagcggggcgacatcgctgggcctcgcctttgtgcagccaaaaccaggacagccgctggtatggtcctcttacaaagactgcgccatactattctctggttggagaaactggaggggagaccataacactaggggtctaccccgtggtgcccctagaaggctccctttgtggggggccacttcggagaccacgacggacgaccacacactgcgccctgagcggcaactgccggggagacttgtcaacgcggggcccgcacccgaaaactaccacgtggacccacggggaggaccccgcgagggatggacagccctcggaacaacacaaggccccttgtgccgcccgagctcggaaaaaatcccttcttccccagccttcgcctttccctatcaccaaacaccgagtactcgggagattacaaggggtccaaataggtgactctttcgcacggtgtaaagttttccccgaggctc

SEQ ID NO: 710920 - DNA, 476 bp, Homo sapiens
gtggctgaacctcggagcagttgtgccctgcctaatgagctttttactgagacttgcaacaccccagtcactctggaagtcatcaatggggaagaaatggagggaaccttggtgttctcctttcccacaaggaaaatcaggtgcacatacaacctatgaggagacatggagggtcttgctgtcacccaggctgaagcggcatgaacatagcttactgaagccttgatctccggggctccagtgatcctcctgcttcagcctctcaagtagcggagactacaggtgtcagaggcatgtgaacgacaacaactccatcctgaataggaactgggtaaaacgaggttgaaacctgtgagctgcattcccatacagttaaggcattttaagtcacagcgtgttgggaattggtgggttcttggtctcactgacttcaagaatgaaaccgcagatccttgcggtgagtgttacagttcaaa

SEQ ID NO: 710921 - DNA, 319 bp, Homo sapiens
gtctgggctgatctgcttggggctaagagatgaagagagaagccagacaatagtccaaggccctctgctttaggtctttcttctaaattctgattctttaatttttttttttttggttaattttaatttttttttggtaaagatgggttctccctattttgcccacaagggtcttgaactccccgtttcaagtgatcctcccaccgtggcctttcaaagtgcggggactacaggcttgagccattgcacccagcctgaacttgcatactttctggtcatcttttggctacccgtgtttaacaagaagatgaggcccacg

SEQ ID NO: 710922 - DNA, 306 bp, Homo sapiens
tatctattcacaagatgacggccaatatgacgaacagctatagatattaaggcatgtgctataggttgtctttgttgacatatgaaaaatgctttagatggataagattctgaatatagttggattagtcacagctgaatcctgttgtgataagatgagttctacaaattgaaagctttgaaaagctactactttgacttctaatacatccagatgaacacgatgtagcaatatcagcttggttaggtctacctggccaggtagacctaactgctggcagggagatttttcagaagcatccacact

SEQ ID NO: 710923 - DNA, 902 bp, Homo sapiens
ttccagacagctgcagcggacgcttgcagaggagcagcacaagaaccagctgctgcagtgaggagctggaggcactgcagctgcagctgcgtgccctggagcaggagaccagagactggggtgtgcatgtgagtacgtggtcacagggagggtcctgctgcatctgagcctgacatgtggccccagtgcgggatgaggtcttgcagctgcgcgggaggagctggaggcacttgagggcggccagaaggggctgcccggggaaggccgcagggtgctcctcctgcagcagcggttgttggcctgccctgtgctttgagaccaggaacgagcctgggctgcagtgcacgcaaggtcacagatcgaacacgaggttggttgaaacttgcagaattgacccccagtctgtgaggcaagaggtaccaagccaggcttgcaaggcagggaccacacagcgccaggaccaagctcaggggagaaggccccgtgcaggtgcagctgacgctttgagcctttccctcccagtggaccacaaggcctcaccagaaggtgcttgcagacagcggacgccggggcccattgggcccgtgggggtcgcgggattccacccggtcggcgggcgggttgcctcaccgggcttgcgagtacaggggatcctgtgggcccgccccgcaggcagtggcgaggtgcttcaggcggattcttcgcgccggcccgagatattgctctgaccgatgcgcttgcacagggctcggcggctaggcccagcatgggcagcaacgcacggcggcttggtcccgtgggcgctatttgcgcctctggacgcgacggacgacccggcccacggtgtgtggctcccgggggccagcggtgcgggagcaccggtcgggccgaccccccggcgg

SEQ ID NO: 710924 - DNA, 119 bp, Homo sapiens
gattaaatcacacactggcatatttaagctcgaaggtcagtctcggacaataaatttactatatttgcctgacgtaccactctttgtgtaggtatttgtcatatatttacggcaagcta

SEQ ID NO: 710925 - DNA, 220 bp, Homo sapiens
  misc_feature (64)..(64): n is a, c, g, or t
  misc_feature (67)..(67): n is a, c, g, or t
  misc_feature (94)..(94): n is a, c, g, or t
  misc_feature (103)..(103): n is a, c, g, or t
  misc_feature (190)..(190): n is a, c, g, or t
tttgtaaataaagttttattggaacaccagccacactcattcgtgttcatgtagtgtctgtggnagnttttacattacaacagcagggctgagnatttgcagnagaggatatatggcctgcaaagccttaaaatcttcactttctacccctttacaaaaaagtttgccaattcctgctagagaagagatnacatacaactaaggacttaaacgagtgatc

SEQ ID NO: 710926 - DNA, 937 bp, Homo sapiens
gtctgtattccgtcaagtaggactcagactgtagaatgcgtgtagtcgcgctcctagtgagagtgccactccatggtgctaccgtgttgcagggctcaaaagagtgctgacaagtgttatgcgtgcagctcgctaatctaaactctatgcttcaggatacatgcacgacacaatagatcgccaggattcagaagtgttggcatctatgtcaccctctttgcaatgtgctgcgcattagaaccgctgtatcatttggcttccgagtgagatatatgaatccttgtccttaaatcgatgctagaaagaagatctcattcctcataaaacatagagtcgcccaattaacatagtgggtcggtgtcatgctattaggtaggatgagtatgcactcgggctatgatgtgtctccacttaggaaatggtcactcgacagttggaggtcttggacgataccggatgcaccccctggtttctaacattgtccattggtccgaacgtgaacctgcattcgatcttgctcccgctgaccctcattgctaactacaaagatgtatataaatatctacgcgattcgtgagcgagaatctttgaaagaacactcaatttgtattcgcgagaggattttaaaatactctgaaataaatcttaaatgaacagtaacagtgatagaactactcacattaagcaatgtacaacacgtgaccaccattgatcggaaataacttgatgacgatgatttatagaggatccaccataccaattgaaaaaccgaagggaaacgtgatcgtatactacactagtgagctggtattaaagatcccctagggttacaaaaatccacttataccccttgcggggggcaggattagcttactcttaaggaaggcaaaggttcctaccgggaaccgcagtagcatccccaccaaggattgagacc

SEQ ID NO: 710927 - DNA, 186 bp, Homo sapiens
ctgaggcctatggtgaaaaaggaaacatcttcagcccctaacaaaaagaagctttctgtgaaactgctttgggaagtatgcattcccttcccaaaggtaaactttcctttgggttcagcagtctggaagccctgtttttgtacattctatgaataaacatttaggaactccctgaggcgaatggca

SEQ ID NO: 710928 - DNA, 383 bp, Homo sapiens
aatgaaaacagactaagtgttccagttaaaagacagacattgtcagagtgggttgaaaacaaccaaattcagcggtagggttgtgaacgtgtgcagcggtaagcacaggaatattccaaccgcagggtgaagatggacaccaaacggccgtgcatcagttcacattgcatttttctgtcaaacagcaaacttacctcggatttgggaatgtggttgtgtggacgcctgttgcgtgcagccgtgagcgtgagtctcatagacctgttcctgagtgaaagaggcaaaaaggtgacaaaattattcatgccatgtggctttgttcagagttcaaaagcatgcagaagtaaacaagatattgccaatattcattaaagtataatttg

SEQ ID NO: 710929 - DNA, 127 bp, Homo sapiens
acaattgtggtagttacaaactgcgataacgctgctgctatgatgtggggcaagatgatattattggaactggcaaggaggaaggttgttggcatccttttagaaaatagatttttttcggagtctt

SEQ ID NO: 710930 - DNA, 1383 bp, Homo sapiens
  misc_feature (1257)..(1257): n is a, c, g, or t
gcgttttatgctgccaggcgagctcgaaggaccactggtgccccgcgcccggttcggcgctggccaacactagcctaccaggggaaagcagagacagtgcacgtgcggtggggactaatagataagtgtagtcatagcgcatgcaggaaccgacgcggagaactgtttacggagtcgagagcatgagcagcactagtgatggacggtggccacgcatgggatgaacgctactgcttgctgatggcaatggtagggtgatatctgagttacatacttacgctatcgagggagattatttgtctaatggttgacattatctaataaatgatagctggcgatgaccacgtagagtgttgatactagtgtagtgcgattgcacgttgatgccattgtgaattggggaccaaacggcagggcgccgccctgatggaaaaggatactggcaggcaatgcactgtggctgccaaggaaacttacctaggtaggggataacaccccattatgaatgaacggggcaagttgtgaaggcagctatcaattctcgtcacacttgccatgcgtactggtaactaccgttttcctgcgcattatagcgggcggcttgggagtcgcgcacaataggtagcatttccgaacaagagggcgacgccatggaagccaatagttgggtctccttccatttagtccgctttgtaaaggaaacttggtacaaaagtgaacgactatcaacaatgacttcgggttttccaactaatgcgcccttggaagcgtggtttcgaccgcggcaacgaaggttggactcgtagcgagaggcaccccggggggcaaatgtggacccgattttcaaagggtcctagcatggttatcacgtacgagtaccccagagaagtacaaagtgctttccaaggtaaaacttggagaggggggacatacaacggggaagaccatgtgcaagaggccgaagacacatgggtttcctttaactccacaaaatggaagcgggatttccataggggaagcgccattataaaaattattcccaatcgttggatcgcaattggctacaccgtttgggtggaccgttaccttctctttgcgatgggcttccccccccagggggaggcaagaagcgccctggtgccaccgtccttggggaccagagaaaacctttgccccatttttcggagggtcgcacaagaccgctgagcttgtggtggcgtaacaggcgtctgcggaagtgttgatcattgttacgtnttgagaggggagcggcgcacatgtgcgccgacacaagcgcaggttgtgcgcgaaacacaatagctgcatcatgctcaaccgaggagaggaacgcacattctcgtggcagcaacgcgcggagaacaa

SEQ ID NO: 710931 - DNA, 988 bp, Homo sapiens
gactgacctggagttgaacgtaaagaagcctatatgctacgtataaattctataaggtgtccagttatgctaatctctaggaactgtagtatctgcttgagtactatcccaaagtctattcgataagtcttcccgcagaatcatgctgactctagtttatcatgcatataccttgcacatgtaacaaaaattctcaaattactataccgcgtccctcaacagatttgacatttcacaattgcgacttgcgtgtaccatatagatagacataggcctaaatcgagtcactatcgaccgtgtagatcttagaggaatagactagataggaaagagtgagtcggattggcgcaagcagtatgaaatcattccaacgtatgtatttacgtgaaagggtcactattgggctcgactgagaaagtgaacattcccactttgcgctcgaatttccagcgcttggaaaccatactggacactagaggcgtccaggggcacgatggggcattaagcgaaacgcaccaattaccacatattctcagcaaagcctcccgtttgcgctctttgtcgcattgaaattattatcaacatcgcacgaacgtttcggtgatatttatgaatgggagagctcaatgagcgaggtagaatcgaaagcgtatagggtaaagagagtttctacaaagcgcgccaattggtaattttcctaaaatggtggggagaagttgctgtgagattctcttggaaaatagaagaagttatgtgataagatacacagttaacttattcaggaaagagtagagacacacttgggaattaacattaattttttaagaaaatcttaggtttttaattaaaatagaggttggacataaggctttaaagtaattaaattccgcagtacccgttttcctttcttattaaagactataagtccatatttagtttttttctggcgaggaaggccaatttttttttttcccctttggaaagtaac

SEQ ID NO: 710932 - DNA, 871 bp, Homo sapiens
agtcaactacctgctctgggagagaataaaaaggttatagttgacttttcctcccctaatatagctaaagagatgcatgtaggccacctgaggtcaactatcataggagagagtataagccgcctctttgaatttgcagggtatgacgtgctcaggttaaatcatgtaggagactggcgggacccagtttggcatgctcatcgctcacctgcaagacaaatttccagattatctaacagtttcacctcctatccggcggatcttcagggtctttctataaggaatctaatgacagaggatttgattactgaggacggaactttacaggacagcgagcatatcagctgtgcttagttctgctccagggctaaaaacaccagatacttacaaaaagcttgcgaagctctatctgtgatcgtctcccgcccaagagtctaacataaaatctatgatgcattggcacgtcctcctttcaatcagagacgaccgcgggacatccctctctatcaacgcataggatgacactgactcacctgtaacaacgcgacactcccgaacacgactacgcaaccgcatccagccgccacgcgccgcgactggacaggaccaagacaacccacatgggcgacctcacgggccacaagagagtggttaccaaatcagtccactccaagcccactaaggatcaaaccactagcagttggagcgctcacgtacgcgtcagtgaaacaaccatactagcaacccggacctagacacatcaaaacaacagcagcaaccaaaacctcgaccgcaccaacagccaccgacaacgaacaacgtacacgttgcacaaccaaacagcacaaccactgtaacacacacaaccaca

SEQ ID NO: 710933 - DNA, 566 bp, Homo sapiens
atgctttcctagcttacaaaaagttctatattgggttaaaaatcaatcaactttctgatatttccccttcgtgcaatggtatggtcataagaaaacagagctgaaaatggaaatctgcagtagttacagttgtcttgaatttctttcagtggccacatcatttccacagttttccaccatccgggaggaagcctggacatgtgcagcctatcgggcaaccggcacagacagtgtgctggcaaggagcttcagacacgccaagtggatggattaggatttgaactgcatatgaaacaggagacgggttctcatgtgagatcaaagatcatccaaagctgttcaagctctaagcgattctcaaatgttaccatttataaaaggtaaatagacctgttgaaggccaagttcagggcagatgtagagatcagtgtagtaaagggtatacatgaatgctggacttttagaatcctgggggcataaatagtgagaagctcgatgatagaaatacatgcacgagatgaatcaatcagcagaaagtgcatgctaaaaaaataaatgatataaaa

SEQ ID NO: 710934 - DNA, 262 bp, Homo sapiens
  misc_feature (192)..(192): n is a, c, g, or t
  misc_feature (209)..(209): n is a, c, g, or t
  misc_feature (226)..(226): n is a, c, g, or t
ctacaggaacagctatacaggaaacagctatacaggaacagctataccaggaaacagctataccaggaaacagctataccaggaaacagctataccaggaaacagcttataccaggaaacagctataccaggaaacagctataccaggaaacagctataccaggaaacagctcttaccaggaaacagctatnaccaggaaacagctatnaccaggaaacagctatnaccaggaaacagctattaccaggaaacagctgtgac

SEQ ID NO: 710935 - DNA, 911 bp, Homo sapiens
tcggaaaagtactcctcaagtggggtaacaacacgtcgccttgaacagcgtcggggtgatccacaccccgtggcccttttataagggggtgagaccactgtgttaaactgcgtagctatttcaggtgtagcaccccctgctatttatgctctagtttatgcccccggatgattatttgtaggaactaaacaaacaaaccatttaggggggggcttcgcctatactaagtgtgtagaacgaagaccttacagtgttaacgctccggagatactgtgggaccaatttctctcccctttattaatggggggcaaagacatggcccaaaaattagaagagctgttgataatcataatcttacaggaaaaatacaatgtggggaaaaacaatactatatttgcgagcattttaatatagcctatgggtgacacaaccacaacaggtcatgctaatcctcaccattgggaggtcttatatactccgcacggatgcaggtagccacgccaccccacgacaaccccgtgacacactgttttgtcccgtgaaacaacctcccgtagggagtgtctagaagaaccagggctccctaacaatatatctttttccagaccaggttctactttcccacgattccctcgtagacagcctccggccacaccccccaagtagagcaaaacctcataaatagtataccggaattatctggggccaaaaaacttgggtttccagcagattcaataaaagagcaaagcagttatctaaagaaaccaaaaacatatgctggagcacaagaacaccacacaaaaggtgttagattataaccgctttgagagagagaataaaaaaggacgcaaccccgtttaaaccttgggaaaatgtgaaaatcattttaaaaaaaccaacttaccaaaaca

SEQ ID NO: 710936 - DNA, 129 bp, Homo sapiens
  misc_feature (64)..(64): n is a, c, g, or t
  misc_feature (86)..(86): n is a, c, g, or t
gatctatgtggtgaaaatgcacaggagcttggtagactgcggggaaagagagagctcctttcgncatgttttaccagtcgtggtgntataaccccgttaggttgtattcctttaatttcccagcccttt

SEQ ID NO: 710937 - DNA, 696 bp, Homo sapiens
cggtgctgggctgagcgcagggagctgcttggcagtgccgaggagtcccaggacctccagatgccctgctggagaggaggcatgactgaaggcagcatggccccgtccaggcagtgcgaatgcatgggatgatgtcaagactgctacacggagctggatgaaggctgtcattgtcctggtggaacagcttctacaagatatagtgtctaagttccaggctggtcaagagcaagatcagcaagagcgatgcttcctgcgagatgctccaagtaaagagctagagccacaatgctgtcggacacagggaaccggacggctgcggatacatgctcatccagaatcctggatgtcaatcatgactgtggcgtcatcagacttcgatgagtacttggaccttgaatagagcgtggatcactcggccccatcgccaaactcatgcatgatgcaggatactggcgagagcagcagctagaagacccctgtggagccaacatccttccagggcaattgggctctgagtggccccaggccactgggatgcactgccaccaaggggcataccccgtcactcaatgcgatccgtgaccattcccaagggatcccatttcacccctactaattcacctgccaagaaacctatccgtctgtacacacttggcttgtaacctgggaaggtgcgcattaggtggaggtggc

SEQ ID NO: 710938 - DNA, 374 bp, Homo sapiens
ctgacctcctgtctcctttggaaagcaagtatcgatgcatatgagctatatgtgagtaacctatagggatactcgaattatagctgctatacatgagtggccattaattgattcgacattcttataacatcaatgctgtgctatgtatgtagagcgcatattactgatactgcgttacatttgattgacaatctctatgacgattacaacagatgaagatgtatgtatctgccaagatcgctgtgagctgtgattggtatgtgtaacccactagtgaggtgcaaatgtgattctgtgctttgatgccatcatgattggtggctaatggaggagctgaatatattgagacttagagcttttggagacttcggtcg

SEQ ID NO: 710939 - DNA, 611 bp, Homo sapiens
  misc_feature (4)..(4): n is a, c, g, or t
  misc_feature (93)..(93): n is a, c, g, or t
  misc_feature (142)..(142): n is a, c, g, or t
  misc_feature (157)..(157): n is a, c, g, or t
  misc_feature (285)..(285): n is a, c, g, or t
  misc_feature (296)..(296): n is a, c, g, or t
  misc_feature (316)..(316): n is a, c, g, or t
  misc_feature (319)..(319): n is a, c, g, or t
  misc_feature (336)..(336): n is a, c, g, or t
  misc_feature (356)..(356): n is a, c, g, or t
  misc_feature (363)..(363): n is a, c, g, or t
  misc_feature (376)..(377): n is a, c, g, or t
  misc_feature (380)..(380): n is a, c, g, or t
  misc_feature (383)..(383): n is a, c, g, or t
  misc_feature (476)..(476): n is a, c, g, or t
  misc_feature (517)..(517): n is a, c, g, or t
  misc_feature (521)..(521): n is a, c, g, or t
  misc_feature (523)..(523): n is a, c, g, or t
  misc_feature (534)..(534): n is a, c, g, or t
cttnaaacaaagtacataagcaaaaataaataatttacaccaacccactaacctaattttcagagtaaagccatttccaattacagtactgtnatcccgggcaccagcctgtggttaaactttgatgattcattatttttanaaaacagtaataaanattgaatactaagcaaaatctttaacaaaaccactggatttaactttttaattttaaataaccaaattttataattttgtacataattcaatgtaatgccaatataattagcatttcagccttgacgngctggtttttnacagggatgggggactatanatnattcagacagtctgcgnaccatgagatacaaataagnatgggcnagcatatagtagnncanaanccgcagacactctactaactggggaaatatctgaaggctttacacctttattatccataatggctttggattacgattgtgtgacatataganctttgatattttagatacagctttatttttttttcacgggnagtnanaatccatcatnagactccataagacttttactagtcttgcatgtagactctaggagtttgtgatctgataaagagtacatgaaattta

SEQ ID NO: 710940 - DNA, 379 bp, Homo sapiens
gccctgtgagttagaacatacaatggacatatagattacacatcaagaaatataaaaatagaatggtggaaaatcgagacagatatcataacaaaaacaacgaagcacacacttattatactaatttattcatcactcaaccaaacaacatcctataaatacaatccacaacgaaaacacaaatcaacagcttacaaatacacaaaaaactcatacatcacgactcacacttaaaaaaataacaaaacacaaaaacatacaccacctcaccaccaaacaacatacaattaaacaccacaaaatctcattcaaaataactctcacaatatctacaaacacaacaaactaaatatttacataactcaactacaaactaaac

SEQ ID NO: 710941 - DNA, 227 bp, Homo sapiens
ccccccacgccctcagtccagctcaattttaaaactctccacacttcacaaatacataagtgcagttgtacagagggtcaccgttctcactacaatatcaattgcaactcaacatgtgactccagtcgccaaggagcttaattatgatctagacactcatacgtctactgggaggatcaaggcagctgaaaagaaggaagcgcgtaatgcagacagccacacaaaaa

SEQ ID NO: 710942 - DNA, 427 bp, Homo sapiens
atacctagggtcttagggagaggatctccctctactctcacttgattcaacgtgtggttgaattgtctggagcactgggacattttttctcttttccttatgggagccacagtgcaatgcaatctcgccatttaactttcaggtcgatatccctttcctgatcagacatctttgtgccccctttgggaaggaaaagaatacacctacgatgtgccaggcactgtgttaggcgcttttatatagatcctcgttaggatgagactaagggatgaggacatctctttataaaaggcccctaagtaatggataaacagaaacacttagaggtgagaaggtctgacttcaagatccaaggtaacgattgccttcagatctgattgtttgggctcaaggacttatcccctacaatattctccctaagacccta

SEQ ID NO: 710943 - DNA, 536 bp, Homo sapiens
  misc_feature (279)..(279): n is a, c, g, or t
  misc_feature (363)..(363): n is a, c, g, or t
tgggttaatctagaggatccctggcccggctctctaccttgacctcagtgatccacccacctcggcctcccaaggtgcggggatcacgggcgtgagccgccggccagccgaaaccatcaattttaactccagagaaagggctgaggtcagatgctcgaggctggctcgggccgactccggctgcaggaaattggataacccaaccttaggtaaaaaggagtcccggccgtgtatctctgagggtggagacacccagccagttcaggagccagtcccaangctcactcgggagtgttgccaagttctctgaaaccagggaggggggggaggtgttgtggtgattggggtctgaagaccccctgnccggggcccttgggtgagagaaggatttctgagaattggatgatctccggcccgagcaggtggttttggctcagcgtgctctaagttcggacaggcctgtacatgtccaggcgtcggtgcatgcctcttcctttcatttatccaaccagcccatataacgcccggatatggac

SEQ ID NO: 710944 - DNA, 610 bp, Homo sapiens
  misc_feature (5)..(5): n is a, c, g, or t
  misc_feature (40)..(40): n is a, c, g, or t
  misc_feature (78)..(78): n is a, c, g, or t
  misc_feature (125)..(125): n is a, c, g, or t
  misc_feature (470)..(472): n is a, c, g, or t
  misc_feature (504)..(505): n is a, c, g, or t
  misc_feature (567)..(567): n is a, c, g, or t
  misc_feature (603)..(603): n is a, c, g, or t
tctgnatgacacgggctcaagacacagtctggataagacntaacgtcctaacctcaattgtattaaatagcattgggnaatagctaaaccttttaaaaaaatttattggattttcctccctgctnaaaaatttcaccagaaaaccttcatataaaaattcagccctttttggacaatttttaaaatttgtatctttactagaacatgagaatctttttcccttggaagcttgaattataaatgtggtgtttggcctgcctcagcagcaccagttgactgctcgtgtgccagcggtgtggggaggacggggcaggaacgctgcagctctctccagccctgttggcatcctcagtgcctgcaggcctctcgctgcctgttgggctgtctggggggtggccatttagggatcgtggggacgggcctttctttcttcttggggtggaccccgtccccacgaagaaagaaaggcnnntccacaggcccggctctgggccacgtgccccnnaagcaggtgtgtccagagtcagctgagggctctccccacaccacccagcaggcgctggtgcnccttctgcctcatgggaccagtccagcttccagtcngctcttg

SEQ ID NO: 710945 - DNA, 512 bp, Homo sapiens
  misc_feature (27)..(27): n is a, c, g, or t
  misc_feature (276)..(276): n is a, c, g, or t
  misc_feature (284)..(284): n is a, c, g, or t
  misc_feature (338)..(338): n is a, c, g, or t
  misc_feature (379)..(379): n is a, c, g, or t
  misc_feature (397)..(397): n is a, c, g, or t
  misc_feature (405)..(405): n is a, c, g, or t
  misc_feature (506)..(506): n is a, c, g, or t
tcatgacagcaccatcttctcttgccngcgcctgggcctcctagtgtgctgcttacgtgatgcccacgtgccacagagttattgcccgaagtgccagtgggctgtgcaggggatgggctcttccttccagatggtctgcagcctctgggaccacgcagccaccatcccctttctttcttcttcggatgcaatttcaggagcaaagctgatctgaggggcaaggactttaaatccacagaagtgtaatgtgccatgttggagtggccacaggaagtntcgagaanccccatgactcctgtcttcgtgtacatctcgggccggggcctccccgtgggttnacagaaaggagcgctcagtttaccctggagcaaaccggaantcggagaaaccttgggantgtcaaanggcaaaagcccgtggcacacgcaccctaatcacactccagcccttcaggatggccggcacgctgaaccagtacagcgggaatgtgggcggcaaaacaaaanaaaatg

SEQ ID NO: 710946 - DNA, 193 bp, Homo sapiens
gctatcctagcacatactacgataagtagtacactagggctccaactcgagagtaataggtctataccagatcagggtctatcacgaagatctgcatacccacctactaagacggagcaccaagtgcagggtggactctatctaggatatagtagtcagacagggtgcgtccatctaccagctatataccagc

SEQ ID NO: 710947 - DNA, 279 bp, Homo sapiens
cccccccccccccccttttttccggggggggggggggggttccaaaccgtttgtttcccttgccccctttaattttgggggaaaaaacggggttttttaccccccctccgctcccccctccaaaggaagagggaattttttggggccccccctgggttttttttttggggggggcccgttttaggtttttgttttttaaacccggcccttttttgggggcccccctccccccaaatttttcccccgatttttggccccccctaaaaaggtttattggga

SEQ ID NO: 710948 - DNA, 182 bp, Homo sapiens
ggtcctgcgttcagaggatcccttcagcacattagtagagatagtttatggctatataacacaagtaaagtggtgttgggaaagttcctccattcatttgatttcctttagaaaagcgaattccaaggttgtgcacatttatccagtgaccacattacaagagattcaagtgaacatagata

SEQ ID NO: 710949 - DNA, 897 bp, Homo sapiens
  misc_feature (102)..(102): n is a, c, g, or t
  misc_feature (135)..(135): n is a, c, g, or t
  misc_feature (153)..(154): n is a, c, g, or t
  misc_feature (171)..(171): n is a, c, g, or t
  misc_feature (192)..(194): n is a, c, g, or t
  misc_feature (196)..(197): n is a, c, g, or t
  misc_feature (205)..(205): n is a, c, g, or t
  misc_feature (216)..(216): n is a, c, g, or t
  misc_feature (238)..(239): n is a, c, g, or t
  misc_feature (246)..(246): n is a, c, g, or t
  misc_feature (249)..(249): n is a, c, g, or t
  misc_feature (255)..(255): n is a, c, g, or t
  misc_feature (260)..(260): n is a, c, g, or t
  misc_feature (263)..(263): n is a, c, g, or t
  misc_feature (269)..(269): n is a, c, g, or t
  misc_feature (276)..(277): n is a, c, g, or t
  misc_feature (280)..(280): n is a, c, g, or t
  misc_feature (293)..(293): n is a, c, g, or t
  misc_feature (298)..(298): n is a, c, g, or t
  misc_feature (300)..(300): n is a, c, g, or t
  misc_feature (312)..(312): n is a, c, g, or t
  misc_feature (323)..(323): n is a, c, g, or t
  misc_feature (337)..(337): n is a, c, g, or t
  misc_feature (349)..(349): n is a, c, g, or t
  misc_feature (355)..(355): n is a, c, g, or t
  misc_feature (398)..(399): n is a, c, g, or t
  misc_feature (403)..(404): n is a, c, g, or t
  misc_feature (411)..(412): n is a, c, g, or t
  misc_feature (414)..(414): n is a, c, g, or t
  misc_feature (418)..(418): n is a, c, g, or t
  misc_feature (420)..(420): n is a, c, g, or t
  misc_feature (422)..(422): n is a, c, g, or t
  misc_feature (424)..(424): n is a, c, g, or t
  misc_feature (426)..(426): n is a, c, g, or t
  misc_feature (437)..(437): n is a, c, g, or t
  misc_feature (469)..(469): n is a, c, g, or t
  misc_feature (484)..(484): n is a, c, g, or t
  misc_feature (505)..(505): n is a, c, g, or t
  misc_feature (523)..(523): n is a, c, g, or t
  misc_feature (528)..(528): n is a, c, g, or t
  misc_feature (535)..(535): n is a, c, g, or t
  misc_feature (541)..(541): n is a, c, g, or t
  misc_feature (546)..(546): n is a, c, g, or t
  misc_feature (549)..(549): n is a, c, g, or t
  misc_feature (554)..(554): n is a, c, g, or t
  misc_feature (563)..(563): n is a, c, g, or t
  misc_feature (566)..(567): n is a, c, g, or t
  misc_feature (569)..(569): n is a, c, g, or t
  misc_feature (580)..(580): n is a, c, g, or t
  misc_feature (584)..(584): n is a, c, g, or t
  misc_feature (615)..(615): n is a, c, g, or t
  misc_feature (714)..(714): n is a, c, g, or t
  misc_feature (726)..(726): n is a, c, g, or t
  misc_feature (864)..(864): n is a, c, g, or t
tatattttatatgattttttatatttgtattaacatatggatagctttaaaattcacacaagaacaaaatgactataaaaatactcagaaatacagaatttnattggatatgattgcttattcaaataggtgatnatgtgaagatttaaattnnctatgattatttttaanaaaacagttattaatatattnnntnnctaagttnttgcttttttnttttactggttaatttataaannaatgganatntttacnatgtngtntctgtnttataannttnacaaaggcaacanatttngnacagttagtttntgttttttttnagcattttttaatncaaactttattnacttantattcttctttcttttattttttggctcatgttccataatttnngggnntcttttnngntttntntngngngtttttttttngtctcattttgttgatctttttggtgattttnttgtttttttttttnccattagttttttttctagtngttcttttcttctttttnttgtnctctttntacagngttcnttnttttnggtgtgttnttnntncagggctcttntttnttattatatggaatattggagtattataaanttgatgattactactcattcttaggaaccaagagcattatgagatttagttaaaaaaacttcacattcattgaaagtgaaatcaaatactgtacttttngtaatgtccaanacttcataactttctctccccttatataagtttagtaaagatgtattattttatatggactgaaatatctacagaaccttctcaaatgggatctggaaatttcattttaaaagactgtttttccacaacatgcgtttngtttaaaagtggggaaaaaaaactctgcagaag

SEQ ID NO: 710950 - DNA, 138 bp, Homo sapiens
taccacatttgaacagtatggagcttgcagatagaatatgacgatggtcagactgaggtccagagaggggaaggtactgacccaaagtcacacaaaaacgtggacttgaatgacgtcctggcctagtcctccggccta

SEQ ID NO: 710951 - DNA, 105 bp, Homo sapiens
ccaccctctacaacacggaagtcctgtttgtcacacctcagttacctcagggaaagtaagtgccgcccagtacccagggcttggagggaagcttggcatgagagc

SEQ ID NO: 710952 - DNA, 406 bp, Homo sapiens
tgggaccacagtctcaacaggcaaagttgttaacatcggatcattgacgtaatagggacatacagggttactatagacgtcttttatatgatgatagtgaatccctacatactgaattcccaaatgcatgtattttatttttgaatttgttttgtcttgagacatggtcttgctgtgttgtccagggtggagtacagtgacgcgatcctggctcactgagacttccacctcctgggttcaagcgaatctcccacctcaacctcccagagtgctgggactgcagacatgtgacaccatgcctggcttatttttgtatttttttggtagagatggggtttcagccatgttgcccaggctggtcttgaactcctgacctcaagtgatccacctgccacgatctcccaga

SEQ ID NO: 710953 - DNA, 170 bp, Homo sapiens
  misc_feature (118)..(118): n is a, c, g, or t
ctgcggaggtcgacctctagacggactccccccaacgacggaacggacgcaacgacctacgacactgactggacgtggactgttaacacggtctacgcctgactgacgacgtgttacnggtaccgttcacgtacctgtgctggtgtgacacttctacaacactttttact

SEQ ID NO: 710954 - DNA, 827 bp, Homo sapiens
  misc_feature (17)..(17): n is a, c, g, or t
  misc_feature (71)..(71): n is a, c, g, or t
  misc_feature (77)..(77): n is a, c, g, or t
  misc_feature (79)..(79): n is a, c, g, or t
  misc_feature (89)..(89): n is a, c, g, or t
  misc_feature (143)..(143): n is a, c, g, or t
  misc_feature (151)..(151): n is a, c, g, or t
  misc_feature (153)..(153): n is a, c, g, or t
  misc_feature (166)..(166): n is a, c, g, or t
  misc_feature (186)..(186): n is a, c, g, or t
  misc_feature (282)..(282): n is a, c, g, or t
  misc_feature (420)..(420): n is a, c, g, or t
  misc_feature (462)..(462): n is a, c, g, or t
  misc_feature (797)..(797): n is a, c, g, or t
tctgttttttttggttnttgtgtttacttagatgagacagacaaaggccctgcccccaaggtaacttacantctagnantaaaacagancatataaaagtgtattttcaatgacgtgtaacatagagttaagaaggaaatgcnaggggccntnggaacactgtgcngaaatatttaacttagtctngggggacagggaaggcttccccaaaggagaagtgtggatacctctgacagggcgagatttagcatggcctctcttggtgctatgtgttccttcatnatcggcttcacttccggcctcatctgccattttatagctcttgctttcaaatgtggagtctcctctgttgtaactcgtgctactagttatatttgttttctgtaacttgtaagatttatccatcgggtagggaattcngctatcccagggtgatgagaactggattcctttgtatttgtnaagatgccagattctgagcccctagactcagtctcactgacaaactctcctaacataggtgagaagaaacctgggaatgtttttccagttgaggcagtgtcgaagaaggcagcttcatcagggttgcctatggcggaacccatccaggagtacctatgccagacaatgtgcctaaatccattgcctcgggacagtcagaaccatcttcggaggtcaccacttctttggtaacttctttgtgaccatcaggaccaataacagtcttagtaacggttttagagcatgaacgacgcgtggtggttgtgctaccagaggtgaccttctctttaccagtnctgagctctttatctcctttagaagtgacc

SEQ ID NO: 710955 - DNA, 960 bp, Homo sapiens
tccctcggggttataacgcggtttcctcgcatcccgcccccttggggcggtctccccctcttcgctcggggcaaattattctcctcccgggtggttccaaattgttgccgcgcgtttcttttatctctgtggccgtggccccgtgtgttatcccccccgtcgggttacgtggcgttcctcgccctgtttccacgggcggcgaagttttccctttgtcgagttagcaacccacgaggtgtcgtgtcccgccaatcctgtctaccccagggagagcacgacaaccaggcgcgcccaaagggaggaacatatcttggggggcccccacaagaggcttccccccctctggggtagccattactggccgggcgccccacattcctcgtttccccgcggcccctccttctctaggcggttgtcccccccctcccgtgtgttcttccgggatgcgggccccaagcttttccggtgtttcccccacaggatccgcaccccgggtacccccgtgcttggagctctggggcgcgtccaccccttctcaggagagcgaatgctggcgggcgagacccccccccataggggtgggcaccccccctgatctgtctctttgactgctgtgtcttctctgtacaaatgctccactggagcacaccacgttgttcagccaggagtagtccaccaccccagtgtcggttttctgtttgcccagtcgactccacgccgcggtggcgtctttcacttccccctgaggaaaggggttccttcctcccttcccaccgtgccactacaaaaagtactgccttcaatcaagtgtggcggtccccagccgggcacgcaccgtggtggtacatacaagtgcgtgtgctccctgggggtcgacacgcgtactgcgcatcgtacggtgttgtcagagccaatccattcaaaacaaattgggccggcaataaaaaaacaaacaaaaca

SEQ ID NO: 710956 - DNA, 557 bp, Homo sapiens
ctgtaatggcctggccaggaggaatgactaccaactgggaggagaggggtcccagagggaggaggagaggagaggcccaagccttggctgctgtcagcactcaaaggcttaacccaaagagggcaggcctggggaacaagtagggatctgcacagcatgcaggctctatgccagacctgcagggagaggaggagcccagatccacatcgctggaggagaggatgcttctggaacaccccctctgcctctctggattacttatggtacaaaagctacctcctttgcagtcatttccatcctccccagaaccaagaagcacagtctcctgaccccacacatctttggggacctggcacaggatttctttcccctttttgcagcctccatgtaattcaaagcaatttcacctttttttctctctctctcagacagaatcttgctctgtcgcccaggctagagtgcagtggcgcgatcttggctcactgcaaccttcgcttctgggttcaagtgcttctcctccctcagcctcctgagtagctgggattacatgcatgcgc

SEQ ID NO: 710957 - DNA, 427 bp, Homo sapiens
aaaaccagacgcaagcggggattttttccaaagggaggccggccacctaagggcagaacccaacggtaaccctcaagacgggagttcagggaagacgagaaaaaggagcaggaaggaacaacgggcgggcaacagaagacccggggggaacggatgaacccaccaatcgaaagcagcaccgaaaggcagagaaacacccagaacccaagacaaaagactcccgggcgaacccacccaaaaaagcaatccccgccccaccagcgacacggaagcctaaacgggcccaaaacgggcgcttaaaccacaggaccggcacctcccatggagaagggacacacgacagaaaacgaacctggggggaccccgggggacacaaccgccgaaggccaaacgcaactcccctggcggacccaccactacgccgccc

SEQ ID NO: 710958 - DNA, 428 bp, Homo sapiens
  misc_feature (313)..(313): n is a, c, g, or t
  misc_feature (322)..(322): n is a, c, g, or t
  misc_feature (327)..(327): n is a, c, g, or t
  misc_feature (357)..(357): n is a, c, g, or t
  misc_feature (396)..(396): n is a, c, g, or t
  misc_feature (399)..(399): n is a, c, g, or t
ttagaggatcccagtcccttctctaaatttcttcctgagtattattcagcatccgctatgtgttggtatcacgtcaggcattagatatacgggaatctggaaatctgaaaatccaaggtctcagcttcaccgaccttagcaagaagacacagatgataaacacataaggaaatacataagaacgcttcaaacaagtgaaaaggtgctgtgataatggttaaacagggtgacaagacgggtaatgactggtgtggggtaggtaattaactgatcccagcattgagcaatgggaataaactagacagatattcanggatgcagngaaangcattccaggcagaggaatagtgtgtgcanatgccctgaggcaggaatgagctcgccctggtggctganacntattgatgagtgaactttacacgaagggc

SEQ ID NO: 710959 - DNA, 1715 bp, Homo sapiens
  misc_feature (1)..(1): n is a, c, g, or t
ngtttgtgtcttgtactggtgtgttttgcagcagtcaggctctagtgaggtggtggatggtcaggtagtgcagctcaggttgtggctactcggtgtatggtcgatttcttgtagttcggtttaccccgtgggcgtgcacttgtcgtctctgtgtgttgtgtcgcacttttttcttttttttttcgtcctcttagcgagctccttgtttttccttagtatagacgttgcggggtggagggtgtgagttagtcagcttgtgcgccgcttccgggtgagtccgggtgggtggtagtcgtctagcgatagctgttttggtgtgagttatgatttggtcgtcctcgtgcctaccacctgcctgggtgtgtgcgtgcgctgctgtctatctagagtctcctcttattcgacggagatgtattttgcgggcgcgcctcttgttgtgtttggcgcttttgtctgggagggagctctcgaccccttggggatgtttgactggggcaccttgggggtttatgacccagaaggggtggtgtctcgttggggggcgccccaccccggctgtatgatgttgccccgcgttgttctgatcgtgtggaatgcgtgatcagtttcgttttgggcggcgagtttcttcgtgtgagagaggaggacttctctcttgattttgggggtgaggtgcacatgcaccacgcttctttgggtgttgcccccccccgtgtggtctcaatttgtggcctcccccgtggtaccacccggctctcccgtatcgcgtgttgttttaatccgcccctctttttttgaaaggggcctctacagaaaaaatatggtggtgatgttttgggcacccgcgggcgctcacgcgtggggcggtctcaccccgcccgtttagtattctctcccgcgcgcgacgtgtttttgtgggagagggcccctcatcatgtgcgcggtcggtagtttcacacctcgtgatgtgtttcgcgcgaggatattttgttgtgaaacccgcgcgccgcgtgccccacccacctcgggagtggtatacaccccccggtgtctctctctcgctcgttttatatatgttcctcacatgtttggtccccgcgcggtggcgtggggcgacaaaaagccccagttaatattccccacggtcgacacttacagggagaggctctgaaggccccagagaagagatctcacattctcgaatcactccgcggaggagcaacagaggagtgtgctcacacgagcgagagtcctcaagatgctccacccacattttgcgcctctcaccccctgcggcgcacacacacagagagccgataatctctccacatgttcctacaataagagaacacacacctcttctcttggttcacctgcaacgcactatgtctccacagttgccaccccacacacagtggtgtcttgacccatattatgttatatagtgctttaaccaccttgtttgattataggggaaaagaaattttcccggaaagtaaaatatcacagccacttcactcatcactcgtgtctaataaagctgtggctctgtgtcgctcacaggccaagtatattccccgtcgacccttaaggaaggctgatggttgggaggattaccttgtgataccccccctttgagacccccctgggccacctagtgagacccccgtctctaaaaaaattaaaatagaaataagtagtgcttattgtttacc

SEQ ID NO: 710960 - DNA, 134 bp, Homo sapiens
tctgtgtctgcgccacgcgtctcctcgggcgagcgcagcctgccggcttcgatggcggtcattgcctgccccagccgtcggttccggcgttggctgatgtggtggttgcaacggcaggctgttgcgttaaagcg

SEQ ID NO: 710961 - DNA, 929 bp, Homo sapiens
gagtctcggttagcttcacttcagcgggaacctgcccactaaggaggccgattctttccggctcgagcaggtccggacccgcccctctggcgtctagcagtctcggaggcctgcccgtatagttcagggccggacagcgagcggggagactgtgcccagtaagggttgtggagtcatcagcaggttcacatttgggaggaacctttacaggttgggctccagcagctgtgtgtggccacccaccacgtagtttcaaggcacctatgcagtttacctcaatatcaaattcttgtgacctccactgctgcatatggggctctcatttacaacttcaaggactaccaccgcaattttcacccacagaatatttaccacaatcaccaggtggttttactgtgaaccaaaaccaagtgttatcaaagagggttgtgaaaccctgtgtgaccttatacttcaatgttaagtgtagtagcaccctccgtgtgatgaacatatggtcatctggagggtctaatacaatgaggtggacccttgagctggcagcatcacacgcagaaagtacttttccttctcccaggcccacttcaaggtccaagtgctgtgggaaccaatacccttggatggagactggggaccatgactccgtcttctacctgggcaagctgaccaactgtgacaatgggttcagcaacagcttgggcccagcattgggctttatccctgtccccaggccgcggactacaacttctggtggcctaataggcacagttacgcgtgaccagcgcggcttctttttcggcgcgttgcatgcggtatcggtgggatctccccaatttgggagttgatgcctttggccctgggaggatgggaaagctctgcacacgtactgccaccgtcgatctcaaggcaagcaagttgagcacatctcg

SEQ ID NO: 710962 - DNA, 114 bp, Homo sapiens
aagatcatgtacactacactccagcctgggcgacagactgagcatctgtctcttaaaaaaaaaacagtgtaaaatacagcttcacacttaaaattcacaaagccagttccccta

SEQ ID NO: 710963 - DNA, 482 bp, Homo sapiens
tagaggtcctctcacgtgccatggtgagaatggaaaatggtacagctgctgtggcatatagtctggcagtcctcaaatagttaccatatgacccagcaatcacacttctaggtatacactgaagcgaaatggaaacatatgtctacacaaaaacctatataaaatgtttaaagcaggccgggagcagtggctcacgcctgtaatcccagcactttaggaggccaaggcgggcagatcacctgaggtcatgagttcgagaccagcctggccaacatggtgaaaccccgtctctactaaaaatacaaaaattagccaggcatggtggcgggtgcctgtaatcccagctatccaggaggctgaggcatgagaattgtttgaacccaggagccagaggttgcagtgagccgagatcgtaccaccgcactccagactgggtgacagagtgagactgtctcagaaaaaacacacaatgggacgtggat

SEQ ID NO: 710964 - DNA, 784 bp, Homo sapiens
  misc_feature (645)..(645): n is a, c, g, or t
tgccaaaggtgacttcagattaaagccttctgtgtaaatatatactgataatgcctatggacatttgggtaaaaccctgtatagaattaattatccttttactttggagtgaaccttggaaaatttataattataataccatggattttgaattttcctttttttttttttttttgggataactcagtttcagataaaccatctgggttacgggtggcttaattgggaccaaattttattatagcttaatagtggacacgtgacacatttgggggggtatccatttagacatatcagagcagtgtattctcgggatcatttttataaagtgacctcttctaaaacataacgtgtcacttacctgaaatgctggcatcctaaatatcccaaaattattttggagcaatcaccagggcctaaagccaactgacttaagggtaatcatttcagctaagattaatatttaaagcctaagaatgtatagagctagtttacaataatggatctcagattttaacaagggtatataggaccctgctatggtcatcctctgaattcaagaacggagggtttctatcataatttagccccaccttggtattttaaaatccttcagaaatacttttatgacacaattgcgacggnactttagccacacacagtggaatttcagaccttgatattgggtggtccccagttcacaaggtgatgaagactgtctgggaagccagttaatccaaaattggacatcctggctgccgggggtgacactgagtgagacaca

SEQ ID NO: 710965 - DNA, 168 bp, Homo sapiens
ataataatctgtgatgatctttgtatttctgtggtatcagttgtaatgtcacctttttcatttctgattgtgctcatgtgaatcttcttttgttcttagggaaacttgctagctatcaatttattgatcctttcaaggaccacctcttgattcattgctcctctgggg

SEQ ID NO: 710966 - DNA, 991 bp, Homo sapiens
ccgtaatcagaggggtgtacacctgccactctacaagctgacgtggttgtctcgaagcacaatacaataacatcagatcagatcgcatcctcacgtcacatgaagaatcttctgccattctatcattgccttgcgctagtataggccatctatgtctatgtcgtacgtcatcctccgtacacaatggatagagtacgctgtaggcccactgtagtctcaggatgtgtgacgtacctttggatcgtatttgcctgttcgatcgatacaccatggggaagtggcgcaaggcaatgccaagatgagtacgacatcacgcgataggctacgtatataataactccagagacacgcatcgtctagacccatcgtacgtggagatcgccgcgtatcgaccaataagacgatgatttcatttctctatgagaagaaggccaaagactaggcgtcggtaccatagatgacgacgtggaagcctggctctaccttgggaatgtctcactagttcagcaactcgctatacaagaggtgtggtggtcatgggaccaatacccgatagatgtgtaagtttggcaacgaatattgggtgccccgaaaagcacataccatgtggcccttgaaggaataagcaataactgcagtatcggttccaccatcccagaggtcgttatggaactgacatttaaactatctgtcattaccgtgttctcataaagatcactcgataagataaagtgcgtcctggtagaggatgttcccctttgtgcctttgtgatagatctgctgcgtgagaagtagtgcgttcaaaggaaggactacaagatgttgggaggagaagaaggaaccgaggaaattctgggaattttaaagcaccaggtagtgtgaagatttggtaccccggatttccatggtgggggtttccattggaaatgatttggcaagttgaactaaagaaaggcgagattaatggggtggttcagggagagaaaactca

SEQ ID NO: 710967 - DNA, 1723 bp, Homo sapiens
  misc_feature (340)..(340): n is a, c, g, or t
  misc_feature (344)..(344): n is a, c, g, or t
  misc_feature (468)..(468): n is a, c, g, or t
  misc_feature (947)..(947): n is a, c, g, or t
  misc_feature (1413)..(1413): n is a, c, g, or t
gcaaccctctatgaagtgctcgtaatctcgccttaagcatcgagaattatctaccacattaccggagtgctccacacagtactatactaaaactataatatacttcactatcatccaccatgatacacagtaggtaattcctctagtgctgtatgtgcgacgcatgctagtggacattcgacaagactagtaattcatgtagtaaaaacaccccttgcatactccaaacacaggtaccacttcagttccatctatgcaatctgtaatccgatgcgcataagatacaacacgacatgcattcctaaccctttcttccatactgattgtccccatgctcctncagnctgttcccggacgatacacgctactactttgagcgtagatcaggcatgcgcgggcgatgacctccataaggcaatccgttcctttctggaagcacccgaactgggtaggcgtaggtgtatgcangcccccccactcttgtcaatgacctcaaagcaaactttgattatttttgggaactttgtttctcctgcgatccaagccgcgtgtataatgttctactaaatgacttttcctcaagtcctcgtaacgccatggtcatctgcaggggacatttccatcccttctctcattcactcttggtgacacactctcaacgtcaatgtgcccgtggcacatacaacataggccatatcacaatgtcacgggacgagtttccactaacgcgataaatgcgctcaatgcaaaccttagtgcaatagtgcgattaatagagtgggtggctccttcatcgtggttccttaaattccgctcgatggaaagacctctttcccaagtacgtgaatatgcacgggcgttcaagtgaagaatacagcaactgatcagaaacaaggcaacgaacgaccagtttattttccagggggacccagaataatctcattaanatacggtttcggactttaactctctagactggggccgtttcaaaattgtcatcacagggtgagggacataccggctcaaaagaggcctctcaaagacaaggggagtctcccaggcgacttgttctccctcgaagtcggtgggccttcgcccacgcgtgggatcccttggggggggcctcctaagaaggagctttctgagaaaggtggtacctttttgggtcagcctgtgtggtggttacctccttgggggtgtatcggccccccttgagaaagggaggcgcataaaggacacccctgggtaaagggcgcatctcgcgtgacctagcacatggaaagagcgcgtgaattatacccacgggttggcggcgacacataagcccccttatttagtttcctttaatacaacgtacgggcggcgctgcaagctttggcacgctccttaatcgagaggagacacaacattatncatcacaggagtagccctttttaataaggcggggcgccaccaagaagcccaaagcggatttctcccacagacccctttgcgaaccacaaatagcacggaggggaagagagaggcgggcgtccacccaacagcgcgcgggcaagcaggaagggcggcgccgaccaccatacaaagagggggcggcggaagatagcccacagccgagaatagcttagccacccccaaggacagagaagcagacagctcgctcgcgtgaacagcacagagagaaacgccacacactctcggaccggccacgatcagcaccacg

SEQ ID NO: 710968 - DNA, 172 bp, Homo sapiens
tacatgtggtactgccaaatggagccagagcctggccaggcactgagaagtttcccacatgacccccatccctgcagtccagcccgggcatggcactgctggccgggaggcggggcccgggacggggccttacaaaactggctgatagtgaggaagccaggagagcagggct

SEQ ID NO: 710969 - DNA, 358 bp, Homo sapiens
gtcagcagtgtttcctggggcgggggaactgggaggggccccaggcctggcacccagcttgcgactgaaggtggcctcgtattgcttagaaacgtatgtttcagtttaaataccagacagtaaaaatggaagctcgaggaccacccggactttgccaatcaattccaggattgacaggcttaattaattaaaaatcgaaattattttacttctcggattaaaattcccagttaaaccatttacctttctttgcattatatataatatacatttattacgggcctggctgcgggcgcggggccgaaggcagccgaagggtcagagacaacttggatgacttcaacgttgcccgagaagc

SEQ ID NO: 710970 - DNA, 533 bp, Homo sapiens
  misc_feature (193)..(193): n is a, c, g, or t
tccccaagatgagccgtacttaaaatgaacacttaagtaaataagtacgtggacagccttaggataagctgacattatagatgcagctaggtaggcaacaaaccatagtgccaaatggaaaaagtatatttgccaacttaaatttaaaaaactaagttaattttttataattaaatacagaaaatatactganttgctacaatacataagatgtgatgtattaacacttcactataaagaatgcataccagaacatttataaacagtgagtgagttttattaagaatagtttactacaataaacgctggctaaatagaagtgcattttgtgaagcactatgggtggtatatgtttggccacatactcttgttaccttgaggtagattacacatgtgtaccaaattcggcattcattttcagttgctgctggtatcatgtgttttaagaaatgtgtacagtatgaaaaacttgaaaatattcatgaatgagaaatgtcttaggaaaaaaatagctattttcatgccattatgta

SEQ ID NO: 710971 - DNA, 661 bp, Homo sapiens
atttatcacaaactgcgtggctataaaacagcagagatttaacgtctcacagctctggaagtccagagcacccaaaattagggtgtcgactagggtcatttgccctctgaaacgtctagagaagagtccttccttgcctctgccgtagtactggtggtggctgacaatccttgtattccttgccctggtgcatgtgtacctccgaattctctgtctccatctttacatggtcctctcccctgtgtgagagtgttgattctacaagtctctttctccttataaggcaaccagtcattggatttagggtccactctaatccaacatgacttcatcataaattgattacacctgcaaggaccttacagtggtcccctcttatctgcagttttgctttccacagttacccatggtatagtacaataaaatatttggagaaaagagagagaatattcacataactttggttatagtatattgttataattgttcaattttattattagttttaatctcttattgtgactaatttacaaattaagctttatcataggtatgtgtgttcaggaaaaaaacatagtatatatagagtttggcacgatctgtagttcaggcatccccttataagggcagactactgtttccaattaggtccttcccggtc

SEQ ID NO: 710972 - DNA, 222 bp, Homo sapiens
tggtcccacaccatgctggaggaagtgaccatctgcattgccactcttgcccccaagggcccaggctgtggcctgacacatagaaggtgcccacataggtctctgtgcggtgagatagacagcaacgataactgcctaactgatagggaatgggggtccctgctcatagaacgggggccaggcagctggaattcaggggagtgcatcatcctcaggagctga

SEQ ID NO: 710973 - DNA, 762 bp, Homo sapiens
  misc_feature (97)..(97): n is a, c, g, or t
  misc_feature (512)..(512): n is a, c, g, or t
ccttcctagtgggtctgcgcctgctcatcttgggccagtagagctgttcccttatacctcgcggcggtcctttctccggagggcctttcttgtcctntccgcggtttggctattctcttacatggggttttgtccgcccactcgttccagcacttgttccctcaagggggcttttttttcccagcccccgttgtgtgttctttataccgtctgcccttttgtctggcccacctctgaggtggtgtcccccccctacttcgggtttgttccacccacagagatgggtgtgcccccgaatccccgtcgcttcactcttccggctgggtttccttgtctcaggcacttctcgccggtgtctacaaatcctcaattgggccccccccacagggcatttcccaaaggtgtgtcgccctaccgagggccaccactgctgcgccttgggcctctcgcctatctcccgggtgtcacaccccccacattgtgtgtccgccacctctcttgtctgacggccnccacaccacaacggcttccttgacccccccttagccacacttctctgccgggacgcccctgacaccaagtggtgttgccctcctggggggatcattgggcttcctcccagagcattttccgcccgaacgctttgtatttcttcggaggacacacgttacgacggatgtagcagccgctatgttcctgtctggcgtccggcgcgggcagtgagtcggacaccacttcgccttcaacccccccaacataaca

SEQ ID NO: 710974 - DNA, 382 bp, Homo sapiens
cccagctactttggaggctgaggcagtaggatcatttgaacctgtgaggcggaggttgcagtgagcggagatcagataaaactaaatggataaaaagaaaaaactaagccagaaaggaaaatcggaaggaaggaaggaaaaaattatacagataaacctaaatggataaaaagaaaaaactaaacaaaagttacctctgagacctgtggttacagagaagatagttaatgtgggggaagggtaaaaccaagtaactattaaaccatatggtataatgtaaacaaattggtccatttcgtaggctggtatcatcagcttcctgagaaacctttactataatggattgtataactactttaaggacaatttcttttgttgctgc

SEQ ID NO: 710975 - DNA, 188 bp, Homo sapiens
tctacctctagatttcatctgtcgtcccaccccacttcttccagccccacttcttccttcaccacacatgcacagttcttgtgccttccctgccagcccagatagatagacagatgggaaaggcaggcgcggccttcgattgtcatgtagttctttgatagtgaaatggggcagcacaagtcatttaa

SEQ ID NO: 710976 - DNA, 113 bp, Homo sapiens
cggcacgaggagccagcagagccagccgcagagcagccagcccaactacagcaaggcctgggaagactattacaaaaaacagagtcacgccgccagcgctgctcctcaggccg

SEQ ID NO: 710977 - DNA, 436 bp, Homo sapiens
  misc_feature (80)..(80): n is a, c, g, or t
  misc_feature (356)..(356): n is a, c, g, or t
  misc_feature (360)..(360): n is a, c, g, or t
  misc_feature (385)..(385): n is a, c, g, or t
  misc_feature (388)..(388): n is a, c, g, or t
  misc_feature (394)..(394): n is a, c, g, or t
  misc_feature (404)..(404): n is a, c, g, or t
  misc_feature (418)..(418): n is a, c, g, or t
  misc_feature (429)..(429): n is a, c, g, or t
agtttgaaagcaattctgcattttcttaacattgtaactggtgttgagttgaaggcaggcccctgggagccctttgtggnaattcccttcactctggaggctgcctcgagcctggacaggcacttacacttggtcagtgattgcacagaaccggttgcaacagattctgtgcacctccctgtggcgcgtagatgttagcaggcacttggtcactatttgctgagtgagtctgttaccttaggcgtgtatttaccgtggacctgcctgggggatcattgctcattcactcattttgaacaagccaatattacatgtccaggggtacgctctatagtgtgaaacacaaaaggtaaatngatnagttccccttcttcaaagggatttnctnaagggnagttaggccntctttttgatggcnttttttccttnttcattt

SEQ ID NO: 710978 - DNA, 490 bp, Homo sapiens
  misc_feature (50)..(50): n is a, c, g, or t
tcatgccataacctccggtcgttcattggggttgatggcgcggtgctatngacgatgtacgaggtatttccaagctgatcgcgcacaactcggcgtctctgttctgcatggcggatagctatttccgcttcgcttcgggcaacaaatccgacgagtccacttccgcaacggtcaaggcattggtcgacgggctgaagggcaatggctcattaccagggatgctgcgcacgctgggtacctccaacgcgttccaattcaagacgcagagggattgatcatggatatcttgaaaagtcgtcgtcgctttctggccggcctggctgcggtaggtgtgttcggcccgctcacccagtgtggcctggcgcgcatgtgccttggccgggcaaaaccagcaggccaagttaaaagtggttttctttgtgggtacctgatggcctggcagtcgactctgtaaccggctattccagtgatggtcgagggaggttattgg

SEQ ID NO: 710979 - DNA, 128 bp, Homo sapiens
cacgaggctcacatgcaaaagacaaactagtctacgtgcacacaaatggaccgaagaaaaagaaagtcacactgcacataaaatggcccaagagtgtggaggtataacggtatgccattaagataatg

SEQ ID NO: 710980 - DNA, 179 bp, Homo sapiens
  misc_feature (27)..(27): n is a, c, g, or t
  misc_feature (41)..(41): n is a, c, g, or t
  misc_feature (80)..(80): n is a, c, g, or t
agcctctcctctggccgccgcggacgnagaggccgagatgnagatgagattgccaaggctcaggtcgctcggcctggtgngacacgatctttgggaagatcatccgcaagaacataccagccaaaatcatttttgaggatgaccggtgccttgctttccatgacatttcccctcaagca

SEQ ID NO: 710981 - DNA, 261 bp, Homo sapiens
ctcgcacagaaggtgataagttactatcaaatgccagtgagagtcttcttctagacatcaacctgggcccaagtgattctcagtcacaaacattgcccttctttggtttacatttactatgtgctttaaggtgtgcatccagatatgcggtcttacattcctttggaaatacacagttcgtatagttactgtacactctgtatgtacaataaactgcatatcaacttccccacaaaagcagactttttagggtctcgttca

SEQ ID NO: 710982 - DNA, 199 bp, Homo sapiens
ggattactgtgtgcccccaaaaccctgtgtgacatagctcaaaagggacggcagagaagccagtgggcacatagaccttcatccgctcatgcttctgggtcatccagccctgtcccaggttctaccttgtagaacgcgctgggacggagatagataggtgcctgtatgtccacgtagacgcatgacgtatggtcatgca

SEQ ID NO: 710983 - DNA, 425 bp, Homo sapiens
  misc_feature (21)..(21): n is a, c, g, or t
  misc_feature (32)..(32): n is a, c, g, or t
gataaaaaattgtttttaagnggtttctaccngtaatctcactttggaaggctgacgcaggaggatcgcttgagcccaggagtttgagaccagcttgggcaacaaacaaagggagatcccatctctacaaaaaattaaaaattgctgggcacggcggtttacacctgtaatcccagcactttgggaggccaaggtgggaggatcgcttgagtccaggagatcaagatcagtttaggcaatatagtgagaccctgtctctacaaaaaaatttaaaaattagccaggtgtgttggtgtgtgcctgtagtcccagctacttgggaggctgaggtgggaggatcacttgagcctgagaggtcaaggttgcagtgagccatgatcatgccacttcaccccagcctgggtaacagagcgagaccctgtctc

SEQ ID NO: 710984 - DNA, 107 bp, Homo sapiens
gcggccgcctactactactactactactgctcgaattcaagcttctaacgatgtacggggacatgctgtacagacaccaccattaaagcattttcatagcgaaaaaa

SEQ ID NO: 710985 - DNA, 946 bp, Homo sapiens
ggactcgcgtggtttgtggactcccggacgtaggtagttgttgggccgcgttctgaggacttgttctctttacttttccactctaggccatgatgccgagtatcagacctggaggagttcagccgcgctgcctggagcaagcttgacctcgtgttgacctctatgaaggcacgtgtggttctcaacaatataaggcagttcgtgatgggcacttgtgtgtgaaagtaacatgatgattagtttgtcgtgtatacagaacagagcaagctcatgatgtagcacgacagattgagaagttccacagtcaacataatgcgagttatagtagccaatggaagccctggaatgttaccatggaaagctgagtgaagtggttttgaaactgaggacgttggtcgtgtacttagggaagtaaatatctttgtgaattagagaacgtgtgggggaccgaagagtacttaatgtagataagtgggctgtcagaaggttagaggtcatttgtagattctttatacttactttagagatgtagggatgcacatgtttagcttagaaaggcttaattactttcggcaccttgccacaacgaattgccttctgtttttagcacactgggcgcagtatttggctgataaggtgaacaccatggtagttggtcttcgccaaattaggatcagaatttggaaagtgagcatattaggaggaccatattcttagaagtcagtgaattcggttacaagaaatttacggtagcgtttgtcgatccggttttttggctaaagttatggtggggaacaaaattaaacatgtgaggcgatacacggcacagttgtggtacatggggcacaaatagagcggttcatgagatgtcaaagttattctacggacaaggtatgagaacaaagagattggtggataaattgtctttacattatattcttattgg

SEQ ID NO: 710986 - DNA, 89 bp, Homo sapiens
tagtttgtattttaattatgggaataattgctttttcacagtcactgatgtacaattaaaaacctgatggaacctggaaaaaaaaaaaa

SEQ ID NO: 710987 - DNA, 349 bp, Homo sapiens
  misc_feature (3)..(3): n is a, c, g, or t
ccngtgcgagtttggccagtgtctgactgtagctgatgggtttagagaactgtggctggcttctcacaaaggattttttcatttactcttgttttgtgtttgagtatagacagcttttcccatcctccatcagggtcattgtcccaccttctctgactcacttattgtgtcaacggaattaaaagagcagccggcggacgtgctgtagaggctgaaggagagctgtgttgctacgcttgtactttgcaacggcttcgtacacaacacagcttctcctttgacttaagctatccggatgaaaccaacttcacactgcaactccaacttaaagctttaactgaacacagtg

SEQ ID NO: 710988 - DNA, 123 bp, Homo sapiens
  misc_feature (32)..(32): n is a, c, g, or t
ggggccgggcagctgggcggcaggccacttcncttgacagagcttccagctgtttctccatcagcaccggggctgggagccctggcttttacctggacaaataaagagatgcctccagagctg

SEQ ID NO: 710989 - DNA, 510 bp, Homo sapiens
atctccaatgcaaacaatgttgcgagatggcaccatcaacagatacagattcatcagatagtctggcctccatgaatgtattcgtatcattatgatacaactgctttcctaatagtcactgcatgtggtagaataacagatgtagaatgcatctgcttacacctgtatatcccagttacatgtgtaatcgtgatcatccctttagcctgggagttcaagtccagcatgggtaagatagtagcaggactccttttgttgttgttgttgttgttgtttttgagatggagtctcgctgtgaggcccaggctggagtgcaatggcgcgatctcgactcattgcaacctccacctcccaggttcgagcaattctcccaccccagcctcccaagtagctagaactacaggcgtatgccaccaagcccagctatatttaattgtattttcagtagagacagggtttcaccatactgaccaggctcatctcgaactcttgactttaagtgatctgcct

SEQ ID NO: 710990 - DNA, 994 bp, Homo sapiens
gtcgctcccccctttgtgtctcgtttcttgtgcaagcggcgtttcccccacgggtcttattcggatcttttagcttgggcttacaacaggtgcttttggtatgaccacttttccgaaatttgcctatatttagggttccctcctggaaaaagtcccctcttgtggaccagagttcgcccttccgcttattgggtacccaggtaccccaggattctgcccgctttcaagactctgccccatgccccagagcccccggcctcacagctcctggattgcctagatttcctggatgggccttctggggatttccccagcatctctctcccattctggacccctccccaggaggtgccctggtacacctgcttgaccttcccctgtgtacctccacccccagctcccatccccgatttccaagtgtttgagcctgagggagtaccgctggatctgtctttcattcgaccccctggaaaccctgctttgctgttaatcaccatccctgccacccacttttcacgagggtgatgtcacccctttcagctgccaggcttctgtgccccacgggtttccacgctgcacagcttcacggccccccgtgggaacccacgttcccgctcggggtggccttcctattcaccccacgcttcttcacggatcctcacatcctaccaaggcccccctgcggctaaaagctgcgcctcacctacgaccacactttcaccccggtcggttcacggagaatctttgaaggtgaacacaacttgcctgtggaaatcgctggcacgtaatctgttctccacctcaccacgcctgaaattttcctgtgtccccaaacccccgggggccccacgcacgctttgaacctatcaccctcgagagggctacccacccacaggtggcgcttctcggctttgcactgccaaaactggggaccagcccccttttccccaccaattaagccccaattataccctgagaaatgaggaaagcccca

SEQ ID NO: 710991 - DNA, 137 bp, Homo sapiens
tcaatcgagctcggtacctgacttcagtgcaggagtttttttactggacacagagtctgtccaagcccactcttcaacagctgagatttgtgtgcgtgtatgtatgtgtgtgtgtgtagacgttgtccggggttgtt

SEQ ID NO: 710992 - DNA, 512 bp, Homo sapiens
cacggccgtcagtggcaccaggctgagctggctgtcagcactttctggcccaatgaatatcaggtgctgtttgaggccctcatctccccagaccgcaggggctacatgggcctagttgacatcctgcttctcagctacccctgcgcaaaggccccacacttctcccgcctgggcgacgtggaggtcaacgcgggccagaacgcgtcgttccagtgcatggccgcgggcagagcggccgaggccgaacgcttcctcttgcaacggcagagcggggcgctggtgccggcggcgggcgtgcggcacatcagccaccggcgcttcctggccactttcccgctggctgccgtgagccgcgccgagcaggacctgtaccgctgtgtgtcccaggccccgcgcggcgcgggcgtctctaacttcgcggagctcatcgtcaaggagcccccaactcccatcgcgcccccacagctgctgcgtgctggccccacctacctcatcatccagctcaacaccaa

SEQ ID NO: 710993 - DNA, 186 bp, Homo sapiens
acatcatatacaacaaccgaacttctagaaaagtgaaaagagaggcattggagtaaggtagatgaaagccctcccaccacccatgcgtgctgaccaagggcatccttcctatctactcagtagtaagatcctcatgatggccaaaaaaaagcatactataacctaaagcatccccatggctcaatc

SEQ ID NO: 710994 - DNA, 181 bp, Homo sapiens
  misc_feature (8)..(8): n is a, c, g, or t
  misc_feature (84)..(84): n is a, c, g, or t
  misc_feature (96)..(96): n is a, c, g, or t
  misc_feature (108)..(108): n is a, c, g, or t
tcccggcnagtcgccactctccttatggactctgttctgtttgtacatggctgacggaaatctctttggtacaaccgaataaanctggtggcagtnttgcgctggggnctcagcctgctgggaaggaccagggaaccactcagcaaggagaccctcgttgccctgcccccaccatgcaccc

SEQ ID NO: 710995 - DNA, 511 bp, Homo sapiens
aagaaactgtaacctttcctgctaagattatgcacaaggcaagaatgtgccctctaatcattgcttttcagcatcattctgttctagctgatgcagtatgacaacaacaatggaagatgcagaggtatatagcattgcaatacaggacagaagtaaactgtcattgttcacagatgacaagattatgcagagaaatattcacaagaatcaggaaaattacttctggcaagttgtagaacctactatcactttgctcgttattgccatgcagtgaacccagtggaaatttgaaattaaaaacacaataccatttacgttagcaacccccagaatgaacatttataggtataaatctaacataatatatatacgaagatctatgtaaagaaactataaaatgatgaaagaaaacagaagaacgtaaataaatatagaagtattctatgttcgatggataggaagacacagcatcatcagaatgtcagttcttcccaacttgatctatagattc

SEQ ID NO: 710996 - DNA, 193 bp, Homo sapiens
ttccagggcttgattgcaggccaactgtcaggtgttggtatagcagctgtttcagtttaaataggccttattttacttaataatggtgccaaacttgcaacgagctagctgactgctggcgcattaagactatgctaacagagcaagccactaacatttccttctcttttagctgaaacaggctgaaaacttg

SEQ ID NO: 710997 - DNA, 332 bp, Homo sapiens
tccaaatgttttgtttctgtgtgtgtgcacgtgcctgctcacaaatgtatctgtatgttgtggaggcaattggctcaacagtcattcagggactcagctgagggacagatcagctgactggttccagatttctccggcgtccccctcccccgtgttttgtaggaagataagaacacacagaaattcttctatgaggaagtttatcgcccaggactgaaaatggcacacaacatctacttacattccatacccatgaacacttagtctgatggccacacttaactataaaaaggctgagaaatggagaagacatgatcagactaaaggggaac

SEQ ID NO: 710998 - DNA, 688 bp, Homo sapiens
gggaaagtaaataaactttaaaattcataaaaaaaaaaaaaaaaaaaaaaaaaaaaaaaaaaaaaaaaaaaaaaaaaaaaaaaaaaaaaaaaaaaaaaaaaaaaaaaaaaaaaaaaaaaaaaaaaaaaaaaaaaaccctgggggcccctttggcccaagccgtttttagcttgggcaagttttttcctggggcccaaatttgggctcatttggcccattcccccttttggggggcggtttacaattaaatggcccgggttttaaaacggggggattgggaaaacccgggggttccccaatttaaacgccttggaaaaaatcccctttttgccaggtggggtaatagccaaagggccccacccggtgggcctttccaaacgttggcccccccgaatggcaaatggaaatttgaagggctaaattttgggaaaaattccggttaaaattttggtaaaccgggttttttttaacccaaatggcccaatatgggaaaatcccttttaaattaaaagaattccccccgaatgggtttgggggtgttcccttttggcaccagggcccccttttaaaggacggggccctcaacgtcaaagggggaaaaaccggttttagggggatggccccattggggcccattcccctaaggtttttggggtcggggggccccgccttattgggccccttgggg

SEQ ID NO: 710999 - DNA, 508 bp, Homo sapiens
ttagtacaatatctgtgtgtatggtggaactttccttaacgtgttagtaacatttagctatttgtctgtaaatagcttacatatcttcacagaaaaatattatgaaataccttcagtacaaatgttttataatatttgccattcctattaatatatgaaacttgaaccctcagattgtgaattgtacacatataacataaactgttaggataattactccagataaaaatattttttcccaaaaaagcacctctctttgcatagtgatctgtctcattattacagaactgacactgtctttacagattctttccacactagaataaaatggtacctttcctagttttctgttatttcagaaaatgaggaaatgaatcctggatgaaaccggccttcacatttagctcaattcttcctctgcagaggtgacacttgatagtacactttctgacttgactcacaactaacagtctgtataatagcagtgacacctaccaatttcactggc

SEQ ID NO: 711000 - DNA, 100 bp, Homo sapiens
gatttgctggtgcagtacaactaggcttaatagggactcgaattcgagctcgaattcgagctcgaattcgagagaaaattgaaaagaaaggagaaaaaaa

SEQ ID NO: 711001 - DNA, 525 bp, Homo sapiens
  misc_feature (517)..(518): n is a, c, g, or t
actgtggtacattcttactgtggaatattacttagcaataaaaagaaagaaactattgatggacacaacttggatggatttcaagggcatttttatgccaagtgaagaaaactaatctcaaaagtcacatactatgtgattccatttgtacgacattctcaatatgaggaaattttagagatgaagaacagattagtggttgccaagggctaggtatagatgggagaggcagagggatgagtagaacttttaataaaggggtagaatgagggtaattcttgtggtgatagaatagttctgtaccttgattgcgactgttgcatgactccatgtgtggtaaagtggcatggaattatacatatgttgtatcaatatcaatttcctgattgtgatattatgctatagttatgtaagaggtaacattgaggtataactgagtgaagagtacagaggatttctctgtattatctttgcaacttcgtgtgactgtataatgatttcaaaattaaaaagattnnaacattt

SEQ ID NO: 711002 - DNA, 259 bp, Homo sapiens
cctagttttagaagtttcaatagcagattagtggttgccaagggctaggtatagatgggagaggcagagggatgagtagaacttttaataaaggggtagaatgagggtaattcttgtggtgatagaatagttctgtaccttgattgcgactgttgcatgactccatgtgtggtaaagtggcatggaattatacatatgttgtatcaatatcaatttcctgattgtgatattatgctattgaacttctaactaggggccg

SEQ ID NO: 711003 - DNA, 634 bp, Homo sapiens
agcggtgcattccagcctgggcgacagagtgagactccgtctcaaaaaaaaaaaaaaacaaaagaagtttctagaatctacggggcttgatgaacacaaaccacagcagaccctgaggaacccagtggtggcagtgactcgggctcctctgctctctaaagctcctttgagaaaacatgggaggggccgggcgtggtggttcacgcctgtcatcccagcacttggggaggctggggcaggaggatcgcttgagcccaggagttcgaaaaccagcctgggcaacatagttgagactgtatcgctacataaaatataaaaaaaagttagctgggcatggtacttgtgcctgtggtcccagctactcaggaggcttgagagcaggaggatggctgagcccaggagtgggatgtggcaggtgagccaagatcgcacccattggccctccactcggggccacggagcaatacccggtctcagaaagcataccaacaaaaagcagaaacgcgtgaaggggtcggttacgggaaaaaccgcctgtcagaacacgtgggagtactcctaccccagatcaggggacctgggaaatgagggtgggctcccgggaggctttctccaagctgttgccaccagaccg

SEQ ID NO: 711004 - DNA, 101 bp, Homo sapiens
cgcctggcgctggctccagaccccagaggcatacatgcagcagcgagtgttccgatcactggcctacatgcggccactgagcatatgggccatgcagctag

SEQ ID NO: 711005 - DNA, 1257 bp, Homo sapiens
  misc_feature (1257)..(1257): n is a, c, g, or t
tggctataaatccggccaaaatattttaaattacgtacaaagatctgacttgtgttcacccagggacccattttcacccattgtgctcgtgttgggccgccagtcttgtggtctctctcttcagcaatggggtgagggcggatacccttttcctcggggaagagaaactccagtggttgtgtggcccttgccaattaacaaaaagtgtgtggaaagttcgagtgtggcaaagctgtgtgccagtgggcattcttctcagggtgaaccagcgttcaaaagactccaggggtgcctctctcgtgtggggtgactcacaccaatttctctcctaggtatagcacctccagttcaccatacaacagggtttaccagtgtgtctcagaacctttgatgtgaaatctcagataattcttgtgcacagtctttataaaatctcaattcgtgaagggggtaatcattctcacccttttgaatgagcgggggactcgggagaaacgcggatgtgggtgcggggccaactacagtggagtctccaccgagaagtgagaggggaatttcccttatgtggtgtggcacccccacaaagagaaatctgttttctctcaacttgtgtggccacacaaactttgtggcgtaacttgggggcccctcctctcagggggggtggggtaaaacatgaccgaagtgttcacagagccaaaagaggcggaaacccctttgggtgggtgttcacattaaagatagttccaaagccaagcgggcaaaagaatttttcttacctaccccgcggagttcttgggcgccaacaaaagtgctcgtcgaatattgaaacactatttccacaattggaaaatttccccgaaggaaaggaggggtgatagagcggcttataaattatactccagaggttttgcgggggacaccttcttgttgggccacaatgcacgaaaatttcttctacaactgaggaaacccccggttgtggcatatggggcgaatacatctccttacttcgtgatacaaagcttactacacattagcctcccctgtggtgacgacgggcggcaataaatcctgagaaagggttactgaggtatctacccctcagaagggagaaacacatatctcgtattcacgaaaggggggggcggaaagcaacacactcttctcttcctcccaacatctcttggttggcggggggacacccccagggtgttgctgatcttgaggacaccagaatgagatactgtcacatan

SEQ ID NO: 711006 - DNA, 812 bp, Homo sapiens
tatgattggggggcacaatatctattactgcaacggccaaaatctgggtttggtactgcggcccgtagatacagtgggactgatttggaataaaaatgaaagctttaaggggttcccctaacaaaactattttttcttaaaatactttggaaagggctataagcagttgattttcaccctgggagagcatcacacgcggttgaggtctcagtgatggttgaccctcccaagcccctccgggttcttaaagttatcggggtgcgtgcagcttcctctcaatcttcttggcacgctcatttctttttctctgacccatgagaagggaaacacttacggatgatacattttaaaatggtggtgaatttatccatttattaggcatggtgcgggataatttaacaaagaacttttggtgctgggaatatggctggcggggagcctatgggtggtaaatggtagggtaatttcggtgaaaataaccacttgaaattggtaaattggacccgttgtttgttgtcagattgggtgtctagttcaaattgggtggggaagcccttttcactcttctttttctaatgtggaaacatttatcttgtgagcaaataatttaattctcgtgagatttatccacatttctgcgcattgagagggttattaaggacgggaaatcctggaaaaaattctcttcaaggttctcaacttctggggtgagggcagcgtacgtggggtttgtttaatatacaccccctgtggtggaagagatttggtttcggaaaaaaaccttgatatttttacgcaaatattctttaagt

SEQ ID NO: 711007 - DNA, 836 bp, Homo sapiens
  misc_feature (356)..(356): n is a, c, g, or t
taaaaaatactattttatttttcctccccttttaaaaaaaagggctgtcctatcactgtttccttccttcctacctttggaaccaaaataccgaatggttttaacttttatggaagaactaccaccaacctattaaaaacatctggtagtggtgttcacagaaagcagatgtttggaggaaaaacactattaagcctttatatatttcctaatttcctattaaaaggagcagccaccctcttgaagatataatcaacctggtattagtatattattcatctcttatcatctgggcaaatatatattattgttccacaagggaaaatgttcagtgcgtattgtgtacactggtattnttatatataatcttttatacccaaagccctattttatattgtttcccctccacctccatatgggcaaagaaaatatcaaaactataatatctctggcaaaaaaaaaatattattgtcctcttatatttattttatttcgccctagattcaaacagtgttgggcgctatattatatctctgggcaacccctggggcgctttttttggtgcaccaatgtgtggccacgccatctttaaagccgggctcttcccagagtgtggggatctccaggtgttgctccccccccgtctgtgtgatctctcgtggaactcccccgcgtgaaaattaggaaaatcctccatcatttcccattatttttgtggttgcgcccaaggcactataactcccccctgggcacccctgtgatatgcacctggcgacccccttttccttgttggggatcccccctagaattcctcccctaatttagagaaaggaccc

SEQ ID NO: 711008 - DNA, 866 bp, Homo sapiens
  misc_feature (609)..(609): n is a, c, g, or t
  misc_feature (644)..(644): n is a, c, g, or t
  misc_feature (657)..(657): n is a, c, g, or t
  misc_feature (747)..(747): n is a, c, g, or t
agcgggtgagtggatctgccaagtacagccgagagaaaggaagcagcgcccgttgggaattggttgtgagaatcccagccaatgtggagaagcctggggcttgccctggactctctgtctcctcccatcggcgagtgaacagagagccaggaccaaaagtcgtccgtatatgtaagctaactctcctcagtccttggcagtcatataggaagagtctacaagtatcacaaatgcgtagagaactccatgtggattcacgtagactgatgagtctagcgtcattgcatgcaaggccacacttggatacgctggtgcgactagcgtgcaaggccatttctaagattaaggaagggaccctgcagagatgaacatctggaccatgaaaaggaatggcaatagtctctatactagtatccttactacttagtatggtgtgaattcgatccaacggaattgctcgttcatcgaaatctcaaccaatatcccacatagtctgtagagtacaataagagtatctcagagagcgagtagttgaccatgctgtataatcgagccaattgagaggacaaaatacagaaggccagatcgtgctaggaactaccttatctnaaatggcggaacggcagataacgattgacgtttcnttccactaatatnggatgatcgattggttggaccgggtcgtgtgttggagttatccagtcttgtgggtggtttgcgcgtatgtatgccattcctaaagcgttnatctccgcgatatcgtaagagaagcaaggctagttagagatttggtctactgtgtgaggaacacgcacatctgttggagataatggttgctcatacagagatatcttcatttcgaatga

SEQ ID NO: 711009 - DNA, 1236 bp, Homo sapiens
cttgaaccaggcagaggttgcagtgagccaagattgcgccactgcaccccagcctgggcaatagagcgagactccacctcaaaaaaaaaaaaaaaatcagttctaactctattttcctcagtgtggcttctagaatattctccagctcacaaccagctaggctgcatttctgttgcacaactgcagtcaaaagcaggagccggcagacagagagtattttcagctttgccagttctggcatctgtcacaagtaacccactaccgcacgccaaccccatccacactgcaccgcccacctgacgtggctcacacgctgtccccaccaacaaacgcctggttcaaggcccctctcgaggcacccagcagcctatgcagcccaatgtggcgtcggggatgtgatgtcacagacagggatatgctgaggacgcgtcaggcaggcactggagcagctcacctgtggcccctgcgaagacgtcgccctgggccggactctctgatatgacagcagtggcctctaccgtggacgctcggtcaaaggtcagtgcccccgaggtcgtgatctgtcccgagggggtcacggtgactggaaaggcagaagcacatttcacgcggccaggcagtggcgcccacggcacacaggtcccgtgccacccacgggcgccaatccttgtgggggcctgggctgaagggcgggcagtggtaactgtaccctcccatgtgaaggacacgggggaaatcccagaccttggagaagacctcacaggagaaaaccaggatggccaggatggcaacttgccactaccaattgttcgctgtttaaactgtgaaccatggaaatgtgctgcccagccagaaaacaaacataaaataaaactttcagtgatttttaagtacttcgtggttcgaattaagaaaaaatctttaatccaagctgaaggtaaaaagcagccgtgtcccacagcaaggctgccctgtgtcccacagcaaggctgcctctccagctcaaaaaaaaatcctggcgacagatcttgagactctgctgctgtgggactcttcctgcacccaccacccagggcctcaggaaggagctgacagggtgttttagaaagaccttactctataaatgcaaaaacccagacttagttaacaaaagcctattacaaagacattttctcctattgctacctctccccatttaaatcctgtctgtacaaaaaaataaaaacattagctggt

SEQ ID NO: 711010 - DNA, 312 bp, Homo sapiens
gtgtcggtacctgctatccttagtctaatgcaactaaagtgaattagagctgggcactgtggctcacgcctgcaatcccagtcattcaggaagctgaggcaggagaatcacccgaacccaggaggtggaagttgcagtgagccgagatcacgccactgcactccagcctgggcaacaagagcaaaactctgtaccccccccccccccaaaaaacaggacaagaacaaagaaatttattgtggcctattacaaaaaagaccaccaggcggggcacccaaacaagacctttgtattacaaattcaaaaacaaca

SEQ ID NO: 711011 - DNA, 4272 bp, Homo sapiens
  misc_feature (379)..(379): n is a, c, g, or t
  misc_feature (396)..(396): n is a, c, g, or t
  misc_feature (399)..(399): n is a, c, g, or t
  misc_feature (415)..(415): n is a, c, g, or t
  misc_feature (426)..(426): n is a, c, g, or t
  misc_feature (441)..(442): n is a, c, g, or t
cgtgttctgcaggtggggctgcgttaggtgtggtgtgtttgtcgtgttgcttgtgtttcgatattgtgggtttggtgtgctgttgtgtgtgtggtgttgtgggaccgtagttcgcgtgtgtgccggcgcactggttgttattgtgtttcggggcaggtcctgtgggcggtccgacggtcttgtgccggtgtttgtcgtctggtcggtgtccgtcggtgttccgggcgtgtgatgtgggttacacggggccactgtcggcgtggaggtgtgtgatggtggtgtcagctagttgtgtaccttccgagacgcgtgttctcacgtccgcgccagagtcctcagggggccgttcgacctgcgtgggcgtcacaggagtgcgagnggccccagcttccaggncgnccgatggagcctcacncgtcaccttcnccatcacgctttcanncacgtggacttcgtctgcctggacggtgacagctgctgactggccgcatatgtgctggtgatccttccagtccttgcgttggcagaaggtggagcagtagttgaccttgtggcagccggtgcactcgctcatagcctcccggccgcagttaacgcaggactgctccttccgctctgcgtcagcgtggatcttggcctggtttgtggcagcttctcggtaggtgctggcatgcttggcttgctcaaacagcgtcttcagctgctgcgctgtgttgagcaaggagttgaccatctcttctaggtacagccagctccgcggctctgacagctccagcccattgaccaacgcgggaggtgccgctttggtgggagtcgggggtgggaccgccagcgcaggcagggatgtcaacactattttgggatgtgacgttggcaacgcagcttctggaaacggtgcgatctggcagctgtcctgatagccggggtagtgaggctcagggtggctggccctgcatgggggctgcacgctggcctcttggactgtggcccctgcgaagacgtcgccctgggccggactctctgatatgacagcagtggcctctaccgtggacgctcggtcaaaggtcagtgcccccgaggtcgtgatctgtcccgagggggtcacggtgaaggtggtagccgcggtggctggaagcaatgtgatgttcttgggggagtccttcttcacgggagttgtgggcagttcattctccttcttgcgccttttgtaaggcacaaaaagcctgactgggccacttaaggtcatgtcgtcgcagcaggcagcacaggtgcaagaggcagcgtgagggtttaagatcccatcctggatgaggcactgcaagggtcggcccgcgtagcgaatgcttcttttccagtccttactgctggctcttcctgccatggcctcaaactcggtgggactgtaccagttctccccctgcttgatgcaccgtccccggccgcctgagccgagcctgttcttgtacagagtgccgctgatgttccggcaccgtacgggcagctcactgtcgtacacagaagggtcccagttgtatttagttccacctttttcttggccgggagccagaggggttggaggagactgaggacctggggtgaggggagctgccgggcctttcagcccggtggtctccacgatgctcccatctgtgtggacgacaatcagtgtcgctttttcggtgttcaggctgtccccgatctgaagggccgtcctaccagacagaacatgtcctgagatggatgccgcgttcgccacagacgtggtgaagacattgtctgcagcagcccccacgttggccactgtcactgtggtcacctctgcgaaggctgcggcagcggcggcctcgtcggggccgggcagggcctcggcgcccatgtccatgtgcccgggctccgccgccatcaccgccactgccgtgacccgcggcgtctcccgctccgcctccgagtctgcgtcctcctccgagtcctcgtccctgctcagcaccggctcctccgcctcgcctcctgccgcggccgcggccgccgccgccacagcggccgcggccgccaccgccgccgcctcagccaggcccagctgctttgccgccgagtccgagtcctccatccggactccgccgagccttcccgaaggcgccgtccgggaccgcccgaagcgccggtcgcggagcccgaagcggggcccgaagaggacgcccgagctgggccgaggccgcccgaagccgccgcccgaatagggaccgaaaaggcagccagccgccgagcagagccgagccgagtccgcccgcggagcggagccgaggcgaacagaggctgcccgagtaggagccgaacctgcacgaagccgccgagccgagaccgagtcctgaaccgaggagggtcgaagttccccgaagtgggaagccgaatcagtccgaataggtccgagtcctcacgagggcttccgagagactcggcccctgctctcctcactgtcctgacaggctgaggcggctgtcgtccccggccgacagggctggacggctctaggcagattctcgccggcggccggcgcaattctgcctctcagagagagcttagtgccgcgggtttcgcccgttcccgccgccggcggaagccgagtcagcccgaggccgagccgagacgagccgaatgtccccgaggccgaatgctcccgaacgtcggttctccacctcttcccttccgaaagtgcccgagcggtgccggacggactaatcgggcctcggccgtggctcggacgtccgctcccgaaacgcggcgcggtcgggccccttcgtcaggagacgcgaaaatggccgaaggagcgcgagcgcgcgggccgagaggctgccgggatcgcgacggaccggcgggcggggcggggagaggatcctccacagtgctctcttcagttccccttcaaatgctgttttatctcagcggaacgtactacgccctgtatttcctcgccacgctcctgatgatcacgtataaaagtcaggtgttcagctatcctcaccgctacctggtcctcgatcttgctctgctgtttctgatggggattctagaagcagttcggttatacctgggcaccaggggcaacctgacagaggctgagaggccgctggccgccagcctggccctcacggctggcaccgccctcctctctgcccacttcctgctttggcaggccctagtgttgtgggcggactgggccctcagcgccacgctcctggcccttcacggcctggaggccgtcctgcaggtggttgccatcgcggccttcaccaggtagctacggacacccgggataccccacactggggccctcctcctgggcctgaccagtcccccagctgtcacctccccattcctggacaggaagggcacttttcctagtgactggccatagatggttttggatggttccatctgttctggcaggagtgggagcaggagccagggcagaacaaactgctggaggccctggtgttgggaacagctgcggggagggtagggaccagacagaactgccttcaagatgagtcccaggagcgcacactcagccctgtcagtggggtctggctttagcagccaggcctccacagacccccatgggcccccagggccgagagggaggacagagcccttcagaacagaggcctcatctcactgcatcccccatcaccccctagttccccaatggtcctaatttgtgttctgagatcccagtttactccgtggccaggccccacctgtgtttccaagtcgggctggagacgcaggatggggtaggccttgtgctctgagcaaccccagctctgcctcacaggcaggcaggcccggtgcaagagtggactctgggttcctaaagcaataaatgcaaacaagccaacagctctgctgcctagcaatttccatcttagccacacttctcccttcaggggcttcggaggagaggtcagggctaaggccggggatgagactgcaggagagagagcagcggagggccacattcggagcctccgtccactccagttttatcagcttttgccttttgcacggagtgctaaacaaattctagctctgtgtttttttcccattcccagatttactatcagttctccttaaaaagtatctaagctgttacagtagctttcccttcacttgattctattgtgtgttttctatgtttggaataattacacccaaatatctagatattttctcttcaccgcattttgtaaataaagagatgtgtatgcctccctg

SEQ ID NO: 711012 - DNA, 129 bp, Homo sapiens
ctgccaagatgcttggagaagcactgagcaagaaccctggctacatcaaacttcgcaagagtcgagcagcccagaatatctccaagacgatcgccacatcacagaatcgtatctatctcacagcctgca

SEQ ID NO: 711013 - DNA, 3928 bp, Homo sapiens
tttttttgcgcacaaaattgtttccctttctgaaacaaagcaaccttatttacaaaaaccaaaaccaccttaacaacaatagctgtcacttttctttaggaaaagcttcatttgtaaatgactctccacagctcccttttccagaaaggtggggcaggggccttgtgagccaaggtgggtcttgcgcactgggcacaggcaccagggtggcctggggttactcggcacaggtcgtgtcttcccatttgttccaaggttacctccttccgctctgcgtcagcgtggatcttggcctggtttgtggcagcttctcggtaggtgctggcatgcttggcttgctcaaacagcgtcttcagctgctgcgctgtgttgagcaaggagttgaccatctcttctaggtacagccagctccgcggctctgacagctccagcccattgaccaacgcgggaggtgccgctttggtgggagtcgggggtgggaccgccagcgcaggcagggatgtcaacactattttgggatgtgacgttggcaacgcagcttctggaaacggtgcgatctggcagctgtcctgatagccggggtagtgaggctcagggtggctggccctgcatgggggctgcacgctggcctcttggactgtggcccctgcgaagacgtcgccctgggccggactctctgatatgacagcagtggcctctaccgtggacgctcggtcaaaggtcagtgcccccgaggtcgtgatctgtcccgagggggtcacggtgaaggtggtagccgcggtggctggaagcaatgtgatgttcttgggggagtccttcttcacgggagttgtgggcagttcattctccttcttgcgccttttgtaaggcacaaaaagcctgactgggccacttaaggtcatgtcgtcgcagcaggcagcacaggtgcaagaggcagcgtgagggtttaagatcccatcctggatgaggcactgcaagggtcggcccgcgtagcgaatgcttcttttccagtccttactgctggctcttcctgccatggcctcaaactcggtgggactgtaccagttctccccctgcttgatgcaccgtccccggccgcctgagccgagcctgttcttgtacagagtgccgctgatgttccggcaccgtacgggcagctcactgtcgtacacagaagggtcccagttgtatttagttccacctttttcttggccgggagccagaggggttggaggagactgaggacctggggtgaggggagctgccgggcctttcagcccggtggtctccacgatgctcccatctgtgtggacgacaatcagtgtcgctttttcggtgttcaggctgtccccgatctgaagggccgtcctaccagacagaacatgtcctgagatggatgccgcgttcgccacagacgtggtgaagacattgtctgcagcagcccccacgttggccactgtcactgtggtcacctctgcgaaggctgcggcagcggcggcctcgtcggggccgggcagggcctcggcgcccatgtccatgtgcccgggctccgccgccatcaccgccactgccgtgacccgcggcgtctcccgctccgcctccgagtctgcgtcctcctccgagtcctcgtccctgctcagcaccggctcctccgcctcgcctcctgccgcggccgcggccgccgccgccacagcggccgcggccgccaccgccgccgcctcagccaggcccagctgctttgccgccgagtccgagtcctccatccggactccgccgagccttcccgaaggcgccgtccgggaccgcccgaagcgccggtcgcggagcccgaagcggggcccgaagaggacgcccgagctgggccgaggccgcccgaagccgccgcccgaatagggaccgaaaaggcagccagccgccgagcagagccgagccgagtccgcccgcggagcggagccgaggcgaacagaggctgcccgagtaggagccgaacctgcacgaagccgccgagccgagaccgagtcctgaaccgaggagggtcgaagttccccgaagtgggaagccgaatcagtccgaataggtccgagtcctcacgagggcttccgagagactcggcccctgctctcctcactgtcctgacaggctgaggcggctgtcgtccccggccgacagggctggacggctctaggcagattctcgccggcggccggcgcaattctgcctctcagagagagcttagtgccgcgggtttcgcccgttcccgccgccggcggaagccgagtcagcccgaggccgagccgagacgagccgaatgtccccgaggccgaatgctcccgaacgtcggttctccacctcttcccttccgaaagtgcccgagcggtgccggacggactaatcgggcctcggccgtggctcggacgtccgctcccgaaacgcggcgcggtcgggccccttcgtcaggagacgcgaaaatggccgaaggagcgcgagcgcgcgggccgagaggctgccgggatcgcgacggaccggcgggcggggcggggagaggatcctccacagtgctctcttcagttccccttcaaatgctgttttatctcagcggaacgtactacgccctgtatttcctcgccacgctcctgatgatcacgtataaaagtcaggtgttcagctatcctcaccgctacctggtcctcgatcttgctctgctgtttctgatggggattctagaagcagttcggttatacctgggcaccaggggcaacctgacagaggctgagaggccgctggccgccagcctggccctcacggctggcaccgccctcctctctgcccacttcctgctttggcaggccctagtgttgtgggcggactgggccctcagcgccacgctcctggcccttcacggcctggaggccgtcctgcaggtggttgccatcgcggccttcaccaggtagctacggacacccgggataccccacactggggccctcctcctgggcctgaccagtcccccagctgtcacctccccattcctggacaggaagggcacttttcctagtgactggccatagatggttttggatggttccatctgttctggcaggagtgggagcaggagccagggcagaacaaactgctggaggccctggtgttgggaacagctgcggggagggtagggaccagacagaactgccttcaagatgagtcccaggagcgcacactcagccctgtcagtggggtctggctttagcagccaggcctccacagacccccatgggcccccagggccgagagggaggacagagcccttcagaacagaggcctcatctcactgcatcccccatcaccccctagttccccaatggtcctaatttgtgttctgagatcccagtttactccgtggccaggccccacctgtgtttccaagtcgggctggagacgcaggatggggtaggccttgtgctctgagcaaccccagctctgcctcacaggcaggcaggcccggtgcaagagtggactctgggttcctaaagcaataaatgcaaacaagccaacagctctgctgcctagcaatttccatcttagccacacttctcccttcaggggcttcggaggagaggtcagggctaaggccggggatgagactgcaggagagagagcagcggagggccacattcggagcctccgtccactccagttttatcagcttttgccttttgcacggagtgctaaacaaattctagctctgtgtttttttcccattcccagatttactatcagttctccttaaaaagtatctaagctgttacagtagctttcccttcacttgattctattgtgtgttttctatgtttggaataattacacccaaatatctagatattttctcttcaccgcattttgtaaataaagagatgtgtatgcctccctg

SEQ ID NO: 711014 - DNA, 1782 bp, Homo sapiens
ggcctggatggctgtgtgcgcatgcgcgagcgcctagctgcgcgcagccacccactgctgaccccagtctgagtgtgctgtgggtcctgtgtgtgccctgtgctgctgggtgtgcctgcctgctgtgcccctctgggcttgctgtgggtgagtgtgtgtgcttcctgccccatgttgtctatttgctccttgcagccctttactgctagtggacttgctgctgacacctgcgcccccggacccgggtgtgcccggcttgtagtgccatgtgcctgggtagctgggcgcacggtgtccctgcggatggtgccctataaggggacttgccatgtgcaaataactagaaaggttctctcttcaccttgcaacggcatgcggacacgtgacagcgatgcactggttgtgcccatggactcccgtaactaatcacggcgcaatccagcgacttcactactgggacgtatgaaaggcccacgtatatgaatcccatgatttataaattccggaccttcgagcggtcaataaggtacgtcgatttcgcccgagcgtatatcgtccatagaaggaaaacgccattttccttctaattccctttgcaaggaaataaaagcagcgggagtggaacctacaggtatatcttaagccagagagacaccgccacaaggcaagacgagcgtagggaccaggccacatggcacatgacaccgagtgcaaattcggctccatggccgccagtgctcacaccaacacccaaactcaccacaacgcccgttttgcagcacgcatcccttggcgcgcacccacccgtgatccctccccttggccagacatggcacacagcagaatacgtgttgcgcagcatctgggcccccaccccggttcccaccgcgctggctacacgtcggcttgcccgcctttcggcacccacacataggacttagcaccttcgcctttctcccattccgttagcgcgcatcgcacgagcttacacgcgtcgccttatggagcccactcctttgatgagagttcaacccaatgcggagtaccgtcagacgaacagagcagacaccccgattatgctaggtcagtacatacacgatttagccacttggaacgcagcacgcagacgagatctcgccacagcgacaatgaacgctacattaccgtggacttctcccaaacgagaggtagtcgtccatccccctctcccagtggccgacattgagcacctcgattacgataacattattaccacagtatgacatcgacacacacacccatgtctgaacgacgggtcagacagagaacgatcgcgcttgagcacacaacagaagccagaccgtccgaacgcggcccacacgacaggctggcatcaatctgcccgacgagcacacagcaccactaagccatggtgcgagcacatacacagcactgaagttgcgcacgacacaccagggaggaaaaccacacggcagaaaacaccaggacaaacgaagcaccaagatcatccccaacagataggaaagggaacaaccagaccacaccagatacacagatagcaacatacacacccatcgaggggcaccccaactaaccgcagcgcacagccaacaaaacagaacagagcaacccgcgcagcagagacagacaacaacactaaccgtgctgaaagagaatcgtacacgcaaaaccacgtacactagacagacaggacagaggagacatcagtatacagcagcagagcgagagagcgataccaaatacaacagcgcgcgaccaacg

SEQ ID NO: 711015 - DNA, 4227 bp, Homo sapiens
  misc_feature (379)..(379): n is a, c, g, or t
  misc_feature (396)..(396): n is a, c, g, or t
  misc_feature (399)..(399): n is a, c, g, or t
  misc_feature (415)..(415): n is a, c, g, or t
  misc_feature (426)..(426): n is a, c, g, or t
  misc_feature (441)..(442): n is a, c, g, or t
cgtgttctgcaggtggggctgcgttaggtgtggtgtgtttgtcgtgttgcttgtgtttcgatattgtgggtttggtgtgctgttgtgtgtgtggtgttgtgggaccgtagttcgcgtgtgtgccggcgcactggttgttattgtgtttcggggcaggtcctgtgggcggtccgacggtcttgtgccggtgtttgtcgtctggtcggtgtccgtcggtgttccgggcgtgtgatgtgggttacacggggccactgtcggcgtggaggtgtgtgatggtggtgtcagctagttgtgtaccttccgagacgcgtgttctcacgtccgcgccagagtcctcagggggccgttcgacctgcgtgggcgtcacaggagtgcgagnggccccagcttccaggncgnccgatggagcctcacncgtcaccttcnccatcacgctttcanncacgtggacttcgtctgcctggacggtgacagctgctgactggccgcatatgtgctggtgatccttccagtccttgcgttggcagaaggtggagcagtagttgaccttgtggcagccggtgcactcgctcatagcctcccggccgcagttaacgcaggactgctccttccgctctgcgtcagcgtggatcttggcctggtttgtggcagcttctcggtaggtgctggcatgcttggcttgctcaaacagcgtcttcagctgctgcgctgtgttgagcaaggagttgaccatctcttctaggtacagccagctccgcggctctgacagctccagcccattgaccaacgcgggaggtgccgctttggtgggagtcgggggtgggaccgccagcgcaggcagggatgtcaacactattttgggatgtgacgttggcaacgcagcttctggaaacggtgcgatctggcagctgtcctgatagccggggtagtgaggctcagggtggctggccctgcatgggggctgcacgctggcctcttggactgtggcccctgcgaagacgtcgccctgggccggactctctgatatgacagcagtggcctctaccgtggacgctcggtcaaaggtcagtgcccccgaggtcgtgatctgtcccgagggggtcacggtgaaggtggtagccgcggtggctggaagcaatgtgatgttcttgggggagtccttcttcacgggagttgtgggcagttcattctccttcttgcgccttttgtaaggcacaaaaagcctgactgggccacttaaggtcatgtcgtcgcagcaggcagcacaggtgcaagaggcagcgtgagggtttaagatcccatcctggatgaggcactgcaagggtcggcccgcgtagcgaatgcttcttttccagtccttactgctggctcttcctgccatggcctcaaactcggtgggactgtaccagttctccccctgcttgatgcaccgtccccggccgcctgagccgagcctgttcttgtacagagtgccgctgatgttccggcaccgtacgggcagctcactgtcgtacacagaagggtcccagttgtatttagttccacctttttcttggccgggagccagaggggttggaggagactgaggacctggggtgaggggagctgccgggcctttcagcccggtggtctccacgatgctcccatctgtgtggacgacaatcagtgtcgctttttcggtgttcaggctgtccccgatctgaagggccgtcctaccagacagaacatgtcctgagatggatgccgcgttcgccacagacgtggtgaagacattgtctgcagcagcccccacgttggccactgtcactgtggtcacctctgcgaaggctgcggcagcggcggcctcgtcggggccgggcagggcctcggcgcccatgtccatgtgcccgggctccgccgccatcaccgccactgccgtgacccgcggcgtctcccgctccgcctccgagtctgcgtcctcctccgagtcctcgtccctgctcagcaccggctcctccgcctcgcctcctgccgcggcctcagccaggcccagctgctttgccgccgagtccgagtcctccatccggactccgccgagccttcccgaaggcgccgtccgggaccgcccgaagcgccggtcgcggagcccgaagcggggcccgaagaggacgcccgagctgggccgaggccgcccgaagccgccgcccgaatagggaccgaaaaggcagccagccgccgagcagagccgagccgagtccgcccgcggagcggagccgaggcgaacagaggctgcccgagtaggagccgaacctgcacgaagccgccgagccgagaccgagtcctgaaccgaggagggtcgaagttccccgaagtgggaagccgaatcagtccgaataggtccgagtcctcacgagggcttccgagagactcggcccctgctctcctcactgtcctgacaggctgaggcggctgtcgtccccggccgacagggctggacggctctaggcagattctcgccggcggccggcgcaattctgcctctcagagagagcttagtgccgcgggtttcgcccgttcccgccgccggcggaagccgagtcagcccgaggccgagccgagacgagccgaatgtccccgaggccgaatgctcccgaacgtcggttctccacctcttcccttccgaaagtgcccgagcggtgccggacggactaatcgggcctcggccgtggctcggacgtccgctcccgaaacgcggcgcggtcgggccccttcgtcaggagacgcgaaaatggccgaaggagcgcgagcgcgcgggccgagaggctgccgggatcgcgacggaccggcgggcggggcggggagaggatcctccacagtgctctcttcagttccccttcaaatgctgttttatctcagcggaacgtactacgccctgtatttcctcgccacgctcctgatgatcacgtataaaagtcaggtgttcagctatcctcaccgctacctggtcctcgatcttgctctgctgtttctgatggggattctagaagcagttcggttatacctgggcaccaggggcaacctgacagaggctgagaggccgctggccgccagcctggccctcacggctggcaccgccctcctctctgcccacttcctgctttggcaggccctagtgttgtgggcggactgggccctcagcgccacgctcctggcccttcacggcctggaggccgtcctgcaggtggttgccatcgcggccttcaccaggtagctacggacacccgggataccccacactggggccctcctcctgggcctgaccagtcccccagctgtcacctccccattcctggacaggaagggcacttttcctagtgactggccatagatggttttggatggttccatctgttctggcaggagtgggagcaggagccagggcagaacaaactgctggaggccctggtgttgggaacagctgcggggagggtagggaccagacagaactgccttcaagatgagtcccaggagcgcacactcagccctgtcagtggggtctggctttagcagccaggcctccacagacccccatgggcccccagggccgagagggaggacagagcccttcagaacagaggcctcatctcactgcatcccccatcaccccctagttccccaatggtcctaatttgtgttctgagatcccagtttactccgtggccaggccccacctgtgtttccaagtcgggctggagacgcaggatggggtaggccttgtgctctgagcaaccccagctctgcctcacaggcaggcaggcccggtgcaagagtggactctgggttcctaaagcaataaatgcaaacaagccaacagctctgctgcctagcaatttccatcttagccacacttctcccttcaggggcttcggaggagaggtcagggctaaggccggggatgagactgcaggagagagagcagcggagggccacattcggagcctccgtccactccagttttatcagcttttgccttttgcacggagtgctaaacaaattctagctctgtgtttttttcccattcccagatttactatcagttctccttaaaaagtatctaagctgttacagtagctttcccttcacttgattctattgtgtgttttctatgtttggaataattacacccaaatatctagatattttctcttcaccgcattttgtaaataaagagatgtgtatgcctccctg

SEQ ID NO: 711016 - DNA, 718 bp, Homo sapiens
atatcaggtcatgagataactaaataatactcacctggtatgactaccatcgctatggggtcatcgtatactctcaccctacttgaagcgctcatgatcataccatgagctcccattgttttaccctctctagtaatagttcaaaaagtccttcgcatgtcgccatagagattctcttttgcaactatgcattgcatgtgccacccgcatagcaggataccttcagcctcttatcctggttaaagcctttgggactgtcaagtgggattggccaattttaaattgctaaagggaaactatagtctgtgtatccccgtgggataggtcacatatgactcctagaacacaatgaatatctctctggtgctgacttgccttgtgcatgcccagagtgctacagtttgcagtgattattggacttaacctgtttccttgactaagtgtggctccgcaagagcaaggccaggtccagaacagtaatggcacgatacgtagatcatacgatccatgtgggtgtagaaggagaagtaactacatgactatttgccaagtactgtgctaagagttttagctgttcaataaatatttgtcacataaatgagctgttcagtaaagctgggtgtttggtgacatggaaaacaagtaggtattggacatttttttctgtcttagaaaatctattagcataatttctacgcaactattctggataaatctc

SEQ ID NO: 711017 - DNA, 229 bp, Homo sapiens
cgtacgatcagtggcacaagatcgaactgaaaacaaacattattcatgctacaggttataattttcctggacaacaccaaaaacacagtactcaaacggcatgtatacttttgtaatatttttttattttgggtctctaaaaaccgattttttaattatttccccaaaattcaaattaaaaaccaaccttattccatgctacggttttatatttctctgtgcaccaaca

SEQ ID NO: 711018 - DNA, 3669 bp, Homo sapiens
cgtccagcaaaactgcaccaggcgaagacgcgatcctcctcgtcgctcaagtgcctccgaagctcctgtccctctttctcgccttaccgttctctgctcgtttgcgttcatctcgtgaccgatgcttccacgttttagctgcctgtgccagattacattctcagtcaccactcgcgttctgcagtcagccatgacacgcggaggtcccttgtggatcgggtggaccccagccaggcagggatgtcaacactattttgggatgtgacgttggcaacgcagcttctggaaacggtgcgatctggcagctgtcctgatagccggggtagtgaggctcagggtggctggccctgcatgggggctgcacgctggcctcttggactgtggcccctgcgaagacgtcgccctgggccggactctctgatatgacagcagtggcctctaccgtggacgctcggtcaaaggtcagtgcccccgaggtcgtgatctgtcccgagggggtcacggtgaaggtggtagccgcggtggctggaagcaatgtgatgttcttgggggagtccttcttcacgggagttgtgggcagttcattctccttcttgcgccttttgtaaggcacaaaaagcctgactgggccacttaaggtcatgtcgtcgcagcaggcagcacaggtgcaagaggcagcgtgagggtttaagatcccatcctggatgaggcactgcaagggtcggcccgcgtagcgaatgcttcttttccagtccttactgctggctcttcctgccatggcctcaaactcggtgggactgtaccagttctccccctgcttgatgcaccgtccccggccgcctgagccgagcctgttcttgtacagagtgccgctgatgttccggcaccgtacgggcagctcactgtcgtacacagaagggtcccagttgtatttagttccacctttttcttggccgggagccagaggggttggaggagactgaggacctggggtgaggggagctgccgggcctttcagcccggtggtctccacgatgctcccatctgtgtggacgacaatcagtgtcgctttttcggtgttcaggctgtccccgatctgaagggccgtcctaccagacagaacatgtcctgagatggatgccgcgttcgccacagacgtggtgaagacattgtctgcagcagcccccacgttggccactgtcactgtggtcacctctgcgaaggctgcggcagcggcggcctcgtcggggccgggcagggcctcggcgcccatgtccatgtgcccgggctccgccgccatcaccgccactgccgtgacccgcggcgtctcccgctccgcctccgagtctgcgtcctcctccgagtcctcgtccctgctcagcaccggctcctccgcctcgcctcctgccgcggccgcggccgccgccgccacagcggccgcggccgccaccgccgccgcctcagccaggcccagctgctttgccgccgagtccgagtcctccatccggactccgccgagccttcccgaaggcgccgtccgggaccgcccgaagcgccggtcgcggagcccgaagcggggcccgaagaggacgcccgagctgggccgaggccgcccgaagccgccgcccgaatagggaccgaaaaggcagccagccgccgagcagagccgagccgagtccgcccgcggagcggagccgaggcgaacagaggctgcccgagtaggagccgaacctgcacgaagccgccgagccgagaccgagtcctgaaccgaggagggtcgaagttccccgaagtgggaagccgaatcagtccgaataggtccgagtcctcacgagggcttccgagagactcggcccctgctctcctcactgtcctgacaggctgaggcggctgtcgtccccggccgacagggctggacggctctaggcagattctcgccggcggccggcgcaattctgcctctcagagagagcttagtgccgcgggtttcgcccgttcccgccgccggcggaagccgagtcagcccgaggccgagccgagacgagccgaatgtccccgaggccgaatgctcccgaacgtcggttctccacctcttcccttccgaaagtgcccgagcggtgccggacggactaatcgggcctcggccgtggctcggacgtccgctcccgaaacgcggcgcggtcgggccccttcgtcaggagacgcgaaaatggccgaaggagcgcgagcgcgcgggccgagaggctgccgggatcgcgacggaccggcgggcggggcggggagaggatcctccacagtgctctcttcagttccccttcaaatgctgttttatctcagcggaacgtactacgccctgtatttcctcgccacgctcctgatgatcacgtataaaagtcaggtgttcagctatcctcaccgctacctggtcctcgatcttgctctgctgtttctgatggggattctagaagcagttcggttatacctgggcaccaggggcaacctgacagaggctgagaggccgctggccgccagcctggccctcacggctggcaccgccctcctctctgcccacttcctgctttggcaggccctagtgttgtgggcggactgggccctcagcgccacgctcctggcccttcacggcctggaggccgtcctgcaggtggttgccatcgcggccttcaccaggtagctacggacacccgggataccccacactggggccctcctcctgggcctgaccagtcccccagctgtcacctccccattcctggacaggaagggcacttttcctagtgactggccatagatggttttggatggttccatctgttctggcaggagtgggagcaggagccagggcagaacaaactgctggaggccctggtgttgggaacagctgcggggagggtagggaccagacagaactgccttcaagatgagtcccaggagcgcacactcagccctgtcagtggggtctggctttagcagccaggcctccacagacccccatgggcccccagggccgagagggaggacagagcccttcagaacagaggcctcatctcactgcatcccccatcaccccctagttccccaatggtcctaatttgtgttctgagatcccagtttactccgtggccaggccccacctgtgtttccaagtcgggctggagacgcaggatggggtaggccttgtgctctgagcaaccccagctctgcctcacaggcaggcaggcccggtgcaagagtggactctgggttcctaaagcaataaatgcaaacaagccaacagctctgctgcctagcaatttccatcttagccacacttctcccttcaggggcttcggaggagaggtcagggctaaggccggggatgagactgcaggagagagagcagcggagggccacattcggagcctccgtccactccagttttatcagcttttgccttttgcacggagtgctaaacaaattctagctctgtgtttttttcccattcccagatttactatcagttctccttaaaaagtatctaagctgttacagtagctttcccttcacttgattctattgtgtgttttctatgtttggaataattacacccaaatatctagatattttctcttcaccgcattttgtaaataaagagatgtgtatgcctccctg

SEQ ID NO: 711019 - DNA, 4020 bp, Homo sapiens
tttttttgcgcacaaaattgtttccctttctgaaacaaagcaaccttatttacaaaaaccaaaaccaccttaacaacaatagctgtcacttttctttaggaaaagcttcatttgtaaatgactctccacagctcccttttccagaaaggtggggcaggggccttgtgagccaaggtgggtcttgcgcactgggcacaggcaccagggtggcctggggttactcggcacaggtcgtgtcttcccatttgttccaaggttacctccttccgctctgcgtcagcgtggatcttggcctggtttgtggcagcttctcggtaggtgctggcatgcttggcttgctcaaacagcgtcttcagctgctgcgctgtgttgagcaaggagttgaccatctcttctaggtacagccagctccgcggctctgacagctccagcccattgaccaacgcgggaggtgccgctttggtgggagtcgggggtgggaccgccagcgcaggcagggatgtcaacactgggaggcagaagttgtggtgagccgagatggtgccagtggactcaagcctgggtgacagagtgagactccatcaggcagggatgtcaacactattttgggatgtgacgttggcaacgcagcttctggaaacggtgcgatctggcagctgtcctgatagccggggtagtgaggctcagggtggctggccctgcatgggggctgcacgctggcctcttggactgtggcccctgcgaagacgtcgccctgggccggactctctgatatgacagcagtggcctctaccgtggacgctcggtcaaaggtcagtgcccccgaggtcgtgatctgtcccgagggggtcacggtgaaggtggtagccgcggtggctggaagcaatgtgatgttcttgggggagtccttcttcacgggagttgtgggcagttcattctccttcttgcgccttttgtaaggcacaaaaagcctgactgggccacttaaggtcatgtcgtcgcagcaggcagcacaggtgcaagaggcagcgtgagggtttaagatcccatcctggatgaggcactgcaagggtcggcccgcgtagcgaatgcttcttttccagtccttactgctggctcttcctgccatggcctcaaactcggtgggactgtaccagttctccccctgcttgatgcaccgtccccggccgcctgagccgagcctgttcttgtacagagtgccgctgatgttccggcaccgtacgggcagctcactgtcgtacacagaagggtcccagttgtatttagttccacctttttcttggccgggagccagaggggttggaggagactgaggacctggggtgaggggagctgccgggcctttcagcccggtggtctccacgatgctcccatctgtgtggacgacaatcagtgtcgctttttcggtgttcaggctgtccccgatctgaagggccgtcctaccagacagaacatgtcctgagatggatgccgcgttcgccacagacgtggtgaagacattgtctgcagcagcccccacgttggccactgtcactgtggtcacctctgcgaaggctgcggcagcggcggcctcgtcggggccgggcagggcctcggcgcccatgtccatgtgcccgggctccgccgccatcaccgccactgccgtgacccgcggcgtctcccgctccgcctccgagtctgcgtcctcctccgagtcctcgtccctgctcagcaccggctcctccgcctcgcctcctgccgcggccgcggccgccgccgccacagcggccgcggccgccaccgccgccgcctcagccaggcccagctgctttgccgccgagtccgagtcctccatccggactccgccgagccttcccgaaggcgccgtccgggaccgcccgaagcgccggtcgcggagcccgaagcggggcccgaagaggacgcccgagctgggccgaggccgcccgaagccgccgcccgaatagggaccgaaaaggcagccagccgccgagcagagccgagccgagtccgcccgcggagcggagccgaggcgaacagaggctgcccgagtaggagccgaacctgcacgaagccgccgagccgagaccgagtcctgaaccgaggagggtcgaagttccccgaagtgggaagccgaatcagtccgaataggtccgagtcctcacgagggcttccgagagactcggcccctgctctcctcactgtcctgacaggctgaggcggctgtcgtccccggccgacagggctggacggctctaggcagattctcgccggcggccggcgcaattctgcctctcagagagagcttagtgccgcgggtttcgcccgttcccgccgccggcggaagccgagtcagcccgaggccgagccgagacgagccgaatgtccccgaggccgaatgctcccgaacgtcggttctccacctcttcccttccgaaagtgcccgagcggtgccggacggactaatcgggcctcggccgtggctcggacgtccgctcccgaaacgcggcgcggtcgggccccttcgtcaggagacgcgaaaatggccgaaggagcgcgagcgcgcgggccgagaggctgccgggatcgcgacggaccggcgggcggggcggggagaggatcctccacagtgctctcttcagttccccttcaaatgctgttttatctcagcggaacgtactacgccctgtatttcctcgccacgctcctgatgatcacgtataaaagtcaggtgttcagctatcctcaccgctacctggtcctcgatcttgctctgctgtttctgatggggattctagaagcagttcggttatacctgggcaccaggggcaacctgacagaggctgagaggccgctggccgccagcctggccctcacggctggcaccgccctcctctctgcccacttcctgctttggcaggccctagtgttgtgggcggactgggccctcagcgccacgctcctggcccttcacggcctggaggccgtcctgcaggtggttgccatcgcggccttcaccaggtagctacggacacccgggataccccacactggggccctcctcctgggcctgaccagtcccccagctgtcacctccccattcctggacaggaagggcacttttcctagtgactggccatagatggttttggatggttccatctgttctggcaggagtgggagcaggagccagggcagaacaaactgctggaggccctggtgttgggaacagctgcggggagggtagggaccagacagaactgccttcaagatgagtcccaggagcgcacactcagccctgtcagtggggtctggctttagcagccaggcctccacagacccccatgggcccccagggccgagagggaggacagagcccttcagaacagaggcctcatctcactgcatcccccatcaccccctagttccccaatggtcctaatttgtgttctgagatcccagtttactccgtggccaggccccacctgtgtttccaagtcgggctggagacgcaggatggggtaggccttgtgctctgagcaaccccagctctgcctcacaggcaggcaggcccggtgcaagagtggactctgggttcctaaagcaataaatgcaaacaagccaacagctctgctgcctagcaatttccatcttagccacacttctcccttcaggggcttcggaggagaggtcagggctaaggccggggatgagactgcaggagagagagcagcggagggccacattcggagcctccgtccactccagttttatcagcttttgccttttgcacggagtgctaaacaaattctagctctgtgtttttttcccattcccagatttactatcagttctccttaaaaagtatctaagctgttacagtagctttcccttcacttgattctattgtgtgttttctatgtttggaataattacacccaaatatctagatattttctcttcaccgcattttgtaaataaagagatgtgtatgcctccctg

SEQ ID NO: 711020 - DNA, 259 bp, Homo sapiens
  misc_feature (3)..(3): n is a, c, g, or t
tantgaataccagcggccaaagagagtgcgcattacgtatgattacgttgattttctgaggccactgaatagtcttgtattatagatgggcaacagagtgaggctccatctcaaaaaaaaatatatatatatacacacatacattatattccacctatctctagtatacggaataacataaatttcaaaaattatactagtaatgccaagaacgaccaattttaagatcggaagtgtaggcccggcgctgtgtataccg

SEQ ID NO: 711021 - DNA, 4296 bp, Homo sapiens
  misc_feature (379)..(379): n is a, c, g, or t
  misc_feature (396)..(396): n is a, c, g, or t
  misc_feature (399)..(399): n is a, c, g, or t
  misc_feature (415)..(415): n is a, c, g, or t
  misc_feature (426)..(426): n is a, c, g, or t
  misc_feature (441)..(442): n is a, c, g, or t
cgtgttctgcaggtggggctgcgttaggtgtggtgtgtttgtcgtgttgcttgtgtttcgatattgtgggtttggtgtgctgttgtgtgtgtggtgttgtgggaccgtagttcgcgtgtgtgccggcgcactggttgttattgtgtttcggggcaggtcctgtgggcggtccgacggtcttgtgccggtgtttgtcgtctggtcggtgtccgtcggtgttccgggcgtgtgatgtgggttacacggggccactgtcggcgtggaggtgtgtgatggtggtgtcagctagttgtgtaccttccgagacgcgtgttctcacgtccgcgccagagtcctcagggggccgttcgacctgcgtgggcgtcacaggagtgcgagnggccccagcttccaggncgnccgatggagcctcacncgtcaccttcnccatcacgctttcanncacgtggacttcgtctgcctggacggtgacagctgctgactggccgcatatgtgctggtgatccttccagtccttgcgttggcagaaggtggagcagtagttgaccttgtggcagccggtgcactcgctcatagcctcccggccgcagttaacgcaggactgctccttccgctctgcgtcagcgtggatcttggcctggtttgtggcagcttctcggtaggtgctggcatgcttggcttgctcaaacagcgtcttcagctgctgcgctgtgttgagcaaggagttgaccatctcttctaggtacagccagctccgcggctctgacagctccagcccattgaccaacgcgggaggtgccgctttggtgggagtcgggggtgggaccgccagcgcaggcagggatgtcaacactattttgggatgtgacgttggcaacgcagcttctggaaacggtgcgatctggcagctgtcctgatagccggggtagtgaggctcagggtggctggccctgcatgggggctgcacgctggcctcttggactgtggcccctgcgaagacgtcgccctgggccggactctctgatatgacagcagtggcctctaccgtggacgctcggtcaaaggtcagtgcccccgaggtcgtgatctgtcccgagggggtcacggtgaaggtggtagccgcggtggctggaagcaatgtgatgttcttgggggagtccttcttcacgggagttgtgggcagttcattctccttcttgcgccttttgtaaggcacaaaaagcctgactgggccacttaaggtcatgtcgtcgcagcaggcagcacaggtgcaagaggcagcgtgagggtttaagatcccatcctggatgaggcactgcaagggtcggcccgcgtagcgaatgcttcttttccagtccttactgctggctcttcctgccatggcctcaaactcggtgggactgtaccagttctccccctgcttgatgcaccgtccccggccgcctgagccgagcctgttcttgtacagagtgccgctgatgttccggcaccgtacgggcagctcactgtcgtacacagaagggtcccagttgtatttagttccacctttttcttggccgggagccagaggggttggaggagactgaggacctggggtgaggggagctgccgggcctttcagcccggtggtctccacgatgctcccatctgtgtggacgacaatcagtgtcgctttttcggtgttcaggctgtccccgatctgaagggccgtcctaccagacagaacatgtcctgagatggatgccgcgttcgccacagacgtggtgaagacattgtctgcagcagcccccacgttggccactgtcactgtggtcacctctgcgaaggctgcggcagcggcggcctcgtcggggccgggcagggcctcggcgcccatgtccatgtgcccgggctccgccgccatcaccgccactgccgtgacccgcggcgtctcccgctccgcctccgagtctgcgtcctcctccgagtcctcgtccctgctcagcaccggctcctccgcctcgcctcctgccgcggccgcggccgccgccgccacagcggccgcggccgccaccgccgccgcctcagccaggcccagctgctttgccgccgagtccgagtcctccatccggactccgccgagccttcccgaaggcgccgtccgggaccgcccgaagcgccggtcgcggagcccgaagcggggcccgaagaggacgcccgagctgggccgaggccgcccgaagccgccgcccgaatagggaccgaaaaggcagccagccgccgagcagagccgagccgagtccgcccgcggagcggagccgaggcgaacagaggctgcccgagtaggagccgaacctgcacgaagccgccgagccgagaccgagtcctgaaccgaggagggtcgaagttccccgaagtgggaagccgaatcagtccgaataggtccgagtcctcacgagggcttccgagagactcggcccctgctctcctcactgtcctgacaggctgaggcggctgtcgtccccggccgacagggctggacggctctaggcagattctcgccggcggccggcgcaattctgcctctcagagagagcttagtgccgcgggtttcgcccgttcccgccgccggcggaagccgagtcagcccgaggccgagccgagacgagccgaatgtccccgaggccgaatgctcccgaacgtcggttctccacctcttcccttccgaaagtgcccgagcggtgccggacggactaatcgggcctcggccgtggctcggacgtccgctcccgaaacgcggcgcggtcgggccccttcgtcaggagacgcgaaaatggccgaaggagcgcgagcgcgcgggccgagaggctgccgggatcgcgacggaccggcgggcggggcgggtaagatggcggccccgcggcgagggagaggatcctccacagtgctctcttcagttccccttcaaatgctgttttatctcagcggaacgtactacgccctgtatttcctcgccacgctcctgatgatcacgtataaaagtcaggtgttcagctatcctcaccgctacctggtcctcgatcttgctctgctgtttctgatggggattctagaagcagttcggttatacctgggcaccaggggcaacctgacagaggctgagaggccgctggccgccagcctggccctcacggctggcaccgccctcctctctgcccacttcctgctttggcaggccctagtgttgtgggcggactgggccctcagcgccacgctcctggcccttcacggcctggaggccgtcctgcaggtggttgccatcgcggccttcaccaggtagctacggacacccgggataccccacactggggccctcctcctgggcctgaccagtcccccagctgtcacctccccattcctggacaggaagggcacttttcctagtgactggccatagatggttttggatggttccatctgttctggcaggagtgggagcaggagccagggcagaacaaactgctggaggccctggtgttgggaacagctgcggggagggtagggaccagacagaactgccttcaagatgagtcccaggagcgcacactcagccctgtcagtggggtctggctttagcagccaggcctccacagacccccatgggcccccagggccgagagggaggacagagcccttcagaacagaggcctcatctcactgcatcccccatcaccccctagttccccaatggtcctaatttgtgttctgagatcccagtttactccgtggccaggccccacctgtgtttccaagtcgggctggagacgcaggatggggtaggccttgtgctctgagcaaccccagctctgcctcacaggcaggcaggcccggtgcaagagtggactctgggttcctaaagcaataaatgcaaacaagccaacagctctgctgcctagcaatttccatcttagccacacttctcccttcaggggcttcggaggagaggtcagggctaaggccggggatgagactgcaggagagagagcagcggagggccacattcggagcctccgtccactccagttttatcagcttttgccttttgcacggagtgctaaacaaattctagctctgtgtttttttcccattcccagatttactatcagttctccttaaaaagtatctaagctgttacagtagctttcccttcacttgattctattgtgtgttttctatgtttggaataattacacccaaatatctagatattttctcttcaccgcattttgtaaataaagagatgtgtatgcctccctg

SEQ ID NO: 711022 - DNA, 779 bp, Homo sapiens
tgcgcgggggccccgggaacggcggggtggcggcgcggcagagcaaggacgcggggatccactcgcacagcagcgcactcggtgcccgcgcaggtcgcgatgctgcccggtttgcactgtcctagtggcgcctgacggtcgggcgctgaggtacccactgatggtaatgctggctagtggttgaacccaagatatgccatgttctgtggcagactgaacatgcactatgaattgtccagaattgggaagtgggattcagatccatcagggaccaaaacctgctatttgataccaagggaaggccatcctgcagttatttgccaaagaagtctaccctgaattgcaggatcacccaatgtggtagaagccaaaccaacagttgaccatccagaactgcgtggcaaggggggcccgcaagccagtgcaagaacccaattccccaacttttgggtgaatttccccttaaccgggtggcttaaggtgggtgaggttggtaagttgatgcccttctcgttcctggacaaagtgcaaattctttacaccaggagcaggatggatggttttgggaaaattcattcttcatgggaacacgcgtcgccaaaaagagaacttgcagtgaagaaagagtaccaatttgcatggataacgggcttgtgctggcccttggggaatgaccaagttcccgagggggaagagttggtgtgttggccaatggttgagaaaaagtgaacatgtggaatctggtgttgcggagaggatgatgggatgcggtgggggag

SEQ ID NO: 711023 - DNA, 4352 bp, Homo sapiens
  misc_feature (379)..(379): n is a, c, g, or t
  misc_feature (396)..(396): n is a, c, g, or t
  misc_feature (399)..(399): n is a, c, g, or t
  misc_feature (415)..(415): n is a, c, g, or t
  misc_feature (426)..(426): n is a, c, g, or t
  misc_feature (441)..(442): n is a, c, g, or t
cgtgttctgcaggtggggctgcgttaggtgtggtgtgtttgtcgtgttgcttgtgtttcgatattgtgggtttggtgtgctgttgtgtgtgtggtgttgtgggaccgtagttcgcgtgtgtgccggcgcactggttgttattgtgtttcggggcaggtcctgtgggcggtccgacggtcttgtgccggtgtttgtcgtctggtcggtgtccgtcggtgttccgggcgtgtgatgtgggttacacggggccactgtcggcgtggaggtgtgtgatggtggtgtcagctagttgtgtaccttccgagacgcgtgttctcacgtccgcgccagagtcctcagggggccgttcgacctgcgtgggcgtcacaggagtgcgagnggccccagcttccaggncgnccgatggagcctcacncgtcaccttcnccatcacgctttcanncacgtggacttcgtctgcctggacggtgacagctgctgactggccgcatatgtgctggtgatccttccagtccttgcgttggcagaaggtggagcagtagttgaccttgtggcagccggtgcactcgctcatagcctcccggccgcagttaacgcaggactgctccttccgctctgcgtcagcgtggatcttggcctggtttgtggcagcttctcggtaggtgctggcatgcttggcttgctcaaacagcgtcttcagctgctgcgctgtgttgagcaaggagttgaccatctcttctaggtacagccagctccgcggctctgacagctccagcccattgaccaacgcgggaggtgccgctttggtgggagtcgggggtgggaccgccagcgcaggcagggatgtcaacactattttgggatgtgacgttggcaacgcagcttctggaaacggtgcgatctggcagctgtcctgatagccggggtagtgaggctcagggtggctggccctgcatgggggctgcacgctggcctcttggactgtggcccctgcgaagacgtcgccctgggccggactctctgatatgacagcagtggcctctaccgtggacgctcggtcaaaggtcagtgcccccgaggtcgtgatctgtcccgagggggtcacggtgaaggtggtagccgcggtggctggaagcaatgtgatgttcttgggggagtccttcttcacgggagttgtgggcagttcattctccttcttgcgccttttgtaaggcacaaaaagcctgactgggccacttaaggtcatgtcgtcgcagcaggcagcacaggtgcaagaggcagcgtgagggtttaagatcccatcctggatgaggcactgcaagggtcggcccgcgtagcgaatgcttcttttccagtccttactgctggctcttcctgccatggcctcaaactcggtgggactgtaccagttctccccctgcttgatgcaccgtccccggccgcctgagccgagcctgttcttgtacagagtgccgctgatgttccggcaccgtacgggcagctcactgtcgtacacagaagggtcccagttgtatttagttccacctttttcttggccgggagccagaggggttggaggagactgaggacctggggtgaggggagctgccgggcctttcagcccggtggtctccacgatgctcccatctgtgtggacgacaatcagtgtcgctttttcggtgttcaggctgtccccgatctgaagggccgtcctaccagacagaacatgtcctgagatggatgccgcgttcgccacagacgtggtgaagacattgtctgcagcagcccccacgttggccactgtcactgtggtcacctctgggacagttgtgcggggcaggcgcgcggggtaggcgcgcgggaaccggacgaggcgagaggccggcgggcgcacttgcctgcgaaggctgcggcagcggcggcctcgtcggggccgggcagggcctcggcgcccatgtccatgtgcccgggctccgccgccatcaccgccactgccgtgacccgcggcgtctcccgctccgcctccgagtctgcgtcctcctccgagtcctcgtccctgctcagcaccggctcctccgcctcgcctcctgccgcggccgcggccgccgccgccacagcggccgcggccgccaccgccgccgcctcagccaggcccagctgctttgccgccgagtccgagtcctccatccggactccgccgagccttcccgaaggcgccgtccgggaccgcccgaagcgccggtcgcggagcccgaagcggggcccgaagaggacgcccgagctgggccgaggccgcccgaagccgccgcccgaatagggaccgaaaaggcagccagccgccgagcagagccgagccgagtccgcccgcggagcggagccgaggcgaacagaggctgcccgagtaggagccgaacctgcacgaagccgccgagccgagaccgagtcctgaaccgaggagggtcgaagttccccgaagtgggaagccgaatcagtccgaataggtccgagtcctcacgagggcttccgagagactcggcccctgctctcctcactgtcctgacaggctgaggcggctgtcgtccccggccgacagggctggacggctctaggcagattctcgccggcggccggcgcaattctgcctctcagagagagcttagtgccgcgggtttcgcccgttcccgccgccggcggaagccgagtcagcccgaggccgagccgagacgagccgaatgtccccgaggccgaatgctcccgaacgtcggttctccacctcttcccttccgaaagtgcccgagcggtgccggacggactaatcgggcctcggccgtggctcggacgtccgctcccgaaacgcggcgcggtcgggccccttcgtcaggagacgcgaaaatggccgaaggagcgcgagcgcgcgggccgagaggctgccgggatcgcgacggaccggcgggcggggcggggagaggatcctccacagtgctctcttcagttccccttcaaatgctgttttatctcagcggaacgtactacgccctgtatttcctcgccacgctcctgatgatcacgtataaaagtcaggtgttcagctatcctcaccgctacctggtcctcgatcttgctctgctgtttctgatggggattctagaagcagttcggttatacctgggcaccaggggcaacctgacagaggctgagaggccgctggccgccagcctggccctcacggctggcaccgccctcctctctgcccacttcctgctttggcaggccctagtgttgtgggcggactgggccctcagcgccacgctcctggcccttcacggcctggaggccgtcctgcaggtggttgccatcgcggccttcaccaggtagctacggacacccgggataccccacactggggccctcctcctgggcctgaccagtcccccagctgtcacctccccattcctggacaggaagggcacttttcctagtgactggccatagatggttttggatggttccatctgttctggcaggagtgggagcaggagccagggcagaacaaactgctggaggccctggtgttgggaacagctgcggggagggtagggaccagacagaactgccttcaagatgagtcccaggagcgcacactcagccctgtcagtggggtctggctttagcagccaggcctccacagacccccatgggcccccagggccgagagggaggacagagcccttcagaacagaggcctcatctcactgcatcccccatcaccccctagttccccaatggtcctaatttgtgttctgagatcccagtttactccgtggccaggccccacctgtgtttccaagtcgggctggagacgcaggatggggtaggccttgtgctctgagcaaccccagctctgcctcacaggcaggcaggcccggtgcaagagtggactctgggttcctaaagcaataaatgcaaacaagccaacagctctgctgcctagcaatttccatcttagccacacttctcccttcaggggcttcggaggagaggtcagggctaaggccggggatgagactgcaggagagagagcagcggagggccacattcggagcctccgtccactccagttttatcagcttttgccttttgcacggagtgctaaacaaattctagctctgtgtttttttcccattcccagatttactatcagttctccttaaaaagtatctaagctgttacagtagctttcccttcacttgattctattgtgtgttttctatgtttggaataattacacccaaatatctagatattttctcttcaccgcattttgtaaataaagagatgtgtatgcctccctg

SEQ ID NO: 711024 - DNA, 4486 bp, Homo sapiens
  misc_feature (379)..(379): n is a, c, g, or t
  misc_feature (396)..(396): n is a, c, g, or t
  misc_feature (399)..(399): n is a, c, g, or t
  misc_feature (415)..(415): n is a, c, g, or t
  misc_feature (426)..(426): n is a, c, g, or t
  misc_feature (441)..(442): n is a, c, g, or t
cgtgttctgcaggtggggctgcgttaggtgtggtgtgtttgtcgtgttgcttgtgtttcgatattgtgggtttggtgtgctgttgtgtgtgtggtgttgtgggaccgtagttcgcgtgtgtgccggcgcactggttgttattgtgtttcggggcaggtcctgtgggcggtccgacggtcttgtgccggtgtttgtcgtctggtcggtgtccgtcggtgttccgggcgtgtgatgtgggttacacggggccactgtcggcgtggaggtgtgtgatggtggtgtcagctagttgtgtaccttccgagacgcgtgttctcacgtccgcgccagagtcctcagggggccgttcgacctgcgtgggcgtcacaggagtgcgagnggccccagcttccaggncgnccgatggagcctcacncgtcaccttcnccatcacgctttcanncacgtggacttcgtctgcctggacggtgacagctgctgactggccgcatatgtgctggtgatccttccagtccttgcgttggcagaaggtggagcagtagttgaccttgtggcagccggtgcactcgctcatagcctcccggccgcagttaacgcaggactgctccttccgctctgcgtcagcgtggatcttggcctggtttgtggcagcttctcggtaggtgctggcatgcttggcttgctcaaacagcgtcttcagctgctgcgctgtgttgagcaaggagttgaccatctcttctaggtacagccagctccgcggctctgacagctccagcccattgaccaacgcgggaggtgccgctttggtgggagtcgggggtgggaccgccagcgcaggcagggatgtcaacactattttgggatgtgacgttggcaacgcagcttctggaaacggtgcgatctggcagctgtcctgatagccggggtagtgaggctcagggtggctggccctgcatgggggctgcacgctggcctcttggactgtggcccctgcgaagacgtcgccctgggccggactctctgatatgacagcagtggcctctaccgtggacgctcggtcaaaggtcagtgcccccgaggtcgtgatctgtcccgagggggtcacggtgaaggtggtagccgcggtggctggaagcaatgtgatgttcttgggggagtccttcttcacgggagttgtgggcagttcattctccttcttgcgccttttgtaaggcacaaaaagcctgactgggccacttaaggtcatgtcgtcgcagcaggcagcacaggtgcaagaggcagcgtgagggtttaagatcccatcctggatgaggcactgcaagggtcggcccgcgtagcgaatgcttcttttccagtccttactgctggctcttcctgccatggcctcaaactcggtgggactgtaccagttctccccctgcttgatgcaccgtccccggccgcctgagccgagcctgttcttgtacagagtgccgctgatgttccggcaccgtacgggcagctcactgtcgtacacagaagggtcccagttgtatttagttccacctttttcttggccgggagccagaggggttggaggagactgaggacctggggtgaggggagctgccgggcctttcagcccggtggtctccacgatgctcccatctgtgtggacgacaatcagtgtcgctttttcggtgttcaggctgtccccgatctgaagggccgtcctaccagacagaacatgtcctgagatggatgccgcgttcgccacagacgtggtgaagacattgtctgcagcagcccccacgttggccactgtcactgtggtcacctcttggggcaggtatgtggggcaggtgtcggggcaggtaggcagccgatcacgtggggcaggtggggaaggctgggaaacgtcgagcaggtgtgcgaggcaggtatttgtggcaggtgggggcaggctggtcaccatgggacagttgtgcggggcaggcgcgcggggtaggcgcgcgggaaccggacgaggcgagaggccggcgggcgcacttgcctgcgaaggctgcggcagcggcggcctcgtcggggccgggcagggcctcggcgcccatgtccatgtgcccgggctccgccgccatcaccgccactgccgtgacccgcggcgtctcccgctccgcctccgagtctgcgtcctcctccgagtcctcgtccctgctcagcaccggctcctccgcctcgcctcctgccgcggccgcggccgccgccgccacagcggccgcggccgccaccgccgccgcctcagccaggcccagctgctttgccgccgagtccgagtcctccatccggactccgccgagccttcccgaaggcgccgtccgggaccgcccgaagcgccggtcgcggagcccgaagcggggcccgaagaggacgcccgagctgggccgaggccgcccgaagccgccgcccgaatagggaccgaaaaggcagccagccgccgagcagagccgagccgagtccgcccgcggagcggagccgaggcgaacagaggctgcccgagtaggagccgaacctgcacgaagccgccgagccgagaccgagtcctgaaccgaggagggtcgaagttccccgaagtgggaagccgaatcagtccgaataggtccgagtcctcacgagggcttccgagagactcggcccctgctctcctcactgtcctgacaggctgaggcggctgtcgtccccggccgacagggctggacggctctaggcagattctcgccggcggccggcgcaattctgcctctcagagagagcttagtgccgcgggtttcgcccgttcccgccgccggcggaagccgagtcagcccgaggccgagccgagacgagccgaatgtccccgaggccgaatgctcccgaacgtcggttctccacctcttcccttccgaaagtgcccgagcggtgccggacggactaatcgggcctcggccgtggctcggacgtccgctcccgaaacgcggcgcggtcgggccccttcgtcaggagacgcgaaaatggccgaaggagcgcgagcgcgcgggccgagaggctgccgggatcgcgacggaccggcgggcggggcggggagaggatcctccacagtgctctcttcagttccccttcaaatgctgttttatctcagcggaacgtactacgccctgtatttcctcgccacgctcctgatgatcacgtataaaagtcaggtgttcagctatcctcaccgctacctggtcctcgatcttgctctgctgtttctgatggggattctagaagcagttcggttatacctgggcaccaggggcaacctgacagaggctgagaggccgctggccgccagcctggccctcacggctggcaccgccctcctctctgcccacttcctgctttggcaggccctagtgttgtgggcggactgggccctcagcgccacgctcctggcccttcacggcctggaggccgtcctgcaggtggttgccatcgcggccttcaccaggtagctacggacacccgggataccccacactggggccctcctcctgggcctgaccagtcccccagctgtcacctccccattcctggacaggaagggcacttttcctagtgactggccatagatggttttggatggttccatctgttctggcaggagtgggagcaggagccagggcagaacaaactgctggaggccctggtgttgggaacagctgcggggagggtagggaccagacagaactgccttcaagatgagtcccaggagcgcacactcagccctgtcagtggggtctggctttagcagccaggcctccacagacccccatgggcccccagggccgagagggaggacagagcccttcagaacagaggcctcatctcactgcatcccccatcaccccctagttccccaatggtcctaatttgtgttctgagatcccagtttactccgtggccaggccccacctgtgtttccaagtcgggctggagacgcaggatggggtaggccttgtgctctgagcaaccccagctctgcctcacaggcaggcaggcccggtgcaagagtggactctgggttcctaaagcaataaatgcaaacaagccaacagctctgctgcctagcaatttccatcttagccacacttctcccttcaggggcttcggaggagaggtcagggctaaggccggggatgagactgcaggagagagagcagcggagggccacattcggagcctccgtccactccagttttatcagcttttgccttttgcacggagtgctaaacaaattctagctctgtgtttttttcccattcccagatttactatcagttctccttaaaaagtatctaagctgttacagtagctttcccttcacttgattctattgtgtgttttctatgtttggaataattacacccaaatatctagatattttctcttcaccgcattttgtaaataaagagatgtgtatgcctccctg

SEQ ID NO: 711025 - DNA, 5054 bp, Homo sapiens
  misc_feature (379)..(379): n is a, c, g, or t
  misc_feature (396)..(396): n is a, c, g, or t
  misc_feature (399)..(399): n is a, c, g, or t
  misc_feature (415)..(415): n is a, c, g, or t
  misc_feature (426)..(426): n is a, c, g, or t
  misc_feature (441)..(442): n is a, c, g, or t
cgtgttctgcaggtggggctgcgttaggtgtggtgtgtttgtcgtgttgcttgtgtttcgatattgtgggtttggtgtgctgttgtgtgtgtggtgttgtgggaccgtagttcgcgtgtgtgccggcgcactggttgttattgtgtttcggggcaggtcctgtgggcggtccgacggtcttgtgccggtgtttgtcgtctggtcggtgtccgtcggtgttccgggcgtgtgatgtgggttacacggggccactgtcggcgtggaggtgtgtgatggtggtgtcagctagttgtgtaccttccgagacgcgtgttctcacgtccgcgccagagtcctcagggggccgttcgacctgcgtgggcgtcacaggagtgcgagnggccccagcttccaggncgnccgatggagcctcacncgtcaccttcnccatcacgctttcanncacgtggacttcgtctgcctggacggtgacagctgctgactggccgcatatgtgctggtgatccttccagtccttgcgttggcagaaggtggagcagtagttgaccttgtggcagccggtgcactcgctcatagcctcccggccgcagttaacgcaggactgctccttccgctctgcgtcagcgtggatcttggcctggtttgtggcagcttctcggtaggtgctggcatgcttggcttgctcaaacagcgtcttcagctgctgcgctgtgttgagcaaggagttgaccatctcttctaggtacagccagctccgcggctctgacagctccagcccattgaccaacgcgggaggtgccgctttggtgggagtcgggggtgggaccgccagcgcaggcagggatgtcaacactattttgggatgtgacgttggcaacgcagcttctggaaacggtgcgatctggcagctgtcctgatagccggggtagtgaggctcagggtggctggccctgcatgggggctgcacgctggcctcttggactgtggcccctgcgaagacgtcgccctgggccggactctctgatatgacagcagtggcctctaccgtggacgctcggtcaaaggtcagtgcccccgaggtcgtgatctgtcccgagggggtcacggtgaaggtggtagccgcggtggctggaagcaatgtgatgttcttgggggagtccttcttcacgggagttgtgggcagttcattctccttcttgcgccttttgtaaggcacaaaaagcctgactgggccacttaaggtcatgtcgtcgcagcaggcagcacaggtgcaagaggcagcgtgagggtttaagatcccatcctggatgaggcactgcaagggtcggcccgcgtagcgaatgcttcttttccagtccttactgctggctcttcctgccatggcctcaaactcggtgggactgtaccagttctccccctgcttgatgcaccgtccccggccgcctgagccgagcctgttcttgtacagagtgccgctgatgttccggcaccgtacgggcagctcactgtcgtacacagaagggtcccagttgtatttagttccacctttttcttggccgggagccagaggggttggaggagactgaggacctggggtgaggggagctgccgggcctttcagcccggtggtctccacgatgctcccatctgtgtggacgacaatcagtgtcgctttttcggtgttcaggctgtccccgatctgaagggccgtcctaccagacagaacatgtcctgagatggatgccgcgttcgccacagacgtggtgaagacattgtctgcagcagcccccacgttggccactgtcactgtggtcacctctgcgaaggctgcggcagcggcggcctcgtcggggccgggcagggcctcggcgcccatgtccatgtgcccgggctccgccgccatcaccgccactgccgtgacccgcggcgtctcccgctccgcctccgagtctgcgtcctcctccgagtcctcgtccctgctcagcaccggctcctccgcctcgcctcctgccgcggccgcggccgccgccgccacagcggccgcggccgccaccgccgccgcctcagccaggcccagctgctttgccgccgagtccgagtcctccatccggactccgccgagccttcccgaaggcgccgtccgggaccgcccgaagcgccggtcgcggagcccgaagcggggcccgaagaggacgcccgagctgggccgaggccgcccgaagccgccgcccgaatagggaccgaaaaggcagccagccgccgagcagagccgagccgagtccgcccgcggagcggagccgaggcgaacagaggctgcccgagtaggagccgaacctgcacgaagccgccgagccgagaccgagtcctgaaccgaggagggtcgaagttccccgaagtgggaagccgaatcagtccgaataggtccgagtcctcacgagggcttccgagagactcggcccctgctctcctcactgtcctgacaggctgaggcggctgtcgtccccggccgacagggctggacggctctaggcagattctcgccggcggccggcgcaattctgcctctcagagagagcttagtgccgcgggtttcgcccgttcccgccgccggcggaagccgagtcagcccgaggccgagccgagacgagccgaatgtccccgaggccgaatgctcccgaacgtcggttctccacctcttcccttccgaaagtgcccgagcggtgccggacggactaatcgggcctcggccgtggctcggacgtccgctcccgaaacgcggcgcggtcgggccccttcgtcaggagacgcgaaaatggccgaaggagcgcgagcgcgcgggccgagaggctgccgggatcgcgacggaccggcgggcggggcgggtaagatggcggccccgcggcgagggagaggatcctccacagtgctctcttcagttccccttcaaatgctgttttatctcagcggaacgtactacgccctgtatttcctcgccacgctcctgatgatcacgtataaaagtcaggtgttcagctatcctcaccgctacctggtcctcgatcttgctctgctgtttctgatggggattctagaagcagttcggttatacctgggcaccaggggcaacctgacagaggctgagaggccgctggccgccagcctggccctcacggctggcaccgccctcctctctgcccacttcctgctttggcaggccctagtgttgtgggcggactgggccctcagcgccacgctcctggcccttcacggcctggaggccgtcctgcaggtggttgccatcgcggccttcaccaggtagctacggacacccgggataccccacactggggccctcctcctgggcctgaccagtcccccagctgtcacctccccattcctggacaggaagggcacttttcctagtgactggccatagatggttttggatggttccatctgttctggcaggagtgggagcaggagccagggcagaacaaactgctggaggccctggtgttgggaacagctgcggggagggtagggaccagacagaactgccttcaagatgagtcccaggagcgcacactcagccctgtcagtggggtctggctttagcagccaggcctccacagacccccatgggcccccagggccgagagggaggacagagcccttcagaacagaggcctcatctcactgcatcccccatcaccccctagttccccaatggtcctaatttgtgttctgagatcccagtttactccgtggccaggccccacctgtgtttccaagtcgggctggagacgcaggatggggtaggccttgtgctctgagcaaccccagctctgcctcacaggcaggcaggcccggtgcaagagtggactctgggttcctaaagcaataaatgcaaacaagccaacagctctgctgcctagcaatttccatcttagccacacttctcccttcaggggcttcggaggagaggtcagggctaaggccggggatgagactgcaggagagagagcagcggagggccacattcggagcctccgtccactccagttttatcagcttttgccttttgcacggagtgctaaacaaattctagctctgtgtttttttcccattcccagatttactatcagttctccttaaaaagtatctaagctgttacagtagctttcccttcacttgattctattgtgtgttttctatgtttggaataattacacccaaatatctagatattttctcttcaccgcattttgtaaataaagagatgtgtatgcctccctgaaaaaaaaagaaaaaaaaaagaaagacaaaaacacaacgaacgaaacacagaaagacaccacgaagacaagacaagcaaccagcggcaaacacacgtaggggggggggagcggcgccgccgcagagcgaggggcgcagacagcgaaagaggggggggggcgacgcgaccgcagagagagaaccaaccgagcggaaacaccgtgagctaccaacgagacaacgcgcgggacagaagaagcggcggcaggggtcaccgcccagagcaagaaacacccccggcgggaataaaaagacagcggtgaaaaaacaaaaacaccagagagcgggaagatcgacggaggagacaagacagaggcgcacgaataaagaaaacaaagcgaagccagcacagagaagagagagacaaagacaacacaacacacgacaccccccaccacgcagggggtagaacaaacgaccaaacgacaacaacacgacagcacacacaagccggcaaaaggagaaaaaggcgagggaaggaagaagccgaacagcacaaccaggggagagcgcacacgcacacgggaaaagcacagaagacaaacagacaggcggacggaggacggacgcagggcgcagcgcgaggggcaggcaggcagcgacagggcagggaaagcacgagacagagagacagagaggacggtgggggggggacggagaagtagaaggaaggaaacgagaaagcaccacaggggagaagagagagagggacaggcggc

SEQ ID NO: 711026 - DNA, 338 bp, Homo sapiens
  misc_feature (16)..(16): n is a, c, g, or t
  misc_feature (25)..(25): n is a, c, g, or t
  misc_feature (40)..(40): n is a, c, g, or t
  misc_feature (87)..(87): n is a, c, g, or t
  misc_feature (96)..(96): n is a, c, g, or t
  misc_feature (104)..(104): n is a, c, g, or t
  misc_feature (226)..(226): n is a, c, g, or t
tggcccactgcaagcnccgcctccnaggttcacgctattntcccgcctcgggagctgggacaacaggtgcccgccaccacgctcggntaatttttngtattttnagtacagacggagtttcaccgtgttagccaggatggtctcgatctcctgacctcgtgatgcacctgctttgacctcccaaagtgctgggattacaggcgtgagcacttgcgcccggccaatnaattttttaagtttaagttcatttttgtccccgctggatgaaagttagagctgctttcctcccaggcagccctgggagtaggggcacagacttgtgcctcggtttcccaagc

SEQ ID NO: 711027 - DNA, 253 bp, Homo sapiens
tttgccgttctgggatattggcccctttcccttcatgagttaggatttttggggtttcccccccccagtttgttgcggtttgctccggtattttatttgcccctttttttttgaaattcttatttttctcctgtggtttcctgttaccctggtcctgtctgccgggtggatttttttgtgtttgtttttttttatcttttatggtgttttccctaccttccaggggttgttttattaagtgggaaaaaattta

SEQ ID NO: 711028 - DNA, 1244 bp, Homo sapiens
ggcagatgcccatgctcatgctggaccacctgaagaactgtgctcccagcaagctgagagattgcccagctcaatgaaccagctggatggagtcacgatgttcacctgtgctgtgcagcctgtgaaatgcacggaaatgcaattggatgtgtggatgatctgaatgacctgcaccttgcagactctgatgactatctgccaacatgccaagtgacatgctgctgcgatggaggcacgccttgatgcctgcacttcatgctgtgactgacacgaacttgatgactccacgaaccctgtgcttgtgcacggacatgatcacgtgaacgacacttgaagctgaaactctgacttgaacgaatgcacaatggcttgcctcgtgtgctcatgtgcttccccggcgaccttggctcaagactaaaattgactctccaatgctcatgcctacgaagcaacgccacaccacatgacgacagcaatggacgcctggcaagtgatgcacagcctacaccaatgcccctacccaaggatgcccatgcgtgccgacgtttcccgttgtgcatgcaatcgtcccattgtgttggaccacatgctccccttgggttgagccacgtgccacgaggaatggcatacaccgcatacctgggggcacgcctgtcgacgaaccaaccgccactgggcaagctcttctgcaccccgtggacccccaccaggttgaacacatctggccttgtcgccgtccaggccctttgggccttaagacctcgtccgtccacctgggccaccatccacttgcgaagacacgtcctgtcaccctgacgggagtgccgcgcgaatcctaccaggccacattggccccgcccttagcaaaccccgcgcgcagcaaacggggaacccacgaacaccaactgccgggcctaccaggcacgcgccacggactcccggctcaccccgcccaacgtgaagggacgacccgcccacgcgcccccgccccacggccaacgccacccgaccctcaacgcccgaacccccgccagaaaaacacacccacacccggcccgcactggacgccccagcacagcccccggcaggactccacaacccagacgccctgcccgcctggacccaaccacgccggcaaccacacgccccaacaccgagcaccacagcaaggcaccaccccccaccccacacaccaaggaagccaccaccccccacccgaccaccccccccacacacaccacacc

SEQ ID NO: 711029 - DNA, 140 bp, Homo sapiens
aacctacaccacagctcacagcaacactggatcttaacccactgagcaaggccaggatcgaacccaaaacctcatggttcctagtcggatttgttaaccagagccacgacgggaactccgttcacttaatgccgctagcg

SEQ ID NO: 711030 - DNA, 940 bp, Homo sapiens
gattagtcagcagatgatataccatcctgcgcatctcgttgaaagcacactcggttgcatcaagttgatggtgggttccgagactgtttctctttccggctgaggacgcgcagaatgtaatctttgcgatgagctagctggtgatcatgacgggaggtgtggcgcaatcttactttggcccagagaactggcgaattacatggagatagaaccagtgatcatgcttacctgaagtcctacagcaacgttctgagtactgctccagtcgatgctttgaaagatgcgtaagtcttttctctcttttaattcactgggtactatactctgcacgcaggtcttctaagcctagggtcgtacgtgtcactgacttcacgtcgtgaccaggagcgggattgaatcacacccctatcggttttcgatttagtaaaaagttttgcacccatgactcaaatgccttaccattgttgcctggttggcggacccggttcacctaacaagccattcctcttcctttgaactcggacactcttgactaaatattacgggcccaggactgcgtatgaaatgactggggacaaaaagcttgttgcgagtgggcccatggatcgaacatcagggaaatcattcagcgccatcctgttgtaaaaaaactctcagccagggaatggtacaagcccgcgtcgggaataattatgccactcaagtagcacaagaatacccgagggcactctacccgtgatcgtacggacgcacgccacacggactggtacaacatacgcgtggacctaggtgtaaaccttgagaaggtgggggccccagcgagggagaccacggcacaacaagaacgagcgcgccacagcaaactacctggagccgaagatcaggacagcaaggagaagaaaacacacacgtgaaggggaaacaaaattagccgcgcaca

SEQ ID NO: 711031 - DNA, 166 bp, Homo sapiens
gtgccctgtgctattcagtcacgcgtggctggtcgtcgatcagcggaccggtcgatagctctgcacctgctgcttggtcatccctactttgacattgttgaccatcggctcattgacttgctgggtgcgcgatcataggtggtgcaaccggcaagaatggaatata

SEQ ID NO: 711032 - DNA, 432 bp, Homo sapiens
tactcgatcatacgtgcacggtcacgctgctccggcggcacttgtcccgcaggatcgcgataaacaccaggttgtcgatacccagcaccagttccagcacaatcaaggtcgcaaggccgagccaggccgtaggatccgctaaccattccatttataaattctctgtctttaaagtgtttagaacgccgggcacggcaaagtgcggtcatgcgaccgggacaaggttagttgacggaatacggggtgcttcagcgggaacagcgacagcggttgtcttggggaaagacgactgggaggctccgagagggtgttcatgcaagtcctgaaatgacaaaaggacttgaatcctacattcgaaatacaaatttcccacaacgcaaaactattacaaaacctgtaaaccccccatcagaagcacagcaactcttgtgg

SEQ ID NO: 711033 - DNA, 698 bp, Homo sapiens
  misc_feature (390)..(390): n is a, c, g, or t
agttgcagcagaggagactgcatgacttcggttgaggaaacgggtatgtcatgtctcagggagtaggtttgtgcagttacagcgttttctgtgggtattgcaataattaatcacatctggacgctgcaaatcagatcgtcgaccacagagatcggcacggtccacgaagaaaacattggcaatgggaccaccaggtctgctctgaccatccttgatactggagcaggacattacagacacgactggcaacggtgggtgtctaggtgcccagcactattccatgcatgctttcatctcgacgatgtgatgttcagacattgtgtgagcgtcaacagcgctacgatttgcccttggcccgtagcgtctcctggtgacgcatcgagcatttanggattataccaaggcgtgtgatcgcaaagctatcccagcaagatgagatcgaaggcctagcctattcgagggccatatctggaatctgaacgttgcttatatctgaggagttgggttcagaagtacagttagttctgctcttggtccactgtgaacttgcgacgatatagaggcaagctcaggcgcctcttcgtgtagttgatgatcttaggttgattctctgaagttgtgcaggcgttgatgtgggtatgtcacctatgtcggggccttgtttagtggtctgacattactgattttgggctctcgat

SEQ ID NO: 711034 - DNA, 339 bp, Homo sapiens
ccccttttttctttttaaaaggccaggttttggccggccgggagggaaaattgggccccgcttacggtttccccaaagaaccatggccgaaatggggtttggtatataaaattttagggcccaccatatggttttctggttttacggaggggccccctggacttaaaaccaaattggcccccccttagggggtttcccaaaccgaaggggttgaaaaatttcccttttaactctttttgaaaaagggttttaaatttttttaggtttggttttgttcccccttttgggtggggttttttggttttgttttccgggggatttataaatttggccgctgga

SEQ ID NO: 711035 - DNA, 1802 bp, Homo sapiens
  misc_feature (75)..(75): n is a, c, g, or t
cgcgggttcagacctgccgagcgcccgccgccgcgggaggggcttgaggccggggcggggcggggccggggcggngcgtcccctcgtaggctccgggccgcgcattctcagcgctgggagccgccgcccccgcagctgctgccgccgccgccagggcccggactcggacgcgtggtatagcctagagtcctggggagcttctgtccacctgtcctgcagaggagtcgtttccagcccggctggtgagtgctggccaggtggggcagagcaggcggggcggcgaaagtccagacctggctgtgctgtctggaaacgtggcccaggcgctcagctgctgtctgcaccccacgccctccctggcttccccatgctcacagcttgcccactgctgcagccccaggatgggtgagttcaacgagaagaagacaacatgtggcaccgtttgcctcaagtacctgctgtttacctacaattgctgcttctggctggctggcctggctgtcatggcagtgggcatctggacgctggccctcaagagtgactacatcagcctgctggcctcaggcacctacctggccacagcctacatcctggtggtggcgggcactgtcgtcatggtgactggggtcttgggctgctgcgccaccttcaaggagcgtcggaacctgctgcgcctgtacttcatcctgctcctcatcatctttctgctggagatcatcgctggtatcctcgcctacgcctactaccagcagctgaacacggagctcaaggagaacctgaaggacaccatgaccaagcgctaccaccagccgggccatgaggctgtgaccagcgctgtggaccagctgcagcaggagttccactgctgtggcagcaacaactcacaggactggcgagacagtgagtggatccgctcacaggaggccggtggccgtgtggtcccagacagctgctgcaagacggtggtggctctttgtggacagcgagaccatgcctccaacatctacaaggtggagggcggctgcatcaccaagttggagaccttcatccaggagcacctgagggtcattggggctgtggggatcggcattgcctgtgtgcaggtctttggcatgatcttcacgtgctgcctgtacaggagtctcaagctggagcactactgaccctgccttgggccttgctgctgctgcacccaactactgagctgagaccactgagtaccaggggctgggctccctgatgacacccaccctgtgccatcaccataacctctggggaccccaacctcagaggcagcttcaagtgccttttgctgcgcaccaatgcccagcaggggaggtgaggggggctggcggggcgaagtttggggggtgttttgtggggctccccggacatactctctgcctggtggtcagatgcaggttggaaggggccttgctgagtggcgcaaggccgagcgttcccagcagggggagaaacccttcacaccccaggcccttcaggaactggggctttgccttgcagccacatggccccatcccagttggggaagccaggtgagctctgacccttgggcctgggcctctgcccctcccaacccagccgtcgtctccctcgacagcgcccctgctgtcttccccaccgcagtcaccaccacccgaaatgccacgtggtcactgtgcactgccctgttcatgtgcctctgcggggcagggccttcctggttttgtacactgctgtacccagatgcctacaaccatccctgccacatacaggtgctcaataaacacttgtagagcaga

SEQ ID NO: 711036 - DNA, 1766 bp, Homo sapiens
  misc_feature (75)..(75): n is a, c, g, or t
cgcgggttcagacctgccgagcgcccgccgccgcgggaggggcttgaggccggggcggggcggggccggggcggngcgtcccctcgtaggctccgggccgcgcattctcagcgctgggagccgccgcccccgcagctgccgccgccgccagggcccggactcggacgcgtggtagcctagagtcctggggagcttctgtccacctgtcctgcagaggagtcgtttccagcccggctggcccataggctcctgccagcctgtgacgtgcggccccgggaatgctgtggggagcgggcaggctggcatgagctcaccggaggtacccgctagggcttcctcccccggccgccagcaggggccccaggatgggtgagttcaacgagaagaagacaacatgtggcaccgtttgcctcaagtacctgctgtttacctacaattgctgcttctggctggctggcctggctgtcatggcagtgggcatctggacgctggccctcaagagtgactacatcagcctgctggcctcaggcacctacctggccacagcctacatcctggtggtggcgggcactgtcgtcatggtgactggggtcttgggctgctgcgccaccttcaaggagcgtcggaacctgctgcgcctgtacttcatcctgctcctcatcatctttctgctggagatcatcgctggtatcctcgcctacgcctactaccagcagctgaacacggagctcaaggagaacctgaaggacaccatgaccaagcgctaccaccagccgggccatgaggctgtgaccagcgctgtggaccagctgcagcaggagttccactgctgtggcagcaacaactcacaggactggcgagacagtgagtggatccgctcacaggaggccggtggccgtgtggtcccagacagctgctgcaagacggtggtggctctttgtggacagcgagaccatgcctccaacatctacaaggtggagggcggctgcatcaccaagttggagaccttcatccaggagcacctgagggtcattggggctgtggggatcggcattgcctgtgtgcaggtctttggcatgatcttcacgtgctgcctgtacaggagtctcaagctggagcactactgaccctgccttgggccttgctgctgctgcacccaactactgagctgagaccactgagtaccaggggctgggctccctgatgacacccaccctgtgccatcaccataacctctggggaccccaacctcagaggcagcttcaagtgccttttgctgcgcaccaatgcccagcaggggaggtgaggggggctggcggggcgaagtttggggggtgttttgtggggctccccggacatactctctgcctggtggtcagatgcaggttggaaggggccttgctgagtggcgcaaggccgagcgttcccagcagggggagaaacccttcacaccccaggcccttcaggaactggggctttgccttgcagccacatggccccatcccagttggggaagccaggtgagctctgacccttgggcctgggcctctgcccctcccaacccagccgtcgtctccctcgacagcgcccctgctgtcttccccaccgcagtcaccaccacccgaaatgccacgtggtcactgtgcactgccctgttcatgtgcctctgcggggcagggccttcctggttttgtacactgctgtacccagatgcctacaaccatccctgccacatacaggtgctcaataaacacttgtagagcaga

SEQ ID NO: 711037 - DNA, 452 bp, Homo sapiens
  misc_feature (19)..(19): n is a, c, g, or t
  misc_feature (22)..(22): n is a, c, g, or t
ccgggtgctgtgtcacccntcnaccctacagcgacggaatgcccagctgttcatcaccgtcaatttgccgcagatggggtcggacatggtcagttgttttgtgtttgagggcggatgaaagcattgcatcggttctgcggcgcgttgctatgtccgatagtccgtccgggtcaccgataaactcgcgctttgtattggcagcgaaggcccccacagcggcgtatataccgttaccacctctgcctggctcaacccaacttacatcaatccaaaccttttttggcttcaccatcacggagaagtagtttccattcatcccttccgtacgaaaggtataaacctccgtatcggaatagattttctcaacctcaaagccgataaatttggtgccgaggctcacttccggcattaactcagtcaggtatttggtgctactggtctggtagagaaac

SEQ ID NO: 711038 - DNA, 1970 bp, Homo sapiens
  misc_feature (75)..(75): n is a, c, g, or t
cgcgggttcagacctgccgagcgcccgccgccgcgggaggggcttgaggccggggcggggcggggccggggcggngcgtcccctcgtaggctccgggccgcgcattctcagcgctgggagccgccgcccccgcagctgccgccgccgccagggcccggactcggacgcgtggtagcctagagtcctggggagcttctgtccacctgtcctgcagaggagtcgtttccagcccggctgccccaggatgggtgagttcaacgagaagaagacaacatgtggcaccgtttgcctcaagtacctgctgtttacctacaattgctgcttctggctggctggcctggctgtcatggcagtgggcatctggacgctggccctcaagagtgactacatcagcctgctggcctcaggcacctacctggccacagcctacatcctggtggtggcgggcactgtcgtcatggtgactggggtcttgggctgctgcgccaccttcaaggagcgtcggaacctgctgcgcctggtcaggagggcgcagggccacggggtgggggtggtgcagatgggcccaaggaggttgtcgctgcaggctttgaacctgtgccttgctgtgctcacctgggggggggtcacggtccttccacacctgcctagtcctgtgggtccccacgttcctgctggaccagctgagggaagacaccagctccgcaagaaagcttcagggagggtggccgcccctcagcccccacctggagcctggggagccggggtggggactctgctctgaggtgcactaggtctaggcactaggcctcagaacaagggtgcccttgtgctgccccccccagtacttcatcctgctcctcatcatctttctgctggagatcatcgctggtatcctcgcctacgcctactaccagcagctgaacacggagctcaaggagaacctgaaggacaccatgaccaagcgctaccaccagccgggccatgaggctgtgaccagcgctgtggaccagctgcagcaggagttccactgctgtggcagcaacaactcacaggactggcgagacagtgagtggatccgctcacaggaggccggtggccgtgtggtcccagacagctgctgcaagacggtggtggctctttgtggacagcgagaccatgcctccaacatctacaaggtggagggcggctgcatcaccaagttggagaccttcatccaggagcacctgagggtcattggggctgtggggatcggcattgcctgtgtgcaggtctttggcatgatcttcacgtgctgcctgtacaggagtctcaagctggagcactactgaccctgccttgggccttgctgctgctgcacccaactactgagctgagaccactgagtaccaggggctgggctccctgatgacacccaccctgtgccatcaccataacctctggggaccccaacctcagaggcagcttcaagtgccttttgctgcgcaccaatgcccagcaggggaggtgaggggggctggcggggcgaagtttggggggtgttttgtggggctccccggacatactctctgcctggtggtcagatgcaggttggaaggggccttgctgagtggcgcaaggccgagcgttcccagcagggggagaaacccttcacaccccaggcccttcaggaactggggctttgccttgcagccacatggccccatcccagttggggaagccaggtgagctctgacccttgggcctgggcctctgcccctcccaacccagccgtcgtctccctcgacagcgcccctgctgtcttccccaccgcagtcaccaccacccgaaatgccacgtggtcactgtgcactgccctgttcatgtgcctctgcggggcagggccttcctggttttgtacactgctgtacccagatgcctacaaccatccctgccacatacaggtgctcaataaacacttgtagagcaga

SEQ ID NO: 711039 - DNA, 443 bp, Homo sapiens
tccctagttaatcgaccgtgatggccatctgtctatcgaccgtggacgttgcctgcacatcggtctctggactagttgatcaagccgttttgtgtttgagggcggatgaaagcattgcatcggttctgcggcgcgttgctatgtccgatagtccgtccgggtcaccgataaactcgcgctttgtattggcagcgaaggcccccacagcggcgtatataccgttaccacctctgcctggctcaacccaacttacatcaatccaaaccttttttggcttcaccatcacggagaagtagtttccattcatcccttccgtacgaaaggtataaacctccgtatcggaatagattttctcaacctcaaagccgataaatttggtgccgaggctcacttccggcattaactcagtcaggtatttggtgctactggtctggtagagaaac

SEQ ID NO: 711040 - DNA, 1911 bp, Homo sapiens
  misc_feature (75)..(75): n is a, c, g, or t
cgcgggttcagacctgccgagcgcccgccgccgcgggaggggcttgaggccggggcggggcggggccggggcggngcgtcccctcgtaggctccgggccgcgcattctcagcgctgggagccgccgcccccgcagctgctgccgccgccgccagggcccggactcggacgcgtggtagccccaggatgggtgagttcaacgagaagaagacaacatgtggcaccgtttgcctcaagtacctgctgtttacctacaattgctgcttctggctggctggcctggctgtcatggcagtgggcatctggacgctggccctcaagagtgactacatcagcctgctggcctcaggcacctacctggccacagcctacatcctggtggtggcgggcactgtcgtcatggtgactggggtcttgggctgctgcgccaccttcaaggagcgtcggaacctgctgcgcctggtcaggagggcgcagggccacggggtgggggtggtgcagatgggcccaaggaggttgtcgctgcaggctttgaacctgtgccttgctgtgctcacctgggggggggtcacggtccttccacacctgcctagtcctgtgggtccccacgttcctgctggaccagctgagggaagacaccagctccgcaagaaagcttcagggagggtggccgcccctcagcccccacctggagcctggggagccggggtggggactctgctctgaggtgcactaggtctaggcactaggcctcagaacaagggtgcccttgtgctgccccccccagtacttcatcctgctcctcatcatctttctgctggagatcatcgctggtatcctcgcctacgcctactaccagcagctgaacacggagctcaaggagaacctgaaggacaccatgaccaagcgctaccaccagccgggccatgaggctgtgaccagcgctgtggaccagctgcagcaggagttccactgctgtggcagcaacaactcacaggactggcgagacagtgagtggatccgctcacaggaggccggtggccgtgtggtcccagacagctgctgcaagacggtggtggctctttgtggacagcgagaccatgcctccaacatctacaaggtggagggcggctgcatcaccaagttggagaccttcatccaggagcacctgagggtcattggggctgtggggatcggcattgcctgtgtgcaggtctttggcatgatcttcacgtgctgcctgtacaggagtctcaagctggagcactactgaccctgccttgggccttgctgctgctgcacccaactactgagctgagaccactgagtaccaggggctgggctccctgatgacacccaccctgtgccatcaccataacctctggggaccccaacctcagaggcagcttcaagtgccttttgctgcgcaccaatgcccagcaggggaggtgaggggggctggcggggcgaagtttggggggtgttttgtggggctccccggacatactctctgcctggtggtcagatgcaggttggaaggggccttgctgagtggcgcaaggccgagcgttcccagcagggggagaaacccttcacaccccaggcccttcaggaactggggctttgccttgcagccacatggccccatcccagttggggaagccaggtgagctctgacccttgggcctgggcctctgcccctcccaacccagccgtcgtctccctcgacagcgcccctgctgtcttccccaccgcagtcaccaccacccgaaatgccacgtggtcactgtgcactgccctgttcatgtgcctctgcggggcagggccttcctggttttgtacactgctgtacccagatgcctacaaccatccctgccacatacaggtgctcaataaacacttgtagagcaga

SEQ ID NO: 711041 - DNA, 423 bp, Homo sapiens
ctgtcctatcatagattctatcagtgtaggtgtatcctctatagtctagctagatggcctgcaatcttgtctcttgaccggccgtttaacaacttccttcactttcagcagcccgttgctatgtccgatagtccgtccgggtcaccgataaactcgcgctttgtattggcagcgaaggcccccacagcggcgtatataccgttaccacctctgcctggctcaacccaacttacatcaatccaaaccttttttggcttcaccatcacggagaagtagtttccattcatcccttccgtacgaaaggtataaacctccgtatcggaatagattttctcaacctcaaagccgataaatttggtgccgaggctcacttccggcattaactcagtcaggtatttggtgctactggtctggtagagaaac

SEQ ID NO: 711042 - DNA, 1022 bp, Homo sapiens
ataaccatgcacactacctataaccaacctaagcctgatttgcctaattccccccatccttatcaacctcggtaatcctaataaaaaaaactcatacccccattatgtcaaatccattgtcgaatcccgaccggttcatttatcgagtctcgttcccacactaactagatattgcatgtgccgtagacgcaaggaaagttgaatgtactactctgcaaactgaccaccgttgatgccatctaatccaagagcgaatgctcagctcgtcgccttaaggcgtatacaaagctaggacctacattcgtccaataagttattcatgccctgataagcagttgtgtcggttgacgatgggtccagtcatagaagtgctcacgtgtgagtatgataaccgtacagaccgcaaaggattgaatcaggtggcgttcaacatgtatctaactcaatactattcgctaaatgtaccagtacgtaagtcttagctataacgcggttaaacaaacgctatttccaagcgtgctagcaattcggtctgaggaggggcgtagagaaattagtatcgcttctttgtctcactcagcttgactggatagctgcccgagtagaatgccagacagcagtcagatcatatcaaggcaaatccgtagtacacatccggtgtcggtggatactcggttgttcattcgcatcgactcgttagcattgtagtttatcctaacactcgcgagagtcaatgagatcccagaacaaaatagccttgtaaaaacagctaagtccaagcctgcaaccgacgagctaataaggcctcctccgtatggagggagcaaggcaatatcaagaccaattatgtgctccagcccttgaatcccctcagggcattaaaatggcgcatacccaggtatccaggcctactcccatacagggcctaatagttggtggcagggatcttttttaatcaatcgggtcaccccctatggagaaaataggcaatatccagaatctaagagcaggttagggtaacc

SEQ ID NO: 711043 - DNA, 1461 bp, Homo sapiens
  misc_feature (75)..(75): n is a, c, g, or t
cgcgggttcagacctgccgagcgcccgccgccgcgggaggggcttgaggccggggcggggcggggccggggcggngcgtcccctcgtaggctccgggccgcgcattctcagcgctgggagccgccgcccccgcagctgccgccgccgccagggcccggactcggacgcgtggtagcctagagtcctggggagcttctgtccacctgtcctgcagaggagtcgtttccagcccggctgccccaggatgggtgagttcaacgagaagaagacaacatgtggcaccgtttgcctcaagtacctgctgtttacctacaattgctgcttctggctggctggtacttcatcctgctcctcatcatctttctgctggagatcatcgctggtatcctcgcctacgcctactaccagcagctgaacacggagctcaaggagaacctgaaggacaccatgaccaagcgctaccaccagccgggccatgaggctgtgaccagcgctgtggaccagctgcagcaggagttccactgctgtggcagcaacaactcacaggactggcgagacagtgagtggatccgctcacaggaggccggtggccgtgtggtcccagacagctgctgcaagacggtggtggctctttgtggacagcgagaccatgcctccaacatctacaaggtggagggcggctgcatcaccaagttggagaccttcatccaggagcacctgagggtcattggggctgtggggatcggcattgcctgtgtgcaggtctttggcatgatcttcacgtgctgcctgtacaggagtctcaagctggagcactactgaccctgccttgggccttgctgctgctgcacccaactactgagctgagaccactgagtaccaggggctgggctccctgatgacacccaccctgtgccatcaccataacctctggggaccccaacctcagaggcagcttcaagtgccttttgctgcgcaccaatgcccagcaggggaggtgaggggggctggcggggcgaagtttggggggtgttttgtggggctccccggacatactctctgcctggtggtcagatgcaggttggaaggggccttgctgagtggcgcaaggccgagcgttcccagcagggggagaaacccttcacaccccaggcccttcaggaactggggctttgccttgcagccacatggccccatcccagttggggaagccaggtgagctctgacccttgggcctgggcctctgcccctcccaacccagccgtcgtctccctcgacagcgcccctgctgtcttccccaccgcagtcaccaccacccgaaatgccacgtggtcactgtgcactgccctgttcatgtgcctctgcggggcagggccttcctggttttgtacactgctgtacccagatgcctacaaccatccctgccacatacaggtgctcaataaacacttgtagagcaga

SEQ ID NO: 711044 - DNA, 2366 bp, Homo sapiens
  misc_feature (75)..(75): n is a, c, g, or t
  misc_feature (1262)..(1262): n is a, c, g, or t
cgcgggttcagacctgccgagcgcccgccgccgcgggaggggcttgaggccggggcggggcggggccggggcggngcgtcccctcgtaggctccgggccgcgcattctcagcgctgggagccgccgcccccgcagctgccgccgccgccagggcccggactcggacgcgtggtagcctagagtcctggggagcttctgtccacctgtcctgcagaggagtcgtttccagcccggctgccccaggatgggtgagttcaacgagaagaagacaacatgtggcaccgtttgcctcaagtacctgctgtttacctacaattgctgcttctggctggctggcctggctgtcatggcagtgggcatctggacgctggccctcaagagtgactacatcagcctgctggcctcaggcacctacctggccacagcctacatcctggtggtggcgggcactgtcgtcatggtgactggggtcttgggctgctgcgccaccttcaaggagcgtcggaacctgctgcgcctggtcaggagggcgcagggccacggggtgggggtggtgcagatgggcccaaggaggttgtcgctgcaggctttgaacctgtgccttgctgtgctcacctgggggggggtcacggtccttccacacctgcctagtcctgtgggtccccacgttcctgctggaccagctgagggaagacaccagctccgcaagaaagcttcagggagggtggccgcccctcagcccccacctggagcctggggagccggggtggggactctgctctgaggtgcactaggtctaggcactaggcctcagaacaagggtgcccttgtgctgccccccccagtacttcatcctgctcctcatcatctttctgctggagatcatcgctggtatcctcgcctacgcctactaccagcaggtgaggggcctgggcaggccattcagagacacagacatgcacaggcggggcggacacacacacatgcacacgcgtggtagccccaaccccaccccatggtcccagagctaaccaatgtgccactcggcctggagatggggtctaggtctctgcaggggcacatggggtcaggcaggtgtccagggatccagaagctctctctgcctctgccgcacttcattgtcaccctggtgacggtcctggcaccacccaactcccctcatgccgaggtctgacctcagcccttccctgtggctctgagctgggccccgggcctccccaccggcatcctggggctctgcnagcccaccttggaaggtcttagactgaggctgaagtttcctgcaccccaacccactgaacacggagctcaaggagaacctgaaggacaccatgaccaagcgctaccaccagccgggccatgaggctgtgaccagcgctgtggaccagctgcagcaggagttccactgctgtggcagcaacaactcacaggactggcgagacagtgagtggatccgctcacaggaggccggtggccgtgtggtcccagacagctgctgcaagacggtggtggctctttgtggacagcgagaccatgcctccaacatctacaaggtggagggcggctgcatcaccaagttggagaccttcatccaggagcacctgagggtcattggggctgtggggatcggcattgcctgtgtgcaggtctttggcatgatcttcacgtgctgcctgtacaggagtctcaagctggagcactactgaccctgccttgggccttgctgctgctgcacccaactactgagctgagaccactgagtaccaggggctgggctccctgatgacacccaccctgtgccatcaccataacctctggggaccccaacctcagaggcagcttcaagtgccttttgctgcgcaccaatgcccagcaggggaggtgaggggggctggcggggcgaagtttggggggtgttttgtggggctccccggacatactctctgcctggtggtcagatgcaggttggaaggggccttgctgagtggcgcaaggccgagcgttcccagcagggggagaaacccttcacaccccaggcccttcaggaactggggctttgccttgcagccacatggccccatcccagttggggaagccaggtgagctctgacccttgggcctgggcctctgcccctcccaacccagccgtcgtctccctcgacagcgcccctgctgtcttccccaccgcagtcaccaccacccgaaatgccacgtggtcactgtgcactgccctgttcatgtgcctctgcggggcagggccttcctggttttgtacactgctgtacccagatgcctacaaccatccctgccacatacaggtgctcaataaacacttgtagagcaga

SEQ ID NO: 711045 - DNA, 190 bp, Homo sapiens
tatacgacttgagctttaccgtacgtgtagacggcctgtgaccccttgtgctcttgtgctcttgtgcccttgccgcgttggccctctggcaagagtggtgatcgtggtgagactggtcctgctggtcccgccggtactgtcgtgcctgttggctgcccgtggccccgccggaccccaatggcccccgtgt

SEQ ID NO: 711046 - DNA, 243 bp, Homo sapiens
caagtggcaaagagcagatcttgcttgcagaaggataacagagtcggcgtcgctagacatgagtgtgcgggctctgttgcggaacgatgaggcgtacgacaagcgaaccttggaagcgaacccgtgtgcccatgtgcagaaagagatcaccgcgctggcacccagcaccatgaagatcaagatcatcgccccgcggaacggcaatatactcgggtgttggatcgagcggctccatccgtggcc

SEQ ID NO: 711047 - DNA, 2307 bp, Homo sapiens
  misc_feature (75)..(75): n is a, c, g, or t
  misc_feature (1203)..(1203): n is a, c, g, or t
cgcgggttcagacctgccgagcgcccgccgccgcgggaggggcttgaggccggggcggggcggggccggggcggngcgtcccctcgtaggctccgggccgcgcattctcagcgctgggagccgccgcccccgcagctgctgccgccgccgccagggcccggactcggacgcgtggtagccccaggatgggtgagttcaacgagaagaagacaacatgtggcaccgtttgcctcaagtacctgctgtttacctacaattgctgcttctggctggctggcctggctgtcatggcagtgggcatctggacgctggccctcaagagtgactacatcagcctgctggcctcaggcacctacctggccacagcctacatcctggtggtggcgggcactgtcgtcatggtgactggggtcttgggctgctgcgccaccttcaaggagcgtcggaacctgctgcgcctggtcaggagggcgcagggccacggggtgggggtggtgcagatgggcccaaggaggttgtcgctgcaggctttgaacctgtgccttgctgtgctcacctgggggggggtcacggtccttccacacctgcctagtcctgtgggtccccacgttcctgctggaccagctgagggaagacaccagctccgcaagaaagcttcagggagggtggccgcccctcagcccccacctggagcctggggagccggggtggggactctgctctgaggtgcactaggtctaggcactaggcctcagaacaagggtgcccttgtgctgccccccccagtacttcatcctgctcctcatcatctttctgctggagatcatcgctggtatcctcgcctacgcctactaccagcaggtgaggggcctgggcaggccattcagagacacagacatgcacaggcggggcggacacacacacatgcacacgcgtggtagccccaaccccaccccatggtcccagagctaaccaatgtgccactcggcctggagatggggtctaggtctctgcaggggcacatggggtcaggcaggtgtccagggatccagaagctctctctgcctctgccgcacttcattgtcaccctggtgacggtcctggcaccacccaactcccctcatgccgaggtctgacctcagcccttccctgtggctctgagctgggccccgggcctccccaccggcatcctggggctctgcnagcccaccttggaaggtcttagactgaggctgaagtttcctgcaccccaacccactgaacacggagctcaaggagaacctgaaggacaccatgaccaagcgctaccaccagccgggccatgaggctgtgaccagcgctgtggaccagctgcagcaggagttccactgctgtggcagcaacaactcacaggactggcgagacagtgagtggatccgctcacaggaggccggtggccgtgtggtcccagacagctgctgcaagacggtggtggctctttgtggacagcgagaccatgcctccaacatctacaaggtggagggcggctgcatcaccaagttggagaccttcatccaggagcacctgagggtcattggggctgtggggatcggcattgcctgtgtgcaggtctttggcatgatcttcacgtgctgcctgtacaggagtctcaagctggagcactactgaccctgccttgggccttgctgctgctgcacccaactactgagctgagaccactgagtaccaggggctgggctccctgatgacacccaccctgtgccatcaccataacctctggggaccccaacctcagaggcagcttcaagtgccttttgctgcgcaccaatgcccagcaggggaggtgaggggggctggcggggcgaagtttggggggtgttttgtggggctccccggacatactctctgcctggtggtcagatgcaggttggaaggggccttgctgagtggcgcaaggccgagcgttcccagcagggggagaaacccttcacaccccaggcccttcaggaactggggctttgccttgcagccacatggccccatcccagttggggaagccaggtgagctctgacccttgggcctgggcctctgcccctcccaacccagccgtcgtctccctcgacagcgcccctgctgtcttccccaccgcagtcaccaccacccgaaatgccacgtggtcactgtgcactgccctgttcatgtgcctctgcggggcagggccttcctggttttgtacactgctgtacccagatgcctacaaccatccctgccacatacaggtgctcaataaacacttgtagagcaga

SEQ ID NO: 711048 - DNA, 2471 bp, Homo sapiens
  misc_feature (75)..(75): n is a, c, g, or t
  misc_feature (1627)..(1627): n is a, c, g, or t
cgcgggttcagacctgccgagcgcccgccgccgcgggaggggcttgaggccggggcggggcggggccggggcggngcgtcccctcgtaggctccgggccgcgcattctcagcgctgggagccgccgcccccgcagctgccgccgccgccagggcccggactcggacgcgtggtagcctagagtcctggggagcttctgtccacctgtcctgcagaggagtcgtttccagcccggctgccccaggatgggtgagttcaacgagaagaagacaacatgtggcaccgtttgcctcaagtacctgctgtttacctacaattgctgcttctggctggctggcctggctgtcatggcagtgggcatctggacgctggccctcaagagtgactacatcagcctgctggcctcaggcacctacctggccacagcctacatcctggtggtggcgggcactgtcgtcatggtgactggggtcttgggctgctgcgccaccttcaaggagcgtcggaacctgctgcgcctgtacttcatcctgctcctcatcatctttctgctggagatcatcgctggtatcctcgcctacgcctactaccagcagctgaacacggagctcaaggagaacctgaaggacaccatgaccaagcgctaccaccagccgggccatgaggctgtgaccagcgctgtggaccagctgcagcaggagttccactgctgtggcagcaacaactcacaggactggcgagacagtgagtggatccgctcacaggaggccggtggccgtgtggtcccagacagctgctgcaagacggtggtggctctttgtggacagcgagaccatgcctccaacatctacaaggtggagggcggctgcatcaccaagttggagaccttcatccaggagcacctgagggtcattggggctgtggggatcggcattgcctgtgtgcaggtctttggcatgatcttcacgtgctgcctgtacaggagtctcaagctggagcactactgaccctgccttgggccttgctgctgctgcacccaactactgagctgagaccactgagtaccaggggctgggctccctgatgacacccaccctgtgccatcaccataacctctggggaccccaacctcagaggcagcttcaagtgccttttgctgcgcaccaatgcccagcaggggagatgcaggttggaaggggccttgctgagtggcgcaaggccgagcgttcccagcagggggagaaacccttcacaccccaggcccttcaggaactggggctttgccttgcagccacatggccccatcccagttggggaagccaggtgagctctgacccttgggcctgggcctctgcccctcccaacccagccgtcgtctccctcgacagcgcccctgctgtcttccccaccgcagtcaccaccacccgaaatgccacgtggtcactgtgcactgccctgttcatgtgcctctgcggggcagggccttcctggttttgtacactgctgtacccagatgcctacaaccatccctgccacatacaggtgctcaataaacacttgtagagcagaaaaaaaaaaaaaaaaaaaaaaaaaaaaaaaaaaaaaaaaaaaaaaaaaaaaaaaaaaanaaaaaaaaaaaaaaaaaaaaaaaaaaaacaaaaaagaaaaaaaaaaaaaaaaaaacaaagcggggcggcggcggccaccattaaattctttttctcccacggggcgacgcccgcccccccgccccccacactcatgtgcacgcacagaggcgcgcgcccccacgacgacagacggggcactcgtctaaaaacaaaccgacgagccgcggcgcgccgcccgggacaagacacaacagacagcgagcagcgcgagcaggacgaaaaacgacgccacgcgcggaagccgcgcgcatgacgaccacgagacgccagcaccaaccaaacccgccggatcaacggagcaccacacaaagcaacgaggcacacggcacaccaccccacaaaacatagacccaagagcggagcgcgaggagctaaaaaacagcaaaacaacgcacccgggcgagtcacaacataagaagaatacaagcaagccacaaacaaagaatagcagaactaggtgatcgtgagcagtgaaaaccacaagcacagcgcgacgaccaagcgcggacaagcacccgtcagcgacgcaaacatatactaccaccccgcggcgcagcaggaacaaagacagaaaacgacaagcaagccacaaaggaacagagagcatagcacgcacgagcaacaagaccacacaagaaccccgcacaacaagacaaggagagacgagatgcaggccgcaagcaccacccatcagtaccacccgacgcgagcagcgacgacgcgaacgagcgcccgagcaccagcgacgtaccgcagccacacacagcagcccagagccaccagacacccaccgacacacgcc

SEQ ID NO: 711049 - DNA, 123 bp, Homo sapiens
tcctgggttcaagcaattctctggcctcagcctcccgagtagctgtgattacaggggcctgccaccccacctcatgcctggcccccctccaggcatgctggcctcccaataaagctggacaag

SEQ ID NO: 711050 - DNA, 1458 bp, Homo sapiens
  misc_feature (75)..(75): n is a, c, g, or t
cgcgggttcagacctgccgagcgcccgccgccgcgggaggggcttgaggccggggcggggcggggccggggcggngcgtcccctcgtaggctccgggccgcgcattctcagcgctgggagccgccgcccccgcagctgccgccgccgccagggcccggactcggacgcgtggtagcctagagtcctggggagcttctgtccacctgtcctgcagaggagtcgtttccagcccggctgccccaggatgggtgagttcaacgagaagaagacaacatgtggcaccgtttgcctcaagtacctgctgtttacctacaattgctgcttctggctggctggcctggctgtcatggcagtgggcatctggacgctggccctcaagagtgactacatcagcctgctggcctcaggcacctacctggccacagcctacatcctggtggtggcgggcactgtcgtcatggtgactggggtcttgggctgctgcgccaccttcaaggagcgtcggaacctgctgcgcctgtacttcatcctgctcctcatcatctttctgctggagatcatcgctggtatcctcgcctacgcctactaccagcagctgaacacggagctcaaggagaacctgaaggacaccatgaccaagcgctaccaccagccgggccatgaggctgtgaccagcgctgtggaccagctgcagcaggagttccactgctgtggcagcaacaactcacaggactggcgagacagtgagtggatccgctcacaggaggccggtggccgtgtggtcccagacagctgctgcaagacggtggtggctctttgtggacagcgagaccatgcctccaacatctacaaggtggagggcggctgcatcaccaagttggagaccttcatccaggagcacctgagggtcattggggctgtggggatcggcattgcctgtgtgcaggtctttggcatgatcttcacgtgctgcctgtacaggagtctcaagctggagcactactgaccctgccttgggccttgctgctgctgcacccaactactgagctgagaccactgagtaccaggggctgggctccctgatgacacccaccctgtgccatcaccataacctctggggaccccaacctcagaggcagcttcaagtgccttttgctgcgcaccaatgcccagcagggggccacatggccccatcccagttggggaagccaggtgagctctgacccttgggcctgggcctctgcccctcccaacccagccgtcgtctccctcgacagcgcccctgctgtcttccccaccgcagtcaccaccacccgaaatgccacgtggtcactgtgcactgccctgttcatgtgcctctgcggggcagggccttcctggttttgtacactgctgtacccagatgcctacaaccatccctgccacatacaggtgctcaataaacacttgtagagcaga

SEQ ID NO: 711051 - DNA, 1610 bp, Homo sapiens
  misc_feature (75)..(75): n is a, c, g, or t
cgcgggttcagacctgccgagcgcccgccgccgcgggaggggcttgaggccggggcggggcggggccggggcggngcgtcccctcgtaggctccgggccgcgcattctcagcgctgggagccgccgcccccgcagctgccgccgccgccagggcccggactcggacgcgtggtagcctagagtcctggggagcttctgtccacctgtcctgcagaggagtcgtttccagcccggctgccccaggatgggtgagttcaacgagaagaagacaacatgtggcaccgtttgcctcaagtacctgctgtttacctacaattgctgcttctggctggctggcctggctgtcatggcagtgggcatctggacgctggccctcaagagtgactacatcagcctgctggcctcaggcacctacctggccacagcctacatcctggtggtggcgggcactgtcgtcatggtgactggggtcttgggctgctgcgccaccttcaaggagcgtcggaacctgctgcgcctgtacttcatcctgctcctcatcatctttctgctggagatcatcgctggtatcctcgcctacgcctactaccagcagctgaacacggagctcaaggagaacctgaaggacaccatgaccaagcgctaccaccagccgggccatgaggctgtgaccagcgctgtggaccagctgcagcaggagttccactgctgtggcagcaacaactcacaggactggcgagacagtgagtggatccgctcacaggaggccggtggccgtgtggtcccagacagctgctgcaagacggtggtggctctttgtggacagcgagaccatcaccaagttggagaccttcatccaggagcacctgagggtcattggggctgtggggatcggcattgcctgtgtgcaggtctttggcatgatcttcacgtgctgcctgtacaggagtctcaagctggagcactactgaccctgccttgggccttgctgctgctgcacccaactactgagctgagaccactgagtaccaggggctgggctccctgatgacacccaccctgtgccatcaccataacctctggggaccccaacctcagaggcagcttcaagtgccttttgctgcgcaccaatgcccagcaggggaggtgaggggggctggcggggcgaagtttggggggtgttttgtggggctccccggacatactctctgcctggtggtcagatgcaggttggaaggggccttgctgagtggcgcaaggccgagcgttcccagcagggggagaaacccttcacaccccaggcccttcaggaactggggctttgccttgcagccacatggccccatcccagttggggaagccaggtgagctctgacccttgggcctgggcctctgcccctcccaacccagccgtcgtctccctcgacagcgcccctgctgtcttccccaccgcagtcaccaccacccgaaatgccacgtggtcactgtgcactgccctgttcatgtgcctctgcggggcagggccttcctggttttgtacactgctgtacccagatgcctacaaccatccctgccacatacaggtgctcaataaacacttgtagagcaga

SEQ ID NO: 711052 - DNA, 1613 bp, Homo sapiens
  misc_feature (1241)..(1241): n is a, c, g, or t
gcacttgtgtgcattgtttcaacaagcattgctgtccgtctccgctattacatggtcgtcctgtctccattcctcgtgctgcggcagttgccagccgtacgcgacatctgcggagactggtggaagaagcatatccacttaacgtgtatgatgtcctgtgccacaggactagcgataccacttgcagcgggactctcactggagattatcagatgtgttttggccaattgaacgtgcgacaattcggtggcgagcgaatcgctacggctagggtcccaggtggattgcgccaaacgctaggaatccggcagacgcgaagggttgcgttggggaaggggcttgattcaacgctagatttgtaaccaagatgcgccaatctcgcgactcgcgatcgcggttgtcgatcgcgttaacactaatcggtgggaggaacctaagcgagtacgccatgaccaaacgcgttgtggaccgcgggcatttcagtcgagtgtctagtttaccagtaaccaacattggtccatgtcccgacctaaggaggtgaggccgaataccagtgattgactttgcactattcgggcatgggcgacaaagtgccccgttgtgttctgttgacatatccctgaagagaatattcgcgcgtgagttacaaagcacctaaagttgaggaagacagttcgttagaattggcccgcgctattcctaaaggcgtattacgccgtaatcctagtggggcgcaccgagggacaaacatccctgttgtgtataaagggagaaaacacttataagggacgcaaacatgccgttctactagcggtaacgttgatcctggtgccctacgaagcgacattccaatggggggggggcccaatgcagatgttacaagccacaaaacctttggaggatggttcacccaaacttaagcggatgcgccaacccaattaactaaccacatttgcacacggggggtggactgtcacccccttgttaaaggcgcaccacttagtgggcgattcctgtcggcaaaaattcttatcacgtttggggattatccgccccgtttgggtgggcacagttttgggcttttcgggtgcactacatgccagggggggcacacacaagtggcggggaacagcggggcacaacagcggaacggcaacacggacccactcgtgttgtggtacacactcggctagggcacggcacactattgcacccaaaagggaggggcatcgatatatagncccggagagcacacgatatgcgacaacccccctatcgcgcaatgtgatataccaaccacggttaggtggacagaaccacgcgcaggtacgagcgggaaacccccaatcagacagagtgtgtacccatatcagagtctggggtgcagaacaaattgggagtcagctatcttagacggttaccgaatcgcccgctatgtagaggttatccaaaccaccgttggtggtcgggaaacgtatcgcccagacaagagtaataggagctaaaaatgttacacgtccccctgtgtgcacgttttgcccagacgaaattttcgatcttggagagacatcgttaatgctcccagttatttaccaggagggcatgggtctatg

SEQ ID NO: 711053 - DNA, 287 bp, Homo sapiens
tagcatcgtttactagccctattgattctggtgtggctaacgtttgagaaccactgtgaagattttaaattgggaagtcgctctattccccagtttagaatcaattattatcatttttttgagatggggtctcactctgtcgcccaggctggagtgcagtggtgcgatggctcactgcaacctccacctcccaggtccaagcgactctcccgcctcagcctcccgagtagctgggaccacaggcgagcgccagcacgccaagctaattttattttcagtagagatgg

SEQ ID NO: 711054 - DNA, 356 bp, Homo sapiens
gcggatgagggcagtcaggtacaatcatgatgatacgggcaacagtccttccatacactttaaatccagtctcttgaggacagagaagcctggtacttttctttaatcaaaaagatacacagaatcagcagggtgagaaacaattgcacaaaagactccagctatgtaacctgctacaaatgttacaccagctgctctggctttgaacattcactggcgggcttaggaaccacaaacttgtacagtgcttcaacagtacgttcaaagcaggcgaacttcatcatggtgtatggtatctgtctcatccagagaggagcaacccccttgtagaatgcttttagcccctcatccgctta

SEQ ID NO: 711055 - DNA, 532 bp, Homo sapiens
catgtaaaagacagctatatcaccgtagaaacacagtgttgaatagagtatatagcaacactagctcccacatgctaaagttacttgtattattgggtacttaatatatattaaatacagacctcgaagcaaatgaatttcaaaaatctatccattcaggaagaatatgtgtaacaattcaagcctgatcctggcgttcgaatgtaaaaaaatgaatcagttaagggtaagtagacataattagaatcatattttagtcagaactgtaaagggtggatcagaaggacataagattactggaagagagatcacaagtggtaacagacatcatctgggtcagattatcccaaagtggggtgtgtgtagcccaggcaagatgaaccactggaaagagttataaaatcagtattgagatacaattcacataccataaaaacacccctgcatgtctaacagtgctgaactcgtatatgagtattcaaaaattttactagctccttaggcacagagacaaaatttaaagctttcttct

SEQ ID NO: 711056 - DNA, 693 bp, Homo sapiens
cacaaagtgcacagtggagaatcgagaatcgatagggttacttttgggagcagtggcttataccattcacctctgttatatgggtgattatttcacagataactgacgaccttcataaccaaatagcgcgtacacacacaatttccacatttgacaccctgatacgaacacataggatgtacactaaacacttgcgaaggatgtgactactgtttaccggcacttgaaaacccgtagacacactctcaacttgcgacgagaccaacgacactgggctcatccagactggcctttaggacctcaagcactacggagatgccaagttgagacagcaagggaacgcccatataataccccgatggcacgcgcgacagttgatcgccttagggatacaacaacccaaagacgcagggcaatcattagatcatattaatacttttccaaagaacatgtgcttactaggtaggagccccataaggcgatattcgcagactatgtgtccatattatgggcgccggaacaagagcggtcaggtggactattccttgagctatgtcacccagttactacacccgctgtggggcaaaaattattcattggctaagcgagcaaccgaacttacacttgggagatggcacccctcattaaaaaggcacattaaccagttcaaggccacctactgcagggacaaac

SEQ ID NO: 711057 - DNA, 115 bp, Homo sapiens
aaagaatcaggctttatttttgttattttaatacaggtattgattgagacatctgttagtctcataattcagtattggccaacacacagaaattaaaagagaaacaaaatgaggg

SEQ ID NO: 711058 - DNA, 1088 bp, Homo sapiens
aatcccacccactcaggagactgaggcaggagaatcacttaaaccggcggaggcggcaggttgcacatccagcctgggcaacggcagactccagactcccaaaacaacacaacaaagatgaacaaaggacacataccacgcagcatcacaaaccataatcatctataaccactcctcgtacacccaaaaaaatccaaccgtgacaccagccaacaaaagggaccaatccagaacagcacccagggcacagatacaaggagccaactgggggcgcacaaaaccaatatcagaccaaacacactacacgccctaacaaggcgccccagaccgcacacacaccgcgccacaaaaccaaaggccggcacgagcccgagcgcacgcgggcacaagacaagcgggagcagataccatgtgccccccaaggtaaacatccaccccaaaacgaaccgctactacaagcaagaacgaaggcgccagcaccagaccggagaagaacggaaacacacacaaccactgcgacagtgacacacaggccacaccaaccacacacagacaccccacaaacccaagggccaccacaaacccaacacggccagcaaacaccacccagcgcaggagcacaacgccattaccaccacaacacaataacacaaaccacaccaattactaccccatcgatcgcgacccgactgagggaggagacgcgggtgacaacacagaccgccaaacaaccccccggaggcagaccacacaaaaacgcggaacgtagcccagccacaagacacacgggacagcaacacgcggcaaaaagcagaacacgaaacgagaaggtcagagacacacccccggaggtacacgcgccacgagcggaaagcaccataccaagcaactagacagtgaacgacagccatgagccagccaaaccacaaagaagacgtagagccgggcgaccacaacgacaggagaccaagcaacaaacaaagccgacagaaccccatcgagaacaagcaacagacacaaaaaacagcaacaaaaaacacaaagcgacgcaacacaaggggtactagacgcagaaggacacagaacgc

SEQ ID NO: 711059 - DNA, 240 bp, Homo sapiens
aatatactagattataacacaaggatacctggaagcaaacctaccatccctgttactgatatcccaaacacaggccagcagccgaagagaagaaagaaccataccagtaactggtgggtaacaaacagaactgtcttggactcgagatgtttccggatagcactattgcagatgtggttgcccacatcggcatctaaagcactgagggagtcgtccaggatgtagatgctcctgtcacta

SEQ ID NO: 711060 - DNA, 1097 bp, Homo sapiens
  misc_feature (43)..(43): n is a, c, g, or t
  misc_feature (421)..(421): n is a, c, g, or t
  misc_feature (488)..(488): n is a, c, g, or t
  misc_feature (495)..(495): n is a, c, g, or t
  misc_feature (541)..(541): n is a, c, g, or t
  misc_feature (581)..(581): n is a, c, g, or t
  misc_feature (761)..(761): n is a, c, g, or t
  misc_feature (808)..(808): n is a, c, g, or t
  misc_feature (826)..(826): n is a, c, g, or t
  misc_feature (839)..(839): n is a, c, g, or t
  misc_feature (844)..(844): n is a, c, g, or t
  misc_feature (848)..(848): n is a, c, g, or t
  misc_feature (850)..(850): n is a, c, g, or t
  misc_feature (859)..(859): n is a, c, g, or t
  misc_feature (862)..(862): n is a, c, g, or t
  misc_feature (866)..(866): n is a, c, g, or t
  misc_feature (872)..(873): n is a, c, g, or t
  misc_feature (875)..(875): n is a, c, g, or t
  misc_feature (880)..(880): n is a, c, g, or t
  misc_feature (895)..(895): n is a, c, g, or t
  misc_feature (899)..(899): n is a, c, g, or t
  misc_feature (932)..(932): n is a, c, g, or t
  misc_feature (958)..(958): n is a, c, g, or t
  misc_feature (962)..(962): n is a, c, g, or t
  misc_feature (982)..(983): n is a, c, g, or t
  misc_feature (985)..(985): n is a, c, g, or t
  misc_feature (991)..(991): n is a, c, g, or t
  misc_feature (997)..(997): n is a, c, g, or t
  misc_feature (999)..(999): n is a, c, g, or t
  misc_feature (1055)..(1055): n is a, c, g, or t
aattcgcggccgcgtcgactacggctgcgataagacgacaaanggggggcgacgtgagcgcgcaggggggcggcggcctcgcctcgtctctctctctgcgcctgggtcgggtgggtgacgccgagagccagagagatgtcggatttcgacagtaacccgtttgccgacccggatctcaacaatcccttcaaggatccatcagttacacaagtgacaagaaatgttccaccaggacttgatgaatataatccattctcggattctagaacacctccaccaggcggtgtgaagatgcctaatgtacccaatacacaaccagcaataatgaaaccaacagaggaacatccagcttatacacagattgcaaaggaacatgcattggcccaagctgaacttcttaagcgccaggaagaactagaangaaaagccgcagaattagatcgtcgggaacgagaaatgcaaaacctcagtcaacatggtagaaaaantattggncacctcttcctagcaattttcctgtcggaccttgtttctatcaggnattttctgtagacattcctgtagaattccaaaagacagtnaagcttatgtactacttgtggatgttccatgcgtcacactgtttcttaatatcttcggatgcttggcttggttttgtgtggattctgcaagagcggttgattttggattgagtatccagtggttcttgcttttaactccttgttcatatatctgttggaacagaccactttatggagctntcaggagtgacaattcatttagattctttgtattcttcttcgtctanatttgtcagtttgctgtncatgttctccaanctgcnggantncataactgnggnaatngtggtnngntttcntcccttactggtcanaacnaaaaaatacctattgggataatgatgatactcntagcagccctattcccagcatcagcngtgntatccctcgtttagtaccannangtacanggactntntcgcccccaggtgctcgtattgaggaggccccccggagtttgcaccggtgtgctgncccacaacctaacagcccgcgccgccctgcgcttccctgcag

SEQ ID NO: 711061 - DNA, 156 bp, Homo sapiens
gtaaccaagtgtatcactgttcccggtactaggccagagtgtcttcaagagtttcttcaagtccccgtacgaggcctaatattagaaggggagcaacactgcgcttatagtgcgacaccatgttcatatcaggcctttaaaaaggatgtcttacca

SEQ ID NO: 711062 - DNA, 663 bp, Homo sapiens
agctctcccgggagcaggaatcaccctgcgcgggagcgccgaaatcgtgcgcgagttcttctcattcggcatcaacgagcattttaatatcagcgtggcatatactccatctgaaccctttacgtcgagtgcagaatatacggactcacctgtgctgtgtaactacgtgatctgtgagctcataaaatacctaaataatgtggtggaaccaagtgaaagatggggttatacaagtgttcagtccagaaactggtgtagttatctcaaatattgaacagtggtgaggtcctggaaaaggatgggcagttgggatcattgagtggtgacaagactgcaaaagatgacagtgcacccagagaaaagtctcagaaagctatccaggatgaaatcggtcagtgatcagacagatcacagctacggtgacatttctgccactggtgggaaagtctctgtgtcatttgggatctgctgattttatacagacaaagattgggtgtgtacctgaaaactgggaagagtcgggaccacagtttattaccaattcttgaggaagtccgccttcgtaccatttactactacaaatccacaagagtaatagcctggtgtgctacaaaatctgtcatgactggggatgacatgaggaaatactgtcatggcattcga

SEQ ID NO: 711063 - DNA, 419 bp, Homo sapiens
  misc_feature (125)..(125): n is a, c, g, or t
  misc_feature (129)..(129): n is a, c, g, or t
  misc_feature (139)..(139): n is a, c, g, or t
  misc_feature (155)..(155): n is a, c, g, or t
  misc_feature (182)..(182): n is a, c, g, or t
  misc_feature (246)..(246): n is a, c, g, or t
  misc_feature (271)..(271): n is a, c, g, or t
gcacgcctggtttgtggggggggggggggtcagggaacattattctgaagaagagaaactaccagtcagacctccagataaatgaagtgaccagaggagatgggagggggggagtgcttctgtcnttancccggtgcantgctgtgtgtatctanttccagctacttgagaggctgaggcangaggattgcttgagtccaaaaagtggcagttgcagtgagtggagatcgcgccactgctctccancctgggtggcagagggggggggctntctcaaaaaataaacaaaaacaaaatgcttctgtgagttaacaatctttattagagggggtttagtctttctttctcagctcgatgttaaggtgggtgacaaatggaaataaacgtctttattatcctttttttctgaaaaaaaaaaa

SEQ ID NO: 711064 - DNA, 888 bp, Homo sapiens
  misc_feature (368)..(368): n is a, c, g, or t
  misc_feature (506)..(506): n is a, c, g, or t
gatatacaatgctgcaaagagtcacagggactctaatatcgaacatgaagcgtggactacagagtagcgcttcctctgagccgagattcagagagtagctgcagagaccccctaggtgtatttacttggtgtgaagccttcgatagcacaaggacgtggctccagacgtgcccagtcctcaacgtgataggtgctgtgacacgatcttctagatcaaactgggcttctcgcgttgcttcctaccataaatggagagtggagaatatcgatgctgaggacggaagcatatgcatgctacaggcacgcgacactcagtagaggtgagatctacggatgctcggcagtctggtatcgtgattctgtggacngcggattcagaacgatgatatgccttatgcggaggaattcccgaatcgtgaggaccagtgataggctcgcccaccagaaacagaacgcctagacgttacatgtagggtagggtgggacgtgcaagcgtaagcttactntacaatcaccgcagcatagtagggcgttctaagcctctctagaaagccctggaacttgatcggagtctggaccctgatggctttggtgtagaccttggagtaaaaatttgacctccctgaggaacccatctagccagaggactagttatcaacaacagcctagtgcagctgcaatgcgtcacatcagcagcaagtccttgccaccccgccaggcttccgccctgtgtgccagttgtgaccgagtaccgctggatggccacaccatctcagacctgagccggagcagcggggcgagctgattcccatctcccccagcactgaagtcgggggctctggcattgggacaccgcctctgtgctcaagcggagaggaagagcgtgtg

SEQ ID NO: 711065 - DNA, 838 bp, Homo sapiens
tggaaaaacccagctgactttattggctctgggggcagggggctcagagacctcttggtgggggcgggctccgtttcctcttcaccatcacaggcttctggctgcccaggatggccgctggccctgcggattggctgccatgcccaggtcggggcggtacttgtctcttgcggatcatgtgtctgatgctgctagagcgtggccgcgagcattcttgttggatggtgggtcccgcactataggaggtgggcaggtcttccgtcgggccggtatctccgtcttatatgacccaccagcgaccctctttgccgtcggtctgccggttccacgcccacgagtcttgcggtgaatcagcccgtttgtaccgggaaggaattggcggggccttcaagttaattggggctcagtggctgtaaggtctggcttaatccctctttgatcaggaaactgggaccatgttccggaaggacctatcctattggccaaatgcggcaagacattggcggggggtctccctccggagggccaagccctgcaagtttcagcaccttgccccacccaaaagtgggatctcaggtggagccaccttgttgggttcccccaaaacttggcccccattcttggctatgttttagccgatgtcttaagggttgagcctcgggatccgggggtctgggccagtggccatagtgaagcctgggaatgagtgtaactgaagcatctgggctgcagcacagggaagggccaagcccctttgtagcccaagtaatccgtgccagcccttgctctggggcattgccggaaggggtggaatcctataggaatcgctatcaagcca

SEQ ID NO: 711066 - DNA, 342 bp, Homo sapiens
gacattaatcaattatacctgtatactgaagccgccctaacactcctaaatgaggccggatatagtggctcacgcctgtaatcccagcactttaggaggctgaggcggatggatcacctgaggtcaggagttcaagaccagcctggctaacacggtgaaacccgtctctactaaaaatacaaaaaattagccggatgtggtggcgggtgcatgtaatctcagctactcgggaggctgaggcaggagaattgcttgaacccaggagggtggaggttgcagtgagccgagatcacgccattgcactccagcctgggtgacagagcgagactctgtctgggggaa

SEQ ID NO: 711067 - DNA, 319 bp, Homo sapiens
  misc_feature (113)..(113): n is a, c, g, or t
tgtgtgtttgggaattgcttggggttgggggtcgtggggacaagggacacttttggaaacaaaggtggccctcggtgccgtcctgcgcaaactctcccgtcccacgaaggccncggggtgggggctggggggggtgcccccgaccgttccgcttttccggccaggtgcttttttgtcaatttttatggaatgcaaaaggaggtttttgttttattttgtttttttgtaaagcttaaaaaaaaaatttcctttttatacttgagcctccatacttaaaaaaaaaaaaaaaaagaaatcaataaaaagaaactggggggca

SEQ ID NO: 711068 - DNA, 879 bp, Homo sapiens
gaaccgttaatgtgtacgctgcgggaaattcagaccctgggaacatatggctcgattgagcaggactgtgctggagcgctgcacgccaggtcgaacagtaagaatgaaggaatgtcagccggtgcatcgggcggttcgtgaccagctggacagtgcgggcatggtagtcgaagagtcacggaagattatcagtcagagtgacggaggtatgcagccctcctggtgtctcaggtggtagccactttacaccatctgatggtggcagcttcattgtggctgcaatgttcgctgacatgtgtcggtgcctatgacgatacgtaagcgcagtcgtgatgtggggcaggagtatgggcctggttacgccaattcacgcagtgagcttttcggctacacctgggtagatccgcgaggggtctcagggagagcattcgatatagctaggtggcgaaaagaccagttggaagatggtcatggctacgaatgggtatctcaccaggtgatgtgctctgcttgagctctcgaggggaagtaacctagtgatggggatcggggggacgcttgagacctaatcggtcctgtcgagaggattgttgatctcagagtaattgatttttggcgaaactcacgataaatagtgccaagaactctgatcataggtatgactttgtgacagaagactaggtgaggaaccaatgatatggggtacctcgggcagctattggaatcgttgtactaaggagaatagggaaatgtaggggtgaatgagaggtaaggaaaaaagctggtggaagtaattgattgcgtaaagggaatgaatagcatataaccagggattggctgtagtgggaggtcggggaccattgagcgaggggttgtggg

SEQ ID NO: 711069 - DNA, 300 bp, Homo sapiens
ggcgttctgtgaagtgttgacgactttgagcctggaggaggacccgtatgctcctgccaccccagaggccacctctgcattttatcctgggcattttcacagtgctcctctgcaccctaagcaaggagtggcatgttcagtgtgcaaatggcatctttagaccccacaacggtgaaaaccccgactgtccacgtagggcccaggtccgctgagcaccgagcatcaaaagccgtttgcatagccaggtgtcagtcatttcagatgaaaaagacgggaagatcggagacagctcccccgggt

SEQ ID NO: 711070 - DNA, 607 bp, Homo sapiens
ctgcatctcacacaagtgggacatggcctgctgctggtcagggtgagaactctgcctttaagttagaatcaaatcaaatcaaatcaaattgaattctttaccccagtggggtagagagcaccgccaaatactaagctacaggaatgtggcccagaaagcaaattaggttttatttctgcctcctgcctttgccccgctgtttctggaagagaccccatagacagtgccgtgaagggcagcctacggagtctgtggcaggcagggactcgcaggtgagcctggtagtgggtcggcgggttctcatccatggcgctcagcccgtctgaggtcatctgccctcttcttcattggattctggaagcctccccaccagcctgcgagatgcagctgaacagggacttgttttgtttactgctgcatcccagggctctacacttgagcctgacatagagtagggctttaataatctttattgagggccgggcacaatggctcactcctgaatcccagcactttaggaggccccggccagacagatcacgaggtcaagagatcaagaccatcctggccaacgtggtgaaacccagtttctatttaaaaaaaaaaa

SEQ ID NO: 711071 - DNA, 1136 bp, Homo sapiens
catatgaacagaaagcagctaagctaacaggagaaatatgcaaacaggcatattgctgcatatcgtgccaagggcaacaagtgcaagccaggaacagaagtggccctgtgcaggcgcaacaggctcaacagaagaagaacggaaccgaggcaagcatgcaggcaggcaggcaggcaggcaagccaagcaaagcatgcaacagccatgcaggcaggcaagcaggcatgcacacgcatgcacagcacatcaacatgggctcatccgttttcaatgcatggcagttgtaggcaatagatagtagtagtggtagcatctagggcaaaattcatatttatggctacagaaatggtgcacatttcaaggtgccaggctccaaatcacatcaagcctttcccacgtcatccaacacacacataggtgaacgatggcaatctctatagactggtacattcaacgccctaggcaattcaacaaggcaattatccgttcctttgggttcaacgcaaggcaacacaacagttcaccttcttaccctaagcacaagccaacaacacagttgcgccccacaggtgcgtgtattactgggattaacgtgcgccggaattcgtatacacaacaacagggagaacctttgggggcaggcgcccgtatcacgcataccacaggttaaaccgacacggttcttaacggacacttcagtaataaaccaaaggtccattagtccgtggggaaagttggattgagggaagacagtgggtttaaaccctttaaaagactataaagttatataacagtggggatatagaagatgagagaaaaaaattgcaatccaaaatggagtggcttaatttgggtatacaggacaaccgcacggggtcaccacaacccttatgggtcacgcgcgcaaccacttctaaggcgaatcagttccacaaccttacggttcaaacaaatctcgcagggaggcggatcaaacgagacaacacgcggaacctgggctccggccacattacttaccgcgtttaccatctactccaccccgacaccaacacaccgtcagccgcgtaaacgttacacaacctcacagcttgagcaattagttacacaccacccacaagaccacccaccgacaacac

SEQ ID NO: 711072 - DNA, 649 bp, Homo sapiens
gccaccttttcatggatgggaatgtagcgttctgcagcaggctatggttgtgtcctgaacagcagaggctgcccaggaggctggtcagggtggtcagtgagatcaccttgccccataatttccatgcttcctttgtgtgcaggggcaaaggcgattatcacaggttgggccatggatcagatgaccatgttcgaaggcctcggcaggtccaagggttgcaggggaagaaagtcatcgccatcgccactggctccctgcactgtgtgtgctgcacagaggatggtaggtaggggctcagtgccgcaggactgaggcctgtgaatctaagagggttgagcatgaaggacatgcgcagccttaaaagggggcacaggccaggtgtggtggctcactcctgttgccccagcactttgggaggctgaggcaggcggatcacgaggtcaagagatcgagaccagcctggcctacacggtaaacatcatctctactaaaaatacaaaaattagctgggcatggtggcgcgcgcctgcatctcagctactcaagaggctgaggcaggagaatcacttgaacccgggaggtggaggttgcagtgagccaagatcgagccattgcactccagcctggtgacagagcacgactgtctcag

SEQ ID NO: 711073 - DNA, 2934 bp, Homo sapiens
  misc_feature (1012)..(1012): n is a, c, g, or t
  misc_feature (2930)..(2930): n is a, c, g, or t
ccccctttgtcaacaacaacccggggacctctacacatggggcaaaggccgctacggccggctggggcacagcgacagtgaggaccagctgaagccgaagctggtggaggcgctgcagggccaccgtgtggttgacatcgcctgtggcagtggagatgcccagaccctctgcctcacagatgacgacactgtctggtcctggggggacggggactacggcaagctcggccggggaggcagcgatggctgtaaagtgcctatgaagattgattctcttactggtcttggagtagttaaagtggaatgcggatcccagttttctgttgcccttaccaaatctggagctgtttatacctggggcaaaggcgattatcacaggttgggccatggatcagatgaccatgttcgaaggcctcggcaggtccaagggttgcaggggaagaaagtcatcgccatcgccactggctccctgcactgtgtgtgctgcacagaggatggtgaggtttatacatggggcgacaatgatgagggacaactgggagacggaaccaccaatgccatccagaggcctcggttggtagctgcccttcagggtaagaaggtcaaccgtgtggcctgtggctcagcacataccctcgcctggtcgaccagcaagcccgccagtgctggcaaactccctgcacaggtccccatggagtacaatcacctgcaggagatccccatcattgcgctgaggaaccgtctgctgctgctgcaccacctctccgagctcttctgcccctgcatccccatgttcgacctggaaggctcgctcgacgaaactggactcgggccttctgttgggttcgacactctccgaggaattctgatatcccagggaaaggaggcggctttccggaaagtagtacaagcaactatggtacgcgatcgtcagcatggccccgtcgtggagctgaaccgcatccaggtcaaacgatcaaggagcaaaggcgggctggccggccccgacggnaccaagtctgtctttgggcagatgtgtgctaagatgagctcgtttggtcccgacagcctcctccttcctcaccgtgtctggaaagtcaagtttgtgggtgaatctgtggatgactgtgggggcggctacagcgagtccatagctgagatctgtgaggagctgcagaacggactcacgcccctgctgatcgtgacacccaacgggagggatgagtctggggccaaccgagactgctacctgctcagcccggccgccagagcacccgtgcacagcagcatgttccgcttcctgggtgtgttgctgggcattgccatccgaaccgggagtcccctgagcctcaaccttgccgagcctgtctggaagcagctggctgggatgagcctcaccatcgcggacctcagtgaggttgataaggattttattcctggactcatgtacatccgagacaatgaagccacctcagaggagtttgaagccatgagcctgcccttcacagtgccaagtgccagtggccaggacattcagttgagctccaagcacacacacatcaccctggacaaccgcgcggagtacgtgcggctggcgataaactatagactccatgaatttgatgagcaggtggctgctgttcgggaaggaatggcccgcgttgtgcctgttcccctcctctctctgttcaccggctacgaactggagacgatggtgtgtggcagccctgacatcccgctgcaccttctcaagtcggtggccacctataaaggcatcgagccttccgcatcgctgatccagtggttctgggaggtgatggagtccttctccaacacagagcgctctcttttccttcgcttcgtctggggccggacgaggctgcccaggaccatcgccgacttccggggccgagacttcgtcatccaggtgttggataaatacaaccctccagaccacttcctccctgagtcctacacctgtttcttcttgctgaagctgcccaggtattcctgcaagcaggtgctggaggagaagctcaagtacgccatccacttctgcaagtccatagacacagatgactacgctcgcatcgcacttacaggagagccagccgccgacgacagcagcgacgattcagataacgaggatgtcgactcctttgcttcggactctacacaagattatttaacaggacactaagatggggaaacgtcctcgtgagatgagagcctgagccaggcagcagagcactcgctgctgtgtagactgtaggctgcctggtgtgtctgatgagaagcgtccgtcctcgagccaggcgggaggagggagtggagagactgactggccgtgatgggaatgacagtgagaaggtccgcctgtgcgcgtggaacactgtggacgctcgacttccaagggtcttctcacccgtaatgctgcattacatgtaggactgtgtttactaaagtgtgtaaatgtttatataaataccaaattgcagcatccccaaaatgaataaagcctttttacttgtgggtgcaatcgatttttttttctttctcctttctttcaagtgtcgtgagtcgtcttgattgtatattggaaataactgtgtaacaaatcgtattataaatatttcaattaattttactctgaatttgtttattaaaagacttttgaacatgaaatgattagtattacttgaatgcatccagaggatatttaaaccaaaatgaaaaaccagaaggccatttggtgtcccctctcccaggtgtccccttgtagcatatgcattatgtcatctgaattgaggcctttctgtgaacagcatcataacttctatcatggaaagtgtactatatataatgtttgtgtcatgtatatgcctaaattttaattatctataaataaaacatctgacataaaaaaaaangtct

SEQ ID NO: 711074 - DNA, 2911 bp, Homo sapiens
  misc_feature (1012)..(1012): n is a, c, g, or t
  misc_feature (2907)..(2907): n is a, c, g, or t
ccccctttgtcaacaacaacccggggacctctacacatggggcaaaggccgctacggccggctggggcacagcgacagtgaggaccagctgaagccgaagctggtggaggcgctgcagggccaccgtgtggttgacatcgcctgtggcagtggagatgcccagaccctctgcctcacagatgacgacactgtctggtcctggggggacggggactacggcaagctcggccggggaggcagcgatggctgtaaagtgcctatgaagattgattctcttactggtcttggagtagttaaagtggaatgcggatcccagttttctgttgcccttaccaaatctggagctgtttatacctggggcaaaggcgattatcacaggttgggccatggatcagatgaccatgttcgaaggcctcggcaggtccaagggttgcaggggaagaaagtcatcgccatcgccactggctccctgcactgtgtgtgctgcacagaggatggtgaggtttatacatggggcgacaatgatgagggacaactgggagacggaaccaccaatgccatccagaggcctcggttggtagctgcccttcagggtaagaaggtcaaccgtgtggcctgtggctcagcacataccctcgcctggtcgaccagcaagcccgccagtgctggcaaactccctgcacaggtccccatggagtacaatcacctgcaggagatccccatcattgcgctgaggaaccgtctgctgctgctgcaccacctctccgagctcttctgcccctgcatccccatgttcgacctggaaggctcgctcgacgaaactggactcgggccttctgttgggttcgacactctccgaggaattctgatatcccagggaaaggaggcggctttccggaaagtagtacaagcaactatggtacgcgatcgtcagcatggccccgtcgtggagctgaaccgcatccaggtcaaacgatcaaggagcaaaggcgggctggccggccccgacggnaccaagtctgtctttgggcagatgtgtgctaagatgagctcgtttggtcccgacagcctcctccttcctcaccgtgtctggaaagtcaagtttgtgggtgaatctgtggatgactgtgggggcggctacagcgagtccatagctgagatctgtgaggagctgcagaacggactcacgcccctgctgatcgtgacacccaacgggagggatgagtctggggccaaccgagactgctacctgctcagcccggccgccagagcacccgtgcacagcagcatgttccgcttcctgggtgtgttgctgggcattgccatccgaaccgggagtcccctgagcctcaaccttgccgagcctgtctggaagcagctggctgggatgagcctcaccatcgcggacctcagtgaggttgataaggattttattcctggactcatgtacatccgagacaatgaagccacctcagaggagtttgaagccatgagcctgcccttcacagtgccaagtgccagtggccaggacattcagttgagctccaagcacacacacatcaccctggacaaccgcgcggagtacgtgcggctggcgataaactatagactccatgaatttgatgagcaggtggctgctgttcgggaaggaatggcccgcgttgtgcctgttcccctcctctctctgttcaccggctacgaactggagacgatggtgtgtggcagccctgacatcccgctgcaccttctcaagtcggtggccacctataaaggcatcgagccttccgcatcgctgatccagtggttctgggaggtgatggagtccttctccaacacagagcgctctcttttccttcgcttcgtctggggccggacgaggctgcccaggaccatcgccgacttccggggccgagacttcgtcatccaggtgttggataaatacaaccctccagaccacttcctccctgagtcctacacctgtttcttcttgctgaagctgcccaggtattcctgcaagcaggtgctggaggagaagctcaagtacgccatccacttctgcaagtccatagacacagatgactacgctcgcatcgcacttacaggagagccagccgccgacgacagcagcgacgattcagataacgaggatgtcgactcctttgcttcggactctacacaagattatttaacaggacactaagatggggaaacgtcctcgtgagatgagagcctgagccaggcagcagagcactcgctgctgtgtctgatgagaagcgtccgtcctcgagccaggcgggaggagggagtggagagactgactggccgtgatgggaatgacagtgagaaggtccgcctgtgcgcgtggaacactgtggacgctcgacttccaagggtcttctcacccgtaatgctgcattacatgtaggactgtgtttactaaagtgtgtaaatgtttatataaataccaaattgcagcatccccaaaatgaataaagcctttttacttgtgggtgcaatcgatttttttttctttctcctttctttcaagtgtcgtgagtcgtcttgattgtatattggaaataactgtgtaacaaatcgtattataaatatttcaattaattttactctgaatttgtttattaaaagacttttgaacatgaaatgattagtattacttgaatgcatccagaggatatttaaaccaaaatgaaaaaccagaaggccatttggtgtcccctctcccaggtgtccccttgtagcatatgcattatgtcatctgaattgaggcctttctgtgaacagcatcataacttctatcatggaaagtgtactatatataatgtttgtgtcatgtatatgcctaaattttaattatctataaataaaacatctgacataaaaaaaaangtct

SEQ ID NO: 711075 - DNA, 1206 bp, Homo sapiens
  misc_feature (75)..(75): n is a, c, g, or t
  misc_feature (1126)..(1126): n is a, c, g, or t
  misc_feature (1131)..(1131): n is a, c, g, or t
  misc_feature (1206)..(1206): n is a, c, g, or t
cgcgggttcagacctgccgagcgcccgccgccgcgggaggggcttgaggccggggcggggcggggccggggcggngcgtcccctcgtaggctccgggccgcgcattctcagcgctgggagccgccgcccccgcagctgccgccgccgccagggcccggactcggacgcgtggtagcctagagtcctggggagcttctgtccacctgtcctgcagaggagtcgtttccagcccggctgccccaggatgggtgagttcaacgagaagaagacaacatgtggcaccgtttgcctcaagtacctgctgtttacctacaattgctgcttctggctggctggcctggctgtcatggcagtgggcatctggacgctggccctcaagagtgactacatcagcctgctggcctcaggcacctacctggccacagcctacatcctggtggtggcgggcactgtcgtcatggtgactggggtcttgggctgctgcgccaccttcaaggagcgtcggaacctgctgcgcctgtacttcatcctgctcctcatcatctttctgctggagatcatcgctggtatcctcgcctacgcctactaccagcagctgaacacggagctcaaggagaacctgaaggacaccatgaccaagcgctaccaccagccgggccatgaggctgtgaccagcgctgtggaccagctgcagcaggagttccactgctgtggcagcaacaactcacaggactggcgagacagtgagtggatccgctcacaggaggccggtggccgtgtggtcccagacagctgctgcaagacggtggtggctctttgtggacagcgagaccatgcctccaacatctacaaggtggagggcggctgcatcaccaagttggagaccttcatccaggagcacctgagggtcattggggctgtggggatcggcattgcctgtgtgcaggtctttggcatgatcttcacgtgctgcctgtacaggagtctcaagctggagcactactgaccctgccttgggccttgctgctgctgcacccaactactgagctgagaccactgagtaccaggggctggctcctgatgacaccacctgtgctcacataactctgggacccaactcgaagcnttcantgctttgtggccgccatggcccaggaggcgagggggcgcgcggcgcacctagggcggttgtggggcccgcaattn

SEQ ID NO: 711076 - DNA, 2459 bp, Homo sapiens
  misc_feature (1012)..(1012): n is a, c, g, or t
  misc_feature (2455)..(2455): n is a, c, g, or t
ccccctttgtcaacaacaacccggggacctctacacatggggcaaaggccgctacggccggctggggcacagcgacagtgaggaccagctgaagccgaagctggtggaggcgctgcagggccaccgtgtggttgacatcgcctgtggcagtggagatgcccagaccctctgcctcacagatgacgacactgtctggtcctggggggacggggactacggcaagctcggccggggaggcagcgatggctgtaaagtgcctatgaagattgattctcttactggtcttggagtagttaaagtggaatgcggatcccagttttctgttgcccttaccaaatctggagctgtttatacctggggcaaaggcgattatcacaggttgggccatggatcagatgaccatgttcgaaggcctcggcaggtccaagggttgcaggggaagaaagtcatcgccatcgccactggctccctgcactgtgtgtgctgcacagaggatggtgaggtttatacatggggcgacaatgatgagggacaactgggagacggaaccaccaatgccatccagaggcctcggttggtagctgcccttcagggtaagaaggtcaaccgtgtggcctgtggctcagcacataccctcgcctggtcgaccagcaagcccgccagtgctggcaaactccctgcacaggtccccatggagtacaatcacctgcaggagatccccatcattgcgctgaggaaccgtctgctgctgctgcaccacctctccgagctcttctgcccctgcatccccatgttcgacctggaaggctcgctcgacgaaactggactcgggccttctgttgggttcgacactctccgaggaattctgatatcccagggaaaggaggcggctttccggaaagtagtacaagcaactatggtacgcgatcgtcagcatggccccgtcgtggagctgaaccgcatccaggtcaaacgatcaaggagcaaaggcgggctggccggccccgacggnaccaagtctgtctttgggcagatgtgtgctaagatgagctcgtttggtcccgacagcctcctccttcctcaccgtgtctggacaaccgcgcggagtacgtgcggctggcgataaactatagactccatgaatttgatgagcaggtggctgctgttcgggaaggaatggcccgcgttgtgcctgttcccctcctctctctgttcaccggctacgaactggagacgatggtgtgtggcagccctgacatcccgctgcaccttctcaagtcggtggccacctataaaggcatcgagccttccgcatcgctgatccagtggttctgggaggtgatggagtccttctccaacacagagcgctctcttttccttcgcttcgtctggggccggacgaggctgcccaggaccatcgccgacttccggggccgagacttcgtcatccaggtgttggataaatacaaccctccagaccacttcctccctgagtcctacacctgtttcttcttgctgaagctgcccaggtattcctgcaagcaggtgctggaggagaagctcaagtacgccatccacttctgcaagtccatagacacagatgactacgctcgcatcgcacttacaggagagccagccgccgacgacagcagcgacgattcagataacgaggatgtcgactcctttgcttcggactctacacaagattatttaacaggacactaagatggggaaacgtcctcgtgagatgagagcctgagccaggcagcagagcactcgctgctgtgtagactgtaggctgcctggtgtgtctgatgagaagcgtccgtcctcgagccaggcgggaggagggagtggagagactgactggccgtgatgggaatgacagtgagaaggtccgcctgtgcgcgtggaacactgtggacgctcgacttccaagggtcttctcacccgtaatgctgcattacatgtaggactgtgtttactaaagtgtgtaaatgtttatataaataccaaattgcagcatccccaaaatgaataaagcctttttacttgtgggtgcaatcgatttttttttctttctcctttctttcaagtgtcgtgagtcgtcttgattgtatattggaaataactgtgtaacaaatcgtattataaatatttcaattaattttactctgaatttgtttattaaaagacttttgaacatgaaatgattagtattacttgaatgcatccagaggatatttaaaccaaaatgaaaaaccagaaggccatttggtgtcccctctcccaggtgtccccttgtagcatatgcattatgtcatctgaattgaggcctttctgtgaacagcatcataacttctatcatggaaagtgtactatatataatgtttgtgtcatgtatatgcctaaattttaattatctataaataaaacatctgacataaaaaaaaangtct

SEQ ID NO: 711077 - DNA, 1217 bp, Homo sapiens
  misc_feature (75)..(75): n is a, c, g, or t
  misc_feature (1081)..(1081): n is a, c, g, or t
  misc_feature (1083)..(1085): n is a, c, g, or t
  misc_feature (1089)..(1090): n is a, c, g, or t
  misc_feature (1111)..(1111): n is a, c, g, or t
  misc_feature (1117)..(1117): n is a, c, g, or t
  misc_feature (1122)..(1123): n is a, c, g, or t
  misc_feature (1133)..(1133): n is a, c, g, or t
  misc_feature (1144)..(1144): n is a, c, g, or t
  misc_feature (1151)..(1151): n is a, c, g, or t
  misc_feature (1156)..(1156): n is a, c, g, or t
  misc_feature (1159)..(1160): n is a, c, g, or t
  misc_feature (1168)..(1169): n is a, c, g, or t
  misc_feature (1182)..(1182): n is a, c, g, or t
cgcgggttcagacctgccgagcgcccgccgccgcgggaggggcttgaggccggggcggggcggggccggggcggngcgtcccctcgtaggctccgggccgcgcattctcagcgctgggagccgccgcccccgcagctgccgccgccgccagggcccggactcggacgcgtggtagcctagagtcctggggagcttctgtccacctgtcctgcagaggagtcgtttccagcccggctgccccaggatgggtgagttcaacgagaagaagacaacatgtggcaccgtttgcctcaagtacctgctgtttacctacaattgctgcttctggctggctggcctggctgtcatggcagtgggcatctggacgctggccctcaagagtgactacatcagcctgctggcctcaggcacctacctggccacagcctacatcctggtggtggcgggcactgtcgtcatggtgactggggtcttgggctgctgcgccaccttcaaggagcgtcggaacctgctgcgcctgtacttcatcctgctcctcatcatctttctgctggagatcatcgctggtatcctcgcctacgcctactaccagcagctgaacacggagctcaaggagaacctgaaggacaccatgaccaagcgctaccaccagccgggccatgaggctgtgaccagcgctgtggaccagctgcagcaggagttccactgctgtggcagcaacaactcacaggactggcgagacagtgagtggatccgctcacaggaggccggtggccgtgtggtcccagacagctgctgcaagacggtggtggctctttgtggacagcgagaccatgcctccaacatctacaaggtggagggcggctgcatcaccaagttggagaccttcatccaggagcacctgagggtcattggggctgtggggatcggcattgcctgtgtgcaggtctttggcatgatcttcacgtgctgcctgtacaggagtctcaagctggagcactactgaccctgccttgggccttgctgctgctgcacccaactactgagctgagaccactgagtaccaggggctgggtcctgntnnnaccnncctgtgcatccatactctggngaccanctcanngcagttcagngctttggtgcncatgccnagggnggnnggggctgnnggaaatggggggntggggcccgaatccttcggtgatagtgaggtgtag

SEQ ID NO: 711078 - DNA, 702 bp, Homo sapiens
  misc_feature (702)..(702): n is a, c, g, or t
ggcaaatcagtgatgcagcgaaatcgtcagcatcagttaaatccactgtcatcacaaagaaaagggctggaccaattgatgatatggaaaaattacttgaggcagtggaagaacgttacacccacggcacctagaaagttcacaatgtaaagatcactggtgaggcagcacgtgctggtaatgaaggtgcctatagcttttaaggaacagctgcataggataattcaatggctcaaagatctttgcaataaggagctgattgcactggagcgcaagaaacgaggtaaagcgcgtggaggcagtggacagaagttacacgttagaagaaatggacgtctagattgactgagagattcgccacacgttgacgaggcgcagatacaggaatgctcttgcttgctaccagagacaatattttgtgaaaagaagaaacaagctgtacggtcaagaacttggtatcttcctgaagaacaacactatgcttgctaaaccagtcaactagtgttgatgtcccaatgccttctaccacctattctcgatgttcatcagaagagagagaaattgaggaccctgttgcatccccatcatccagcaattaattctatttcagtgcttcaaacatttttcaggacactgtgctttcagctgtgtaaattaatgatgccctccaaatccttggttatggaatattgggtcatccan

SEQ ID NO: 711079 - DNA, 2539 bp, Homo sapiens
  misc_feature (1012)..(1012): n is a, c, g, or t
ccccctttgtcaacaacaacccggggacctctacacatggggcaaaggccgctacggccggctggggcacagcgacagtgaggaccagctgaagccgaagctggtggaggcgctgcagggccaccgtgtggttgacatcgcctgtggcagtggagatgcccagaccctctgcctcacagatgacgacactgtctggtcctggggggacggggactacggcaagctcggccggggaggcagcgatggctgtaaagtgcctatgaagattgattctcttactggtcttggagtagttaaagtggaatgcggatcccagttttctgttgcccttaccaaatctggagctgtttatacctggggcaaaggcgattatcacaggttgggccatggatcagatgaccatgttcgaaggcctcggcaggtccaagggttgcaggggaagaaagtcatcgccatcgccactggctccctgcactgtgtgtgctgcacagaggatggtgaggtttatacatggggcgacaatgatgagggacaactgggagacggaaccaccaatgccatccagaggcctcggttggtagctgcccttcagggtaagaaggtcaaccgtgtggcctgtggctcagcacataccctcgcctggtcgaccagcaagcccgccagtgctggcaaactccctgcacaggtccccatggagtacaatcacctgcaggagatccccatcattgcgctgaggaaccgtctgctgctgctgcaccacctctccgagctcttctgcccctgcatccccatgttcgacctggaaggctcgctcgacgaaactggactcgggccttctgttgggttcgacactctccgaggaattctgatatcccagggaaaggaggcggctttccggaaagtagtacaagcaactatggtacgcgatcgtcagcatggccccgtcgtggagctgaaccgcatccaggtcaaacgatcaaggagcaaaggcgggctggccggccccgacggnaccaagtctgtctttgggcagatgtgtgctaagatgagctcgtttggtcccgacagcctcctccttcctcaccgtgtctggaaagtcaagtttgtgggtgaatctgtggatgactgtgggggcggctacagcgagtccatagctgagatctgtgaggagctgcagaacggactcacgcccctgctgatcgtgacacccaacgggagggatgagtctggggccaaccgagactgctacctgctcagcccggccgccagagcacccgtgcacagcagcatgttccgcttcctgggtgtgttgctgggcattgccatccgaaccgggagtcccctgagcctcaaccttgccgagcctgtctggaagcagctggctgggatgagcctcaccatcgcggacctcagtgaggttgataaggattttattcctggactcatgtacatccgagacaatgaagccacctcagaggagtttgaagccatgagcctgcccttcacagtgccaagtgccagtggccaggacattcagttgagctccaagcacacacacatcaccctggacaaccgcgcggagtacgtgcggctggcgataaactatagactccatgaatttgatgagcaggtggctgctgttcgggaaggaatggcccgcgttgtgcctgttcccctcctctctctgttcaccggctacgaactggagacgatggtgtgtggcagccctgacatcccgctgcaccttctcaagtcggtggccacctataaaggcatcgagccttccgcatcgctgatccagtggttctgggaggtgatggagtccttctccaacacagagcgctctcttttccttcgcttcgtctggggccggacgaggctgcccaggaccatcgccgacttccggggccgagacttcgtcatccaggtgttggataaatacaaccctccagaccacttcctccctgagtcctacacctgtttcttcttgctgaagctgcccaggtattcctgcaagcaggtgctggaggagaagctcaagtacgccatccacttctgcaagtccatagacacagatgactacgctcgcatcgcacttacaggagagccagccgccgacgacagcagcgacgattcagataacgaggatgtcgactcctttgcttcggactctacacaagattatttaacaggacactaagatggggaaacgtcctcgtgagatgagagcctgagccaggcagcagagcactcgctgctgtgtagactgtaggctgcctggtgtgtctgatgagaagcgtccgtcctcgagccaggcgggaggagggagtggagagactgactggccgtgatgggaatgacagtgagaaggtccgcctgtgcgcgtggaacactgtggacgctcgacttccaagggtcttctcacccgtaatgctgcattacatgtaggactgtgtttactaaagtgtgtaaatgtttatataaataccaaattgcagcatccccaaaatgaataaagcctttttacttgtgggtgcaa

SEQ ID NO: 711080 - DNA, 1412 bp, Homo sapiens
  misc_feature (75)..(75): n is a, c, g, or t
cgcgggttcagacctgccgagcgcccgccgccgcgggaggggcttgaggccggggcggggcggggccggggcggngcgtcccctcgtaggctccgggccgcgcattctcagcgctgggagccgccgcccccgcagctgccgccgccgccagggcccggactcggacgcgtggtagcctagagtcctggggagcttctgtccacctgtcctgcagaggagtcgtttccagcccggctgccccaggatgggtgagttcaacgagaagaagacaacatgtggcaccgtttgcctcaagtacctgctgtttacctacaattgctgcttctggctggctggcctggctgtcatggcagtgggcatctggacgctggccctcaagagtgactacatcagcctgctggcctcaggcacctacctggccacagcctacatcctggtggtggcgggcactgtcgtcatggtgactggggtcttgggctgctgcgccaccttcaaggagcgtcggaacctgctgcgcctgtacttcatcctgctcctcatcatctttctgctggagatcatcgctggtatcctcgcctacgcctactaccagcagctgaacacggagctcaaggagaacctgaaggacaccatgaccaagcgctaccaccagccgggccatgaggctgtgaccagcgctgtggaccagctgcagcaggagttccactgctgtggcagcaacaactcacaggactggcgagacagtgagtggatccgctcacaggaggccggtggccgtgtggtcccagacagctgctgcaagacggtggtggctctttgtggacagcgagaccatgcctccaacatctacaaggtggagggcggctgcatcaccataacctctggggaccccaacctcagaggcagcttcaagtgccttttgctgcgcaccaatgcccagcaggggaggtgaggggggctggcggggcgaagtttggggggtgttttgtggggctccccggacatactctctgcctggtggtcagatgcaggttggaaggggccttgctgagtggcgcaaggccgagcgttcccagcagggggagaaacccttcacaccccaggcccttcaggaactggggctttgccttgcagccacatggccccatcccagttggggaagccaggtgagctctgacccttgggcctgggcctctgcccctcccaacccagccgtcgtctccctcgacagcgcccctgctgtcttccccaccgcagtcaccaccacccgaaatgccacgtggtcactgtgcactgccctgttcatgtgcctctgcggggcagggccttcctggttttgtacactgctgtacccagatgcctacaaccatccctgccacatacaggtgctcaataaacacttgtagagcaga

SEQ ID NO: 711081 - DNA, 909 bp, Homo sapiens
ccgtggggcccagtatttgggccgccccccggaatatcttgtgggcgcaggtgttaacatttttgagagagtggcccccggccagatttctttgggggcacgcccacaaaagggttcccccactcttgcggaaaaacgtgcttgtgccttggtgcccgaggtttctaactgccttattggggcaatttcagccgggagccataacccctctggcctttgctttcgggtaaaattcccctgctgactgacgtgcggtggtccgcccacagacccacgcttgcggcgccgagtttctgtcttacgaccacgtcagccttgcccaccacggacccgtgcccggggtccaacccacaggatctccgcttttgcaaagcaaccaagacatcgctgaggttgcccgaacttctcaaaatcctcccgcgccaaactcttaacacgacggaatttgattgtactacatcacgcatcatacagacctttcttgttaaaaacaccccctgatacacttctgtgcaaaaaatatctataacaagtacttctctccgcgtcttttgcggctgtccccccccgttaatagcatacacccccttgggtgcccttattctttgccttaataaaggccaatccaaagaatccttctataactatggaagcagccttgtttcttcacatagaatttacatgaggcgtacatagaaaaattctcttcgctttctataattctgattgtccataatttcccactgatccctcattggtgtttaatataggcaaccccaccctcataactatacccctgaccccacctttatgcgtaagatacacttttccacccaaaatccccactcccaagatgggatccccagagggcattttccccaaaaaattccaaaacaacaccacataaca

SEQ ID NO: 711082 - DNA, 2529 bp, Homo sapiens
  misc_feature (1012)..(1012): n is a, c, g, or t
  misc_feature (2522)..(2522): n is a, c, g, or t
ccccctttgtcaacaacaacccggggacctctacacatggggcaaaggccgctacggccggctggggcacagcgacagtgaggaccagctgaagccgaagctggtggaggcgctgcagggccaccgtgtggttgacatcgcctgtggcagtggagatgcccagaccctctgcctcacagatgacgacactgtctggtcctggggggacggggactacggcaagctcggccggggaggcagcgatggctgtaaagtgcctatgaagattgattctcttactggtcttggagtagttaaagtggaatgcggatcccagttttctgttgcccttaccaaatctggagctgtttatacctggggcaaaggcgattatcacaggttgggccatggatcagatgaccatgttcgaaggcctcggcaggtccaagggttgcaggggaagaaagtcatcgccatcgccactggctccctgcactgtgtgtgctgcacagaggatggtgaggtttatacatggggcgacaatgatgagggacaactgggagacggaaccaccaatgccatccagaggcctcggttggtagctgcccttcagggtaagaaggtcaaccgtgtggcctgtggctcagcacataccctcgcctggtcgaccagcaagcccgccagtgctggcaaactccctgcacaggtccccatggagtacaatcacctgcaggagatccccatcattgcgctgaggaaccgtctgctgctgctgcaccacctctccgagctcttctgcccctgcatccccatgttcgacctggaaggctcgctcgacgaaactggactcgggccttctgttgggttcgacactctccgaggaattctgatatcccagggaaaggaggcggctttccggaaagtagtacaagcaactatggtacgcgatcgtcagcatggccccgtcgtggagctgaaccgcatccaggtcaaacgatcaaggagcaaaggcgggctggccggccccgacggnaccaagtctgtctttgggcagatgtgtgctaagatgagctcgtttggtcccgacagcctcctccttcctcaccgtgtctggaaagtcaagtttgtgggtgaatctgtggatgactgtgggggcggctacagcgagtccatagctgagatctgtgaggagctgcagaacggactcacgcccctgctgatcgtgacacccaacgggagggatgagtctggggccaaccgagactgctacctgctcagcccggccgccagagcacccgtgcacagcagcatgttccgcttcctgggtgtgttgctgggcattgccatccgaaccgggagtcccctgagcctcaaccttgccgagcctgtctggaagcagctggctgggatgagcctcaccatcgcggacctcagtgaggttgataaggattttattcctggactcatgtacatccgagacaatgaagccacctcagaggagtttgaagccatgagcctgcccttcacagtgccaagtgccagtggccaggacattcagttgagctccaagcacacacacatcaccctggacaaccgcgcggagtacgtgcggctggcgataaactatagactccatgaatttgatgagcaggtggctgctgttcgggaaggaatggcccgcgttgtgcctgttcccctcctctctctgttcaccggctacgaactggagacgatggtgtgtggcagccctgacatcccgctgcaccttctcaagtcggtggccacctataaaggcatcgagccttccgcatcgctgatccagtggttctgggaggtgatggagtccttctccaacacagagcgctctcttttccttcgcttcgtctggggccggacgaggctgcccaggaccatcgccgacttccggggccgagacttcgtcatccaggtgttggataaatacaaccctccagaccacttcctccctgagtcctacacctgtttcttcttgctgaagctgcccaggtattcctgcaagcaggtgctggaggagaagctcaagtacgccatccacttctgcaagtccatagacacagatgactacgctcgcatcgcacttacaggagagccagccgccgacgacagcagcgacgattcagataacgaggatgtcgactcctttgcttcggactctacacaagattatttaacaggacactaagatggggaaacgtcctcgtgagatgagagcctgagccaggcagcagagcactcgctgctgtgtagactgtaggctgcctggtgtgtctgatgagaagcgtccgtcctcgagccaggcgggaggagggagtggagagactgactggccgtgatgggaatgacagtgagaaggtccgcctgtgcgcgtggaacactgtggacgctcgacttccaagggtcttctcacccgtaatgctgcattacatgtaggactgtgtttactaaagtgtgtaaatgtttatataaataccaaattgcagcatccccatgaatgcctttcttgnggggtgc

SEQ ID NO: 711083 - DNA, 1179 bp, Homo sapiens
  misc_feature (75)..(75): n is a, c, g, or t
  misc_feature (1081)..(1081): n is a, c, g, or t
  misc_feature (1116)..(1118): n is a, c, g, or t
  misc_feature (1134)..(1134): n is a, c, g, or t
cgcgggttcagacctgccgagcgcccgccgccgcgggaggggcttgaggccggggcggggcggggccggggcggngcgtcccctcgtaggctccgggccgcgcattctcagcgctgggagccgccgcccccgcagctgccgccgccgccagggcccggactcggacgcgtggtagcctagagtcctggggagcttctgtccacctgtcctgcagaggagtcgtttccagcccggctgccccaggatgggtgagttcaacgagaagaagacaacatgtggcaccgtttgcctcaagtacctgctgtttacctacaattgctgcttctggctggctggcctggctgtcatggcagtgggcatctggacgctggccctcaagagtgactacatcagcctgctggcctcaggcacctacctggccacagcctacatcctggtggtggcgggcactgtcgtcatggtgactggggtcttgggctgctgcgccaccttcaaggagcgtcggaacctgctgcgcctgtacttcatcctgctcctcatcatctttctgctggagatcatcgctggtatcctcgcctacgcctactaccagcagctgaacacggagctcaaggagaacctgaaggacaccatgaccaagcgctaccaccagccgggccatgaggctgtgaccagcgctgtggaccagctgcagcaggagttccactgctgtggcagcaacaactcacaggactggcgagacagtgagtggatccgctcacaggaggccggtggccgtgtggtcccagacagctgctgcaagacggtggtggctctttgtggacagcgagaccatgcctccaacatctacaaggtggagggcggctgcatcaccaagttggagaccttcatccaggagcacctgagggtcattggggctgtggggatcggcattgcctgtgtgcaggtctttggcatgatcttcacgtgctgcctgtacaggagtctcaagctggagcatactgaacctgcttgggcttgctggtgtggcccaatatgggtggaccctgttccgggtgggtcccgtgaacccccgtggctnccatactctgggccccccagggtcagccttgcgcnnncccgggggggcggccncgggtggcccccccccaccgggcccgacccggcccggtgctcccc

SEQ ID NO: 711084 - DNA, 2885 bp, Homo sapiens
  misc_feature (1012)..(1012): n is a, c, g, or t
ccccctttgtcaacaacaacccggggacctctacacatggggcaaaggccgctacggccggctggggcacagcgacagtgaggaccagctgaagccgaagctggtggaggcgctgcagggccaccgtgtggttgacatcgcctgtggcagtggagatgcccagaccctctgcctcacagatgacgacactgtctggtcctggggggacggggactacggcaagctcggccggggaggcagcgatggctgtaaagtgcctatgaagattgattctcttactggtcttggagtagttaaagtggaatgcggatcccagttttctgttgcccttaccaaatctggagctgtttatacctggggcaaaggcgattatcacaggttgggccatggatcagatgaccatgttcgaaggcctcggcaggtccaagggttgcaggggaagaaagtcatcgccatcgccactggctccctgcactgtgtgtgctgcacagaggatggtgaggtttatacatggggcgacaatgatgagggacaactgggagacggaaccaccaatgccatccagaggcctcggttggtagctgcccttcagggtaagaaggtcaaccgtgtggcctgtggctcagcacataccctcgcctggtcgaccagcaagcccgccagtgctggcaaactccctgcacaggtccccatggagtacaatcacctgcaggagatccccatcattgcgctgaggaaccgtctgctgctgctgcaccacctctccgagctcttctgcccctgcatccccatgttcgacctggaaggctcgctcgacgaaactggactcgggccttctgttgggttcgacactctccgaggaattctgatatcccagggaaaggaggcggctttccggaaagtagtacaagcaactatggtacgcgatcgtcagcatggccccgtcgtggagctgaaccgcatccaggtcaaacgatcaaggagcaaaggcgggctggccggccccgacggnaccaagtctgtctttgggcagatgtgtgctaagatgagctcgtttggtcccgacagcctcctccttcctcaccgtgtctggaaagtcaagtttgtgggtgaatctgtggatgactgtgggggcggctacagcgagtccatagctgagatctgtgaggagctgcagaacggactcacgcccctgctgatcgtgacacccaacgggagggatgagtctggggccaaccgagactgctacctgctcagcccggccgccagagcacccgtgcacagcagcatgttccgcttcctgggtgtgttgctgggcattgccatccgaaccgggagtcccctgagcctcaaccttgccgagcctgtctggaagcagctggctgggatgagcctcaccatcgcggacctcagtgaggttgataaggattttattcctggactcatgtacatccgagacaatgaagccacctcagaggagtttgaagccatgagcctgcccttcacagtgccaagtgccagtggccaggacattcagttgagctccaagcacacacacatcaccctggacaaccgcgcggagtacgtgcggctggcgataaactatagactccatgaatttgatgagcaggtggctgctgttcgggaaggaatggcccgcgttgtgcctgttcccctcctctctctgttcaccggctacgaactggagacgatggtgtgtggcagccctgacatcccgctgcaccttctcaagtcggtggccacctataaaggcatcgagccttccgcatcgctgatccagtggttctgggaggtgatggagtccttctccaacacagagcgctctcttttccttcgcttcgtctggggccggacgaggctgcccaggaccatcgccgacttccggggccgagacttcgtcatccaggtgttggataaatacaaccctccagaccacttcctccctgagtcctacacctgtttcttcttgctgaagctgcccaggtattcctgcaagcaggtgctggaggagaagctcaagtacgccatccacttctgcaagtccatagacacagatgactacgctcgcatcgcacttacaggagagccagccgccgacgacagcagcgacgattcagataacgaggatgtcgactcctttgcttcggactctacacaagattatttaacaggacactaagatggggaaacgtcctcgtgagatgagagcctgagccaggcagcagagcactcgctgctgtgtagactgtaggctgcctggtgtgtctgatgagaagcgtccgtcctcgagccaggcgggaggagggagtggagagactgactggccgtgatgggaatgacagtgagaaggtccgcctgtgcgcgtggaacactgtggacgctcgacttccaagggtcttctcacccgtaatgctgcattacatgtaggactgtgtttactaaagtgtgtaaatgtttatataaataccaaattgcagcatccccaaaatgaataaagcctttttacttgtgggtgcaaaaaaaaaaaaaaaacaaaacacaaaacaaaacccaaaaaaaaaaacaaaaaaacaagaaccaacaacaaaccacaaaagaagagggggcgcaccaaaaatcacccgcgcggggcgcacacaacaaacaccacacaaggagtaaacgagcgacgcccaaaacaagaaacaaacagaacgaaggccatataaaaggcaggccgggaccaaaacacccgaggcaaccacgacgacaacccccccggggggaggaaaaaaggggacacacacccagagaaacaacccacgagagacacaagcagacatacgagaaagcgagcagcgggaaaacacaccgcaactagaagc

SEQ ID NO: 711085 - DNA, 1300 bp, Homo sapiens
  misc_feature (75)..(75): n is a, c, g, or t
  misc_feature (1202)..(1202): n is a, c, g, or t
  misc_feature (1237)..(1239): n is a, c, g, or t
  misc_feature (1255)..(1255): n is a, c, g, or t
cgcgggttcagacctgccgagcgcccgccgccgcgggaggggcttgaggccggggcggggcggggccggggcggngcgtcccctcgtaggctccgggccgcgcattctcagcgctgggagccgccgcccccgcagctgccgccgccgccagggcccggactcggacgcgtggtagcctagagtcctggggagcttctgtccacctgtcctgcagaggagtcgtttccagcccggctggcccataggctcctgccagcctgtgacgtgcggccccgggaatgctgtggggagcgggcaggctggcatgagctcaccggaggtacccgctagggcttcctcccccggccgccagcaggggccccaggatgggtgagttcaacgagaagaagacaacatgtggcaccgtttgcctcaagtacctgctgtttacctacaattgctgcttctggctggctggcctggctgtcatggcagtgggcatctggacgctggccctcaagagtgactacatcagcctgctggcctcaggcacctacctggccacagcctacatcctggtggtggcgggcactgtcgtcatggtgactggggtcttgggctgctgcgccaccttcaaggagcgtcggaacctgctgcgcctgtacttcatcctgctcctcatcatctttctgctggagatcatcgctggtatcctcgcctacgcctactaccagcagctgaacacggagctcaaggagaacctgaaggacaccatgaccaagcgctaccaccagccgggccatgaggctgtgaccagcgctgtggaccagctgcagcaggagttccactgctgtggcagcaacaactcacaggactggcgagacagtgagtggatccgctcacaggaggccggtggccgtgtggtcccagacagctgctgcaagacggtggtggctctttgtggacagcgagaccatgcctccaacatctacaaggtggagggcggctgcatcaccaagttggagaccttcatccaggagcacctgagggtcattggggctgtggggatcggcattgcctgtgtgcaggtctttggcatgatcttcacgtgctgcctgtacaggagtctcaagctggagcatactgaacctgcttgggcttgctggtgtggcccaatatgggtggaccctgttccgggtgggtcccgtgaacccccgtggctnccatactctgggccccccagggtcagccttgcgcnnncccgggggggcggccncgggtggcccccccccaccgggcccgacccggcccggtgctcccc

SEQ ID NO: 711086 - DNA, 254 bp, Homo sapiens
actctagcaggatcctgaaggtggtcgtaggtagggtatgtagtgagatattttgttgttgaagcttagggtgtagatctggtctggtcaatggcacttaggcacagtgatcagttggtagactcttgctcagttgtggctcccctatatttccttacagtagcagctgtgcttcttctcagtgccccgaaagcatgggctcctttcccacttaagtgttggctatagatcatggcttggcacttccaggatgc

SEQ ID NO: 711087 - DNA, 942 bp, Homo sapiens
  misc_feature (75)..(75): n is a, c, g, or t
cgcgggttcagacctgccgagcgcccgccgccgcgggaggggcttgaggccggggcggggcggggccggggcggngcgtcccctcgtaggctccgggccgcgcattctcagcgctgggagccgccgcccccgcagctgccgccgccgccagggcccggactcggacgcgtggggcccggactcggacgcgtggtatagcctagagtcctggggagcttctgtccacctgtcctgcagaggagtcgtttccagcccggctgccccaggatgggtgagttcaacgagaagaagacaacatgtggcaccgtttgcctcaagtacctgctgtttacctacaattgctgcttctggctggctgctgcagcaggagttccactgctgtggcagcaacaactcacaggactggcgagacagtgagtggatccgctcacaggaggccggtggccgtgtggtcccagacagctgctgcaagacggtggtggctctttgtggacagcgagaccatgcctccaacatctacaaggtggagggcggctgcatcaccaagttggagaccttcatccaggagcacctgagggtcattggggctgtggggatcggcattgcctgtgtgcaggtctttggcatgatcttcacgtgctgcctgtacaggagtctcaagctggagcactactgaccctgccttgggccttgctgctgctgcacccaactactgagctgagaccactgagtaccaggggctgggctccctgatgacacccaccctgtgccatcaccataacctctggggaccccaacctcagaggcagcttcaagtgccttttgctgcgcaccaatgcccagcaggggaggtagggggctgccgtccgactttggggggggttgtggggcttcccgacatactctttgctcgtggcagaatccggtggaagggccttctct

SEQ ID NO: 711088 - DNA, 203 bp, Homo sapiens
atcccattcaatcgcggtgaagccatcaaccagtccagatttagtgtaattcctaagggcccataggatttctggaatcataaagtcaccagctgcatttagaccctaacaggagagtcagcctgtcctttgaagctttgaagctaggacatgatttctcctctctagctatgaaaatcctagatcgctcaccgcaatctaat

SEQ ID NO: 711089 - DNA, 676 bp, Homo sapiens
  misc_feature (374)..(374): n is a, c, g, or t
ggccctggggttttggagtttccccccctgcgggggttgtggccaatttttgctcccgagggtcccccatttttgaaatttttggtttcccgccaaggtctgtgccttagtggccacttgtattggccccccccccccaaagcccttcctcgccgctgaggggtttttttttaggtgaacacgggcccggtttttccttccccggttctttaggttttccccccaagcctgtggccaggggttgggtttttggcccccccaagcagagggttcgggttcccgtttttgttttccaaccccaaaaaaagaaccctgtgtgggcccccgggttttcccccccggggggggaatttcccgccccccccaggggtggntttttcctttttaagggcattgtcccccttcggggcccccagggggcccgggggtttgggggtttttttccccccccggccccccaattttggggggttttttccccccctaaaaaggtggggccgggcccctttttttttttcccccccctccggggcccgtttttttgttttttagggggggggggttttttttccccgggaaccctttccttggtcccccccccccccgtcccccccgtttcccagtttagggcccaagggttttcagggggtttcccttaagggttttttgggcccca

SEQ ID NO: 711090 - DNA, 819 bp, Homo sapiens
gaaatttccatttatattttgtaggtgtgacaagaagtaagggggtgaatgattaaacagattgtcggggataatagattgactttatgagtaggattctgggctgaagaagtgggtataggaacatagcatgaaggagaagaagcctaaatttgaaagtgtttaactactaaggaactaactcatttatttttactatacatgagaatgaaggggtgtcaacatgggtgggtgaatatttagaaatgtggtactggaatatgtttaaagataggtgatgtgaacagattgttaattgaaaaatagccaatagtttgagacgagcaccagacgaaatacgaatacttgggtcagacctactttagcgttcctcttgtacaacaatatcaatcttcagaaaattcgtgagattagcatagcgtgaagatatgtcatagaaacactcagggtgctgcagcctttaaactcggcaatggcccgcatcaggtgaaaccagcatggtgtcctgacgaaaaagccgctgcatgacgctgggggagagaagaacagcgattcaaggatacaagccgataataaacgtaggcggcagagcaaacaaagtaaatcccacacgacccattggctggaccggacggaaactagaaacgcatcgcacctaaaacttaaagaaacctggacggaaacggggagctatatacttcaccaccaaatccacctttaccttaggagtaatcgccaaacgaacttgtttaatagaacccacggtgggcgaataaaaaatagtatataccccctccatggagcgtaactattttaaac

SEQ ID NO: 711091 - DNA, 126 bp, Homo sapiens
gccattgccctcctcacaacccgcactctttccctccgccaaagaccggtggttgaggcgtcacggcaagcgcgaagcgcgaagcacagcggaaacgggagcgccatggccgggagcgcgaggtcg

SEQ ID NO: 711092 - DNA, 140 bp, Homo sapiens
ctgtgaacctaaatgatgctctgcaacaataaagcctactacaaaaaaagttgaaacgatgccatgtaaagcagaatgctgtccaatacgcacaatctcttctccctaatagctactgttcttggccagagctacttgaa

SEQ ID NO: 711093 - DNA, 285 bp, Homo sapiens
  misc_feature (140)..(140): n is a, c, g, or t
  misc_feature (182)..(182): n is a, c, g, or t
aatagctgtataattacgctgttatgatgattaaggcccagtgatgatgcggtgaaaagctgtcttagctcaagaaaagtagggagacaaatgtagcaagcagaaagcaacacagatttgggcagactttgccagaatgnaagtctaacacttagattagcattctcttggccaagtaaganactgcagttgttgtgggtattaccctacaattaccatatgtattttttattagattaaactcagcattaaatatgcttgtataattacgctgttaatgatgca

SEQ ID NO: 711094 - DNA, 397 bp, Homo sapiens
  misc_feature (40)..(40): n is a, c, g, or t
  misc_feature (42)..(42): n is a, c, g, or t
  misc_feature (45)..(45): n is a, c, g, or t
  misc_feature (118)..(118): n is a, c, g, or t
  misc_feature (323)..(323): n is a, c, g, or t
  misc_feature (344)..(344): n is a, c, g, or t
  misc_feature (370)..(370): n is a, c, g, or t
  misc_feature (383)..(383): n is a, c, g, or t
  misc_feature (395)..(395): n is a, c, g, or t
tgtaaaaaaatattttttctatctgcctgctgaggagatncnacncttgaggtcaggatttcaagatcagcctggccaacatggtgaaacctgtctctactaaaaatacaaaaaattngccgggcgcggtggctcacacctgtaatcccagcactttgggaggctgaggcgggcagatcacgaggtcaggagatcgagaccatcctgggctaacacagtgaaaccccatctctacttaaaaatacaaaaaaaattagccgggcgtgggtgggcaggtgctgccagccccagctacttcggggaggcttgaggccaagaggatnggcgttgaacccggggaggcnggaagtttgccagttgaagccccagntttgcggccattncatttccagccntg

SEQ ID NO: 711095 - DNA, 405 bp, Homo sapiens
  misc_feature (349)..(349): n is a, c, g, or t
  misc_feature (369)..(369): n is a, c, g, or t
  misc_feature (379)..(379): n is a, c, g, or t
  misc_feature (384)..(384): n is a, c, g, or t
tcggctgcatgcactgagctatggcgttcgtgaccaggcaattcttgcgctccatgtcctcctcttcctctgcgtcggcggccgcaagaagatcctgatcaagcatgtgaccgtcatcggcggcgggctgatgggcgccggcatcgcgcaggtagctgcagcaactggccatacagtagtattggtggaccaaacggaagacatcctggcaaaatccaagaagggaattgaggagagtctaaagaggatggcaaagaagaagttcacagaaaaccctaaggctggagatgagtttgtggagaagaccctgagctgcctttcaaccagcaccgatgcggcatccgtggtncacagcaagacctggtggtngaggccattntgganaacctgaagctgaagaacgag

SEQ ID NO: 711096 - DNA, 174 bp, Homo sapiens
cggcgcaccgacgctgcttctgttacctccacgtggtccccggcctgatgccgcactgtcacgagggtcctttccgtcttcacagtggcgcagctcttggacaccggtttatggggggcggcggcggccacccgctttctggttccggttaacaaccgacgagcacaccctggg

SEQ ID NO: 711097 - DNA, 175 bp, Homo sapiens
aggtgactctagaggagccccttaatagctacccgcaatgtcttattgtgatgagtctcgactgtcaaactcttcttcagaggatcacccgggaaaacgaccgaggaccgaagattggctactgtacaggcagtcgagagaagtttattcatgcaaccaggaaaataagactggt

SEQ ID NO: 711098 - DNA, 336 bp, Homo sapiens
aatgactaaaccaacaattctcaaggactttactaaaaatttttgtagcataaactgtggcctctatcttaaacttctcgtaagacaacgtttctctccactgtgatgaccgtttacatgctcagcactcctgaatgcatgactatgtccaactcccacgaccatttgtaaatgcatcaaaatggcggcaaatgccgttacctggaccaaatagctgcagtttttgtggcaaatggcaaatgtgatatagaatatgactggcaaagagggatttctgagcgctgcccagaattaattcagcaaacgctgaacattactacctgccacatatagcat

SEQ ID NO: 711099 - DNA, 327 bp, Homo sapiens
tggatcccctcctttggccgttaattcgacggacaaatggtccccgtgcactgggccagctctgtgagggctattacccttccagcccgagggacgatcatggggtgccttcagccactcagaaatgctgatgactaaagcaatactgcaaagcacactcggcagcagcatcaggagggagatgaatcacagaaaatgagaggggactatgggaagttgcaaaggctcctccatcaatagatcggaaaagtcaaaacacaggaggacatccagtagccagagtctttgatcactatcttcatggtgggtcttaatgcttcacattga

SEQ ID NO: 711100 - DNA, 107 bp, Homo sapiens
cgtatgtatccgacatggttcacattcatcaagactaaagcatccctcgggagagaccctggctaccgacattcatgtgaagatgtctagtgaattccgtactcccc

SEQ ID NO: 711101 - DNA, 111 bp, Homo sapiens
cacgaggaggaaggccattttgctgcagatgatgtgaaggccatgcttcactagctgaaccaaaagtgggaggtactgaaagccaaagcttctcatcgtcggtaggacctg

SEQ ID NO: 711102 - DNA, 427 bp, Homo sapiens
tcccctctctctgctccatctgacctctcagccgtgttcacttcctgtggtttttcaaacatgatgggtatgcttccatctgagagccgtttgcaaagcctggcctggcgtggttactctctcacgttaagactttgcccaaacgttactttctcagtggggtctaccctaagctctttattgataatcccctctccaccccatgcgtatttaccattctccctttatcttgttccatttttttaacggcatttatcacctaacataccatataatttacttatttattaagttgtttgtctcgtgacactagagtttaaccttcacaaaggcagtgatttgtttgctttgctcgctaatctatcccaaccatcagaatgtgccaggccataggtaagcccttaataagcattgttaaaagaaggga

SEQ ID NO: 711103 - DNA, 242 bp, Homo sapiens
gttctgaatattctttggaaattttgagaatccaagtttttttctcatatgtgtgattattaaagggaaaaatgtggatagtactgggattggaatcacataggttttaattcatattaaggtttaaatgatgagtctaattatttgatcaccttttgggtatcatctagttcttaatatactccttttgtttttgttttgttttgttttgttttgtttttgagatggagtttttcctcgtg

SEQ ID NO: 711104 - DNA, 842 bp, Homo sapiens
ctctgctcctatggttataccagagactggggcagaagctgaccccatattctggaggaagatccgagtttgtgactgtccatccactcccctctataagtcactgtccccagactttgctccagatctgtcacttgcagcctggagctcagcctcaccagtataggtgaggcagagatggctgcagggccaacactggcagaacctggtgagttccttacggaagggtgaccagggacgtctgaagatgctcagtagcaccccacatactctagaggcacgacataccagctactctgaggacctgactcaatctcctcgagctggaagcaggtgttttcccagagacttggcccttgcatgacctcgctcactagggcccaacttacccacacatgctcttggaagagacaccccataccggtagcagcacccaagctgagggggctcccctttatagaccttcactggcccagccacttcactgtacataccagcaggagtacctatggcttggactgccttgctccacagtacggcgggaggcagaccatgacttgtcactgacgatgccctagacaaggccaaatgggtacatcacatgcccacatggctcttctgcccaaagcctccaacgtgtgtcaaggcgagtctcccagccgtgccagggaccgggatcttcggattgcaccccggtcgcatcacttaaaccctggcaatgggccatatgccctccgacactgtggtcactgagattgaggtctgtacactgttgcccaacacggattctgttgccctgtcgcagtctcagcaactctgtcaaggtcccagtgatcagagtc

SEQ ID NO: 711105 - DNA, 171 bp, Homo sapiens
cactgaacatgaccagtccttgaatatcgctagtatggtaaaatgcgagctaccgtttacccttgctaaggctgcctactgcagggtactactaccctttataccttacatacccagtacccccaccaacgatgaatagctgtgctgggtgatgcagggtcttgcctacca

SEQ ID NO: 711106 - DNA, 393 bp, Homo sapiens
cccagacccgcgagcgaggtgagatgccggtggccgtggggtccctacggacagtgctccagcgcaagctgcgttcgaccgtgatcaaaagtgggctatcggtgaatgggttgcgccggtggagtcactggcgggaccggggcgcgtcttcggtcaccttttcctgtctcaggtatcggaatgcggggtcgagagctgatgggcggcgattgggaagaaccagtggatgcagcagtggcaggcaccgtttggcatcattctatggaccattgggcatgggcatccgatgctaaccatggttgccaagtacatctgtcccttcccatcaatcccagcccatgtactaatagaagagcaaagtctttgagtacatagaaacacagagagaataaa

SEQ ID NO: 711107 - DNA, 136 bp, Homo sapiens
tcggggtcttgtctctctctgagctgctggtatcttacacccaccctcttttccagtccctagatacactgagctccggtgttgggacggacgcactcggcctgcgatgctctagcggacgcgtggcagaggcccg

SEQ ID NO: 711108 - DNA, 151 bp, Homo sapiens
ctaccacacccagctaattttttgattctggtggagatgaggtctcagtatgttcccaggctagggtgaactcctgagctcaagaaatcctcctgcctgagtctctgaaagtgctgggattacaggcgtgagccaccacacatggcctatg

SEQ ID NO: 711109 - DNA, 534 bp, Homo sapiens
aggatcccgtagagatcctaaccagacaatgtcattatcatggttaagtctgagtatggcagggcataaaaacatttgagaaaccacttctacatcacataccccctttatcccaccaatacttacatacttccagcgttcttgcagaaactggcagaaccagctcattcctcctggtatgggacacctcagagacttgaagatggggatatgatgaacattctgtttgccagttgtttgtggtgatgaacacaggaatataccggatgcgccaatctcaacacgatttctcctccaccctaaactccctctttcagagcagcccttggagatgctcttcctaagccctcattaagtccatctgtgaatttagctaagcctggcttgaacttgtctactatttcagcttgcataaactctcggggagggagtcccacatggaggctgcctgctgtacaactgcttgctttgatttattctaaacacaaactcctccagacttcgagggggcacctgttttactaggaggtctca

SEQ ID NO: 711110 - DNA, 279 bp, Homo sapiens
catgggagtgagggacctgggtcagccacagtgctgccctggtttgctgtgtggctttgagaccacgtcctgccctctctggtctggggttgcggggacgtggacgggtgggcacggggcgggcttgtgggccacagacaggacgcaggagggtcttcacttgaaaggcctcccgtcctcttctggctttattgatcttcatcccggtagtgggtactgcactggggagacagggcatgagctcaggccttcagtgccttaccgggtaccggagctcga

SEQ ID NO: 711111 - DNA, 498 bp, Homo sapiens
gtcgttcaactgccggccggtgccccacctgctgccggactcctcagagtagctgtccccacactctgacagcacatgctctgaatatgggcttattctgacagtacaccacatacatatgcagcctgagctcgtgtttgatgaatagctgagccagacaatcaggatctttcagacacctgttgtagctcttgcaagaaatagtactcggtgccactcatagataatgctggatattcccaaacacaatcctgtcatgtgactcgaagactctcggggaccccctgaagcagacatgtgtggccatataaccctccacaatcttgccccaagtcgtccacgtacaatattctctgtattctaccagttcactcaggacatacatactcctttccagagccttcttcttctgtacctcctcactctcaggggcttgggacaaagtctcctcttcaggtggctgcgtctaatctccagggccctccaacagtgtgaggt

SEQ ID NO: 711112 - DNA, 337 bp, Homo sapiens
gctgaaaaatgtctcttgttataatgtggtgctgcaatgcatactcacatgtctgtggtgatcctggtgtaaacaaacttactgagctagctgtccgtcgtataaaagtctagcacagccgggcatggtcgtcacgcctgtaatcccaacactttgggaggccgaggaggttggatcacctgaggtcaggagttcgagaccagcctgactaatatggtgaaaccccgtctctactaaaactacaaaaattagccagctttggtggcgggtgcctgtagtcccagctactcaggaggctgagacaggagaattgcttgaacccgggaggcagaagttg

SEQ ID NO: 711113 - DNA, 598 bp, Homo sapiens
  misc_feature (16)..(16): n is a, c, g, or t
  misc_feature (33)..(33): n is a, c, g, or t
  misc_feature (41)..(41): n is a, c, g, or t
  misc_feature (77)..(77): n is a, c, g, or t
  misc_feature (149)..(149): n is a, c, g, or t
  misc_feature (534)..(534): n is a, c, g, or t
  misc_feature (563)..(563): n is a, c, g, or t
tgccaaaattcaaccnaaatttttttcagtagntaaatggntaataaattgtggggcatgtagtcattattcagtgnttaaatcaagttatgacaaattatgagttatcaagctataagaagtcacagaggaacttaaatgaatgttantaaatgaagccagtctgaaaaggcttcatattaaatgatgccaactatatgacactgggatgtattctggaaaaggcaaaactatggagacagtaaaaagcagtgggtgggggaggggagggaggaataattggagcacagaagatttttagggcagcgaaactactctgtatgatactataattataaatacctgtcattgtacatatgtccaaccccctaaaatgtacaacaccaagagtgaaccctaatgtaaactgtggactttgagtgataatgatgtgtcagtgtagttcatcaattactgcaaatgtacttctttggtgggagatgttgaaaatggtggagactatgcatgtgtgggacaacaactatatgggaaatntctgtaccttttcaattttgctgtaaacntaaaattgctctaaaatataaagtctattaaaacc

SEQ ID NO: 711114 - DNA, 300 bp, Homo sapiens
  misc_feature (278)..(278): n is a, c, g, or t
ctctctttttttctaagacagagtctctgtcactcaggctggagtgcagtggtgtgatcttggctcactgtaacctccacctcctgggttcaagcaattcttctgcctcagctactcgggaggctgaggcaggagaatcacttgaacctgggaggcagaggttgcagtaacctgagatcataccactgcactccagcctgagcggcaacagagtgagactccgctcaaaaaaaatttgagggaagagagctaattaagacattcattatgtttagggngaaaaacaaaggccagcattct

SEQ ID NO: 711115 - DNA, 744 bp, Homo sapiens
  misc_feature (10)..(10): n is a, c, g, or t
  misc_feature (52)..(52): n is a, c, g, or t
cgtgaatgtntgtaggagagacccactcgacgacatacattgtctgggcttntagaaatttcatctaaaaacaaattcattgcttcttcaatggaagaacgtgtaggatgaaaccgattggcaatgaccgtctcttttagccatttccataaccgttcaatgggattcaaatccggcgaataaggcggtagataaatcaacaagatccgttcgttcttggaaagaaaatctcggatgagttgagaacgatggattttggcattgtcaacgaccatggcaatgacttggtctttgtaatgattcaccactaactgaagaaacgacaaaaaatcctcctgtttgcaaaaagaggagggcagcttagagatcatctaagctgtttaatatatccgcattttcttttgaagctattggataaatccccatttcgtctaatttctcccataacgaagacatggctttttcaggatctaaatagaattggcttcctcttacccgccagaaagtccagcctacacgttctaatactcgttgacgttcaatatcgtcttcccacttatcgagtccatgccattggtccccatcgcattccactgccaagcggcttctcattccttctacaacgagatcaattctttttccagctgatccgactttcacttgaggtattacacggtaacctcttgcagcaatcatacgatacacatcttcttctaattctgaatcaacagacattcagccgta

SEQ ID NO: 711116 - DNA, 1004 bp, Homo sapiens
gcaaatcccactctgcatcaactgaactgcaaatcagcgcacgttgaattaagctaatggcccattgactagaccagatgggacttaaacccacaaacacttagataaacagctaagcaccctaatcaactggcttcaatctacttctcccgccgccgtgaaaaaaggcgggagaagccccggcaggttagaaagctgcttcttcgatatttgcaattcaatatgaaaatctacctcgggagctggtaaaaagaggcctaaccccattggtctgttagatttacagtccaatgcttcacgtccagtcgcattttacctcacccccatctgatgttcgcctgaccgttgagtatactctagaaaccacaaagacgttggaacactatacggccgtattattcggcgcatgagctggagtcctaggcagcagctctaagcctccttattcgagccgagctgggccagctcaggcaaccttctaggtaacgatccacatcctacaacgttaatcgtcacagtccatgcatttgtaataatctttcttcatagttaatacccatcggataatcggaggtgtttggcaacttgactagttccctaataatcggtgtccccgaaatggcgttccccgcatataggaacatcagcttctgactgttacctccgtctctctactcctgctcgatttggtataagtgaaggccggagcatgaacggtgaccagctagcttccttagggggagctatccagcctggaagctccgtgacttaagcatctctcttacagctagaggtgtgctcacttaggccccaattttccacactttgttaaccctggtacacataaaagcccctttagaggtcataaaagattcctttccacaagggggaaaataaaagcaaccttccgcgggcgcacacacatcgtgggcgggtaatccacgccagctacatcgaaagttgttgttgtgctttctactttctattccaggtcttgttggggg

SEQ ID NO: 711117 - DNA, 110 bp, Homo sapiens
ggaagtatctgtgggcacaacgtccgcaggaagccttcaccttagtggtggcacatggtgcctgacctgccagggccctggtgtttgcctccttcgcttagttctccaga

SEQ ID NO: 711118 - DNA, 814 bp, Homo sapiens
  misc_feature (29)..(30): n is a, c, g, or t
  misc_feature (35)..(35): n is a, c, g, or t
cccggcgcgggaatgtccgggtggagctnnctgantcgcgcgctctgctccacccgacggggcctgtgtgtgctgggcctggctcgcggcgaaccgagatggcagagcagtcggacgaggccgtgaagtactacaccctagaggagattcagaagcacaaccacagcaagagcacctggctgatcctgcaccacaaggtgtacgatttgaccaaatttctggaagagcatcctggtggggaagaagttttaagggaacaagctggaggtgacgctactgagaactttgaggatgtcgggcactctacagatgccagggaaatgtccaaaacattcatcattggggagctccatccagatgacagaccaaagttaaacaagcctccagaaccttaaaggcggtgtttcaaggaaactcttatcactactattgattctagttccagttggtggaccaactgggtgatccctgccatctctgcagtggccgtcgccttgatgtatcgcctatacatggcagaggactgaacacctcctcagaagtcagcgcaggaagagcctgctttggacacgggagaaaagaagccattgctaactacttcaactgacagaaaccttcacttgaaaacaatgattttaatatatctctttctttttcttccgacattagaaacaaaacaaaaagaactgtcctttctgcgctcaaatttttcgagtgtgcctttttattcatctactttattttgatgtttccttaatgtgtaatttacttattataagcatgatcttttaaaaatatatttggcttttaaagt

SEQ ID NO: 711119 - DNA, 763 bp, Homo sapiens
ggcttgggtcctggcctcgtcggtgccgaatccgaggacttgtctacgagcagctcgggatctgaggtccgttgatagtacctatcactcctatcgaagtgagattcacgaatgcactactctgctagcaatgacgcatcctggcttgtattccttggcactcatcaacggtgtacgatttgaccaaatttctggaagagcatcctggtggggaagaagttttaagggaacaagctggaggtgacgctactgagaactttgaggatgtcgggcactctacagatgccagggaaatgtccaaaacattcatcattggggagctccatccagatgacagaccaaagttaaacaagcctccggaaactcttatcactactattgattctagttccagttggtggaccaactgggtgatccctgccatctctgcagtggccgtcgccttgatgtatcgcctatacatggcagaggactgaacacctcctcagaagtcagcgcaggaagagcctgctttggacacgggagaaaagaagccattgctaactacttcaactgacagaaaccttcacttgaaaacaatgattttaatatatctctttctttttcttccgacattagaaacaaaacaaaaagaactgtcctttctgcgctcaaatttttcgagtgtgcctttttattcatctactttattttgatgtttccttaatgtgtaatttacttattataagcatgatcttttaaaaatatatttggcttttaaagt

SEQ ID NO: 711120 - DNA, 325 bp, Homo sapiens
  misc_feature (16)..(16): n is a, c, g, or t
  misc_feature (41)..(41): n is a, c, g, or t
  misc_feature (201)..(201): n is a, c, g, or t
  misc_feature (228)..(228): n is a, c, g, or t
  misc_feature (254)..(254): n is a, c, g, or t
  misc_feature (309)..(309): n is a, c, g, or t
caaccctggaagtctngggctaacgccgccaaaagtgaaanacatgcgcttgttcccgtgggggttgaagcttaacagaagatccatcgcggctaaggcgctggtaactttcagggtcagagactctcacccaaccctccgtccggggattgctctgcggctccccccaattggttccagctgagtttggggtctggatgncgcggcagagcagatgagtgtctcgtnccttcctccagctccatctccttggntctattccgctgtctttagctgcgagccttgaccagcagcgtaagtctgggtcgnttgaggccggactgtg

SEQ ID NO: 711121 - DNA, 933 bp, Homo sapiens
  misc_feature (158)..(158): n is a, c, g, or t
gctgaaaagccatctttgcattgttcctcatccgacctccttggctcgctctgtagccgccgtcctgccgctacgcctccgtccgccgtccgctggactccgtgcagctttatcgccagagatccctgatactctcgctattcttattctaatccccntgacactcggagtcaccgtgtgctgccccaccattggtcagacgcatgccggtacacaccagtcatccgaaatcagccatgctaaggactttaaacggatgaacgaatggaaagttgtgtgaatgaaggctagtaacacaatggcaagacgacgtcccgctgcataacggggcaattgtctcatatgcatgcgtaacaatcgggcggcagccaggcatggcttgacaatctgacggtacgatctgagaaagagcgaatggaaggtgggtgatggtagcgagcgatagtatgtgaccgcaagaaagcgtgactaggctcgatgtccatgatgcacctgtcaggatgtacgcagacttccggcatcgccctgaaaatctggtggtactggtgccaaatgctggcaaccgccatgaaggaatgatgtaagcgtatcgacctgtaccgtgcgaacgtaagcgaaggaagacgactcgcatggaacgccggagggtgcgaagtgagctaacaatccggacgagcaaagcatcccttgggacttcccaaagttgccgtacccaagagaattgtgagctttcagccccaagaacgttgtggcttacgcagggagctttgcctaggccccctcctgtggggacgcattgaggtctaaattcccacagaggcaaagatacttgagcgctaccgatctttgcttagcgtttctcgcgaagataggttgattacacgggttcctaatgtcccgaccaagactgggttccgtaccaatgattcccgg

SEQ ID NO: 711122 - DNA, 136 bp, Homo sapiens
aggcgttgaatggccatacggagaaagctcgagtcatcactgaggaagagaagaatttcaaagccttcgctagtctccgtatggccattcaacgcctccgggccattcaacgcctccgggccattcaacgcctccg

SEQ ID NO: 711123 - DNA, 235 bp, Homo sapiens
aaggaggcaggctggacagggcggagcggagaaacggacttaaagtcaaaagctctaacatgagctttaaccgagcagtgtcacgcccagatatcataataaacggccagaaaggtaggcagaaatacaatcaaagcacggatcatcacttttttttttttttttaaagaaaaggggggtcccagcccagcacgggggcttacgcgggatatctcccagcagggggctcgggcgg

SEQ ID NO: 711124 - DNA, 470 bp, Homo sapiens
tacagatatgcagagatgatcaccaaataacatcccagacctcaaatatgagagggagacagtccaggggccacagagaagtgaaaaaaccagaagcagataataagagaattggactttctatttatttattttgagagagaatctcactttctatctgcagtgcccctcccagcaatctgcccaggaccacactttcccaccgacttatggtttctacaacactggaaaaagtaagatcaaggtggacaaccagcttccctaccacctggggttttctggcaggagatctatccctgcctcaactgacaggaagcatcaggaacacccaaagggagaaatatccctgaggacagccagaaacaaaggaagcagagaaggactaccatccccagtcctggaaactctgctccataaattagacaaaggagatgccatatcagagtggcagttcagcagcaccatgctgt

SEQ ID NO: 711125 - DNA, 537 bp, Homo sapiens
  misc_feature (73)..(73): n is a, c, g, or t
caataggatttcatcttgtcactagctggatgcatggcgcgatcttggctctctgcaaactctgcctcccggnatcaagcgattctcctgtctcagcctcctgagtagctgggattacagccaccatacccaactaatttttgtatttctagtagagacggggattcaccatgctggccaggctggtctcaaactccagacctcaggtgatccgcccacctcggcctcccaaagtgctgggattacaggcatgaaccaccgcgcccggcctggaaaaagtgattcttaatgcagaaacagaaaaccaaataccacacgttctcacttataagtgggagctaaacgtcaagtacacgtgggcataaagatgagaacaacagatagtgaatgcaagcggaggaagggctgaaaaactacctattaggtactatgcttactacctgggagacagattcatgtgtactccaaacctcagcattacacaatatgcccatataccaaacctgcacatgtaccccgaacctataataaaagttg

SEQ ID NO: 711126 - DNA, 437 bp, Homo sapiens
ctacaagtgagcgaccgacgagtacataatacatctctgattcttctcttggcaaagtccggctggcagaggttctaccagccaggtgtaccgagagagtgccacgagcatggaaaaactggctgtactcaaagcttgggcagaggtatatgtggtcgctataaatcttcaaaaggaagcagagtcgaaacccaaaagagcaatttaaaatactgcacgcatgatgataacgggtgtagtaccatcgatgaactgccaccagatagtttaataacactggtacaagctgaactaccaacactcagtcgcctgtggttagcaggcattccaaagattatgcactcttgaatttaccagccgaatattctagtacagctacctcccgatggtggagcaatttataaccctgaaactattgatacagatagacttcacta

SEQ ID NO: 711127 - DNA, 172 bp, Homo sapiens
gggcccccacccccccattttttcccccccaccccctccaatgctgttatcccggctgggtcctcacactcccccaacaatcccagggccctttttatccaggaattttcagttctcttcccccagggttttttaaagaaaaataaaagaattgtctttctgtctctctata

SEQ ID NO: 711128 - DNA, 210 bp, Homo sapiens
ggagacatgatagaattcgatcgcggtacccctgcgataagggccaaagtaggaggcgatttgccaagcataggagggtcatggacggggtttcccctacttctcaggctacagccttagcaccaaacctacgccaaaatccatttcattatcatattcatcggcgtaaatctaactttcttcccacaacactttcttggccttatcgag

SEQ ID NO: 711129 - DNA, 163 bp, Homo sapiens
ggaccagttctattcgtcactttctaaaacttatagtaggttactcgccttcttacttctctctgccttcgttctttcacttgcagtcccgtatattacttcttcctttagttcttcaatttgtttctgatctacacattcaaaagatgattcaaactcctca

SEQ ID NO: 711130 - DNA, 174 bp, Homo sapiens
ctgcgtatttcacaggatgtaggttgaaaaataaaacactctctaatcttcccccagacagaatctagtatacctttacaaccatccctgcaaagcttcagttgaaatatgagcaggcgattgtaggcacctttggacaggccagaggagacacctgtctctgtgcaggcagtt

SEQ ID NO: 711131 - DNA, 711 bp, Homo sapiens
  misc_feature (313)..(313): n is a, c, g, or t
  misc_feature (687)..(687): n is a, c, g, or t
cgggctcgcaccgacgaggtgcctgccggaggaagcgcgctccgaggcggaagatgaggacgacgaggactacgtgccctagtgtgcctggtgacggcgacgcgccggcaggctacttgctccagaagctgcgtgctagctgctagacatcaaggggaggctggcggcagtgtaaggagcgagcgagggagcgaggcggtgagtgagaccccggggtaggatgaggacgacattcgccgcgtaggactccttcgaggtgccagcgtcagtccttcctgggatcagctactcagcatccttgaaagaggaaggnctgacagtcgcgtcatatgaagtctgccaaggagaacgcagctcgaacggaaggaacgagaacgatcctgtgacgagtgtttgccgagggccgagtcattgatgtcaggtgaaggagatggctaaggtgcgttacgtagtgagtgagccccatcaaataccgagcgtggactccaccccggttagtgttctgagcatgtctgaagagcgagcatgagcgcgtgcggaagaaataccactatccgtggtggagggagactggtatccgcaccacccagtcaagagcttcaaggaaatgaggtttccgtgcagccatcctgatgaggcctgaagaagaaaggcgattcaccacccatgacccattcatgatcaggncatgcccacattctatctggccgg

SEQ ID NO: 711132 - DNA, 345 bp, Homo sapiens
  misc_feature (16)..(16): n is a, c, g, or t
  misc_feature (60)..(60): n is a, c, g, or t
cgcactctcgacttgnttaacctacaggacaagttctgtctttgccactgattgaactcntggctgtgcctcaaataaattaatcaacaaatatttattaattagtctgtgtaggctaagtacagtgctaagtgctatgacagatgtaaaaagttgtttcttttttttcttttctttttagagacagggtcttgctctgtcacctaggctggattgcagtgatgcaatcatggctcactgcagccttgaactcctgagctcaagtgaacctctcacttcagcctcccgagttgctgggactgcaggcatgcatcaccacacctggccaaccttgtctttttcatt

SEQ ID NO: 711133 - DNA, 486 bp, Homo sapiens
gacacgatgtatggtgatctatgaaacctccagacaccagaacacttctagcaaatcaggcgcagtatgtctacactcaggctgcagtatattcagcaaacttgattggacaaacgggcctgtgccttctctttcggtggagtgaaaaaattagagccagagaagccacatcgtaacttacagcaagcagcatgcagcatacctggctctttgcagattgcaactcggcatttaaaatgtgaatttggccatcagatgtctccattacttccagttaacgtggcatcataggcgtaacctaagtattaagtctaggataaaaactccaccagtgtctaccatctccaccatgaactctgtcaaagaagcttcatatacgtatattcccgctcttttctcttcatttccctgtcttctgcataatcatgccttcttgctaagtaattcaagcataagatcttggaataataaaatcacaatcttagg

SEQ ID NO: 711134 - DNA, 764 bp, Homo sapiens
  misc_feature (10)..(10): n is a, c, g, or t
  misc_feature (119)..(119): n is a, c, g, or t
  misc_feature (149)..(149): n is a, c, g, or t
  misc_feature (163)..(163): n is a, c, g, or t
  misc_feature (170)..(170): n is a, c, g, or t
  misc_feature (172)..(172): n is a, c, g, or t
  misc_feature (174)..(174): n is a, c, g, or t
  misc_feature (196)..(196): n is a, c, g, or t
  misc_feature (210)..(210): n is a, c, g, or t
  misc_feature (226)..(226): n is a, c, g, or t
  misc_feature (258)..(258): n is a, c, g, or t
  misc_feature (288)..(288): n is a, c, g, or t
  misc_feature (293)..(293): n is a, c, g, or t
tccaattaancccccaaaatttggggaaaagggaggtagaaaaaacccaggtaacttgaccaactttgaattaatccccccgagaggattaatatgagaatccagatccttttcaaaanctccatttcctaaggtaccggcattgaganctgcatatgtttcnctgatanangngttttcacatttgcgaatggtnccattctctctccngtactttttccagacnctttttgagggatgatgtttcgtgaagtatcngtatttttacctttttccttccttatcacntgacncaaaaagtagattaagagatgggtttgacaaggttcttcccttttacaaactgctgtctatgtggctgtatcttgtttttccactactgctaccacaactatattatcatgcaaatgctgtattcttctttggtggagataaagatttcttgagttttgttttaaaattaaagctaaagtatctgtattgcattaaatataatatgcacacagtgctttccgtggcactgcatacaatctgaggcctcctctctcagtttttatatagatggcgagaacctaagtttcagttgattttacaattgaaatgactaaaaaacaaagaagacaacattaaaacaatattgtttctaattgctgaggtttagctgtccagttctttttgcccctttgggaattcggcctggtttcattttactgccctagcccagagactttacttttaagaagtattaaaattctaaaattcta

SEQ ID NO: 711135 - DNA, 104 bp, Homo sapiens
gactagaggatccaagagagcactgaagagaaccgctgaagagactcaccgaagagattcattgaagagagcctccgaagagcctccgaagagcctccgaagag

SEQ ID NO: 711136 - DNA, 577 bp, Homo sapiens
  misc_feature (68)..(68): n is a, c, g, or t
  misc_feature (73)..(73): n is a, c, g, or t
  misc_feature (113)..(113): n is a, c, g, or t
  misc_feature (121)..(121): n is a, c, g, or t
  misc_feature (129)..(129): n is a, c, g, or t
  misc_feature (131)..(133): n is a, c, g, or t
  misc_feature (143)..(143): n is a, c, g, or t
  misc_feature (150)..(150): n is a, c, g, or t
  misc_feature (180)..(180): n is a, c, g, or t
  misc_feature (183)..(183): n is a, c, g, or t
  misc_feature (201)..(201): n is a, c, g, or t
  misc_feature (203)..(203): n is a, c, g, or t
  misc_feature (215)..(215): n is a, c, g, or t
  misc_feature (219)..(219): n is a, c, g, or t
  misc_feature (229)..(229): n is a, c, g, or t
  misc_feature (266)..(266): n is a, c, g, or t
  misc_feature (284)..(284): n is a, c, g, or t
  misc_feature (303)..(303): n is a, c, g, or t
  misc_feature (306)..(306): n is a, c, g, or t
  misc_feature (337)..(337): n is a, c, g, or t
  misc_feature (342)..(342): n is a, c, g, or t
  misc_feature (355)..(356): n is a, c, g, or t
  misc_feature (359)..(359): n is a, c, g, or t
  misc_feature (362)..(363): n is a, c, g, or t
  misc_feature (374)..(374): n is a, c, g, or t
  misc_feature (388)..(388): n is a, c, g, or t
  misc_feature (418)..(418): n is a, c, g, or t
  misc_feature (437)..(437): n is a, c, g, or t
  misc_feature (462)..(462): n is a, c, g, or t
  misc_feature (472)..(472): n is a, c, g, or t
  misc_feature (483)..(483): n is a, c, g, or t
  misc_feature (488)..(488): n is a, c, g, or t
  misc_feature (498)..(498): n is a, c, g, or t
  misc_feature (510)..(510): n is a, c, g, or t
  misc_feature (519)..(519): n is a, c, g, or t
  misc_feature (539)..(539): n is a, c, g, or t
  misc_feature (548)..(548): n is a, c, g, or t
cctccggaggggcctcattcccatcaatgtagaactcagctttcttggaaaaaaaaaaaaaggctccnggttnccaatggtggggtacacaaaggaactggctcccgttcggnctatttgnagtcatgncnnnaacatgatcnagggtgntaccctgggcctccgttacaaaattagggntgngtatgctcccttcccccncnacggtgtttccngganaaagggtttnttgttgaaaacccaaattttttgggggaaaaaaacanccccaggggtcggattanacccggggttgcttgttcngtntttccagccccaaaaaatgaatttatccctnaaggnaaagaccttgagnntgnttnnaattcaacggnttttattcagccanccccccccgtttaaaacaaggaaatccggnaatttttgggtgggatttntgttttttaaaaaagaactgttccnccgggtgatnaataaaatttnaaagnttcctgggtncaaaaaaaaaangcccgatgnccctttagacccccttgtgntattttaangatgccataaaaaacccttttttttggga

SEQ ID NO: 711137 - DNA, 734 bp, Homo sapiens
ataattttgtccccgagattctgggtctcgtatgctcgggaccacttcttttccccatcggccctgcgaagcgcccctgggggtttacagggcgtttcctcggaaatctccgcaatccacgcgttgtcggtgcccggcgttcttttcccggacgctgcctagaagccgcccctcgtgtcaaagagatcggggggtaaacccccgcagagctcctcgattagccccccccgcgccctccgcggaggttaaatcgtcgccctcgcgccgccctctgagggtgttccacaggcccctcgcggttgtttgccccccgacggagaagcctccctctctttggagggacctttcctcgggtaagctccacctcttctcaagaatggtggagaccggccaggcccttccaccactacgagaagggggtgggagccacccccggcactcactcgctcgccgcacaccgcgcgggtgggttccccgagaatggaggctgcgtgccgcagaaatatctgtttgctagagcatgtacactcattacgcagggcgatgaagacgagctctgctggtcccacggaagatttgtcgagagggcgccgtgactccaggatgatacgggcgtatgtgctcggaagatgactccctccgcatcctatatccggctgcttttctttagttgatcggctacgacgaccgtgggggccacaatgggaaaaaaacttttcggaaaacatagacag

SEQ ID NO: 711138 - DNA, 680 bp, Homo sapiens
  misc_feature (661)..(661): n is a, c, g, or t
ggcactgcctgcccagctgacacatgttcaacggtccgcagtaccctaaccgtgcacaaggttagcataatcacttgttccttcaatagggacctgtatgaatggctccatcgagggttcagctgctctcagtactgttaagccagtgatatattgacctgacccgtgaagtaggtcgggcatgacacgagcaagacgagaagaccctatggagctttaacttattaagtgcatactagtactctgacgatacccacaggtcctatactaccaaacctgctattaaaaatttcggttggggcgacctcaggagcagaacccaacctccagagcagtacatgctaagacttcaccagtcaaagcgaactactatactcaattgatccaataacttgacgcaacggcacaagttaccctagggataacagcgcaatccgtattctagagtccatatcaacaatagggtttacagacctcgatgttggatcaggacatccctgatcggtgcagccgcctatctattaaggttcgtttgcttacaagcgattaaagtcctacgtgatctgagctcagaccggtagtaatccaggtcggtttcatatctacattcaaattcctgcctgtacgaaaggacaagagtaataaggcctacttgcacaanttgctctcccccgtaaaga

SEQ ID NO: 711139 - DNA, 340 bp, Homo sapiens
acttattcttgggtagagtccattatgtcagtagcatgcaccataatctgactcccatcatgcgactaatcatatttcattgaccttgtctctcctacttcaagataaggacagtacattgctacattaccctagaaagtctgtgtgaggatctgccccttcagtcatgttattgcaaagtaataaaatgtcacctacagggagcctctgagcctactctagttcaaacgacttcctgagagaaaatacataagataaagggtcagcaacaacagagattaagacaattacagaaaataagcaagattcggagaggaagtataatggcacttttttcctc

SEQ ID NO: 711140 - DNA, 237 bp, Homo sapiens
actaagacgatgacggcctcaaatgttggaatcagtctcagtagtctgaagatctcaatctatttagtaaagttatctgtactgttttgtgagtaaggaggttcaatataacagaaaaagactgtgataaaaatacatggcatcatttaataatgaacataagatatctatgaatcaaatcaaatcaagtgttaaaattcctatatatgtatcaatgtataattacttcatcttata

SEQ ID NO: 711141 - DNA, 333 bp, Homo sapiens
cgccatgcacttaacccattgtgaccagcgttcgcgcaagcagatgcgccagttgtgcatacgagttctttccgctaggaccgacttctatgagccctgcttgatgagctggctgcctgagtctgcctttaccatctgatgagcggacacacacacaagcatgaaacagtggctggctaatatctggtttaaacattaaacacacacacacacacacagagagatactgttaaacacacatatgaagatgcagatgttttcctttttttaagtgtgaaaagtcatcatggggaggaccatgagtgcctaggaatgaccttgtgcttaatccat

SEQ ID NO: 711142 - DNA, 884 bp, Homo sapiens
ggcccactgcgcccccgtccccagcgcccccggtgcgacttcttgtttgcactctgccctcgtcgttcctcctccttccatttgacccaagaatcgagcaactgcagtgtgagtgatcagcgtctcggcgtaggcaggaccctagggagacccgtggtgtgcgccgccatgcgcgtcgggagtcttcggttgcgtgggggctggcttgctgtccagcctgtgtgggggccgtcccgtcccacaactccgcctgggcattcttggactcagaggccggggctctgcgtggtttgcttgggaggtggagctgcagcgtcagagcgcctgtgactgcgttccatgcggcctatgttcactactgcagtaatctctgggcgcctgggtaccagccacgtgcctgagctgttcagcgtacgtgaggtgtcccttctcgttgagatatttaaccttatggttctgctctagttctttctctctttgacagagagctgactggagtggtaaacgatggaatatgcagaaaacgctgcagactgtgggcctcgacgcttggcgagtccggaacgaaccctcggtctcccgtacatccacccgttgccctgggcccgtgttgctgtcaaacccccacggtacgagtcggtaaacccttcgtgtgagctccctcatggcagttaagcccacgcgtgcccgagaacaaccagaccgttgccaacccagggtttcaacccaagtaccacgtggccaatccgcagcgaatgaaggcgaacaacgcgagaacccctgaagcctggtcccttcatcctcgctgtggtaagcttagagaccatccctgataaacaccccttgagaacgaagagaaaggacgcccaaaggttggagccctg

SEQ ID NO: 711143 - DNA, 127 bp, Homo sapiens
tgaaactatagtgaagagtatgtaggctctttgactgtagagcgatatcgtcctttcatccatctgtccatcttacagagcactggactgatggtactaaactgccagtgcacacgactaaggtacc

SEQ ID NO: 711144 - DNA, 1168 bp, Homo sapiens
  misc_feature (172)..(172): n is a, c, g, or t
  misc_feature (225)..(225): n is a, c, g, or t
gatgccctcaggtacttggcacggagatccagtgggccaaatgcctatgtatccagacttccacatgccttcttgcgccatctctggtctctcgtggctgtcggctccgagacgacggacatacctgggtcacgtctgggcatctcagagctgcgtggcattgaatggatancagtgcacgtacgtgcgttggacgtgtgctgtgtcccgtgaattcgccgttgnctttcgtctgcaggcgggatccagggagtggagcgagtgcacgatcggtccgtggaggcgcgcggcacggagctactatccgcgcgcgcgctttcgtgcccgcgtccatagcctacgaccatcgcgaggcaacgaagcagggagaagaacggtgcccacagcactgcacacggaaccagccctgcgggctacttttaacgcctggtaacctatgagattgaagcgccatgccggagtagaacccaacgaaataacccgagtacgggtgctgcgtgggcaagccaatgagagctcctgtggagacagcgcaacctctgggcgacaaacatggacacggcgtgaggcaccccacaaagttggatgcccagggacagaacccatcgagggagggcccaagtgtacacgcgattgcaaatcgtgcaattaccaaatcgttaagttgcgcattgccttggacaagcgcggggtgttgccaaggcgcagttggctgtgtcttgccggcgcccacatatatactcacctgtcggattggcgagaagccaataagttgtgccccaccgttggcacgtgttccgtattacacgttggcttcttgcacaagtttgttaataccccaccactgtggggcgcacgcggattctccattgttggatacatcgtaggcgttggcatagttggaagccaattcgacacagttaacgcctttccgccatgggtcatatcggaacggagagctaggaaaaacgttcggtagcgaggctaccaccatttgcgccgcgccccaatgcttccttattggcgtcgcagcaatggaacattcccgtaatcagacttcagcgaattagccgagtagctctcagtacccgggttatacacgtgtggcgtgccaacacgtctttggactccgtaggaatagtccgcaacaaaattgacgtttccaccg

SEQ ID NO: 711145 - DNA, 149 bp, Homo sapiens
ctaattggttcttcgatgacgggtctctaacctgggacgcagagtgagagtcgcaccctttgtctccaacagtgaaggacacatgctcttgggattggtaaggccacgctgaacaccactggccatgtcgtcatcgaagaaccaattag

SEQ ID NO: 711146 - DNA, 128 bp, Homo sapiens
agtatgaagtgtgttgatacaagaagcacggacaatgtgtctatgtcgtaaacttaaaactggcatggtttaccttttgagtcaagagagcttgacagttaaaaaatgaaattagtcttttttctgta

SEQ ID NO: 711147 - DNA, 604 bp, Homo sapiens
aacccccgggctctggcctgggccggcgggggggtacattttcccccggggagcagcttggccccttggggcttttggggggccctatagaccaggtttggcacaaaagccggcgggggccggccggggatttcgggggattggggccccccgcgggccgccgcccttggggcgcttaaaaaaccaattttttttggacccttacaccttttttcttccgggcccggggatttaattttaaggaaaatggtttgccctggggccccctaaattaaaacccttggggggcccctatggggtataacccaacccatttggtttggtggagggaaatttttttttttgggagggggggggaacccctggtccggttttaaggttcgggtttttttaaaaaccgggggccccttaaacttttctttgggccccaggggtatgccaacccttggggccggggctcccccaatgaagggtgggtttttacggggggggggtttccccggggcttttggggggtttttgggaaaggtcccttttggttttttttggggggggtccttttttcccaataaaagggtccggggttcccctggtttttttccca

SEQ ID NO: 711148 - DNA, 367 bp, Homo sapiens
ggcaggcacttttcaaatttataataagggaaccagtgtaagggtagcagtccctccctaaagcatggggaggtaggggaggtatccattcataaaaggagtgtgggtgacgccgccctaaggattttcctttattttctctggagtaatactgtaccataggggtcttggctttaagtaataaaacatcaaagtgggtggggagggaacttggatcttccataagaatagggtggccaaattatgcggagggctctttactctcctttaagtcttggatatatatgagtgtgtataaagggaacgcatgagtggtcggccttttcctttccttcctgtggccccacccccttgaatggagcccagg

SEQ ID NO: 711149 - DNA, 537 bp, Homo sapiens
gtctatatggaggtgctaaggagtagggaaaaccagaatggggtatcacatcttgaactagggtgagaaccccttaatgaggtggccagaggcacttccaggagtctttaagacctgtttctccccacccacctaggggtatggtgggggcctcatgtttctttgccaccatgctgacagcattaacttttctgccttccagccaatcaacaatgctgacttcatagtgcctatagagattgaggggaccactcaccaggtgagctgccagccagaacacacccagcccagagggtggggggtctgccttctgcctcacctgtactggggtcctccacccatctcagggcttgggttctgtcagttgatcccttttctataactccagactcccctttttattggtatctttcactcaaggctttctcaccttaaaaaaagagtttcagccccatataccaaccagctgtctaccttgttttctctttgcaaccaagctgtttaaaagaatagttacattttatttaatactaataa

SEQ ID NO: 711150 - DNA, 125 bp, Homo sapiens
gggccagggcgtctggccttcaatgtcgtctcctccacggatgacccagactgagctgggctgagcccggctgacgaccaacggtcgcagatcacagacctacgaggtctgctatgcgactggtc

SEQ ID NO: 711151 - DNA, 368 bp, Homo sapiens
gtctgggggagatagttgcctccaggcttagacagaagcagtgggtttggatggggtgggaaaggcagtgagatggcactgaccacctccttctcttcctcagtcggatctgctccagtgtctccagtaccagttctaccagagatcccagggacctgcctgctcccagaggtgacagaggaagatcaaggaaggatctgtgtggtcattgacctcgatgaaacccttgtgcatagctcctttaagccaatcaacaatgctgacttcatagtgcctatagagattgaggggaccactcaccaggtgtatagggtggtatagggtggtatggtggtatagggtgtatagcataggatctgtagagtcga

SEQ ID NO: 711152 - DNA, 815 bp, Homo sapiens
gcgctgtctctccccctcggctcgtgagatggcccttcggcctgagggagcctcgcctgccgtccccgggacactgcgcagccccggcctctcggcctctgtcggacgaaacagttgggacccctgattttcgcaggatggcccaatggaatcagctacagcagccttgactacactggtacctggagcagctccatcagctctactagtgacagcttcccaagtggagctgtggcgagtttctggccccttggattgagagtcaagattgggcatatgcgagcaggaaagaatcacatgccacttatggtgtttcataagtctcctgggagcagattgaccatgcagtatagccgcgtacctgcaagagtcgaatgtgctctatcagtcgacaatgctatcgaatgaagtcaagcagtttcttcagagcaaggtatcttgaagacagccaatggatgattgcccggattgtggcccggatgcctgtgggaacgaatcacggcctttctacatgacttgcatgccactgtcggcccagaaaatggcgggccaggccaaacagcccatcagtcagccgtggtgacggagaagcacgcagatgctggagcagcaccttcaggatgtccggaagagagtgcaggatctagaacagaaacatgaaagtggtagagaatctccagggatgactttcgatttcaactatcagaaccctcaagagtcgcggagacattgcaagatctgaattggaaaacaaccacgtcagtgaccaggcagaagatgcgcaagtggaacagatgctccttgcgctggacctg

SEQ ID NO: 711153 - DNA, 3257 bp, Homo sapiens
  misc_feature (477)..(477): n is a, c, g, or t
  misc_feature (545)..(545): n is a, c, g, or t
  misc_feature (2250)..(2250): n is a, c, g, or t
  misc_feature (2575)..(2575): n is a, c, g, or t
  misc_feature (2639)..(2639): n is a, c, g, or t
  misc_feature (2686)..(2686): n is a, c, g, or t
  misc_feature (2698)..(2698): n is a, c, g, or t
  misc_feature (2732)..(2732): n is a, c, g, or t
  misc_feature (2746)..(2747): n is a, c, g, or t
  misc_feature (2767)..(2767): n is a, c, g, or t
  misc_feature (2778)..(2779): n is a, c, g, or t
  misc_feature (2792)..(2792): n is a, c, g, or t
  misc_feature (2798)..(2798): n is a, c, g, or t
  misc_feature (2810)..(2810): n is a, c, g, or t
  misc_feature (2821)..(2821): n is a, c, g, or t
  misc_feature (2837)..(2837): n is a, c, g, or t
  misc_feature (2840)..(2840): n is a, c, g, or t
  misc_feature (2847)..(2848): n is a, c, g, or t
  misc_feature (2871)..(2871): n is a, c, g, or t
  misc_feature (2873)..(2873): n is a, c, g, or t
gtctgggggagatagttgcctccaggcttagacagaagcagtgggtttggatggggtgggaaaggcagtgagatggcactgaccacctccttctcttcctcagtcggatctgctccagtgtctccagtaccagttctaccaggtacgtgactctggcctggtaagtactcagaagccaggatcctgtgatccctgccagctccacgggcagggtgatgtgcatagtccttggtgcctagccagccacctccctgacctgggaagccatttgttccccatacttgttgagggcctgctatgtgcaaggcattagattttaggggacagctggtgctccatgccctcttcccacagctgctgtccatcccacacctgccctggccaccacctccaatgtccagatcacttaatagtcccactgggaggctgaaaccaaggaaacaactccacctcctttcttcctggcctttaagtggngcctatcctgggttggtgattgtgtctccacaaacaacccagctcttcccataattatgccaagggtnacaattgggctttcttggtaggcagatctcagcaacctggcttggttttagatcccagggacctgcctgctcccagaggtgacagaggaagatcaaggaaggatctgtgtggtcattgacctcgatgaaacccttgtgcatagctcctttaagccaatcaacaatgctgacttcatagtgcctatagagattgaggggaccactcaccaggtgtatgtgctcaagaggccttatgtggatgagttcctgagacgcatgggggaactctttgaatgtgttctcttcactgccagcctggccaagtatgccgaccctgtgacagacctgctggaccggtgtggggtgttccgggcccgcctattccgtgagtcttgcgtgttccaccagggctgctacgtcaaggacctcagccgcctggggagggacctgagaaagaccctcatcctggacaactcgcctgcttcttacatattccaccccgagaatgcagtgcctgtgcagtcctggtttgatgacatggcagacactgagttgctgaacctgatcccaatctttgaggagctgagcggagcagaggacgtctacaccagccttgggcagctgcgggccccttagcctgccctgcttccaagcgacggccatcccagtaggggactttcccacactgtgcctttacgatcagcgtgacagagtagaagctggagtgcctcaccacacggcccggaaacagcgggaagtaactggaaagagctttaggacagcttagatgccgagtgggcgaatgccagaccaatgatacccagagctacctgccgccaacttgttgagatgtgtgtttgactgtgagagagtgtgtgtttgtgtgtgtgttttgccatgaactgtggccccagtgtatagtgtttcagtgggggagaagctgaaagaccaagactcttcccaagttagcttgtctcctctcctgtcaccctaagagccactgagttgtgtagggatgaagactattgaagactccattgccaaaccatggcctttcctcagtgttgtaaggcctatgccaaggataaaggaagggtatgcctttgggtactccaggcacacacctttctgaaatccttctccagccagctgctgcagacaaaagatcacatttctgggaagatgagaacttgtttccagaccagcatccagtggccatcaggtcttgtggcccaaaggctatgcttgcctccggctgagtgcctgggataggccttttctatgtctccccaaggctggggtgctgagcctgccttcctcaccacctagccatagtctcaaacctgtggggaaggaggttttctccctgcccgggaagaggacagataactgatttccgttcttttgactgtgttttaaaattctctttctaaacacagagtgttgggcctggtttgtttctgacaaagttacagtcctgggcctgtaatgaatgtcggcggcgctggggttgcagggaaaagacaaatcctcaaagcgtggacgtgtgtccccatggcttgtggatcagctaagctcgggatcatttccataagtctgcttttcagggattctctgctggtgctggtgcaaggacttctgttccaaaggctgggaaaaactaagctgtcccagcccctcccatttcttgggcagggctcttttcctgttgtgtcttcccccaggncctgtcctgtaccgagctctgtctgttccagccttcatccttcctggctgttgcttttcctcttaagggcctcagaactcttgctcttcctgggctgagggggaatgagtgttcttgccatttgccagcctaatgcgcatgctttctgcctctggtaacaggagtgagtgagcccctcagacctgcactctgggtgtctcctgctttcaaaggttcttaatagtgaatgctttaaaattaaagtcatcacgaaatggaagttttcccagggtggaaaataagaggaagtgctgctgtaatgggagcacaaggggcctcccaaaanggagccccacctcagcatcactgccttaatcgtggctccctggggtgggtggggttctctcctncctccctccctcctcctggggtgggagggcgctcctgttcccatctntgtgttccctgnaggcaggtatcacaaagcattgtgaatgctttangtgcagggacaccnnccactcaggactcttccccntcatcccttcnntgccacaccctanatccancctcaggaactnacaagtttganaaaagcaggtggtgancancagcttnntgctctcagcggttggctggctngnattttctctagcgtgtggtgcaccttcccttctgtcccaaggttataaggcttgtctttctctttgaatcctcaagtgaccagagtccccagcaaatcatgtggcatattccggccagcatcaatcccacggtgctatggggttccgggggacctaaaggggcgaggcccagtggcaagcagaatatctgactgaaggaaagagggcaagaactaagacaggggggtagcaccaagcggcaggggtcctatagggagggtcaaaggcccaggggacgagaaattggaagagcacggtggtaaaaaagacagaggaagagagactgaagaacgagagccatcaagcggcaagagggaaaaaggacgcacgacagggcatgagcaa

SEQ ID NO: 711154 - DNA, 1214 bp, Homo sapiens
aaagagaaagaacaattcaagaaggaagaaaaagctaaagatgagaaatttaagaccactgtccccacacgcagactcaaacatccaacgtcaagcacacagggcacacagagcagaaggcagcccatccgagcagcaaagagcatcatagcaacaggaacatgcaaatcaaaggaaaatgttaaaggcaggcagcacaaaaacaccagtttctgggtccttgcaaatcacctgttcccagatcagatattccagagcctgaaagggaacaaaaacgccgcaaaattgatactcacccttctccatcacattcctccacagctaaaggacagtctcatcgaactcaaggaatcttcagcaaagctctacattgaatcatactcctccaccactgtccaagagtaaggagagagcaaatggacaagcacagatttggcacaagtcaagggaacagatccagcaaaacagagagaaaaaagatgcacaaaggacaggaaagagcggaccacagggatcactcaaacaacgaccgtgaagtgccaccggacttaaccaagcagacgtacaagaggcagaatggaccaatgggggtctcacaaccataaacgtgagcagtcctggtgcactctccttatccaaatgagcacacgacacatgtaaaacaatacgtcaaaatcttcaggcaacacaaaagggcagtgattcatttcacctctgagaagactggataaaatctccaccgagtgagccaacacaggagttccaggcaatgaataaagaacacgatggcacaagcacagcgcaaacagggaccgcaaccaagagccaaaggcaccacgcagaaacaccataagcctcggacaagcgcacaataggaaaatatccaacaagtgaactcggccggaacggacgtgacaccgaactgtaatatacgtgccaaatgccgcacctaccaacgcgaagggaccactgaaagatccaaacaagaaacgacaagcaggtacgagcccagacgacaccccacgggcaaccggacacacgacaaacccgccacacacaacgagactaagaccagagaaaaagaagcgaccacacacccgaagaaagaagcaaacaaacacaacacgcagaacacacgcctacagacacaaacgcaccaaaatcaagacacaaggaaatctcacatagcgaccaaacactgccaccacaccagt

SEQ ID NO: 711155 - DNA, 2389 bp, Homo sapiens
  misc_feature (477)..(477): n is a, c, g, or t
  misc_feature (545)..(545): n is a, c, g, or t
gtctgggggagatagttgcctccaggcttagacagaagcagtgggtttggatggggtgggaaaggcagtgagatggcactgaccacctccttctcttcctcagtcggatctgctccagtgtctccagtaccagttctaccaggtacgtgactctggcctggtaagtactcagaagccaggatcctgtgatccctgccagctccacgggcagggtgatgtgcatagtccttggtgcctagccagccacctccctgacctgggaagccatttgttccccatacttgttgagggcctgctatgtgcaaggcattagattttaggggacagctggtgctccatgccctcttcccacagctgctgtccatcccacacctgccctggccaccacctccaatgtccagatcacttaatagtcccactgggaggctgaaaccaaggaaacaactccacctcctttcttcctggcctttaagtggngcctatcctgggttggtgattgtgtctccacaaacaacccagctcttcccataattatgccaagggtnacaattgggctttcttggtaggcagatctcagcaacctggcttggttttagatcccagggacctgcctgctcccagaggtgacagaggaagatcaaggaaggatctgtgtggtcattgacctcgatgaaacccttgtgcatagctcctttaagccaatcaacaatgctgacttcatagtgcctatagagattgaggggaccactcaccaggtgtatgtgctcaagaggccttatgtggatgagttcctgagacgcatgggggaactctttgaatgtgttctcttcactgccagcctggccaagtatgccgaccctgtgacagacctgctggaccggtgtggggtgttccgggcccgcctattccgtgagtcttgcgtgttccaccagggctgctacgtcaaggacctcagccgcctggggagggacctgagaaagaccctcatcctggacaactcgcctgcttcttacatattccaccccgagaatgcagtgcctgtgcagtcctggtttgatgacatggcagacactgagttgctgaacctgatcccaatctttgaggagctgagcggagcagaggacgtctacaccagccttgggcagctgcgggccccttagcctgccctgcttccaagcgacggccatcccagtaggggactttcccacactgtgcctttacgatcagcgtgacagagtagaagctggagtgcctcaccacacggcccggaaacagcgggaagtaactggaaagagctttaggacagcttagatgccgagtgggcgaatgccagaccaatgatacccagagctacctgccgccaacttgttgagatgtgtgtttgactgtgagagagtgtgtgtttgtgtgtgtgttttgccatgaactgtggccccagtgtatagtgtttcagtgggggagaagctgaaagaccaagactcttcccaagttagcttgtctcctctcctgtcaccctaagagccactgagttgtgtagggatgaagactattgaagactccattgccaaaccatggcctttcctcagtgttgtaaggcctatgccaaggataaaggaagggtatgcctttgggtactccaggcacacacctttctgaaatccttctccagccagctgctgcagacaaaagatcacatttctgggaagatgagaacttgtttccagaccagcatccagtggccatcaggtcttgtggcccaaaggctatgcttgcctccggctgagtgcctgggataggccttttctatgtctccccaaggctggggtgctgagcctgccttcctcaccacctagccatagtctcaaacctgtggggaaggaggttttctccctgcccgggaagaggacagataactgatttccgttcttttgactgtgttttaaaattctctttctaaacacagagtgttgggcctggtttgtttctgacaaagttacagtcctgggcctgtaatgaatgtcggcggcgctggggttgcagggaaaagacaaatcctcaaagcgtggacgtgtgtccccatggcttgtggatcagctaagctcgggatcatttccataagtctgcttttcagggattctctgctggtgctggtgcaaggacttctgttccaaaggctgggaaaaactaagctgtcccagcccctcccatttcttgggcaggatgggtatttattctatttggtgttgagcttccaggtctgttgcttagtgttaccagtttttgtaaataaagatttatcagaacacattcactctggttgtttacatattatgtatgtctggttttgtactataatgacagagttgagtagttgcgacagaaaccgtat

SEQ ID NO: 711156 - DNA, 2725 bp, Homo sapiens
  misc_feature (1718)..(1718): n is a, c, g, or t
  misc_feature (2043)..(2043): n is a, c, g, or t
  misc_feature (2107)..(2107): n is a, c, g, or t
  misc_feature (2154)..(2154): n is a, c, g, or t
  misc_feature (2166)..(2166): n is a, c, g, or t
  misc_feature (2200)..(2200): n is a, c, g, or t
  misc_feature (2214)..(2215): n is a, c, g, or t
  misc_feature (2235)..(2235): n is a, c, g, or t
  misc_feature (2246)..(2247): n is a, c, g, or t
  misc_feature (2260)..(2260): n is a, c, g, or t
  misc_feature (2266)..(2266): n is a, c, g, or t
  misc_feature (2278)..(2278): n is a, c, g, or t
  misc_feature (2289)..(2289): n is a, c, g, or t
  misc_feature (2305)..(2305): n is a, c, g, or t
  misc_feature (2308)..(2308): n is a, c, g, or t
  misc_feature (2315)..(2316): n is a, c, g, or t
  misc_feature (2339)..(2339): n is a, c, g, or t
  misc_feature (2341)..(2341): n is a, c, g, or t
ggttgaggttgggaccactgatccattggaagcctggtgaggggtacagccagttctccgggtctgtggggtctcaggggccgcaggcttccagccaggtagcccaggaggctgggctgcaggggttgagagctccttgctgctgtgtaactggtgaaggtacccagtactgcaaaccttcatcacagggatgcctccaacaggctgctctgctcttcctcaggtgtatgtgctcaagaggccttatgtggatgagttcctgagacgcatgggggaactctttgaatgtgttctcttcactgccagcctggccaagtatgccgaccctgtgacagacctgctggaccggtgtggggtgttccgggcccgcctattccgtgagtcttgcgtgttccaccagggctgctacgtcaaggacctcagccgcctggggagggacctgagaaagaccctcatcctggacaactcgcctgcttcttacatattccaccccgagaatgcagtgcctgtgcagtcctggtttgatgacatggcagacactgagttgctgaacctgatcccaatctttgaggagctgagcggagcagaggacgtctacaccagccttgggcagctgcgggccccttagcctgccctgcttccaagcgacggccatcccagtaggggactttcccacactgtgcctttacgatcagcgtgacagagtagaagctggagtgcctcaccacacggcccggaaacagcgggaagtaactggaaagagctttaggacagcttagatgccgagtgggcgaatgccagaccaatgatacccagagctacctgccgccaacttgttgagatgtgtgtttgactgtgagagagtgtgtgtttgtgtgtgtgttttgccatgaactgtggccccagtgtatagtgtttcagtgggggagaagctgaaagaccaagactcttcccaagttagcttgtctcctctcctgtcaccctaagagccactgagttgtgtagggatgaagactattgaagactccattgccaaaccatggcctttcctcagtgttgtaaggcctatgccaaggataaaggaagggtatgcctttgggtactccaggcacacacctttctgaaatccttctccagccagctgctgcagacaaaagatcacatttctgggaagatgagaacttgtttccagaccagcatccagtggccatcaggtcttgtggcccaaaggctatgcttgcctccggctgagtgcctgggataggccttttctatgtctccccaaggctggggtgctgagcctgccttcctcaccacctagccatagtctcaaacctgtggggaaggaggttttctccctgcccgggaagaggacagataactgatttccgttcttttgactgtgttttaaaattctctttctaaacacagagtgttgggcctggtttgtttctgacaaagttacagtcctgggcctgtaatgaatgtcggcggcgctggggttgcagggaaaagacaaatcctcaaagcgtggacgtgtgtccccatggcttgtggatcagctaagctcgggatcatttccataagtctgcttttcagggattctctgctggtgctggtgcaaggacttctgttccaaaggctgggaaaaactaagctgtcccagcccctcccatttcttgggcagggctcttttcctgttgtgtcttcccccaggncctgtcctgtaccgagctctgtctgttccagccttcatccttcctggctgttgcttttcctcttaagggcctcagaactcttgctcttcctgggctgagggggaatgagtgttcttgccatttgccagcctaatgcgcatgctttctgcctctggtaacaggagtgagtgagcccctcagacctgcactctgggtgtctcctgctttcaaaggttcttaatagtgaatgctttaaaattaaagtcatcacgaaatggaagttttcccagggtggaaaataagaggaagtgctgctgtaatgggagcacaaggggcctcccaaaanggagccccacctcagcatcactgccttaatcgtggctccctggggtgggtggggttctctcctncctccctccctcctcctggggtgggagggcgctcctgttcccatctntgtgttccctgnaggcaggtatcacaaagcattgtgaatgctttangtgcagggacaccnnccactcaggactcttccccntcatcccttcnntgccacaccctanatccancctcaggaactnacaagtttganaaaagcaggtggtgancancagcttnntgctctcagcggttggctggctngnattttctctagcgtgtggtgcaccttcccttctgtcccaaggttataaggcttgtctttctctttgaatcctcaagtgaccagagtccccagcaaatcatgtggcatattccggccagcatcaatcccacggtgctatggggttccgggggacctaaaggggcgaggcccagtggcaagcagaatatctgactgaaggaaagagggcaagaactaagacaggggggtagcaccaagcggcaggggtcctatagggagggtcaaaggcccaggggacgagaaattggaagagcacggtggtaaaaaagacagaggaagagagactgaagaacgagagccatcaagcggcaagagggaaaaaggacgcacgacagggcatgagcaa

SEQ ID NO: 711157 - DNA, 1123 bp, Homo sapiens
agcggtctctgcggcgcggtcatcggacacacgcggaggtgtcctctgttggccatggccgagtacctgattagtgggggcacgctcctacggtgccagacggaacggacatcagctagccaatcagcctagtcgtccttcgaacctggcggcagacgggccttcgagccgtacaactggacttatcgtcagttctcccatgggtacactcagactttcagcgtgcaggaccacggctggatcctgaacattctgcatctgacctagagaaaacatcgacctcttgtaagaccccgcatctgggctttatacctcgtaccgcattgggaaacaacgaagtgcaacctgtaagggcattggccgaatgggactcccattagcctacaactagggcctttcgtattatcacgtggcagggatcatttagagccctttccaattccacgagcctagcaagacatgtttaccaccacatgggaaactatgcgcaaaggggctcatactgcatagagtttccgaagaacacagggcttgtaataggaaaagagttacgttttagaaccaaaggaggggaattttcgatattctagccgatgtaaacccgcattggtttggagggtccccattaccatatcgaacgccaccaacgacgttggaagtacctagcaggattagacccggcgcagaacctggttgaatatccaagaaagtggcccctacaagtggactcctggcgacagaattagaggttatcaataccattggtcccgacggataagtacaccgcaacaattccgatccacggaaacctagccaacgcggccgctgggaattgccgctcggaatgcccccaggcttttcggtcgcatgggagtcagaaattccaggatactaaccctttgccccaggagggcagttcgaaacttttcggtaatcttttatacccgtttccgggacatatggcagaacgcggcaagcgggtacagccgagattggaatctctaagggttaaatccctattggtagacacacggtaaggaacattaagacttgggaacctcaacgaagaagcgaggcgacaaattggagacactattggtggaacaggcgtttgaagtccccc

SEQ ID NO: 711158 - DNA, 117 bp, Homo sapiens
gttctcctatctctccagtcctagctgctgggcatcactatactactaacagaacgcgaacctcaacaacaccttcttcgacccgcccgagaggaggaccccattctataccacaac

SEQ ID NO: 711159 - DNA, 156 bp, Homo sapiens
agaataagaattggggtgccctgcctgccattaggagtgccttcattggatttacgcctggtttctgaaacaacagtgtcattattttaacctagaaaacatttcttcaccttaaactgcaggtttaattctaccacagcccaggaaaaataggga

SEQ ID NO: 711160 - DNA, 3173 bp, Homo sapiens
  misc_feature (477)..(477): n is a, c, g, or t
  misc_feature (545)..(545): n is a, c, g, or t
  misc_feature (2166)..(2166): n is a, c, g, or t
  misc_feature (2491)..(2491): n is a, c, g, or t
  misc_feature (2555)..(2555): n is a, c, g, or t
  misc_feature (2602)..(2602): n is a, c, g, or t
  misc_feature (2614)..(2614): n is a, c, g, or t
  misc_feature (2648)..(2648): n is a, c, g, or t
  misc_feature (2662)..(2663): n is a, c, g, or t
  misc_feature (2683)..(2683): n is a, c, g, or t
  misc_feature (2694)..(2695): n is a, c, g, or t
  misc_feature (2708)..(2708): n is a, c, g, or t
  misc_feature (2714)..(2714): n is a, c, g, or t
  misc_feature (2726)..(2726): n is a, c, g, or t
  misc_feature (2737)..(2737): n is a, c, g, or t
  misc_feature (2753)..(2753): n is a, c, g, or t
  misc_feature (2756)..(2756): n is a, c, g, or t
  misc_feature (2763)..(2764): n is a, c, g, or t
  misc_feature (2787)..(2787): n is a, c, g, or t
  misc_feature (2789)..(2789): n is a, c, g, or t
gtctgggggagatagttgcctccaggcttagacagaagcagtgggtttggatggggtgggaaaggcagtgagatggcactgaccacctccttctcttcctcagtcggatctgctccagtgtctccagtaccagttctaccaggtacgtgactctggcctggtaagtactcagaagccaggatcctgtgatccctgccagctccacgggcagggtgatgtgcatagtccttggtgcctagccagccacctccctgacctgggaagccatttgttccccatacttgttgagggcctgctatgtgcaaggcattagattttaggggacagctggtgctccatgccctcttcccacagctgctgtccatcccacacctgccctggccaccacctccaatgtccagatcacttaatagtcccactgggaggctgaaaccaaggaaacaactccacctcctttcttcctggcctttaagtggngcctatcctgggttggtgattgtgtctccacaaacaacccagctcttcccataattatgccaagggtnacaattgggctttcttggtaggcagatctcagcaacctggcttggttttagatcccagggacctgcctgctcccagaggtgacagaggaagatcaaggaaggatctgtgtggtcattgacctcgatgaaacccttgtgcatagctcctttaagccaatcaacaatgctgacttcatagtgcctatagagattgaggggaccactcaccaggtgtatgtgctcaagaggccttatgtggatgagttcctgagacgcatgggggaactctttgaatgtgttctcttcactgccagcctggccaagggctgctacgtcaaggacctcagccgcctggggagggacctgagaaagaccctcatcctggacaactcgcctgcttcttacatattccaccccgagaatgcagtgcctgtgcagtcctggtttgatgacatggcagacactgagttgctgaacctgatcccaatctttgaggagctgagcggagcagaggacgtctacaccagccttgggcagctgcgggccccttagcctgccctgcttccaagcgacggccatcccagtaggggactttcccacactgtgcctttacgatcagcgtgacagagtagaagctggagtgcctcaccacacggcccggaaacagcgggaagtaactggaaagagctttaggacagcttagatgccgagtgggcgaatgccagaccaatgatacccagagctacctgccgccaacttgttgagatgtgtgtttgactgtgagagagtgtgtgtttgtgtgtgtgttttgccatgaactgtggccccagtgtatagtgtttcagtgggggagaagctgaaagaccaagactcttcccaagttagcttgtctcctctcctgtcaccctaagagccactgagttgtgtagggatgaagactattgaagactccattgccaaaccatggcctttcctcagtgttgtaaggcctatgccaaggataaaggaagggtatgcctttgggtactccaggcacacacctttctgaaatccttctccagccagctgctgcagacaaaagatcacatttctgggaagatgagaacttgtttccagaccagcatccagtggccatcaggtcttgtggcccaaaggctatgcttgcctccggctgagtgcctgggataggccttttctatgtctccccaaggctggggtgctgagcctgccttcctcaccacctagccatagtctcaaacctgtggggaaggaggttttctccctgcccgggaagaggacagataactgatttccgttcttttgactgtgttttaaaattctctttctaaacacagagtgttgggcctggtttgtttctgacaaagttacagtcctgggcctgtaatgaatgtcggcggcgctggggttgcagggaaaagacaaatcctcaaagcgtggacgtgtgtccccatggcttgtggatcagctaagctcgggatcatttccataagtctgcttttcagggattctctgctggtgctggtgcaaggacttctgttccaaaggctgggaaaaactaagctgtcccagcccctcccatttcttgggcagggctcttttcctgttgtgtcttcccccaggncctgtcctgtaccgagctctgtctgttccagccttcatccttcctggctgttgcttttcctcttaagggcctcagaactcttgctcttcctgggctgagggggaatgagtgttcttgccatttgccagcctaatgcgcatgctttctgcctctggtaacaggagtgagtgagcccctcagacctgcactctgggtgtctcctgctttcaaaggttcttaatagtgaatgctttaaaattaaagtcatcacgaaatggaagttttcccagggtggaaaataagaggaagtgctgctgtaatgggagcacaaggggcctcccaaaanggagccccacctcagcatcactgccttaatcgtggctccctggggtgggtggggttctctcctncctccctccctcctcctggggtgggagggcgctcctgttcccatctntgtgttccctgnaggcaggtatcacaaagcattgtgaatgctttangtgcagggacaccnnccactcaggactcttccccntcatcccttcnntgccacaccctanatccancctcaggaactnacaagtttganaaaagcaggtggtgancancagcttnntgctctcagcggttggctggctngnattttctctagcgtgtggtgcaccttcccttctgtcccaaggttataaggcttgtctttctctttgaatcctcaagtgaccagagtccccagcaaatcatgtggcatattccggccagcatcaatcccacggtgctatggggttccgggggacctaaaggggcgaggcccagtggcaagcagaatatctgactgaaggaaagagggcaagaactaagacaggggggtagcaccaagcggcaggggtcctatagggagggtcaaaggcccaggggacgagaaattggaagagcacggtggtaaaaaagacagaggaagagagactgaagaacgagagccatcaagcggcaagagggaaaaaggacgcacgacagggcatgagcaa

SEQ ID NO: 711161 - DNA, 2428 bp, Homo sapiens
  misc_feature (1421)..(1421): n is a, c, g, or t
  misc_feature (1746)..(1746): n is a, c, g, or t
  misc_feature (1810)..(1810): n is a, c, g, or t
  misc_feature (1857)..(1857): n is a, c, g, or t
  misc_feature (1869)..(1869): n is a, c, g, or t
  misc_feature (1903)..(1903): n is a, c, g, or t
  misc_feature (1917)..(1918): n is a, c, g, or t
  misc_feature (1938)..(1938): n is a, c, g, or t
  misc_feature (1949)..(1950): n is a, c, g, or t
  misc_feature (1963)..(1963): n is a, c, g, or t
  misc_feature (1969)..(1969): n is a, c, g, or t
  misc_feature (1981)..(1981): n is a, c, g, or t
  misc_feature (1992)..(1992): n is a, c, g, or t
  misc_feature (2008)..(2008): n is a, c, g, or t
  misc_feature (2011)..(2011): n is a, c, g, or t
  misc_feature (2018)..(2019): n is a, c, g, or t
  misc_feature (2042)..(2042): n is a, c, g, or t
  misc_feature (2044)..(2044): n is a, c, g, or t
agcatctttacatatcacccgagaatgcagtgagtgctcctgatgcgtctccacggtagggattgggagaggaagcagactggaactgtgggctccaccagagaagtacacccctccaggaagacccagccaccctctagggctctggggcgagggagggggaagcagcagtcgggagattgacaccacatcttccccccaccaggtgcctgtgcagtcctggtttgatgacatggcagacactgagttgctgaacctgatcccaatctttgaggagctgagcggagcagaggacgtctacaccagccttgggcagctgcgggccccttagcctgccctgcttccaagcgacggccatcccagtaggggactttcccacactgtgcctttacgatcagcgtgacagagtagaagctggagtgcctcaccacacggcccggaaacagcgggaagtaactggaaagagctttaggacagcttagatgccgagtgggcgaatgccagaccaatgatacccagagctacctgccgccaacttgttgagatgtgtgtttgactgtgagagagtgtgtgtttgtgtgtgtgttttgccatgaactgtggccccagtgtatagtgtttcagtgggggagaagctgaaagaccaagactcttcccaagttagcttgtctcctctcctgtcaccctaagagccactgagttgtgtagggatgaagactattgaagactccattgccaaaccatggcctttcctcagtgttgtaaggcctatgccaaggataaaggaagggtatgcctttgggtactccaggcacacacctttctgaaatccttctccagccagctgctgcagacaaaagatcacatttctgggaagatgagaacttgtttccagaccagcatccagtggccatcaggtcttgtggcccaaaggctatgcttgcctccggctgagtgcctgggataggccttttctatgtctccccaaggctggggtgctgagcctgccttcctcaccacctagccatagtctcaaacctgtggggaaggaggttttctccctgcccgggaagaggacagataactgatttccgttcttttgactgtgttttaaaattctctttctaaacacagagtgttgggcctggtttgtttctgacaaagttacagtcctgggcctgtaatgaatgtcggcggcgctggggttgcagggaaaagacaaatcctcaaagcgtggacgtgtgtccccatggcttgtggatcagctaagctcgggatcatttccataagtctgcttttcagggattctctgctggtgctggtgcaaggacttctgttccaaaggctgggaaaaactaagctgtcccagcccctcccatttcttgggcagggctcttttcctgttgtgtcttcccccaggncctgtcctgtaccgagctctgtctgttccagccttcatccttcctggctgttgcttttcctcttaagggcctcagaactcttgctcttcctgggctgagggggaatgagtgttcttgccatttgccagcctaatgcgcatgctttctgcctctggtaacaggagtgagtgagcccctcagacctgcactctgggtgtctcctgctttcaaaggttcttaatagtgaatgctttaaaattaaagtcatcacgaaatggaagttttcccagggtggaaaataagaggaagtgctgctgtaatgggagcacaaggggcctcccaaaanggagccccacctcagcatcactgccttaatcgtggctccctggggtgggtggggttctctcctncctccctccctcctcctggggtgggagggcgctcctgttcccatctntgtgttccctgnaggcaggtatcacaaagcattgtgaatgctttangtgcagggacaccnnccactcaggactcttccccntcatcccttcnntgccacaccctanatccancctcaggaactnacaagtttganaaaagcaggtggtgancancagcttnntgctctcagcggttggctggctngnattttctctagcgtgtggtgcaccttcccttctgtcccaaggttataaggcttgtctttctctttgaatcctcaagtgaccagagtccccagcaaatcatgtggcatattccggccagcatcaatcccacggtgctatggggttccgggggacctaaaggggcgaggcccagtggcaagcagaatatctgactgaaggaaagagggcaagaactaagacaggggggtagcaccaagcggcaggggtcctatagggagggtcaaaggcccaggggacgagaaattggaagagcacggtggtaaaaaagacagaggaagagagactgaagaacgagagccatcaagcggcaagagggaaaaaggacgcacgacagggcatgagcaa

SEQ ID NO: 711162 - DNA, 2075 bp, Homo sapiens
  misc_feature (477)..(477): n is a, c, g, or t
  misc_feature (545)..(545): n is a, c, g, or t
gtctgggggagatagttgcctccaggcttagacagaagcagtgggtttggatggggtgggaaaggcagtgagatggcactgaccacctccttctcttcctcagtcggatctgctccagtgtctccagtaccagttctaccaggtacgtgactctggcctggtaagtactcagaagccaggatcctgtgatccctgccagctccacgggcagggtgatgtgcatagtccttggtgcctagccagccacctccctgacctgggaagccatttgttccccatacttgttgagggcctgctatgtgcaaggcattagattttaggggacagctggtgctccatgccctcttcccacagctgctgtccatcccacacctgccctggccaccacctccaatgtccagatcacttaatagtcccactgggaggctgaaaccaaggaaacaactccacctcctttcttcctggcctttaagtggngcctatcctgggttggtgattgtgtctccacaaacaacccagctcttcccataattatgccaagggtnacaattgggctttcttggtaggcagatctcagcaacctggcttggttttagatcccagggacctgcctgctcccagaggtgacagaggaagatcaaggaaggatctgtgtggtcattgacctcgatgaaacccttgtgcatagctcctttaagccaatcaacaatgctgacttcatagtgcctatagagattgaggggaccactcaccaggtgtatgtgctcaagaggccttatgtggatgagttcctgagacgcatgggggaactctttgaatgtgttctcttcactgccagcctggccaagtatgccgaccctgtgacagacctgctggaccggtgtggggtgttccgggcccgcctattccgtgagtcttgcgtgttccaccagggctgctacgtcaaggacctcagccgcctggggagggacctgagaaagaccctcatcctggacaactcgcctgcttcttacatattccaccccgagaatgcagtgcctgtgcagtcctggtttgatgacatggcagacactgagttgctgaacctgatcccaatctttgaggagctgagcggagcagaggacgtctacaccagccttgggcagctgcgggccccttagcctgccctgcttccaagcgacggccatcccagtaggggactttcccacactgtgcctttacgatcagcgtgacagagtagaagctggagtgcctcaccacacggcccggaaacagcgggaagtaactggaaagagctttaggacagcttagatgccgagtgggcgaatgccagaccaatgatacccagagctacctgccgccaacttgttgagatgtgtgtttgactgtgagagagtgtgtgtttgtgtgtgtgttttgccatgaactgtggccccagtgtatagtgtttcagtgggggagaagctgaaagaccaagactcttcccaagttagcttgtctcctctcctgtcaccctaagagccactgagttgtgtagggatgaagactattgaagactccattgccaaaccatggcctttcctcagtgttgtaaggcctatgccaaggataaaggaagggtatgcctttgggtactccaggcacacacctttctgaaatccttctccagccagctgctgcagacaaaagatcacatttctgggaagatgagaacttgtttccagaccagcatccagtggccatcaggtcttgtggcccaaaggctatgcttgcctccggctgagtgcctgggataggccttttctatgtctccccaaggctgggtgctgagctgctttctacactgtagcatagttctcaaactgtggggaaagaggtttctcccgtccgggaagaggcacgattacgtaattccggcctggcagggttttaagactcctcttctaacacaaccgacaacgacgcacaacacgatagacaacaaaaaaaggggggcgctaaaatcccagggcacacattgaacacacttttataaaggcccaagaggataaacggacgggaaaaagtccagaaca

SEQ ID NO: 711163 - DNA, 1133 bp, Homo sapiens
ggctgggctcggtggctcacgcttgtaaatcctcagcctcccaaaagtactgggattcatcaggcatgaggcacaggccaagcctggtcatttataacattatatcatcggtcacagaccccagtgacaagagtcttcattctgtttgcccatgcttggaagtgcagatggcgtgaatcatagctcactgacagccttgacattcctaggctccagtgatcctctcacctcagagttccctaatagctaggattaccaggtgtgtggcctccaacaccaaaccaacccttcacacctggctcgcattcgcaacacacgtcccaccgggagaaaacagggactcaccatgtagtccagccgggcctcaacatccctggtcctcaagtgatcctccccgactcagcctatcaagtgcgggaattacgaggtgtgagacattttgcctggcgtaccacataacttggcatacattcagaaatcaccatcctatgcacaaaaattggtcagaacatagttcatgagagacgcaaaagagacaagaagaagacctttaaacggaatgggtacattacatgctaaggattacagtggtggtaatttacaaggaaagaatacgtagcaagtatgggctaaaaagattgttcactggtcaattaggtcagggcaaatcgaagaactgacgggtatatgaaacagttgaatatttgtatgacatatagtgttccagcgcgttccacgaaaacagctgatgagtgtaaaaactgtcatggcatacgctggcgactattagtgggcagcatagagtgagactacatgtatagccgtggttacacatgtggcccagatcttctgtgaaaggaaaaggatgcaacaacacacgttccggtgttacagtattggtgagcatatcgaccaaacctgatgaacaacgggagaaatcagcagcggcagacaggaacaaaaaggggtacacaagagcgtggcgagacaaactcagggggaaaacgctaggcaacggactctgtgaggagcgtacagaaaaaaaaaaaacagggaagcaaacaccaggagaaattatgattaacacccactcccggccgtcgtagcagcagacacgagagcaacaggacgga

SEQ ID NO: 711164 - DNA, 2544 bp, Homo sapiens
  misc_feature (477)..(477): n is a, c, g, or t
  misc_feature (545)..(545): n is a, c, g, or t
  misc_feature (1537)..(1537): n is a, c, g, or t
  misc_feature (1862)..(1862): n is a, c, g, or t
  misc_feature (1926)..(1926): n is a, c, g, or t
  misc_feature (1973)..(1973): n is a, c, g, or t
  misc_feature (1985)..(1985): n is a, c, g, or t
  misc_feature (2019)..(2019): n is a, c, g, or t
  misc_feature (2033)..(2034): n is a, c, g, or t
  misc_feature (2054)..(2054): n is a, c, g, or t
  misc_feature (2065)..(2066): n is a, c, g, or t
  misc_feature (2079)..(2079): n is a, c, g, or t
  misc_feature (2085)..(2085): n is a, c, g, or t
  misc_feature (2097)..(2097): n is a, c, g, or t
  misc_feature (2108)..(2108): n is a, c, g, or t
  misc_feature (2124)..(2124): n is a, c, g, or t
  misc_feature (2127)..(2127): n is a, c, g, or t
  misc_feature (2134)..(2135): n is a, c, g, or t
  misc_feature (2158)..(2158): n is a, c, g, or t
  misc_feature (2160)..(2160): n is a, c, g, or t
gtctgggggagatagttgcctccaggcttagacagaagcagtgggtttggatggggtgggaaaggcagtgagatggcactgaccacctccttctcttcctcagtcggatctgctccagtgtctccagtaccagttctaccaggtacgtgactctggcctggtaagtactcagaagccaggatcctgtgatccctgccagctccacgggcagggtgatgtgcatagtccttggtgcctagccagccacctccctgacctgggaagccatttgttccccatacttgttgagggcctgctatgtgcaaggcattagattttaggggacagctggtgctccatgccctcttcccacagctgctgtccatcccacacctgccctggccaccacctccaatgtccagatcacttaatagtcccactgggaggctgaaaccaaggaaacaactccacctcctttcttcctggcctttaagtggngcctatcctgggttggtgattgtgtctccacaaacaacccagctcttcccataattatgccaagggtnacaattgggctttcttggtaggcagatctcagcaacctggcttggttttagatcccagggacctgcctgctcccagaggtgacagaggaagatcaaggaaggatctgtgtggtcattgacctcgatgaaacccttgtgcatagctcctttaagccaatcaacaatgctgacttcatagtgcctatagagattgaggggaccactcaccaggtgtatgtgctcaagaggccttatgtggatgagttcctgagacgcatgggggaactctttgaatgtgttctcttcactgccagcctggccaagtatgccgaccctgtgacagacctgctggaccggtgtggggtgttccgggcccgcctattccgtgagtcttgcgtgttccaccagggctgctacgtcaaggacctcagccgcctggggagggacctgagaaagaccctcatcctggacaactcgcctgcttcttacatattccaccccgagaatgcagtgcctgtgcagtcctggtttgatgacatggcagacactgagttgctgaacctgatcccaatctttgaggagctggggtgctgagcctgccttcctcaccacctagccatagtctcaaacctgtggggaaggaggttttctccctgcccgggaagaggacagataactgatttccgttcttttgactgtgttttaaaattctctttctaaacacagagtgttgggcctggtttgtttctgacaaagttacagtcctgggcctgtaatgaatgtcggcggcgctggggttgcagggaaaagacaaatcctcaaagcgtggacgtgtgtccccatggcttgtggatcagctaagctcgggatcatttccataagtctgcttttcagggattctctgctggtgctggtgcaaggacttctgttccaaaggctgggaaaaactaagctgtcccagcccctcccatttcttgggcagggctcttttcctgttgtgtcttcccccaggncctgtcctgtaccgagctctgtctgttccagccttcatccttcctggctgttgcttttcctcttaagggcctcagaactcttgctcttcctgggctgagggggaatgagtgttcttgccatttgccagcctaatgcgcatgctttctgcctctggtaacaggagtgagtgagcccctcagacctgcactctgggtgtctcctgctttcaaaggttcttaatagtgaatgctttaaaattaaagtcatcacgaaatggaagttttcccagggtggaaaataagaggaagtgctgctgtaatgggagcacaaggggcctcccaaaanggagccccacctcagcatcactgccttaatcgtggctccctggggtgggtggggttctctcctncctccctccctcctcctggggtgggagggcgctcctgttcccatctntgtgttccctgnaggcaggtatcacaaagcattgtgaatgctttangtgcagggacaccnnccactcaggactcttccccntcatcccttcnntgccacaccctanatccancctcaggaactnacaagtttganaaaagcaggtggtgancancagcttnntgctctcagcggttggctggctngnattttctctagcgtgtggtgcaccttcccttctgtcccaaggttataaggcttgtctttctctttgaatcctcaagtgaccagagtccccagcaaatcatgtggcatattccggccagcatcaatcccacggtgctatggggttccgggggacctaaaggggcgaggcccagtggcaagcagaatatctgactgaaggaaagagggcaagaactaagacaggggggtagcaccaagcggcaggggtcctatagggagggtcaaaggcccaggggacgagaaattggaagagcacggtggtaaaaaagacagaggaagagagactgaagaacgagagccatcaagcggcaagagggaaaaaggacgcacgacagggcatgagcaa

SEQ ID NO: 711165 - DNA, 297 bp, Homo sapiens
cctgctgtcttcgcgctaggggtcgccagctgctgaagcagaggcggccgattggcttccacctgaggtcgccggggctgccatttatcggcaacatctattccctggcagcctcatctgagcttccccatgtctacatgagaaagcagagccaggtgtacggagaggtaccagccgacgggcccgggcagggacggcgccaggctgaccgggaagccagggacttcctggttggaattatggacgccctgggcgaatagtcgggacctctaagtgtgacggctgcactttgagggc

SEQ ID NO: 711166 - DNA, 842 bp, Homo sapiens
  misc_feature (477)..(477): n is a, c, g, or t
  misc_feature (545)..(545): n is a, c, g, or t
gtctgggggagatagttgcctccaggcttagacagaagcagtgggtttggatggggtgggaaaggcagtgagatggcactgaccacctccttctcttcctcagtcggatctgctccagtgtctccagtaccagttctaccaggtacgtgactctggcctggtaagtactcagaagccaggatcctgtgatccctgccagctccacgggcagggtgatgtgcatagtccttggtgcctagccagccacctccctgacctgggaagccatttgttccccatacttgttgagggcctgctatgtgcaaggcattagattttaggggacagctggtgctccatgccctcttcccacagctgctgtccatcccacacctgccctggccaccacctccaatgtccagatcacttaatagtcccactgggaggctgaaaccaaggaaacaactccacctcctttcttcctggcctttaagtggngcctatcctgggttggtgattgtgtctccacaaacaacccagctcttcccataattatgccaagggtnacaattgggctttcttggtaggcagatctcagcaacctggcttggttttagatcccagggacctgcctgctcccagaggtgacagaggaagatcaaggaaggatctgtgtggtcattgacctcgatgaaacccttgtgcatagctcctttaaggtaactcaatgtctggaacccttcctacctttatcttgggccttcttgtgaattggcaacagatgtgtaaggcagcctaaaggtgaggaaagaagagtgattagaagggaaaaggccaggcctctggcattctggccaccctgt

SEQ ID NO: 711167 - DNA, 361 bp, Homo sapiens
  misc_feature (19)..(19): n is a, c, g, or t
cagctggatcaccctgttncccctggttttattaccacaattcagaaggctagaagaggagtttgggggcttggcaccctgaaaatttagaccgcattccttattaagtaaaggaagaggtagggaggccgaggcgggcggatcatgaaatcaggagatccagaccgtcctggctaacacagaaaccccgtctctactaaaaatacaaaaaattagctgggcatggtgacatgtgcctgtagtccatcccagctactcgggaggccgaggcaagagaatcacctaaacctggaaggcggaggttgcagtgagccgagatcacaccactgcacttcaggctgggcagcagagcgagactcca

SEQ ID NO: 711168 - DNA, 374 bp, Homo sapiens
  misc_feature (16)..(16): n is a, c, g, or t
  misc_feature (248)..(248): n is a, c, g, or t
  misc_feature (251)..(251): n is a, c, g, or t
  misc_feature (309)..(309): n is a, c, g, or t
  misc_feature (354)..(354): n is a, c, g, or t
  misc_feature (374)..(374): n is a, c, g, or t
actgtgttcccaagcnggtttccataaagaaaattccttaacccttagaaccctcggatatccctcctatgttttagttttcatttttttaaaatgccttccttaaaattcactaaattgggcctaggtgtggctcatgcctgtaatcccagcactatgggaggctgaggtgagaggatcacttgagcccagaaggttgaaaccagcctgggcaacatagtgagaccccatctctacaaaaagttttnaanccaggtatggtggtgccctcctgtggtcccagctactcgggagtctgaggtgggaggntcacctgagcccaggagactgaggctgcagtaaggtgtgattgcnctattgctctctagcctggn

SEQ ID NO: 711169 - DNA, 1069 bp, Homo sapiens
gaaccatcccagtaaccctgaccgcctgctggtcttctgctggacaccatgaatcaaactgtccaaaccttcttctctcctgtcaacagctggcagccccccaactatgagatgctcaatggaggcagcactgagtgtgcgctgtcgctgggtggctgccccaacaaccctgctcccccgatgtccaccgtgatccacatccgcagctgagaccttcctgtgccctgaccatgtcgtactgggtccctgttcaacagcctcttcatgaacccctgctgcctgggcttcatagcattcgcctactccgttgcagtctagggaccaggaacgatggtctggcgactgttgaccggggcccagggcatatgcctccaccgccaaagttgcctgaacatctgtggcccttgattcctgggcaatcctcattgaccattcttgctacatcgtcatcccaagtgctgatcttcccagtgcctattggatacgatcaaggagggcatccacttgaggacccaaggagctcttggcccatgaccgtgtatcccaagtactccaacgttccattccttcggcccttgccccggagccgagagtcttgtatcaagcccttaatcctcaacaccgccttttcctaccaattgtgcattccaataaaaggtgccacggttgttcttgaaaaacccacaacacacaccaccaataacacaaaaccgaaacaccacacaacacacaacaaacacaacaccaaagaaacactacacacatccacaacaacaccacacccgcacaacctacgtgcacattattcctctcatatctacataccgacaagaaaacaacacgaagacaatgagtgtgacaaccgacaagaaaggtggccatgtccctccacggagtcacacacacaaaacagcacgtacccacgcaccacactcaggtgtggatgtgcacacacccagcgggcaagcgaaacgaactggagaaatgcccggaagcgacccacgcggccagcgacaaacggaggtcgcggaagtcggtcgacgggcgacagagagaggacggaaccggc

SEQ ID NO: 711170 - DNA, 848 bp, Homo sapiens
ctttacttattgctcacaggctgaggacggcagaatgactctgtctccactaggagccattagggcttcttccctggaggactgcctgcttgctttctggggacaactagccctcatttcccttctgtggtacagtggtccaagattatttgtattaagcaagcatttatgggaggacaacccggtcccgaaaacggagcccccaagtatagcacaaccctgagagattatgaaactatgaattgtctctagtagagatatgatttctgcaaacatatctcagtcttccctctgtttctctggtgatgtaatgaagtctcctttctggtaaggaagaaggattctgaaccatagacgttaggcatcatggaaattcaaaccaggatttcttaatacctggtcttcctcaaagagagaataataagcagtaatagtggtgctgggaacacatatggcagattacttgaactgaaaattgaattaagcttgaactaagagtgctgtgaatttttctctaaaaatgaataaccaaaatgatactaatagagggaatatcacgggcagtaaccccgagtgcagaaatctgggcccctgagggagtactaccattcgtactgaactgcgcccacgaataccctcagtagactcgtacgttgttccacacggccctcacgaactaatgtgaacacaatctaggggaccttgatcgttgagcgcctgagcaaaattgtgagaggcccacagagttggatccattggattctcggctgtacatgacatggtgcaaactgacttggactttaaggcctttgatatccgcttgggtccgccacaagcatatgggtgag

SEQ ID NO: 711171 - DNA, 595 bp, Homo sapiens
gccctaaaagccaaaactgggaacacggaaaagactcatatcaacatggtcgctcgttggacacgtagatgcgggcaggtccaccactactggccatctgatctataaactgcggtggcattcgagcaaacatggaaccacttgagagaaatttgaggaagggacgcgcgtgcatgaggactgtggaaagcgggcgtcctgtcaatgtgtatgcctgggatcttgagataatccctgcaaaccatgagcgctggaacggtgggtatcaccgattctggaatactcctcctcttgctggacaagtgatgatgagcccaggcaacgtcactcatgatgacctagtccaatgtgactgccgcccaggcacgacagtagtagctttagtcagaaaacgatgactctacaagggaacaatcctcagcgactgatcctggtgtactgcatccttgaagtgtgttctggctctcgcttgggtagtgcaggtgcgcacattgttgagatgccttggctcatcatctcccaacgacattggggctaaggacccctcgtaggacgccattgcgcccgtatcgtgtggccctttacagcgacgttg

SEQ ID NO: 711172 - DNA, 749 bp, Homo sapiens
  misc_feature (390)..(390): n is a, c, g, or t
  misc_feature (749)..(749): n is a, c, g, or t
tggagatcggatcttttctccaggcaatggggggaaagaagggtttttctctggaattcgcttagtgtaaccagcgggcgtatattttttaaggcgccttttcgaaaacctaagtaggttaatattcatttggtttaaatcttaatttatttttaagctcaaactggcttaagaatacccttaattcccttaaaggtgaaataattttttggcacagggggtttcctcggatttggagactttttttttcttccaccggtcatttcctaactccttcccaactccagattcccatccatgggtgatggttcaagcaagaatctcaaggtcttttggagaggtgggtctttaacggacccctggaaacagggtggtacggggaggtggcgnagaaagggtggcgtgggccgggggtgaataggtggacgggtggtggtgacaggttaactcgctggtctaaaggccggttagagaatctctgggcttggcgggaggtgggctataaggtggctcttggactgtccgggggaatcccaggcaggtggcaaagcagaacttcgcgaggtaacctggcggctatggaagcacacggccttctctctggggaagaccacggcaaccaggtggagaatggagaaggtggatccatgagaactgggaaacaaatatgagtaccagttcatggcaacaacggattataatggagggggtccctggattctcaaccatgtggcgtgagcctgtggcgn

SEQ ID NO: 711173 - DNA, 299 bp, Homo sapiens
ttgggggggttttttttttggggggggccccccaaattgggatttcggggtttcgggggggggcccctttgcccccccccccgttttccttgggctttttttttttaaatttttttgggggggggggcccccgtttgggaaaaaaaaggcccccagggttggggggggggggggtttttgggcgggtttttgtcttccccccctttacccgttttcgggaccttccttttttcccccttaatgtttccctttttggtttttccttttaagggttttttttttttaaaagggaaaaggga

SEQ ID NO: 711174 - DNA, 228 bp, Homo sapiens
atattgctgtgagaaaagctgtggttcagttgagcctgggtgctgtagaaggtggtagatttctcactaagtgctggcactgtgtgtgctggcaggtgaccactgttgacagagctgagcctggttggctatgaggggtggtaaattcttgagcaaaagatgaagtttgtgatagcttgccaggggaccgtgttgtctcagttgacgccttggcttacttgtggcacg

SEQ ID NO: 711175 - DNA, 218 bp, Homo sapiens
gccgctgtcggtccacttgtcgccactttcacagatctcggtcacttcgacttcgtcggcgccgatgtccggcacggcaacgtctttggccgcagcggcggccggggcagctgctgctgctgccggtttttcttccgctttcgccgccggtgcagcttccgctgcgcctgccgcttcgaagatcatgatcagtttgccggtttcggttttatcgccga

SEQ ID NO: 711176 - DNA, 260 bp, Homo sapiens
atttagaggatccctacttccacaggggaggagattgattccaggagacggtgaaatgattcttattactcttccagggtgaggttaggtgatggactctgggctggaacctgtcgtccgatggtcctcatcccgtgatgcacagcagaggtaagaggcactgaaatgtagcaccatggtcttattggtacgggaggcatccaatgtcttgctcgagtgggtaccgtagctcgatcttcgttaatctctggtcagtagct

SEQ ID NO: 711177 - DNA, 364 bp, Homo sapiens
gtgtgtgtgcttctgtgagaacaagcatatgtgggtgcctgtgtgtatggatgcgtaccgaggtgcctgtgccgtgctgtgctgtctgtgctgtctgtgctgtgctgtgctgtgctgtgctgtgctgtgctgtctgtgctgtgctgtgctgtgctgtctgtgctgtactgtgtgtgctgtgcagtctgtgctgtggtgtgctgtctgtgctatgctgtgctgtctgtgttgtgctgtgctgttctgtgctgtgctctgctctgctgtctgtactgtctgtgctgtgctgtgctgtactgtgctgtctgtgcagtgctgtgctgcctgtgctgtctgtgctgtgctgtgctgtgttggtcgacgc

SEQ ID NO: 711178 - DNA, 709 bp, Homo sapiens
cccacaccgcaggattatgataagtggctctaataccatagtcgtacacatgccagtacaggaatatattaacatctgtttatttgccagacgaagagcagtgtccaatataacatttcccccaaaatcattgtaagacctgtgaatttgtgaccagttcacaaaaccaccaactgacactttagcatgaagaaaaaaacaaacctgacagactgtcagctctaaagacattacagagcagaaacttccaaaagcgttatacaagctgtctttctgggcgaatgaaaaatatagcttgtataatacattaacaaaaattcacaagataagattgtgttgacatactttacaagcatgctctatgtgtctccaacaaacaaagctaaggaaataatgtaaccatctttacacagtacattaaggttacaagtcatacacaagaacagaactgcttgcgcgttagaaactgtccagctccatggtcatagggctaaatgttggcacttaaaccattttcggttacatacaagcaaaggttattatatattcagcaattaataaattttcaataatttaagatacggtagcttaaaaaagtagactgagaatggtcttgataaggcaggtgaaacatcttagtggaactaaactcacagaagctccgcaaatgtgggggacctctaagtcacctgcgcttgcacttggactg

SEQ ID NO: 711179 - DNA, 321 bp, Homo sapiens
ttagttagtcgggacggttgttgttaaattgtggtaccatatacttaacacaaaaattaccattttaaccttttttttgtggggggagggacgggatctcactatgttgcccaggctgttctccaactcctgagctcaaacaatctgcctgcatctgcctcccaaagtgctgggattagagacatgagctaccacacccagcctgattttaccaaaagaaactttttttctttttggagacagagtctggcttggtggtcaggctggagttcaggggcatgatctcggtcccggcttaactggcggccccgatttaacttg

SEQ ID NO: 711180 - DNA, 269 bp, Homo sapiens
  misc_feature (36)..(36): n is a, c, g, or t
  misc_feature (72)..(72): n is a, c, g, or t
  misc_feature (83)..(83): n is a, c, g, or t
  misc_feature (137)..(137): n is a, c, g, or t
  misc_feature (171)..(171): n is a, c, g, or t
tgtcggggtagcagtgagctaagatcatgccacagnactctagcttaggggacagaccaagacctttctcanaaaaacaaacnaaaacaaacaaaaaaagacagaagttgtatcctaaggaaaatgagacataccanttaagatgcaggagaattctgctgaaactacttnaaacaagattcagggagatggaggtcaaaatggctgtgtggaaacaccacacggcttagaaccaaacagacttggtttccaagccccgaacacggata

SEQ ID NO: 711181 - DNA, 203 bp, Homo sapiens
tctagaggtcccatcagtttacacaacttaatgagacttaatagaaatgtgaacttacttaacatggtagtcttagtttctcatcatcaggtgccataactcttaggcagattccaaaagaaaatgaagattaataacaaaacaaaacaataaaacaggaggcctaggcacttctttacattcctctcttgtgtaaactgata

SEQ ID NO: 711182 - DNA, 1292 bp, Homo sapiens
gtctagcgcgccgcacgacttagtgcgcccggccgtatcagtcagcgcgaggccgtggatatatgtatcgtggaacatagtccgtatcatgtgatactgcggaatctctccgaataccagtgctaccatccattgagagtgacgagccagtgttggcgttacctgcgtgtgctatgtgccaaccgagattcgactcggcccgagtcgtgggacgagagagatggggaaggtcgatccaaggaattgaacactgtgaaactcgaatgtctaagggctctggatgcagtactctgccatgtgcacctcattaatcgttgaaaccatgagttgcaggaagctcttgcgtagactcgagatgctggcatgcattgacatgtccatataattgagcgcagacactatgagagtacagcaaattggatacctcctaggatccgggacccatgtgagaagcccatttgagcgtgtactgcttcaatacacttcgaaagacaaaacatggctaggctttcggaaaatatccatggagtggtgggctagaccagggggcgatcaaatgacccgcgcatatcgcttcccggatacacctactttggcaaagcaaactaggcaaccgatccaataagcccgtgacttcgtaattagaacctttggttaagctacgcatacgtcggctactgtggggaaacaactatgttgcttggcacccacttgccttgtccacgcagtattatcgtgtgggcatgcaacctggtgacaattcctaggtggcgtacttccacgcagatgggctccatctcgttacatggaccaaccacaaagctaggccgacacagggaagcatgtcctggccctggggatgaacccgtaagaacagcccggagccgtggcgaccctccaggggaggaaaggcgcaagccttggtaagtcagttttccattccatatagaaagggacaccccaagcacaaagagataggcgcaacgcccaccgggacggggctccttgacatacgttctgcccatgcaatttgttcccacagctcactgggcggctaagaactcgcgatgtcctaagcggcataattgcaattgggcccctccgcaaatattccttgccaaaagcagcccttgcgtgcccacagccactcggaatgtgtcagtcaacgcttcgccagggagaccccatgaaaatgcctccgagaaccaatggggcactatccgcgccaattcaaactctcggagcacacgaccctcacttgataccgccacgtctaacgggtggcgttccaa

SEQ ID NO: 711183 - DNA, 134 bp, Homo sapiens
tcgttttacactgaggaacgtgttataccccgggaaccggttttcactgggcaccgtgttacaccggggaaccggctttccccgggagccggaatacactggggaacgggctacacccgcgggaaccggatatc

SEQ ID NO: 711184 - DNA, 146 bp, Homo sapiens
ccccttccctttccttccccctggggcaaccgcctccctttcaaccttgttaattccccctccccaccccgaggggcttgcaggggcaaggcggccgactgcgcttagctgcttttttttttaaaataaaccccgggaaagtttta

SEQ ID NO: 711185 - DNA, 208 bp, Homo sapiens
atggtaatacacacagtggtgttgtgtacttctgaatgttaaaaccgcctggctcctttgaagtaaccacatagtttatctatgggatgtacattatttatttactctattagtgattaagttttatctagatcttatgatactgtaaacagccacagtgatgatcctttctggtgttatgtgagcacatgcacaatttgtcgagatt

SEQ ID NO: 711186 - DNA, 641 bp, Homo sapiens
  misc_feature (44)..(44): n is a, c, g, or t
  misc_feature (411)..(411): n is a, c, g, or t
  misc_feature (441)..(442): n is a, c, g, or t
  misc_feature (487)..(487): n is a, c, g, or t
  misc_feature (524)..(524): n is a, c, g, or t
  misc_feature (548)..(548): n is a, c, g, or t
  misc_feature (551)..(551): n is a, c, g, or t
  misc_feature (553)..(553): n is a, c, g, or t
  misc_feature (559)..(559): n is a, c, g, or t
  misc_feature (573)..(573): n is a, c, g, or t
  misc_feature (587)..(587): n is a, c, g, or t
  misc_feature (602)..(602): n is a, c, g, or t
  misc_feature (604)..(604): n is a, c, g, or t
cacccaagagcgggcagccagaaccgattccagcacccagcaangtgtgtcactttttaaccgccccgcggaaggggaccaaggagaacttctttgaaatctgcgatgagctgggagtgaagcgcccattttctgtgaaagtattctcaggcaaaagtgagcgcagctcctttggactgctggagtgggaatccaaaagcgatgccctggaaactttgggcttcctgaaccattaccaaatgaaaaacccaaagggtccaaacccttacactttgaagttgggtttttccccggctcagcacccctcctaattaggggcctaggaagagtcccatttgagcaggaaaacatttttttttccttaaagccatttttggttttggttatttgcaaaagatccgggaccccccntttttttttttttttttttttttaaaaggnnaggtttgaagaggcttacttacccttaatggaaacgctggaaatntgcagggggagggaaaggggaactgttatctcccaanattacccttcacttttaaaaaatnatngnacatgngatttttttttccngttcaaacatttgngcggcccatgtactntnggcacatttcaataaaattgtttggaaaataacccca

SEQ ID NO: 711187 - DNA, 424 bp, Homo sapiens
  misc_feature (26)..(26): n is a, c, g, or t
  misc_feature (28)..(28): n is a, c, g, or t
  misc_feature (30)..(30): n is a, c, g, or t
  misc_feature (94)..(94): n is a, c, g, or t
  misc_feature (98)..(98): n is a, c, g, or t
  misc_feature (101)..(102): n is a, c, g, or t
  misc_feature (173)..(173): n is a, c, g, or t
  misc_feature (337)..(337): n is a, c, g, or t
ggcggcggcggcaccggcagcggcantncntctcacttgaacgccgcgagcgagcttctcgtctgtgtcctgacctcggagcctacgagcaganggcngcnntgacggaccggtacaccatccacagccagctggagcatctgcagtccaagtacatcggcacgggccacgcngacaccaccaagtgggaatggctggtgaaccagcaccgcgactcctactgctcctacatgggccacttcgacctcctcaactacttcgccattgccgaagaacgagagcaaagcccgcgtgcgttttcaacctgattggagaaaatgctgcagcccagcgggcngcccgcggacaaagcccgaggagaacttgaggtgagcgctgcccagtcttccccgtgtgccggctgcgagccttcctttgctcctgg

SEQ ID NO: 711188 - DNA, 296 bp, Homo sapiens
  misc_feature (147)..(147): n is a, c, g, or t
  misc_feature (150)..(150): n is a, c, g, or t
gctttgggtgcaggcatccagacagatgcacaacagacttcggagatacctgagctatgaagacacgcttcttctggaagaccagccaacaggtgagaatgagatggtgatcatgagacctggaaacaaatatgagtacaagttcgnctntgagcttcctcaggggcctcttggaccatcctcaaaggaaatttgggtgtgtagctacttggtgaaggctttcttgacccccgagccagccaacttaagagacaagaaaactttgagtagtggatctggtggatgtcaatacccct

SEQ ID NO: 711189 - DNA, 272 bp, Homo sapiens
caagtcaatcgtaaactgggtatggattagtccacctcaactgcctgctatgatggataaggttgcgagagtgaggagaaggctacacgtatagtgagggagagatttggtatacgattgactatgtgctgtgtgcacaagccaagtgaatcgtagtggctgtcagtggctagcacggcttgatgtagtcatcgttcattctcacttatgtgatcgttgtacatactgcactttatatgctgcaggacccaaatggaaccaacatgatgggt

SEQ ID NO: 711190 - DNA, 301 bp, Homo sapiens
ttcgcgtatataatcaagaaagataagagtgagtaaaactgacatgcagagattagttattaaggaaatgagtaataaaagagtgaaaaccattgggggtggagtcaaacaagcctagacatttgattgggagagaaaagatccaatatgaagttcacaaaccaaaagtttataaactcaatggcataccaatcctttttattgtacaagctgaggttgaaactaaaagatctataaaaactgttacttttggccttaaacagtacccactcttatggtaccggggagggtaccgcgctcg

SEQ ID NO: 711191 - DNA, 1017 bp, Homo sapiens
gcatttaccatctcacttctaggaatacaagtatatcgctcacacctcatatcctccctactatgcctagaaggaataatagtatcgctgttcattatagctactctcataaccctcaacacccactccctcttagccaatatgtgcctatgccatactagtctttgcccgcctgcgaagcagcggtgggcctagccctactagtctcaatctccaacacatatggcctagacgtacggtacataaccctaagacctacgtccaatgctaaaacgtaaatcggtcccaacagattaatatttactaccactgacatgactttccaaaagaaacgacataatttgaatcgaacgacaaacacccacaggcctaagttattagcatcatcccccgtactattttttaaccaaatcaacgactaacctatttagactggttgcccaaccttgtccctccgaacccctgaaagattcccccttcataatactaactgactcgtgaatcctaaccctacaaaatcatggtaggatgggtaacggcacttgatccagtagaaccaaggtatcacgaaagaaaagtctatcctctactatactaatctccctatcaattctccttagttataacattcacagcgacagaactactcatattgatatcttgttggagacagatttatacccagcttggttatcatcacccgatgtaggcaacagccggaaacggctgaacgcgggacataccttctattctacaccctagtaaggtcccttcccctaatcatcgcactattttacagtcacaacaacctggctcagtaaaattctaatatcactctgctggccagaaatataaatcctgagcaccagttaatgactggtcacaaagcttatacgaagaacccctggtcattgatcacggccgttgaccctcggtaaaattggcggctaaagggggtaagcaacttcccgaaagcgttttgcgggataaccgaaaatttttcacggatacaagcca

SEQ ID NO: 711192 - DNA, 254 bp, Homo sapiens
actctgtagaggttcgactcattgctctttcttacctatcacaggtatgcttgactcagaatacttctattcaatgtcagagtacacagagaagtggcctcccgtgcaggagaagcagcacacaaccaccaagtgtctattcatttcacgttcactgtcggaaaaagaagtgcaataggttagcccaataccatatggagagtccatgtagtacttagatgggtagcggccttccaactccatgagtggcccag

SEQ ID NO: 711193 - DNA, 128 bp, Homo sapiens
acagctaggggtacacttgtctcccacaacaaagctgcacagtcgagatccaatcaaagaacgtcctggtgtgcttctacacctatgccccatttagctaggatttacttgaatgtatcgtatagggt

SEQ ID NO: 711194 - DNA, 404 bp, Homo sapiens
  misc_feature (208)..(208): n is a, c, g, or t
  misc_feature (211)..(211): n is a, c, g, or t
  misc_feature (306)..(306): n is a, c, g, or t
  misc_feature (363)..(363): n is a, c, g, or t
  misc_feature (390)..(390): n is a, c, g, or t
  misc_feature (403)..(403): n is a, c, g, or t
taaaatgccctcgatgagtagcagttggttacacacaagtaccttccatgggagttaaatgactcaaatatagaaatgtgatctctccatgaagtttgttattttacctaaattctttactgcaaatgacccatacaaggatgtatctaagtagactggttctctgttctgtttggaaacatagcagttgtcagccagcgaagcgctnctncacccgccagcagctcctgtggtgtcccagttttagtgcctcttccgtgtatgtctgtaaagcctctttattggattctctgctatatatttttnaaattgcttactttgttctgattatatggctccttaaggaaagtccaaatagtttanatatggctaaactctaaaaatacaatnccctaactgaacnt

SEQ ID NO: 711195 - DNA, 648 bp, Homo sapiens
agtcgagtcgaccggtttcgcatgtttccgcttttctggggaaagggcaagtaccccaaccccttctctccttgtctctatcccttctctgcttttctggggaaagggcaagtaccccaaccccttctctccttgtctctatcccttctctgcttttctgggagaggggcaagtacccctcaaccccttctccttcaccctcagcggcaagtcccgcttttctggggaaagggcaagtaccccaaccccttctctccttgtctctaccccttctctgcttttctggggcaagggcaagtaccccaatcccttctctccttgtctctaccccttctctgcttttctggggaaagggcaagtaccccaaccccttctctccttgtctctatcccttctctgcttttctgggagaggggcaagtacccctcaagcccttctccttcaccctcagcggcaagtcccgcttttctgggggaggggcaagtacccctcaaccccttctccttcacgcttagcggcaagtcccgcttatctagggggcaagcaaccccaatcccttacttccacaccccgacctcttatctctgtgccacaatcccttatttctgtgcccaacccaccttcccaatttctggagggaagaaccca

SEQ ID NO: 711196 - DNA, 930 bp, Homo sapiens
  misc_feature (432)..(432): n is a, c, g, or t
cggccagtcgtgcgggtgaactagctctcaagtggatacaggtacgactgcgtcagcgaaaggacacggccctcactgtatggcaactagccattgggcgacaggagcgttcctgacgtctacagatgtgtgccaatcctctctcgcggccctcgcggcaccagaggtcctttgttgactcgttccctacagaggcgaaggggcgtgtgatggcaagcttcgtctagacgtctatcatgggtcatacccatagttcccttaataggtagagccacataggaaaggattgacagagacgatcgtaacatgcaccgaacatagctgatggtacgatacgtaagccttggcttcctcaagacgagacgtagtactggtctcgtgacatggcgctatgcctcctattgcacgtccatggtctggcggagagatggngcaaggagatagccgctacctttcgcaatcattgctctgctctccagaacacaataacgatcacctatatttgatacgtagccatatccctgtggtgcggcagcctagcgccgatcctgaggggactgtgcgccagacagtggcaccccttttgcaagatgcacaaatagttgtgtcgcgtggggcctcaaggttgtgttcactgaccatagtaactcaccccaaggccacttttgtgtgcgcatggcaccagggggccacggccaagaatctagcgtggagagtctcggagatgttcagaggaagcaatagccatgtgtctaaaccgttggttgataaacagccatctcgcactgaaggactcacaaaaatattggctgcgattgccctggtaaatcccacgctacctttggggagggcctcgaagggtgggccggattccattttgaaggctcaccgaacgctctgaagacccaagctggacccattattggggaa

SEQ ID NO: 711197 - DNA, 123 bp, Homo sapiens
cagcgtaaaacatgcaggtggaaagcaaaagggtaagtgcacagcctggcactatccatagtctctgttcttaagatttaatactgtctccaaaaccctggccggtcaaaactggaatttcac

SEQ ID NO: 711198 - DNA, 518 bp, Homo sapiens
tggttcctaggaatgcgtgtagaccaatccaagcatatcgacatggttgctaaatactgagcctcgcaactgctcacatgatcttccaggagtatagctgacccctctgattgttcgagagtaatgttccctctctgacttactgattgctactgtcttgccgtctgcacccatactgctgggatatgcctgcactctgcagtttgttgactcctctgcaaccttggctttggtttctccccaggtcctgaccacctggccgtgggcccctccctgtagagccacactgcaggaaaacaaggctgcttcagcccagcgagacccatcttgcctgggtgccacctcccagcctggatcagcactcggagctcccacctgcctcccaggggagtgggcatccaccctgagcacctggttctaggaatttcccttcctttcatttctgaggcagtgccggacggcttgagcatctcatgctgtctcacgttccgcagctggtctggggccaagtgctgaag

SEQ ID NO: 711199 - DNA, 391 bp, Homo sapiens
tggagaacgaccggtagctgaccctcatgctggatggcaggcaggaccacttcatccgtgcctacagcctcatagaccagctctttcaggacaggttttttaaccaggagccccacgatacctaccagtacctgcccttcattctgacgaaacagaaggctcactacttcttttccaaataccgcattatccgcagcttgatgcccttctctccatacgagcccctgaactgccacgccatagttgcatgccttccttgagatgatacacgaggctcaccagggcctggacatgcactaccatagtgcggacttccagcagacgccaacagaattcatgcgagaaggcgaccattaccggactgtgttgcgggagatgcgccacaaatcca

SEQ ID NO: 711200 - DNA, 1140 bp, Homo sapiens
gtctggatataacgtactccttgcgctacacggggccaactcaattctaaactgcgtccaacttggtagtcattatatggtagccgttcccgcgcgcatggtgtatcttacagtgcgccggtttcttcccgacctcgaaggcacggggtgatccagatcgagtatcggggtcccgtaaacacggtgcaccacatgctcagcgcatgcatgattgttacgatgcacggatgaatcattgtatgtgcctgtgcatgtgtaaccgcagcaaccatcggaacgctactcatgacgcgtggtcaccggatgcttcccgtggtcacgttgtgtcccatgaatggtaggtgtgacgcagcaagatgcttcggtcccatcgcaatgagacaatgaacagtcgatgggtacgttccgtgtggagattggctcctccgaagcaatagtgtgacaaggtggccgttgttgttatcgatcccgtcgcccgctgggcttcaatgaatgtccgtccaccgttcatcgggaaaacagcatctgggcatccatggagctgttcgaatgcgcatctcgcgtagccatgttacactgagcctatgttccagtgctgcaaggtcctttcgcctggtactgggatacacgggcgtcgaagggctagtgaacgatgatggtagtatccacccgaagggccgacgaagcacatcattgaaatcgcacgctggatgtaccgcagttacccagtcaatgttacccacggaacggcccacgtgttcctgacgagaaacacggggcctagaattgttaccggaaaggaatagaacccgaaagggaatgtgacagttcggggaaagggcctcacaggggacgtccccaaatgtttggaaagcctagcttcgacacttctggaagggtagacgaaggtgccaagaatttgtggctggtcccagactggaccctgaaaaggcacaaagacaaggatggtcttaaacacgcccccccggagagaccaaatcctttggcatttgccagaacaacccatttgggtttttcccccttcgcacacctaagagggtcatcacccctttagtccgggtcactttcccatcggcaaagttaagtaaattagggcacttacgatacatcccgcggaac

SEQ ID NO: 711201 - DNA, 292 bp, Homo sapiens
tgaggatcccctctacgagcgcaaccaagcaacatggtgaaacctggtccctcccaaaaatacaaaaatgatccaggtgtggtggtgcgcacctgtattcccagctactttgcgggctgacgtgggagcctcacttgagcccaggaagtcaaggctgcagtgagctatgatcagtgctcaagagatcctcccacctcaacttcccaagcagctgggactacaggcatgcatcacctcacctggctaatttatttcattttttattttaattcttgtagagaacgtatctccc

SEQ ID NO: 711202 - DNA, 2273 bp, Homo sapiens
  misc_feature (1305)..(1305): n is a, c, g, or t
ctgagatagatctggtcgtcacccagcgagaccaggggcaagatcatggctcaacgcagcctcaaatccgggctcaaagcagtcctcccaccgtggcctgcccaagtgctgggaaaacaggtggtcaagcaccacacccagtcagggctcacggttcaagcccctaacagaaggccttgggccaaaagtgtaattcttcgggagctggttactattattttttgctagatggaatctcgctctgtcaacccaggctggtgtgcaatggcgcgatctctgctcactgcaagctccgcgccttctcgggtttaagccaatcttctgcgtcaagcctcacaaactagctgggaactacaaggtgcacaccaccacacctggctttttttttttgtttctttctttctaagtagagacagggtttcatcatgttggccaggatgatcccgaactcctgacttcagatgatccacctgcctcagactcccaaagtgctgggattacaggcgtgagccactgtgcccagcctcttggaaagatttggattcgcttcatggagccagggagcaggacataggtgaagaacccagcttgtggctcaagttggcctgaatagggttcgaggccctgctcccccgggcctctttgtccatgtgttcaaggaaaaaatgggagagtccaataccaaaaaggtggtcagagatccggagttgggcctgattccaaagaagggtcaaggccaaggcctcgagcttacgtgtggccaccagggggcagcagggatcggggtgtgcaggtggcctttcctccccgcctccactggcccatgggtcagaagtccagctcgggcatcagggtgtgcttgaccgggcagctgggggtctcgggttcctgctcgcagatgtccccggcaacacccatcctgtccccatccccattcccactcccgtccctgtgctctgcctcccaggctctctgctgggccggccagtccaggtgcgcccagcgggggtcagggcccccgatgacctcgtccaccaggtccgccaggtcgggcaggggctcgggtcgctccacaaggatgggcgcgaagggtcccaccagccagggcagcggcacggcctgcaccaccagctccagcagctcgtccacgcaggcgtgcgcgtgggccacgcgaccccggccctcggccagcgcggccgctggcacgtccctgaagcagcgggcatcagcgaaggcggtctgcagggcatccacactgcgccgcacctcagccaccttctcctgggcgccggcgggcaggccccncacgctggactccagagcctctaccgtgccctgcagctcctgggtcaggctgcgggacagcaccagcgtctccagctctgcctggctccggcggcggctctccggagggcgctggccccattccccccacagctcgtgcaccttcccagggcgggccggggcggtgggggtcaccccacactgcatgtggtctatcagctccagcgtctcctgcagctgggccagggtgtcctgggcacggtgtttgctctgcctcagtttccccacagagtgctcgtaggccaggtggcggatccgtgctgacagggagccgaggcgcacaaagtagccctgctgtctcctctgatcctccaccgaacccacttcagggccttcagcctcagccgccagtgccgcgagctcttcctccgtcatgggcaggaagtgatccaccagctcctctgatttttccagtacaacatccacagcatggctcacggagcgcttcagctccacgctccagcgccggcccctccgggccaggtccaccacacccgtgacactgctggccaccacgtccttggctgaggtcaccaccgtctccgaaggttgctggagaaagggaagcttctcttccagcttgtccaggcccctgcaggcgaggctgttcatagtggccagctggggctgcaggtgctcgagcagcggctgggcgtggtccagggcacgggtggtcaggccgcacacgcagttctcagccaggcggcaggcggagcccagcagcgggtgcctgtccttggctgcactgtaaacatcgcagaccgcggtgcacgtggccctgaccaggggcagagccaccacacgctgcaccacgttctgctggtcctgctcccacacactggatctggggatctgagccgcctcttcttcagacatcgtgctgcaaacagggtcacctgggcgcgagcggcttcagacaccagctgtct

SEQ ID NO: 711203 - DNA, 122 bp, Homo sapiens
  misc_feature (85)..(85): n is a, c, g, or t
tgtcaaggctgtagtgagctgtgatcgtgccaccgcactccagcctgggcaacagagtgagaccctgtatcaaatatatggctgnttggatggtggttatgatcaggtgtgtagtttagaag

SEQ ID NO: 711204 - DNA, 928 bp, Homo sapiens
  misc_feature (297)..(297): n is a, c, g, or t
  misc_feature (459)..(459): n is a, c, g, or t
ggagcgccgtctccggtgcaccgagctcgctccgaagtttccaggctcgtgctaagctagcgcctgtcgtcgtctacccttcagtcgccatctatgattatctacgcgggacctctatcgagccactgattgagatgtttctcgcgacatcttacagagatccggggaggatccgcggaccggtgtgtgttgcctgggaaggtgggacgggggacagcatggtcagttaggcacagaccggtacacccatttgatgtgacttcgggcttcatgtgggtggggaaaattgccttccgnttggaagggccccgaaggggcgaaaggttacccgaaaagccacaagtacatcacactgggtggtcgattatgtgtcatttgaacccattcactctgtgcaggacacacaatgtttcacccaaaaggaacgctaacagagaatgtaccttccagtgatcaccnttgaatctccactccaaagcgggaacttttgaaggaacacaagagacccgagaagagagtaacaaccctttttatgaccaggggtttgcaggaaccaattcaagcacattcctttgcctatttccaaaaaaattaccagtttccttttattgtgcctggccacccttggaattccagggattggggctgtggtttgctcttattgtgacttcacccgtgcagggctttggttggttgacaccacaatatttttggattttcctttaaagcgctttgcgttcacgacaacttggccacacttgttcacccacattggtgcgcccactcttttgtgggttctattccacctgttcatcattaaactgcttctggctggttatgccaccaacacccggtctttaggccacatgtcggactgatgtcaccttgggggccttcattatttcgcctgcgatcattggcggtgagg

SEQ ID NO: 711205 - DNA, 139 bp, Homo sapiens
tctaagaagggaaccccaaatttaattaagccttagcacaattagttaaagtgaaaggtagttgtacaagcagttcatcacccaccatagggcatgattatcaaagcaacctttcccttcccccaagtgaattcgcgaa

SEQ ID NO: 711206 - DNA, 418 bp, Homo sapiens
  misc_feature (82)..(82): n is a, c, g, or t
  misc_feature (98)..(98): n is a, c, g, or t
  misc_feature (130)..(130): n is a, c, g, or t
gtgactctagacgatccctttatcatcccccttcgtactcactagcatcttacatatcctctatcagagatctggccagacncacaaaggcttatccncctgtccaacagaacagtcatattaagaatgncacacattatatccttggagacaacttcagcatactcttctgtctctcctttttctttacactaaatgttaggcatcaagagtaaagttataacctagtactacactttctcctcttcataaatccatcactgctagcgggtgtaaccatcaatacttttttacttacacaaaatttaaacaatcaaaccctaacagtcctgacaaatatatactcctgtgatatcagtctgcacagacagatccacagggaaattcatacaataacataaaatacaacaataccaaa

SEQ ID NO: 711207 - DNA, 440 bp, Homo sapiens
ggctcctgacctcgagtggtctgcccgcctcggcctcctggggtactgggattgcagacggagtctcggtcactcagtgctcagtgttgcccaggctggaatgcagtggcgtgatctcgggtcgctgcaacctccaccttccagccgcctgccttggcctcccaaagtgctaggattacagcctatgcccggacgccccgtctgggaagcgaggagcacctctgcctggccgcccggtctgggaagcgaggagcccctctgcccggctgccaccctgtctgggaggcgaggagcgcctctgccctgccgacaccccgtttgggaggtgaggagcgcttttgtccggccacacccccgactgggaggtgaggagcgccatctgtctgcacgacaccctgtttgggatatgagggactcctctgcccgggctgaatcccatt

SEQ ID NO: 711208 - DNA, 850 bp, Homo sapiens
gcatcttgtcgatgagtgcaataggtggtcgtaaggtaatcacgaaatcgctaactactattgctcgagggcgtctcagcgtttcgacactgcgaggccaccgtggttctgagagggccagcttccgtgtcagcgcctcagccgtcctggcctcgtcgtgaagcgcgtgcctatgggcggtcagccttgtcgtcagtcatctaccattgcgctgtgggtcgtcgttggcctagggacctttcgtcatggctaatgggcccgagggtctgcggacctggtagtgaccacgtcactgcgtcctcgtgcccaccctcatcgtttggtcccttttgacacgcattacctcctccaaagctgcgtaatgggtccttcggtagtgcctccgaaacgtgtgaacgggggtctcgtcgctccagtccattgggggtgcaattcgtcgagagatctttgtgagacgacctgagggaacgccgtgtcgcggtatgcttcatgggttccgtaatagtcatttgacaggcggaacgccggcgttggcagaggttgagtaattggcctagagtggcaaacgattttgtgcgcagctcagtccaagtgtttgctagcaagcaccggggactcctacttattatgacccttccgaaatcgaagctactgtatgcaatgataccgtgtgatgcgccctgacgtgtaatttcctcacgccagatgctgaatgtgagttctttacccctacttcgtgattggaacactcctggagggggaaaccctggggttcaggtgttaatttctcttcgcacaggggaaactctggctcagttgagaccgaatggaatctttgccaggatccgaa

SEQ ID NO: 711209 - DNA, 632 bp, Homo sapiens
  misc_feature (29)..(29): n is a, c, g, or t
gaacaaaattactaactaaatccaagagntgttcttagactaagtgattctttgcgcactgtctcacctcaggaatgagccatgcgagctgcgcttaaggcagcggctgtgttggaagcatgttatgacgctgcaccgagagcccagcccgttaccatgaggtcctcgtggtacttcactaattaactctctttggatcagatccagaaaaagaccagccctaaacttaatttcactagtaggaaaggttgttgtaaagaagttccattgtagtttgattttcttaacggggcctttgaaattaaactcttctgtagtcatgattttccaggtaaaagtaagagtgttagttcagctatgcttgaggaaccttagaaacaaaaattaaaccccaggctttttacttacctttttcatatgtcttttcttaaagtgtgtgtatgtttgtgtgtgggggtgtttaaatgaataataatataaatttaatgaacaaagaaaattgatggctgggtgtggtgtcacgcctataatccgagcactttgagaggcagaggtggaaggattgcttaaggccagaagtttgctactatgggcaacatagtgaaatccatctctatttaaaaaaagaaaaa

SEQ ID NO: 711210 - DNA, 637 bp, Homo sapiens
gagacttggcgaagtaggagccctgtgtgttcgtgcgtcagagtcggggctgagaccagccctggccagggcagttaccaggacggtctccggaggccgggattcgcggagggtccaccagcaggaagaaaccccaggaggaagaaacctcagacagatcgccggggaggcagcgcgggatcccaacctcaggcgtgcgcggacggtgtgcgggtgagtctccccaaaagtggcgcccttgtgatgtcgaggacaggtctccctgtgtgcccgtgggctgctgtctcaccggtggctcgtagtcgcggagaccagaacccggcagcttcaggggctgcctgggggtgggtgttacctgctgtatgtctgtgtccattatgggggtgtgtgtgtgtgtgtgtctgtgtgtctgcgtgtgtgtgcgcgcgcgcgcgtgcgtgcgtgtctgtgtgcccactaccgtctctctcttaagtctctctctctctctctctctctctctcccttctcgctctttccgtcgccctctctctctgtctctgtccgtgtgtgtgtgcgtgcgccttgggacacgtgtcccgtgtgcgccggacgctgagtttcgtgcccgtcggcctctcttctggtcagcctctct

SEQ ID NO: 711211 - DNA, 1036 bp, Homo sapiens
tggaaacagtcttgctgtatggcccaggttggattgtggggggcacaatcacagctcatggcttcctcaatcacccaggcctaagaaatcctcccaccttgtagctggggactacagctcacagcacacctgggctaaaaattttttttcttggagagaaacgggatcctcttatggcgcgcccaggttgggtctacaggctccaggggctacaaatggtgtcctacctggctctacagtttccaaagggcaacgaggccaggtgtgtgataggctttggctcccttgtgcaattcatgtgccacaaacagagaggtttcataatacctatttaaagtgaatgtggacctttcacacataaactgtgggttaatgttgggggtggggacaaggatatcttaaaaggcgtggaaaacagttgtgtaaaatgtgcctcgtgtgaaaagtagtgtttgtttcaagtgccgagttacacctgtggactgtaatatcatataagcataaaagagggagtggcttctggggggatgttacaaatacttgtgaagaaaagagacgagaaagagaagaagaaaagagcatagaatggaagagaaaaaaaaagataaaagagagaaagaagacacacgacagggaaggagagcgcgggacgcagagaagagaacagcgagcagggagggacgagaggcagaagaaacaagcagaaagagagagacagagcgcgacgtagaccgaagaggagagaagaaagaagacgagggaggcaacagagcaaagaaaaggagaaggaatggaatagagaagaagcggcagaggagagaggaagcagcgacaccgagaaacagaagcaagcaaaaaagaaaaagaagagaaaagaaagaaaaaacgagagacaaagaagcaacgcaggaaagaacaaaaaaacgcagaagataaaaaaaaagaagacaaagaaaacgaagaaaagacggaaaaaagaaagagcgagaggaaagaagacaagaaagcaagaaaagaagaagagagagaaaggaac

SEQ ID NO: 711212 - DNA, 167 bp, Homo sapiens
aacaaccgccagcaaatcctaagtcttggccatggctgtttcctgggggaaaaacaccccccaccaaatccttagcttgcccttggggggttccagggggaaaaaaaacggtccaggaaaattttgttttgctttggggtgattccagggggaaaaacatgggttcc

SEQ ID NO: 711213 - DNA, 464 bp, Homo sapiens
acacgggcagccaggtggagagaagggcagagctaccttcagcagacaaaacgacccatgcaaaggctctggggcctggaggagctcgaccctagatgagactggcgctggtattgtccccacttcaccaggaaggaagccaaggctgcagaggatgggcagcacctaacgcctcagggctaattgttctccatccgtccactcgttccaagtccattcacttcctgctacccaaggccactgtccccttccggtgggaccagttacctgatgctgggtttaaccttctccaccagaataaccactggccttagaaactcacttgggtttcacgtctgcatgtgtgtgagctagctctggggttgaaattgtatcagcatgatcatcacagttatatctgatacttgatttgtctccaaaagctccaattgataggttaaataaatgacatatgcttcatcaaa

SEQ ID NO: 711214 - DNA, 856 bp, Homo sapiens
  misc_feature (58)..(58): n is a, c, g, or t
  misc_feature (180)..(180): n is a, c, g, or t
  misc_feature (214)..(214): n is a, c, g, or t
  misc_feature (218)..(218): n is a, c, g, or t
  misc_feature (283)..(283): n is a, c, g, or t
  misc_feature (302)..(302): n is a, c, g, or t
  misc_feature (308)..(308): n is a, c, g, or t
  misc_feature (341)..(341): n is a, c, g, or t
  misc_feature (398)..(398): n is a, c, g, or t
  misc_feature (460)..(460): n is a, c, g, or t
  misc_feature (597)..(597): n is a, c, g, or t
  misc_feature (601)..(601): n is a, c, g, or t
  misc_feature (626)..(626): n is a, c, g, or t
  misc_feature (632)..(632): n is a, c, g, or t
  misc_feature (665)..(665): n is a, c, g, or t
  misc_feature (720)..(720): n is a, c, g, or t
  misc_feature (732)..(732): n is a, c, g, or t
  misc_feature (840)..(840): n is a, c, g, or t
ttcagaagtttgccattcatttcactcccccccataaaaatgcctggccttagcaganaatcttctatctttcaggtattttctcagtagaaggtttatttgttgcagttactttttaagagtttaattttcattgttaaccttactgaatcatcagtgaacccagccgattgggacccnctgtggttccattctcagtttctctatggcagtntgcngtttttcaaaggctttgtctagattatcatttatgatgatcaaatcaaaatagtggttgtttgcnctctgaatccgtgcccttncatccnctgttttcttcaagttagattgggtcagaagcntgggagtgattcctgcctcccccacacccttgtccatgggacgtcacgcctctcgcnccggagccgcaataaataccacacagggcataaactctgaggtcctcaatactttcagtccntgtgggtggacatccagaatgccagttcgtccagtctggacaacctcaagaatagaatcaattttggttccatagagatttccttcatattccccatgttccacatactttccagctttaatatctgcttccatctnagancgtgacaaaaacttatatgcctggncatctntttcatctccccttggtttccgtgaagtaaatngcaccgtagttccaaatctagtgggattaaatactataaacctgtctttcaagcntcttcggcctanaccttgagcccctatcaatactaatgtttttctaaagaagggaggaattttggctacctcctcaaatatctggatttcatgacgatcaaattcagcataaaggtagcnctcaagtaaagaaagt

SEQ ID NO: 711215 - DNA, 169 bp, Homo sapiens
  misc_feature (43)..(43): n is a, c, g, or t
  misc_feature (75)..(75): n is a, c, g, or t
  misc_feature (93)..(93): n is a, c, g, or t
  misc_feature (124)..(124): n is a, c, g, or t
  misc_feature (158)..(158): n is a, c, g, or t
cgcgctgagccgcctggggcgggggaccccgtgcaggccccgngccctctggtgctgccagcgcgcggccgcaanacccgccacgacccgctngccaaatccaagatcgagcgagtgaacatgncgcccgcgtggaccctgcggagttcttcgtgctnatggagcgtta

SEQ ID NO: 711216 - DNA, 126 bp, Homo sapiens
cttcaagcagatgataagattgtttcatgaaggacaagtgctatccaatctaaaagtctctgagggaaccatagtaaaaagtctcttataaagttagcttgctataacatgaacttggaatagctg

SEQ ID NO: 711217 - DNA, 94 bp, Homo sapiens
ttggccccctcccgtcaggcccagggcttggagtgaaaattactttcaggtggtggggtggggaatgtgaataaacattatttcttgtcgggga

SEQ ID NO: 711218 - DNA, 537 bp, Homo sapiens
  misc_feature (342)..(342): n is a, c, g, or t
  misc_feature (367)..(368): n is a, c, g, or t
  misc_feature (370)..(371): n is a, c, g, or t
  misc_feature (393)..(393): n is a, c, g, or t
  misc_feature (481)..(481): n is a, c, g, or t
  misc_feature (530)..(530): n is a, c, g, or t
aataaagcttgtcaggatgttaagcatctcaggagaaatattggaaaattatatgtataaaaccaaagtgctatttttaaaagcatcatttatggtttggcaacaggtatctcgtgcatgaagctgacagctaaagaagattttaaaaattgagttaaagatgactgtgtaaatgtccaagcacagagagcatgcacctgactttctaaagtttgatgtgttctcaagcctgcagaagcacaaggaacagtttgatcacttttggtctgaaacaaagctgtatagggatcctctctctcttgagcaaagatacaacagaatatattttttggtgaagctttngagccatgtttactaataatctggnntnnaagcttctattctacctatggntgaatcctcatgctcttggtaatggttacacacttgcagtgtagcccagttggaatattatttgggtatcaactggccatggaggagntcttgatgatccaggctcttggccttcatacccacacaggctttggccnggttccc

SEQ ID NO: 711219 - DNA, 599 bp, Homo sapiens
acagcatatgccaaaaattcttttgcttcaaataaagacaagccttcaaataaatcattatgtctgacaactgaattatttgaaggcttgtgtgatttgaagaaaagcatattgccaaaaattctggttaaaagcttccgtaatgggtaacagaccatgggagagatatgtggttgggtaatgcgaatgtagttatacaaagaaaaatacagatgtctccagacctgaggactttttaatagggcggttgttgtgttggtggcacattggatatttctaacatgtacaaagctatgtagtgtgatgttactttacatatcttggctatggtatattgttagctttgctttaaaatgccaatgaagcttgtgatcatgtgctagtcgatggctccattttgaagagaattcaagtttgcatgtctacagctgactgtggtgttagagattgagtcagtcgacattcaggatttcaagtctgaggtagtcgaacccgtcaggaaaacaaaaatgggcttgatctgaaatcagtactggtggaaatgaactaatattaggtattatggaagtaatggtccagttataagaatatgcttctgg

SEQ ID NO: 711220 - DNA, 455 bp, Homo sapiens
gctatacccgcatacccaagtgtgcagaagctgctgcaggactactttaacgggcgcgacctgaacacgagcattaaccccgacgaggctgtggcctacggtgcggcggtgcacgcggccattctgatgggggacaagtccgagaacgtgcatgacctgctgctgctggacgaggctgccctgacgctggcgctggagactgccgaaggcgagatgactgtcctgagcaagcgcaagtgcaccatccgcaccaagcagacgcatatctttaccacctactgcgacaatcaacccggggtgctgatccaggtgtacgagggcgagagggccatgacgaatgacaacaatctgttggcgcgctgtgagctgaacggcatacctgcgtgccccagaggcatgccctagattgaggtgaccttagacatcgatgccgacggcattctgcgtcacgtgcc

SEQ ID NO: 711221 - DNA, 168 bp, Homo sapiens
tctcaaggtacatcagtgtactataactgcagccctcatggatccctctgcattctaaaagatagtgggtgtatggatagaaggaggtggtggtcgtttattttttttttttttttattttttttgaaaaaaattcattggcccctaaacaaaccttagccccattac

SEQ ID NO: 711222 - DNA, 216 bp, Homo sapiens
cgactggcgggtctcgacacccgactggaccacgcgcgccagtgcaaagccgagggcggctgcaatgccgatcgccaccgccgggctcttcgcgacgaaggcgcgggcgtcgtcgagcagttcctcgacgtccttgtccttgatcgcacccgacagcgaggtcacggtgtcggccgccgagcgggcatattgaccatattgattacccagcttttc

SEQ ID NO: 711223 - DNA, 523 bp, Homo sapiens
  misc_feature (43)..(43): n is a, c, g, or t
  misc_feature (59)..(59): n is a, c, g, or t
  misc_feature (91)..(91): n is a, c, g, or t
  misc_feature (312)..(312): n is a, c, g, or t
  misc_feature (315)..(315): n is a, c, g, or t
  misc_feature (372)..(372): n is a, c, g, or t
  misc_feature (384)..(384): n is a, c, g, or t
  misc_feature (390)..(390): n is a, c, g, or t
  misc_feature (427)..(427): n is a, c, g, or t
  misc_feature (434)..(434): n is a, c, g, or t
  misc_feature (491)..(491): n is a, c, g, or t
  misc_feature (498)..(499): n is a, c, g, or t
  misc_feature (516)..(516): n is a, c, g, or t
gacgccaaagagactcgagtggaagttaaagtttcaagtgagngcaagcaaggtgttcnagccgggctgcgggttccctgttaacgttctnccctaggcaaaggtcccagttccttctcggagccggctgtcccgcgccactggaaaccgcacctccccgcagcatgggcaccagcctcagcccgaacgacccttggccgctaaacccgctgtccaatccagcagaccacgctcctgctacctctgtcggtgctggccactgtgcatgtgggccagcggctgctgaggcaacggaggcggcagctccggtcngcnccccgggcccgtttgcgtggccactgatcggaaaacgcggcggcggttgtgcagcgntcacctctcgtntcgctncctggcgcgggctacggcgacgttttccagatccgcnctgcagntgccccatagtggtgcttgaaatggagcgcgccatccaccaggccctggtgcaagcnatgggcnncttcccgaaccgtgtcncttcgcc

SEQ ID NO: 711224 - DNA, 164 bp, Homo sapiens
gaaagatcccaaataaacaatctaactttatatctcaagaaattagaaaagaaaaagaccaacccaagcccaaagttagttgaaggaagtaaataatgaagttaaaagcataaataaccacattagagattagaccacctaacatgatcaatgacaccgagtag

SEQ ID NO: 711225 - DNA, 165 bp, Homo sapiens
ccgattgggctcactgctcctttcacaccacactctcgctttgatgtgcttgtgctgtgactacttcacagagcagcacaccttctcctgtgcagatgtgggctcccaatgtgcccacatacagggtgtgctagcagtggctggactgtgggtgtagtgagtgtt

SEQ ID NO: 711226 - DNA, 803 bp, Homo sapiens
  misc_feature (15)..(15): n is a, c, g, or t
atgatacccctaaanaggcaatgatggggagaaggatatacagacatcagtatcaagcatgtgatcgtgccgatatggcacactgtcatatatcgtggacgaaaatgtgcatccatctatctggcgcattcctggaatctaatcaaatgacgtgatgagacagtcgtactagaaatgaacgcatgtagaacatagattgtgatgcaaaaggtaagggcatagtcgtagcaggtagtggggtgacaagggacgtacgcaatttcgaaaagttaactcgtcgccttgtgagattcaatatgcgtattaacaagcatagcaacatagtcgctgggaaggcggatgggaatacggtgagtcaacgaaaccaatatgtatggatctactctttgatgagaattacattttgatgaactcgaacgaagatagataccatattggtcgatcttactcgacattgaagtaagacctctaagtgaaggaagcatgagtacgtgataaatcgaagaacaagctattgagttataacaggggggatcgagatctcgaagggcgatgatcgttgtgctatgttcgcatgattaaagttggctggtctgtgatagtgagggttgaactttttgaaacagtgtggctaatacattccaagggaaattaggagtcaaagagacccgaaagaggcactagcacgcattgcgtaggacatatatcaggcactggagagatgatttgagaatcagatcatataattagtccgggatgtataaactaatacattgagatattgcagcatggatgacgcgatc

SEQ ID NO: 711227 - DNA, 108 bp, Homo sapiens
cgatggcggtccacatgatgtccacgctcacacaatggggctcagctgaactgggagagggaagtagccaggaagggtactgatgagcgtatggaagcagaggagcgg

SEQ ID NO: 711228 - DNA, 147 bp, Homo sapiens
cgaatctctcaacacacatgggcttgccatgaaccatatcatgaatggcatgcatcaccagacttcaacaatttagggtcatcttccagctttttacccagaacggcgatcaatcttctccttcagctcatcacacttgcatgcgat

SEQ ID NO: 711229 - DNA, 185 bp, Homo sapiens
tcttcttcctgagactgcatcatgtcgcccttgcacccacccccccctccctcgaatcgaaggggctaccattcccgatgaggctctcgaaccaccgttttgggttgtgttaaaggtgagaccctccctcccctttatgtcccatctcgaactaactgctaataaaatggggttctgtcttgtta

SEQ ID NO: 711230 - DNA, 146 bp, Homo sapiens
atgcatccccacaatagtgcactgtgaaatctcaacattcccaattctgcacacacttccatccaacccaacagtggccagcacaagctcagctgcagcatgcatggtcacagggccacaatgtggggggcatcctctcagcagtc

SEQ ID NO: 711231 - DNA, 710 bp, Homo sapiens
atttcattcaatatgtctttatgaattatttaccattgtgtacttcaatagtagcagaagaccaaagaaaaggtcatctaatacatgggagaaacatggatttggcacgtattgtcttgggtggaacataaataatgtatacgctgggtcgataactgaagcaattaaaactctttaactagtgaatttggatttccaaagaaacaagaaaactgtcttcaagggcttcaagcattggctggctatgtgggcatgtcaagcagggattcaagaccaggacgtgtcacagatcattacgacgtgaatgaatggtctcagtataactggtggtgatctgggtatactagaatggattctgggaagagaacagatgccatgtgcacagggtgcctcactagaagcagttctggaaagatagcacaagttatgaagaagccaagaatttatggaccaatgaccaagatattggccccagcctactttatcctgggaggcaagcagatctggggaaggtggtgtgattacacgagcacagaaaggaatcatcggatgtatatgaactcgatgctaagcacgggtagctggtatgtggtacaaacaaatttattgaccgtgggtaaccatccattcttccttgatgatcgcagaagcctgcaagatgttgtctgaaccgaccagcagagaatatttcatttgaaccatgttgatgc

SEQ ID NO: 711232 - DNA, 399 bp, Homo sapiens
ttttttgaagtggacccaaggcccccggagcttttcagcagctggcttcagagccggcctgacctttaccttaattttgtggctttgcgcagggacttttttggggggccccggttcctgcatatccggaggtttgggccctagcatggcttccctgtggatgccttgtcagttccccccgcctgacccgaggggaggtgggtggcactttcccgagcccaggtttttttggcctttcccagggttttgtgatttccccctgctctgcatttttagggtatttttagggcacctgggttggctccctcacatcagggtggctgagggccgtttctctgtgttggtgaaaattctgtgggggtatcgggggatttggcccgtaaagttttggggggctta

SEQ ID NO: 711233 - DNA, 662 bp, Homo sapiens
gttagaaggcatctccctggagttcagaggtattggattgaccaaagaagtctgctggacagtatgtgtgtatacaaatggggctccacagtgattaaagacaagagacttataacaacagtgggtatctactgaaggaaacatgcatgacatttagtgttctgtgctggtctgggcacccagctttggttgccaaagatggtaaggggtgtaaaagtcatgtcacgtatgaaagagcttggcaggaactagtttcaaacgatccacagcttgtggaaggagcgattagagcagagctaagtccacttacaagataggtagattgcagctcaatataaggacttgttggttaatatcagtgcagttccaaatggaataagctgtatgaacatggcttagcagaatctgaatgacaacctgttagaagttctaggtaattctgcactgagtacaacgttggattatatccttgggctgtttccaactcaagattctgttatctcattataagcattttgaggaaggcagttggtataaaggtgaccttagtaataaaagtcagtgtgaagtctaaagtggtgccacaatgaatttaaagacaagaattgtagggtcaaggatacagaaaaatgcctagtaacatcgtgccgaattcctgcagc

SEQ ID NO: 711234 - DNA, 103 bp, Homo sapiens
  misc_feature (37)..(37): n is a, c, g, or t
  misc_feature (54)..(54): n is a, c, g, or t
  misc_feature (80)..(80): n is a, c, g, or t
tggcaggactgtttgccacaacggggtgctaggcctnacccgcctgctgttttncctgctgggcttcctccggattcgcnttcgtggccagcaagcctctcgc

SEQ ID NO: 711235 - DNA, 200 bp, Homo sapiens
cagttccacacctataacatctaatcttcaacacagtcacaaacaccaagcaatggggaaatgagtccatattcaatacatgttgctgagataactgagctaaccatattcagaagactgaaactggaccctttccttaggccatatgcaaaaatcaattcaaaatagattaaatacttatatgcaaaaactataaaaac

SEQ ID NO: 711236 - DNA, 519 bp, Homo sapiens
tagaggaccaggtcatgtatacggaagtcgtaactacaacagtcattgagtttagactctctgtatcatagagcacaacgcatcagtccagtctctggtgactgattataacactgtagactgagctgatactaagataaagcaggcggtctagagtgtcacataatcagatgtctaatggcccagtcaaaagagtgcaaagcttacatcagtaagagagaaaaataaaaattttttattggtttataagtatcttttgtgctgaaagtcaactttatgactggatataaaaagtcaggagttaagagtgtcatgcagcagcactgatttaatgactggagatagaacaaacagatgtttgaacaaagactgacattcttaacaggttttattatatagggtggaatgctctaaattcatgaacgcttttggaaaatcttcaattctcaaccccttaaaaaagtaccctgaaccaggaagaaaaatccagagacagaaataatgatctgggtatacatg

SEQ ID NO: 711237 - DNA, 1564 bp, Homo sapiens
gcagcagcagtggggcacgtccggcattcaggagctgtggcagtgttctgttcgtagccagcgactcaacacacagcagcacattaaatcattgtggttgcattgttgcagcaacatgtgcaagcacagcatttttcattcattgcaagttgttccacagttgccgagaccagttgcaaaatgggcagtgcaatgcgacgaatgacttgtgtgcccaacatctaccattggtcttcttttgtgagctgtgcaagacaggtgtcatggcccactgtgcatcactactataccacatgccctgcctaatacagcacaccacaaggccatcactctttgggtcgcagcaggcataacactgactggccgtattctgtgcagacatcccgaaagaagtacccatccctgggaaccaaacaatgcatcttttgtcgtgccattcaacgcacagcaaggccacgcacaaggtgcaagcacttcaactcagcttcatcgtcgagaaaaaagctcactcacatgcagtacataaatctggggcccacttgcctcttcattttcatatcacaacaaaccagcacacatagtcatccatggcactttacacatcatagctggtaacccaatccctttctcacatacagactcgtccaatcaccaaccgagaacatttccatagcatcacttgcacattgcactggcaccagcaaattcattcgcgggccaggggcgatgtcccttggcatctacaaacacacctcacaggccactgggccttagggttgggttcaaaaactcgcagacgtcagtggatttcgcaggcatcagtttctggcagctttcgttgcacgtcgtagttacagactcccaacaatttaccaaggttacaacattggggtaacatcacacgttgtgtagaataacaccacccaccttcttaagacaaggaacatctcctggactttacggaaactttacagccgcaacgatcaaccgtgctagcacacgttcttctacaaccaactggacgttgatgacacgtctgtcacacgttctttgaagacaccatttatacctggggacgcaccctgggggccgtcacacatctgtttcactcacttctgctcttcttaccgcctcggcgggtcctacttgtcaaccaccacgcatagtcgctaacacaccccgtcggcgcgcgcacatgatcgcatccaacgtactatcaatcaaacaccactgtagaagcgacgactccaccaacgtggagacaaggtagccacatggaagtaaggccaccgaacaaggcgtcgacgcgacacgacatactctaagccagaacgaacggcaagacaaacgagcgcggacaacagccaacgcacagaagacgagacaacgaggacgacagacaggaggacacgaacaaccacgcccgcagcggcgaagaagacgaacacgaagacacgagacagcatcgcgcacggccaggtcacaggcagacagaacgggaacaacagccaagcaacacacgacggacacaacagcagagagtagacgagcgcctgagccgggg

SEQ ID NO: 711238 - DNA, 213 bp, Homo sapiens
ggtgtacatcaaatgaaatgtagaagtgtgtatgctgtacaaaccacaagaaactttctttaagttgtgttaaatgaggagatgacctagaatccaagcgtgttacatgaaaattgtacatgagcagctgcttccacctttcagatatagatgttggaaccacatgcatatgttcttgctctatcctgtgatctgcatagccacaaaggtagt

SEQ ID NO: 711239 - DNA, 375 bp, Homo sapiens
  misc_feature (12)..(12): n is a, c, g, or t
  misc_feature (32)..(32): n is a, c, g, or t
  misc_feature (41)..(41): n is a, c, g, or t
  misc_feature (61)..(61): n is a, c, g, or t
  misc_feature (76)..(76): n is a, c, g, or t
  misc_feature (103)..(103): n is a, c, g, or t
  misc_feature (105)..(105): n is a, c, g, or t
  misc_feature (107)..(107): n is a, c, g, or t
  misc_feature (109)..(109): n is a, c, g, or t
  misc_feature (124)..(124): n is a, c, g, or t
  misc_feature (138)..(139): n is a, c, g, or t
  misc_feature (184)..(184): n is a, c, g, or t
  misc_feature (191)..(191): n is a, c, g, or t
  misc_feature (200)..(200): n is a, c, g, or t
  misc_feature (217)..(217): n is a, c, g, or t
  misc_feature (221)..(221): n is a, c, g, or t
  misc_feature (295)..(296): n is a, c, g, or t
  misc_feature (301)..(301): n is a, c, g, or t
  misc_feature (372)..(374): n is a, c, g, or t
gacaaatcaganagggcacttgacaataaatnttgattctnagccaggagaaaaacttganatgttgacttaagtnagggggaaataaaacccagagcgagananananacatgttactatganagacttgtattccnnattgtctctgaactttaatcctgtgaaaatgctcaaagttttggngagagtnatataaaanaactgactgtggctganaganttgcatttaaaaatatttatgtgcaccttgttactttctactctgcaatgatgtattaacaattcatggtattnntttgnattcttcaatgacccttccacatcaacagtatttatcatgtgttaaagtcatgggtcttatgtgcagattnnnt

SEQ ID NO: 711240 - DNA, 875 bp, Homo sapiens
ggaagcccttgcaagagaaagagcataaattgtaagagtacaagctgctaagctagccagagtttccctggtgcgcaaagaactcaggtcccggatccagagcctgcctaagaacttatctcgattgcccaagtgtcactgggcagccacactgacacctgtccctttgcgggagacatctacagtgagagagttgatggaccagcctctttccaggtcccagtgactttgcaacgcagatggacgcacaggtaacgtggatagtcctgttagtgtatatgagtactcatgtgagaaagaaacactaacaaaaggaacaaccgtagtaatttataccaatacttgtttaagaagtgtcggttgtgtgttactatctacacttcggtaaattagacgatgacttgaattcgcatcaacacgtggatgatctgtgtgtagtaattaagctcaacaagatagtgattatctgcaagagagatctttttgtaaatttcttgttttgatccaaggccttgggagaaatctctggttggattcctctcgggtattcccactggtgtgcctttatttgtcttcagcatgtaatcactgtatatcgatgtaattccctgagagcgacagagcctactgaggaagtcgactgagacttataaggtctagcttgggacccgatcgtcggaaggggactcaatgtccaaaattatcttgaccttctccccaaacagaattccattctggtctatacaagcccttgaatcacttagaggtcggggattaaccctaaaaaaggtggcccctgcggggggaaaaagctctaaaacgggctatacaacggaaagtcccccccgcgccgtgattcaaggggaaaggcccct

SEQ ID NO: 711241 - DNA, 93 bp, Homo sapiens
tttttttttttctgcctactatagaagttaaaccacccgatagtccttcgagcaaaagcaaagatccaccgagagaagaagagaaagaaaaga

SEQ ID NO: 711242 - DNA, 338 bp, Homo sapiens
tagtcggacccagttctgcttcttgaaagatccgtacctctctttggacacagctgcagtagtcatccttctgggatagccagcctggatcagaacaactggggctcatatatctgctgtgcactaaacctgtgaaggcgtatgataggaacgttccagtcagactgtactcctctggtggctctggggaaaagggcctgatgaggggagatgcgcttttttcctccggtaatgctggcctcatccctaactccctctcctgctgtcttctatccaatgacagagtacccagattataaccaaggtggatggcctggggttcaagaagcaggaactgg

SEQ ID NO: 711243 - DNA, 1492 bp, Homo sapiens
  misc_feature (115)..(115): n is a, c, g, or t
  misc_feature (121)..(121): n is a, c, g, or t
  misc_feature (137)..(137): n is a, c, g, or t
  misc_feature (163)..(163): n is a, c, g, or t
  misc_feature (215)..(215): n is a, c, g, or t
  misc_feature (228)..(229): n is a, c, g, or t
  misc_feature (302)..(302): n is a, c, g, or t
  misc_feature (321)..(321): n is a, c, g, or t
  misc_feature (389)..(389): n is a, c, g, or t
  misc_feature (400)..(400): n is a, c, g, or t
  misc_feature (511)..(511): n is a, c, g, or t
  misc_feature (538)..(538): n is a, c, g, or t
  misc_feature (548)..(548): n is a, c, g, or t
  misc_feature (553)..(553): n is a, c, g, or t
  misc_feature (618)..(618): n is a, c, g, or t
  misc_feature (628)..(628): n is a, c, g, or t
  misc_feature (648)..(648): n is a, c, g, or t
  misc_feature (715)..(715): n is a, c, g, or t
  misc_feature (761)..(761): n is a, c, g, or t
  misc_feature (763)..(763): n is a, c, g, or t
  misc_feature (765)..(765): n is a, c, g, or t
  misc_feature (774)..(774): n is a, c, g, or t
  misc_feature (864)..(864): n is a, c, g, or t
  misc_feature (869)..(869): n is a, c, g, or t
  misc_feature (888)..(888): n is a, c, g, or t
  misc_feature (984)..(984): n is a, c, g, or t
  misc_feature (1108)..(1108): n is a, c, g, or t
  misc_feature (1153)..(1153): n is a, c, g, or t
  misc_feature (1210)..(1210): n is a, c, g, or t
  misc_feature (1260)..(1260): n is a, c, g, or t
tttctatatccatccgacgacaccgccgcccaatctgtgcacaggtcaccctcccgccgcacccctcggctctcttgcttgtgtctctctcaccacttaatccactatctttatntctctngtattaagtaatagangcaaacttagtcacgtcgtctattanggttcttgttctcgcttattgtatactctacacaatctcgcttctcacacancaccctcacacannccatagtgatcgactttctaggataccaaactcacattcactgaaatcatatacatgcatattattttaatantcctccgcgcagcagtggngcatcgtgcagtgagtgcttacgtatatgtatatattgagctcaatagtagaatctaatatgctggtnttattatgagngatataaatgtaattctattacatttatatatatacgtccgcgcaatagacaaaccatcgctcgaagaacacgaatcactaatacactcacgaggacaatctgtcacatcncaacacctactgctcccagcgcacatnctaagctcanctcgntccctgcgttaacgagtcccacaagtatgcacagcgtcgcataccacgcgccagtgacgcttcgncagtgtcgantacgacgcgtcgtctctcgngtcgcctaatggtgttcagtgagactagcgttacgttgcgtcttcttctcgctcgtccgacgtccgntcgttctcgctcgtctgtgtctcgtgcttgtctgtgtttgttgctntntntcgtatgantgtgaaacttagcatatcactacgcactgccactaactcagcttacatacctctcacagctatctcacatctgagaatcatagctatgantcaanactatcacgactaactctntgtatatatatagatatataatatagatagaataatgtaatcatatacttatatgttataatatatatattactaggatatgattatacgtataanttagatacgcacatctcgctacaatatcacactccacacaatacatactacatcgctacgatttcttatcaatgatcactctggaactcaactcgactgctcctgacgtgcaccgctactgtantgtatatacacgcagtacgatgtgtagcactagagcgttcctcantctctactcctgcgtcatactactactacactgctcctatcatctttctatcacacnctatctgatcagtgcatcaccatcatacacctcacgcattatactttatnctcactgctccatgtactattctcttagcgtatattcaatgttagtctcataatatagagatagactatttgcatatttacatcccgccatccatagtatcactatgagtgtcgcacggttacgccgacactcaccgtcagccgcacgtccgcgtatcgtcgactcctctctctgtggactctacgcacaccgtacgcaccattcatcgtacactaacgtataattctccat

SEQ ID NO: 711244 - DNA, 1939 bp, Homo sapiens
gggggcgcgggggcagaggtgacctggggctctggacttagacccaagggctagacaccccgggtctgactggtgggagagaagacgtaatgtgaagggggttggcaaccaagacgcgggaccccacttgcagtaccccccgtctgcggccggcgtcgcccacccgcagccgccggccgggcaatggcaccacctagcggacggcaccagtgcggggaccccagcctcgaggaggcgctcgtgccgggcggaggtggcgcttcagcaccgtcgtgggccggacagcgcctcccgcccccggccctcgaaacctggcttctggagcccagccgtagggaccggacggaagacaccgaaggaatggcagcgccttcacccggaagaggccttgtatcttctggagtgtggctccatccacctcttccaccaagacctgccactgtctatccaggaagcttaccagctgctgctgaccgaccacactgtgaccttcctgcagtaccaggtcttcagccacctgaagaggttgggttatgtggttcgacgattccaaccaagctctgtcctgtccccgtatgagaggcagcttaacctggatgccagcgtgcagcacttggaggatggagatggcaagagaaagaggagcagctccagccctcggtccattaataagaaggccaaggccctggacaactccctgcaacccaagagtctggcagcctccagcccacctccctgcagccagcccagccaatgcccagaggagaaaccccaggagtcaagccccatgaagggcccagggggcccctttcagcttctggggtccctgggccccagccctggcccggccagggagggggtggggtgcagctgggagagtggcagagccgagaacggagtcacgggagccggtaagcggcgctggaacttcgagcagatctccttccccaacatggcttcagacagccgccacacccttctgcgcgccccagccccagagctgctcccggccaacgtggctgggcgggagacagacgctgagtcctggtgccagaagctgaaccagcgcaaggagaacctctccaggcgggaacgggagcaccacgcggaggccgcgcagttccaggaagatgtcaacgccgatcccgaggtgcagcgctgctccagctggcgggagtacaaggagctgctgcagcggcggcaggtgcagaggagccagcgccgggcccctcacctgtggggccagcccgtcaccccgctgctgagtcctggccaggccagctccccagccgtggtccttcagcatatctctgtgctgcagacaacacaccttcctgatggaggtgtccggctgttggagaagtctgggggcttggaaatcatctttgatgtttaccaggccgacgctgtggccacattccgaaagaataaccctggcaaaccctatgcccggatgtgcattagtggatttgatgagcctgtcccagacctctgcagcctcaagcggttgtcttaccagagtggggatgtccctctgatctttgccctggtggatcatggtgacatctccttctacagcttcagggacttcacgttgccccaggatgtggggcactgacctcacagctctgcagaggatggagcttgctccgggggaccgggactgtctgttctcagggaccatctcggctgcctcctgtacccagactctaacctgtagcttcagaggccagtctgggccttggccctgggtgtctgatactcacagagtgaaactgtgaccctctcccttccctgctgccttgcagtgacccctctggaactcaggactcgattttaaggacccaggaggtggggcagaagagaggactgtgtgcctttaacgagagggtgcctgcttcgtgctataaagccaaagccattaaaaatagatttcttt

SEQ ID NO: 711245 - DNA, 2028 bp, Homo sapiens
ggtggcggcgcgcgcagcggcaggcggcggcgggatggagcccgatcccgagcccgcggccgtggaggttcccgcggggcgcgtgctcagcgcccgggagctcttcgccgcccgctcgcggtcgcagaagctgccccagcgctcgcatggccccaaggactttctgcccgacggctcggcagctcaggccgagcggctgcgccggtgccgggaagagctctggcagctgctggcagagcagcgcgtggagcgcctgggcagcttggtggctgccgagtggaggccagaagagggcttcgtggagttgaagtctcccgcggtgagcggcgggctcgtgggaccggggaccgcactccctgccctccctgtgcctccctcccttgtgacacttgctctgggccccacactaggtgcaaattctggcagaccatgggcttctcagagcagggccggcagcgccttcacccggaagaggccttgtatcttctggagtgtggctccatccacctcttccaccaagacctgccactgtctatccaggaagcttaccagctgctgctgaccgaccacactgtgaccttcctgcagtaccaggtcttcagccacctgaagaggttgggttatgtggttcgacgattccaaccaagctctgtcctgtccccgtatgagaggcagcttaacctggatgccagcgtgcagcacttggaggatggagatggcaagagaaagaggagcagctccagccctcggtccattaataagaaggccaaggccctggacaactccctgcaacccaagagtctggcagcctccagcccacctccctgcagccagcccagccaatgcccagaggagaaaccccaggagtcaagccccatgaagggcccagggggcccctttcagcttctggggtccctgggccccagccctggcccggccagggagggggtggggtgcagctgggagagtggcagagccgagaacggagtcacgggagccggtaagcggcgctggaacttcgagcagatctccttccccaacatggcttcagacagccgccacacccttctgcgcgccccagccccagagctgctcccggccaacgtggctgggcgggagacagacgctgagtcctggtgccagaagctgaaccagcgcaaggagaacctctccaggcgggaacgggagcaccacgcggaggccgcgcagttccaggaagatgtcaacgccgatcccgaggtgcagcgctgctccagctggcgggagtacaaggagctgctgcagcggcggcaggtgcagaggagccagcgccgggcccctcacctgtggggccagcccgtcaccccgctgctgagtcctggccaggccagctccccagccgtggtccttcagcatatctctgtgctgcagacaacacaccttcctgatggaggtgtccggctgttggagaagtctgggggcttggaaatcatctttgatgtttaccaggccgacgctgtggccacattccgaaagaataaccctggcaaaccctatgcccggatgtgcattagtggatttgatgagcctgtcccagacctctgcagcctcaagcggttgtcttaccagagtggggatgtccctctgatctttgccctggtggatcatggtgacatctccttctacagcttcagggacttcacgttgccccaggatgtggggcactgacctcacagctctgcagaggatggagcttgctccgggggaccgggactgtctgttctcagggaccatctcggctgcctcctgtacccagactctaacctgtagcttcagaggccagtctgggccttggccctgggtgtctgatactcacagagtgaaactgtgaccctctcccttccctgctgccttgcagtgacccctctggaactcaggactcgattttaaggacccaggaggtggggcagaagagaggactgtgtgcctttaacgagagggtgcctgcttcgtgctataaagccaaagccattaaaaatagatttcttt

SEQ ID NO: 711246 - DNA, 2807 bp, Homo sapiens
  misc_feature (1794)..(1794): n is a, c, g, or t
  misc_feature (1976)..(1976): n is a, c, g, or t
ggtggcggcgcgcgcagcggcaggcggcggcgggatggagcccgatcccgagcccgcggccgtggaggttcccgcggggcgcgtgctcagcgcccgggagctcttcgccgcccgctcgcggtcgcagaagctgccccagcgctcgcatggccccaaggactttctgcccgacggctcggcagctcaggccgagcggctgcgccggtgccgggaagagctctggcagctgctggcagagcagcgcgtggagcgcctgggcagcttggtggctgccgagtggaggccagaagagggcttcgtggagttgaagtctcccgcgggcaaattctggcagaccatgggcttctcagagcagggccggcagcgccttcacccggaagaggccttgtatcttctggagtgtggctccatccacctcttccaccaagacctgccactgtctatccaggaagcttaccagctgctgctgaccgaccacactgtgaccttcctgcagtaccaggtcttcagccacctgaagaggttgggttatgtggttcgacgattccaaccaagctctgtcctgtccccgtatgagaggcagcttaacctggatgccagcgtgcagcacttggaggatggagatggcaagagaaagaggagcagctccagccctcggtccattaataagaaggccaaggccctggacaactccctgcaacccaagagtctggcagcctccagcccacctccctgcagccagcccagccaatgcccagaggcccagccctggcccggccagggagggggtggggtgcagctgggagagtggcagagccgagaacggagtcacgggagccggtaagcggcgctggaacttcgagcagatctccttccccaacatggcttcagacagccgccacacccttctgcgcgccccagccccagagctgctcccggccaacgtggctgggcgggagacagacgctgagtcctggtgccagaagctgaaccagcgcaaggagaacctctccaggcgggaacgggagcaccacgcggaggccgcgcagttccaggaagatgtcaacgccgatcccgaggtgcagcgctgctccagctggcgggagtacaaggagctgctgcagcggcggcaggtgcagaggagccagcgccgggcccctcacctgtggggccagcccgtcaccccgctgctgagtcctggccaggccagctccccaggtaccccctcagcctgccacatcttcgagggccactggcagctgaggaatcacaggactttggaaagggcatggatgaactgggatggattgaggcttaaggaagatgtgggaggagggagtggacccacaagcacggtcagttctccggcggctgcagcagggcctgtgtgggaaggcttagagatggtgagtcaggagaggtaaggaggggtggaaactatgaccatatccttaaaaagataaacaacatgcatgtggatggctttgccaccaactagctgtgatcccaacctgttagatgggaaaaggaggtgccttcttggccaagtgaaagaaaggcttgctgtctgctctaagcccagggaaccaatggggaaagaataagctaaatgtgttaacggattccaaattacttaaagcctttatgggaacacggtagattgtaggtaactagatagggttgccagatcagtttgatttgactttcagtataatttttcagtatatgttccaaaaattgcatgggatatgcttatactaaaaaaaaaaaaaatgttgctaggctggacacggnggctcatacccgtaatcccagcactttgggaggccgaggcgggcagatcacctgaggtcaggagttcgagaccaacctgggcaacatggtgaaaccatctctactaaaaatacaaaaattagccgggtgtggtggtgcacacttataatcccagctactcaggaggctgagacaggagaatngcttgaacctgggaggcagaggtcacagtgagccaagatcacgccactatactccagcctgggtgacagagtgagactccgtttaaaaaaaaaagttgctaaatctggccgtcctaaactagatggcagactgagaaatgtgactcccctccccagtaccttgttttctgtgtccttgtagccgtggtccttcagcatatctctgtgctgcagacaacacaccttcctgatggaggtgtccggctgttggagaagtctgggggcttggaaatcatctttgatgtttaccaggccgacgctgtggccacattccgaaagaataaccctggcaaaccctatgcccggatgtgcattagtggatttgatgagcctgtcccagacctctgcagcctcaagcggttgtcttaccagagtggggatgtccctctgatctttgccctggtggatcatggtgacatctccttctacagcttcagggacttcacgttgccccaggatgtggggcactgacctcacagctctgcagaggatggagcttgctccgggggaccgggactgtctgttctcagggaccatctcggctgcctcctgtacccagactctaacctgtagcttcagaggccagtctgggccttggccctgggtgtctgatactcacagagtgaaactgtgaccctctcccttccctgctgccttgcagtgacccctctggaactcaggactcgattttaaggacccaggaggtggggcagaagagaggactgtgtgcctttaacgagagggtgcctgcttcgtgctataaagccaaagccattaaaaatagatttcttt

SEQ ID NO: 711247 - DNA, 1295 bp, Homo sapiens
  misc_feature (578)..(578): n is a, c, g, or t
ggctgtcgcggtgttgtgctgtggggaaggggagaaggcattatgtatagccctggcagtggtaggtcttctgcttactcctgagagtccgctgtgactgatgcgggagaaccgcccgaggatgcaagccaccagtctgatcatgttctgcagcagtgcaggtccacacagaccttcaaactgagttggactctgcggtgcataagagaggaaggtgaagtataattaatagctcaaaggtcgattggcactgaggcatagcgagttgtgagattcacttgtcataatgtgcaacacaatggaggagagcacaatgtctacgtagaacttcatgagaaattctacttactgatctgagaagacgaggagatgcttcgcaactgcacattcaccgtctaggatttctcttcctctcttggagaagggatcgaacatgcaattttggcgtagcacttagagtcaaagttaccttccctacaaataatggaaacctggggcgcatcagtcgcgcaagcgtagagggaccatcactcggttcgcatgtggcaacgctatctcatctcaagggcagaccaaanacctggcgcggggctgcggtttcaaaaccagcgttctataggaattagtctaccgttaatgtgtcactttttcataacacctccctttattatttctccccgttccaggagtggaccatgatattactctgaattgtatataatcaccacctaagcacttcaagggattgccttatagcacgcgtggagtatggtggggggtaagttccaccaaactacacccgtgaagcatttaggcaaagcgctgtggcgcaagccctccgcatcttcgtatattaggatacacccattccatttgcgttgacaatttttgggaaagtgtacgttaagttttggccgtccaagtacaattctcccacttataactagccgatagaagggattcagccacattgggttgcgctcgaagttgcaagcgggggtggaagttccacaaggcccgtcccaagttcactcccgttgtcactttaattatagccacgtgctttcccgtttctgtgtaacaatagcagtgcaacgagtagatagccaccgggaaagtaaggggtcacaagacatatattttccaagcgcaccgatttggcaaattgtctctcaagggtcagtggattgggtcgacatataaagagtacaaggaattcggaagccagaagtgcacacaatgctggtatccacagaagttgaacccttgtatgcccaaaattatggggcgacact

SEQ ID NO: 711248 - DNA, 382 bp, Homo sapiens
  misc_feature (291)..(291): n is a, c, g, or t
  misc_feature (354)..(354): n is a, c, g, or t
  misc_feature (368)..(368): n is a, c, g, or t
tgtccaccgatcagctatacgtcattttgctcaaagttacaatttctaagaaccaacctattgatgatgtttagtgaggacttactgtagttgaatttgtcaatcttgttcacaaagatatatcatctaaaatttttctgcttttactcttaggttgtgaaatgagtgcagtttccttttttttccccaaaatgcatatttggaaagccatattgaaaagcctatcttttccccactgatcttaagtgccagctcagacgtaaaacaggtttccttctatgcatggctctntctgggatctttattcttttattggcaaatctgtaccagtctgtactgataccacactgtctntcttactatagctntataaatagtcttg

SEQ ID NO: 711249 - DNA, 386 bp, Homo sapiens
ggtcgacataaatacacttaccccacatgtttcccaaccctccggggggcggttttcaaaaaaaactccccccccacttcttgtttattttggggggggggggggggtcgaaataaacacccgcgggggtttgtttttttctaaaggggcggcggggatttaaaaaacaccccccggctctgttacccaagctgggggggggggggggtcttttacaacctcccagccccaagcattcctcccacctcagcctcctgagtaaatacaatccccgcccattttgttattttgttgagatggggactcgctatctcaagctgcccttgaattcctggtttcaaataatccttcccacctcggccttccaaagtgccggatttacaggc

SEQ ID NO: 711250 - DNA, 1990 bp, Homo sapiens
ggtggcggcgcgcgcagcggcaggcggcggcgggatggagcccgatcccgagcccgcggccgtggaggttcccgcggggcgcgtgctcagcgcccgggagctcttcgccgcccgctcgcggtcgcagaagctgccccagcgctcgcatggccccaaggactttctgcccgacggctcggcagctcaggccgagcggctgcgccggtgccgggaagagctctggcagctgctggcagagcagcgcgtggagcgcctgggcagcttggtggctgccgagtggaggccagaagagggcttcgtggagttgaagtctcccgcgggcaaattctggcagaccatgggcttctcagagcagggccggcagcgccttcacccggaagaggccttgtatcttctggagtgtggctccatccacctcttccaccaagacctgccactgtctatccaggaagcttaccagctgctgctgaccgaccacactgtgaccttcctgcagtaccaggtcttcagccacctgaagaggttgggttatgtggttcgacgattccaaccaagatccccaggctgaggaggtgggtcagtggcccacccgctgttctcaccccacagctctgtcctgtccccgtatgagaggcagcttaacctggatgccagcgtgcagcacttggaggatggagatggcaagagaaagaggagcagctccagccctcggtccattaataagaaggccaaggccctggacaactccctgcaacccaagagtctggcagcctccagcccacctccctgcagccagcccagccaatgcccagaggagaaaccccaggagtcaagccccatgaagggcccagggggcccctttcagcttctggggtccctgggccccagccctggcccggccagggagggggtggggtgcagctgggagagtggcagagccgagaacggagtcacgggagccggtaagcggcgctggaacttcgagcagatctccttccccaacatggcttcagacagccgccacacccttctgcgcgccccagccccagagctgctcccggccaacgtggctgggcgggagacagacgctgagtcctggtgccagaagctgaaccagcgcaaggagaacctctccaggcgggaacgggagcaccacgcggaggccgcgcagttccaggaagatgtcaacgccgatcccgaggtgcagcgctgctccagctggcgggagtacaaggagctgctgcagcggcggcaggtgcagaggagccagcgccgggcccctcacctgtggggccagcccgtcaccccgctgctgagtcctggccaggccagctccccagccgtggtccttcagcatatctctgtgctgcagacaacacaccttcctgatggaggtgtccggctgttggagaagtctgggggcttggaaatcatctttgatgtttaccaggccgacgctgtggccacattccgaaagaataaccctggcaaaccctatgcccggatgtgcattagtggatttgatgagcctgtcccagacctctgcagcctcaagcggttgtcttaccagagtggggatgtccctctgatctttgccctggtggatcatggtgacatctccttctacagcttcagggacttcacgttgccccaggatgtggggcactgacctcacagctctgcagaggatggagcttgctccgggggaccgggactgtctgttctcagggaccatctcggctgcctcctgtacccagactctaacctgtagcttcagaggccagtctgggccttggccctgggtgtctgatactcacagagtgaaactgtgaccctctcccttccctgctgccttgcagtgacccctctggaactcaggactcgattttaaggacccaggaggtggggcagaagagaggactgtgtgcctttaacgagagggtgcctgcttcgtgctataaagccaaagccattaaaaatagatttcttt

SEQ ID NO: 711251 - DNA, 103 bp, Homo sapiens
tgtatttactcgaagaaaagtcctgtttgtatcgtcacaaacaacggaaggtggctgaatagtccctaggggacactgtccctggcgagtgaaattacggcca

SEQ ID NO: 711252 - DNA, 3055 bp, Homo sapiens
  misc_feature (2042)..(2042): n is a, c, g, or t
  misc_feature (2224)..(2224): n is a, c, g, or t
ggtggcggcgcgcgcagcggcaggcggcggcgggatggagcccgatcccgagcccgcggccgtggaggttcccgcggggcgcgtgctcagcgcccgggagctcttcgccgcccgctcgcggtcgcagaagctgccccagcgctcgcatggccccaaggactttctgcccgacggctcggcagctcaggccgagcggctgcgccggtgccgggaagagctctggcagctgctggcagagcagcgcgtggagcgcctgggcagcttggtggctgccgagtggaggccagaagagggcttcgtggagttgaagtctcccgcgggcaaattctggcagaccatgggcttctcagagcagggccggcagcgccttcacccggaagaggccttgtatcttctggagtgtggctccatccacctcttccaccaagacctgccactgtctatccaggaagcttaccagctgctgctgaccgaccacactgtgaccttcctgcagtaccaggtcttcagccacctgaagaggttgggttatgtggttcgacgattccaaccaagctctgtcctgtccccgtatgagaggcagcttaacctggatgccagcgtgcagcacttggaggatggagatggcaagagaaagaggagcagctccagccctcggtaactcccacatcacggtggccccccagggagtgctggtgtctgggaccttggaaaatgcacaggctttctaagaaccacagctcccatgcaggctcagggaacactagggacctgccttcagctccatggacgtgtgcacctagcacccggcagattgctgctttccccactcctcaggtccattaataagaaggccaaggccctggacaactccctgcaacccaagagtctggcagcctccagcccacctccctgcagccagcccagccaatgcccagaggagaaaccccaggagtcaagccccatgaagggcccagggggcccctttcagcttctggggtccctgggccccagccctggcccggccagggagggggtggggtgcagctgggagagtggcagagccgagaacggagtcacgggagccggtaagcggcgctggaacttcgagcagatctccttccccaacatggcttcagacagccgccacacccttctgcgcgccccagccccagagctgctcccggccaacgtggctgggcgggagacagacgctgagtcctggtgccagaagctgaaccagcgcaaggagaacctctccaggcgggaacgggagcaccacgcggaggccgcgcagttccaggaagatgtcaacgccgatcccgaggtgcagcgctgctccagctggcgggagtacaaggagctgctgcagcggcggcaggtgcagaggagccagcgccgggcccctcacctgtggggccagcccgtcaccccgctgctgagtcctggccaggccagctccccaggtaccccctcagcctgccacatcttcgagggccactggcagctgaggaatcacaggactttggaaagggcatggatgaactgggatggattgaggcttaaggaagatgtgggaggagggagtggacccacaagcacggtcagttctccggcggctgcagcagggcctgtgtgggaaggcttagagatggtgagtcaggagaggtaaggaggggtggaaactatgaccatatccttaaaaagataaacaacatgcatgtggatggctttgccaccaactagctgtgatcccaacctgttagatgggaaaaggaggtgccttcttggccaagtgaaagaaaggcttgctgtctgctctaagcccagggaaccaatggggaaagaataagctaaatgtgttaacggattccaaattacttaaagcctttatgggaacacggtagattgtaggtaactagatagggttgccagatcagtttgatttgactttcagtataatttttcagtatatgttccaaaaattgcatgggatatgcttatactaaaaaaaaaaaaaatgttgctaggctggacacggnggctcatacccgtaatcccagcactttgggaggccgaggcgggcagatcacctgaggtcaggagttcgagaccaacctgggcaacatggtgaaaccatctctactaaaaatacaaaaattagccgggtgtggtggtgcacacttataatcccagctactcaggaggctgagacaggagaatngcttgaacctgggaggcagaggtcacagtgagccaagatcacgccactatactccagcctgggtgacagagtgagactccgtttaaaaaaaaaagttgctaaatctggccgtcctaaactagatggcagactgagaaatgtgactcccctccccagtaccttgttttctgtgtccttgtagccgtggtccttcagcatatctctgtgctgcagacaacacaccttcctgatggaggtgtccggctgttggagaagtctgggggcttggaaatcatctttgatgtttaccaggccgacgctgtggccacattccgaaagaataaccctggcaaaccctatgcccggatgtgcattagtggatttgatgagcctgtcccagacctctgcagcctcaagcggttgtcttaccagagtggggatgtccctctgatctttgccctggtggatcatggtgacatctccttctacagcttcagggacttcacgttgccccaggatgtggggcactgacctcacagctctgcagaggatggagcttgctccgggggaccgggactgtctgttctcagggaccatctcggctgcctcctgtacccagactctaacctgtagcttcagaggccagtctgggccttggccctgggtgtctgatactcacagagtgaaactgtgaccctctcccttccctgctgccttgcagtgacccctctggaactcaggactcgattttaaggacccaggaggtggggcagaagagaggactgtgtgcctttaacgagagggtgcctgcttcgtgctataaagccaaagccattaaaaatagatttcttt

SEQ ID NO: 711253 - DNA, 892 bp, Homo sapiens
  misc_feature (44)..(44): n is a, c, g, or t
  misc_feature (169)..(169): n is a, c, g, or t
  misc_feature (208)..(208): n is a, c, g, or t
  misc_feature (234)..(234): n is a, c, g, or t
  misc_feature (248)..(248): n is a, c, g, or t
  misc_feature (312)..(312): n is a, c, g, or t
  misc_feature (336)..(336): n is a, c, g, or t
  misc_feature (355)..(355): n is a, c, g, or t
  misc_feature (357)..(357): n is a, c, g, or t
  misc_feature (359)..(359): n is a, c, g, or t
  misc_feature (464)..(464): n is a, c, g, or t
  misc_feature (467)..(467): n is a, c, g, or t
  misc_feature (514)..(514): n is a, c, g, or t
  misc_feature (517)..(517): n is a, c, g, or t
  misc_feature (519)..(519): n is a, c, g, or t
  misc_feature (524)..(524): n is a, c, g, or t
  misc_feature (675)..(675): n is a, c, g, or t
tcaggcggggcgagttaggcgacttgtccctaattttcgatggnccatacctaataggcatattgagcacaatgaagcgagagatgatgtagaaaggtttgtagggcagatgatggaaatcaagagaaagactagggaacagcagatgaggcactatatgcgcttccanactcctgaacctgacaaccattatgacttttgcctcatnccttgaatcctaaaagttttcgctgnggttaatgtgaacnctgctttacaagcttgtatttttgtgatttactttttctgtaagccttttggggtttacacttnccagtttctaatggaaattagaantctaattgaatattgtttngncncagcctaaaagttacggtcagcatggcaattcacctattttaggaaaaatactcttttcataatatgaaatgcataaagcagttcaaaaagcagtctgtattccntcntcttcctttttcattccagtccttatttttgtaagtattactttccnccncnggctncctggactcaaaatctcagttgtctttggacagtttttttcttgtccactgacaaaaaaaggaatgatcatacccagaattcaatgtttgatattttaagaatgtatgttctagtgtttttcagagtgagtctaccatctgtataaaaacnccttgggggcaggcaggggcatttaaaaatgtaggacctatcgtccagactcacagagtggggctccagaatctccatttttaacaaactctcttaagtaattctgatgtgtaccaaaatcagtgccattggtgtgtgtgtacgtaactatatacatatgtgtgtgtgtgtatatatataatgtgtcataaccgtaaacaataaacaatatcaagat

SEQ ID NO: 711254 - DNA, 300 bp, Homo sapiens
tggtacctaagtttgagcgtctcatggacagtgggcagggagtgggtggatgcccatctgtacccacaagtcacgaccctgctggagctcagacattcctcagcagggtcagggccgggtggagtcgtctcaccctgtcattatgctacccactgaccagcagccaccttgctccgtggcagccacaccacaggagtcgggggagccccaggaacactttgggaggtcagggatgcaggtccagggtgcccttggacccactggtgctcccagctcaggctggccacaactcccagcccc

SEQ ID NO: 711255 - DNA, 123 bp, Homo sapiens
cacgaggcgcctcctcagggttccctgtgtctgtacttttcagccatgggcatatgtgaatagagtatctgtcaagcccgggcttctgtgatggtctatcatgacaccattattaaatgggta

SEQ ID NO: 711256 - DNA, 1722 bp, Homo sapiens
gctagtacaatgacatttttgttagaaaaaaatatatggagagagattagtgtgtacataaacgaaagaaagatgttaacaatagttatccaaggtttttatttttctatatttaccaagtttgctagctcctctgggccattgcctaggcagaggcacatggctgggccccctggctgggcctgtacccctcatgggggtctgcttagggccttagcacttgggtgtggctccgatcctggcccactgactgtcctcttggcccgtttccttacacatcccaccagatccccaggctgaggaggtgggtcagtggcccacccgctgttctcaccccacagctctgtcctgtccccgtatgagaggcagcttaacctggatgccagcgtgcagcacttggaggatggagatggcaagagaaagaggagcagctccagccctcggtccattaataagaaggccaaggccctggacaactccctgcaacccaagagtctggcagcctccagcccacctccctgcagccagcccagccaatgcccagaggagaaaccccaggagtcaagccccatgaagggcccagggggcccctttcagcttctggggtccctgggccccagccctggcccggccagggagggggtggggtgcagctgggagagtggcagagccgagaacggagtcacgggagccggtaagcggcgctggaacttcgagcagatctccttccccaacatggcttcagacagccgccacacccttctgcgcgccccagccccagagctgctcccggccaacgtggctgggcgggagacagacgctgagtcctggtgccagaagctgaaccagcgcaaggagaacctctccaggcgggaacgggagcaccacgcggaggccgcgcagttccaggaagatgtcaacgccgatcccgaggtgcagcgctgctccagctggcgggagtacaaggagctgctgcagcggcggcaggtgcagaggagccagcgccgggcccctcacctgtggggccagcccgtcaccccgctgctgagtcctggccaggccagctccccagccgtggtccttcagcatatctctgtgctgcagacaacacaccttcctgatggaggtgtccggctgttggagaagtctgggggcttggaaatcatctttgatgtttaccaggccgacgctgtggccacattccgaaagaataaccctggcaaaccctatgcccggatgtgcattagtggatttgatgagcctgtcccagacctctgcagcctcaagcggttgtcttaccagagtggggatgtccctctgatctttgccctggtggatcatggtgacatctccttctacagcttcagggacttcacgttgccccaggatgtggggcactgacctcacagctctgcagaggatggagcttgctccgggggaccgggactgtctgttctcagggaccatctcggctgcctcctgtacccagactctaacctgtagcttcagaggccagtctgggccttggccctgggtgtctgatactcacagagtgaaactgtgaccctctcccttccctgctgccttgcagtgacccctctggaactcaggactcgattttaaggacccaggaggtggggcagaagagaggactgtgtgcctttaacgagagggtgcctgcttcgtgctataaagccaaagccattaaaaatagatttcttt

SEQ ID NO: 711257 - DNA, 2841 bp, Homo sapiens
  misc_feature (1828)..(1828): n is a, c, g, or t
  misc_feature (2010)..(2010): n is a, c, g, or t
gctagtacaatgacatttttgttagaaaaaaatatatggagagagattagtgtgtacataaacgaaagaaagatgttaacaatagttatccaaggtttttatttttctatatttaccaagtttgctagctcctctgggccattgcctaggcagaggcacatggctgggccccctggctgggcctgtacccctcatgggggtctgcttagggccttagcacttgggtgtggctccgatcctggcccactgactgtcctcttggcccgtttccttacacatcccaccagatccccaggctgaggaggtgggtcagtggcccacccgctgttctcaccccacagctctgtcctgtccccgtatgagaggcagcttaacctggatgccagcgtgcagcacttggaggatggagatggcaagagaaagaggagcagctccagccctcggtaactcccacatcacggtggccccccagggagtgctggtgtctgggaccttggaaaatgcacaggctttctaagaaccacagctcccatgcaggctcagggaacactagggacctgccttcagctccatggacgtgtgcacctagcacccggcagattgctgctttccccactcctcaggtccattaataagaaggccaaggccctggacaactccctgcaacccaagagtctggcagcctccagcccacctccctgcagccagcccagccaatgcccagaggagaaaccccaggagtcaagccccatgaagggcccagggggcccctttcagcttctggggtccctgggccccagccctggcccggccagggagggggtggggtgcagctgggagagtggcagagccgagaacggagtcacgggagccggtaagcggcgctggaacttcgagcagatctccttccccaacatggcttcagacagccgccacacccttctgcgcgccccagccccagagctgctcccggccaacgtggctgggcgggagacagacgctgagtcctggtgccagaagctgaaccagcgcaaggagaacctctccaggcgggaacgggagcaccacgcggaggccgcgcagttccaggaagatgtcaacgccgatcccgaggtgcagcgctgctccagctggcgggagtacaaggagctgctgcagcggcggcaggtgcagaggagccagcgccgggcccctcacctgtggggccagcccgtcaccccgctgctgagtcctggccaggccagctccccaggtaccccctcagcctgccacatcttcgagggccactggcagctgaggaatcacaggactttggaaagggcatggatgaactgggatggattgaggcttaaggaagatgtgggaggagggagtggacccacaagcacggtcagttctccggcggctgcagcagggcctgtgtgggaaggcttagagatggtgagtcaggagaggtaaggaggggtggaaactatgaccatatccttaaaaagataaacaacatgcatgtggatggctttgccaccaactagctgtgatcccaacctgttagatgggaaaaggaggtgccttcttggccaagtgaaagaaaggcttgctgtctgctctaagcccagggaaccaatggggaaagaataagctaaatgtgttaacggattccaaattacttaaagcctttatgggaacacggtagattgtaggtaactagatagggttgccagatcagtttgatttgactttcagtataatttttcagtatatgttccaaaaattgcatgggatatgcttatactaaaaaaaaaaaaaatgttgctaggctggacacggnggctcatacccgtaatcccagcactttgggaggccgaggcgggcagatcacctgaggtcaggagttcgagaccaacctgggcaacatggtgaaaccatctctactaaaaatacaaaaattagccgggtgtggtggtgcacacttataatcccagctactcaggaggctgagacaggagaatngcttgaacctgggaggcagaggtcacagtgagccaagatcacgccactatactccagcctgggtgacagagtgagactccgtttaaaaaaaaaagttgctaaatctggccgtcctaaactagatggcagactgagaaatgtgactcccctccccagtaccttgttttctgtgtccttgtagccgtggtccttcagcatatctctgtgctgcagacaacacaccttcctgatggaggtgtccggctgttggagaagtctgggggcttggaaatcatctttgatgtttaccaggccgacgctgtggccacattccgaaagaataaccctggcaaaccctatgcccggatgtgcattagtggatttgatgagcctgtcccagacctctgcagcctcaagcggttgtcttaccagagtggggatgtccctctgatctttgccctggtggatcatggtgacatctccttctacagcttcagggacttcacgttgccccaggatgtggggcactgacctcacagctctgcagaggatggagcttgctccgggggaccgggactgtctgttctcagggaccatctcggctgcctcctgtacccagactctaacctgtagcttcagaggccagtctgggccttggccctgggtgtctgatactcacagagtgaaactgtgaccctctcccttccctgctgccttgcagtgacccctctggaactcaggactcgattttaaggacccaggaggtggggcagaagagaggactgtgtgcctttaacgagagggtgcctgcttcgtgctataaagccaaagccattaaaaatagatttcttt

SEQ ID NO: 711258 - DNA, 99 bp, Homo sapiens
catttcaagccgctccaggttaaatcccatcactagcgtttgacagagtcaaaggctgaagaataagtccaggataggggccaagagatcttgaggagt

SEQ ID NO: 711259 - DNA, 217 bp, Homo sapiens
gagtatgttcatgaacacccgggtgcacgcatgtgctctctgacgcacacgcgtgctctcagacaccatgctccagcaaccctagtcgggcagcggggtaggtgtagagggactcggagaatgagcagctacctgggctgcgaatcctgcctgtacagccaggcaagttccttcatctcatccaacgacaaattcctgttgcacaaacacgggattt

SEQ ID NO: 711260 - DNA, 1269 bp, Homo sapiens
  misc_feature (295)..(295): n is a, c, g, or t
  misc_feature (467)..(467): n is a, c, g, or t
ccgagcgcacgtgtagcaagtcttgcagtgtagtctcgcgatggcgcacgttgggaacgttgaatgcctgccacggggaaggctatgcattattgagtccgcacagatagaactctatcggcgtgtgcaactctgtgttccagtgacgctgcgccgtagacgcgcatgagtgcgcaatgtgggccatacgagacggcgggagatcacgtatgcggaaagcaattggcccgaaacctccacttcgaggaatactgaattacgcagttaggtgtaggcagaggaatgggaggagacngactggttgcaggaatcaggaggcacgtgagggcttaggggcacacggaccaaatggctccatgtcccggaaccatgtgcactccgcaggtgtgggaataggaagccttatctggtgtggatgggacacatgtatttccgtacacttctcgaccttccgaggctgagctacnctggatggtaggagtcggcgttggaccgcgtcgaagagacctaactagaaatgcgggaagaatggctaagagctagagacgctgtgttgaccgcactgccttctaccgctgtctgggcaatgtagccacaaatgcatattacggctgaagttgggaatcgtgacgtgggatggacggtgagcgactggtagcgggacgcggcttttgggtggcgggtcgtccgattggaggtcatcgaccagcatggcgattcgacttgtgtcagtggatgcttctggcgtggccgagggctctcgaccgtggggtcccgcatactctgggggtgcttggcgatcgctgaagcctcttccccatggggggccatgggtgagtctagtcggtaccagggtgctcgaatccgggagaatccagagggcagataatagttgttgccagttctctcctggggggcggttgcagccgtcctgtgaaggctcgtgcccagtacaggtgactagctggcggatacggtgagcggggtgaacggaaagcccggccggggggcggtacggctgtcgtgttgcggactgggctgcgggggcccagggaggagcggaacggaaagcagatacggacgcgagcctgaaagagaggggcggacaatagacgcggaactctcacggaatggccccagtggaggcacccaaagagggaggcgctcaacaggcgcaagagagatgcaggccaggggacaagacgggagagcatgccaagggcggagaggagccacaaatgtggaggcaccgcacaggggggaaacaag

SEQ ID NO: 711261 - DNA, 949 bp, Homo sapiens
ggtggcggcgcgcgcagcggcaggcggcggcgggatggagcccgatcccgagcccgcggccgtggaggttcccgcggggcgcgtgctcagcgcccgggagctcttcgccgcccgctcgcggtcgcagaagctgccccagcgctcgcatggccccaaggactttctgcccgacggctcggcagctcaggccgagcggctgcgccggtgccgggaagagctctggcagctgctggcagagcagcgcgtggagcgcctgggcagcttggtggctgccgagtggaggccagaagagggcttcgtggagttgaagtctcccgcgggcaaattctggcagaccatgggcttctcagagcagggccggcagcgccttcacccggaagaggccttgtatcttctggagtgtggctccatccacctcttccaccaagacctgccactgtctatccaggaagcttaccagctgctgctgaccgaccacactgtgaccttcctgcagtaccaggtcttcagccacctgaagaggttgggttatgtggttcgacgattccaaccaagctctgtcctgtccccgtatgagaggcagcttaacctggatgccagcgtgcagcacttggaggatggagatggcaagagaaagaggagcagctccagccctcggtccattaataagaaggccaaggccctggacaactccctgcaacccaagagtctggcagcctccagcccacctccctgcagccagcccagccaatgcccagagggtgtctgatactcacagagtgaaactgtgaccctctcccttccctgctgccttgcagtgacccctctggaactcaggactcgattttaaggacccaggaggtggggcagaagagaggactgtgtgcctttaacgagagggtgcctgcttcgtgctataaagccaaagccattaaaaatagatttcttt

SEQ ID NO: 711262 - DNA, 421 bp, Homo sapiens
aaatctgcgatggttcacacagcacattagatccaaagttgaccggtgtgacctaagatcttgtctaggagcttattgaacagatgttctctgtcttttgtatcaagctatccatatgatcacagaccctctcctctaggatctaggtcgtggatctgaggtctgaaagagctattaccattttttgctgcctttgtgcctcaaagacagaacaaagccgatacatagagaaagtcagaaccaatagaaaccagaggaacatggagatcgagccctgaatattgccacaaaactcgtatatcacactcatagctgaatgctcaaatacagtcgcaggagtctttattttcccttactcatttcagcccagattgctcaatttgttttgttacttgcaacgtcatagagaagctttggcgga

SEQ ID NO: 711263 - DNA, 1039 bp, Homo sapiens
gcgagtgacgcggcttgcgtgatgtgagagtgctggattgctaactaattacgatgggaggctatgtcactacgatgtccagcagatgtattgcagtacagaagacgttgtttcaagtggatgtcaagatgtccattctgaagatccatctacatgactcgctgtaatcgcgtcgcgtgtgctggtcaccaattgccacaaagtgcttgtcgtgaccaaaaagagatgcactgcttgacgacccccactggttccttctcaccaattccacaaagtcacaggaaggctgtttattggcggcttatgccattcgttggctctacagggacgagtatagaactatacatcacgaccatatatgtgttacatcactgacagttcgcatcgtcactatcgcaagcttgcgacacgcggtggactcaacataatgatagaggggaatcccagtttgacaggacaccattgtgggtaccatctaaaactccacagggtagtcgagcttcagagtactcgtgtgaccgacggactgccggccgcgcatttgttactagctggtatcccaattcatcatggaactaactcaatgagggacgctgcattgcattggccctcttcatacgatccagcgaagatccgctgatgctcgcagagcgctgaacatgatcgatgctatggaaggatctaggagacgctagtggcgacgaggtcgagggagatgatcccgtactcatgtgcataggcccaggtgtctggatgtcgagacgggccgtcaagtgaaagtaccgctatggtgctaagctaagtgcgagagtaacttgacagctgactggactaacgtaaaccaatcacctgataaggatccaggcgtcatgggacaagcttgaatgacggcgcgaagaccgcacagagccctgagcctttcccctctctcgtttaaagaaaaaaagccattaggagaaacgaacttaggtaataccgcaaccaaagggagaccaagaataatgcatctgtgtctctcgcggcctcttcaagagagaaa

SEQ ID NO: 711264 - DNA, 356 bp, Homo sapiens
ggcctctcattcctgcttgcttactccaccctggctcctccactggccgccatgtgggctggtccccaaatgtctctccacgctgggcccagaatggagaagaggcgggaaaacccagctggccgaatggaggcctggaaaagattccctggacagtactgcctgtcccctgctcaggtgggacatatgagcctgaacaggccgcaggctacctcttggaggtagcctgggaagtgatggggccctgggctgtgactggggacctacagccttgctcagccccgtccctgaggcccccatgccgtggaggtagggaaggggcacgaacccacgctaggtgtctcacacacccgcct

SEQ ID NO: 711265 - DNA, 374 bp, Homo sapiens
tcgaccactgtactcactgtagcttctacctcctcggttcatgtgatcctcctacctcagctcctgtaatagctaggaccacaggcatgtgccaccatgcctggctaatttttaaattatttgtagagatggggtctccctgtggttgctcagtgctggtctctgaactctctaggctcaatgtgatcctttctgcctcagcctccttaaagggattacaaagcaggagccgctgtacctgggcctacttggaaggtcattttttaaaaaattatatactcttccaatcttttggtcttttaattggtagtactccagaccattttgcttctaaaaataattccctggggtaccggagctccgaaattcgtaat

SEQ ID NO: 711266 - DNA, 130 bp, Homo sapiens
tcgaattctctagaccaccagttctaaccttcaaaaacccaacctctttgtcgagatctcctcaacatactactcgtagaccccactgcttcttcactaaattttctcaacatctgttctatttggactc

SEQ ID NO: 711267 - DNA, 159 bp, Homo sapiens
ctctctgggttgtgggaggttattttgatgccatttcccacgaagggaaatgtgtggagccatgaggcgaggatccattctgacgacccagacctgaacggaaatgcatccctttcagtgtattcccgtaatgaccagatttaaattggagacaaagca

SEQ ID NO: 711268 - DNA, 426 bp, Homo sapiens
  misc_feature (91)..(91): n is a, c, g, or t
  misc_feature (93)..(93): n is a, c, g, or t
  misc_feature (102)..(102): n is a, c, g, or t
  misc_feature (373)..(373): n is a, c, g, or t
tggtaggagaaggagccacagggacaagcggtgaatatctggattcccaaccgccctccatgggggcccgcggccctctccctcctctctnangatgcgccnccgccgcttgctccctgggtacggcctgaggatggacggagcgccgtccaatcgtccaggactcaggcctggccactccgagccccccaccccccgccccgcgccggcccgagcaccctgcttccatgcaacttgcagcaaacgcagcggcatatggagagcctagcgacgggtagcaaactttgtcccgttaagcgcaagagcaatcctcgcaaagtttgtgcggcggctcccactccccacatgagatgggcaacctcccgcccgcctngtgctcttgccgcgcccgcgggctgcagctaccaggccggcacccgtcgccta

SEQ ID NO: 711269 - DNA, 421 bp, Homo sapiens
taaccgagaatcggtttatcacgggaaagtcgatgttcaagggtactggtatgatgcgacatggctcttgagcgatgagaagatgctcagcatagtcaggaaggaaacgcaaatcaaaatccacaatgagatacttcttgatgccgtgccagaatgattatcagttaaaaagaccagtagtagcaagcattggcaaggatgtggactaattggaatccaaatacattgctggtggaaatgtaaggtagtacactcactttggaaaacagtatggcagttcgctcaaaacacagttaccatgtatcagttaaatagagttacctaatgacccagtagttctactcctaggtacatacccgagagaactgaaaacatatgtccacacgaaaatgtgtatacaaatgttcatagtagcattatt

SEQ ID NO: 711270 - DNA, 151 bp, Homo sapiens
  misc_feature (71)..(71): n is a, c, g, or t
cgatctctgagtgccccatatggcaatcagcaggatcctcagtatgcagcaataataataaggtatcgctnactctgctgcggccaagtcgtccgcaatagattgctgttcctagtaggtgtctgcgaagtctatagtctcaattgcagct

SEQ ID NO: 711271 - DNA, 317 bp, Homo sapiens
tgggtaaagggatttaaaatattgaaattgaaaccatttgcgaaaaccttccttttcgccacaggagcttgacagcttcatagtacttaaaaattttacttggccgggtgcggtggcgcatgcctgtaatcccagcactgagaaggcgaaggtgggcgtatcgcggtagcccaacagcctgtttgttttctctataaaaccaaatcagtattctataatcacaaattgtgattgcggtcagaaaatatctcacgtgtattgtgctgcagataacacacagcagaaatctatcctttgtataagaggggactatgtgt

SEQ ID NO: 711272 - DNA, 161 bp, Homo sapiens
tctgatcagcagcactattctcaatagccaaaggtggaacaacccaagtgtccatcaagcagaagaataaacaaaatggtgtatatacatataatggaatattactcggccttaaaaggaaggcagtcttgatatatgctatataccatgatgggggtacc

SEQ ID NO: 711273 - DNA, 938 bp, Homo sapiens
gattagtctggtgcggggattgctcgaggtggtttgtgagttcctgtccgttgcggtgctatctctctttctgatcatggccgtggtgccgacaggatgtgcaacgtgtcgatgaaacttgctagtggttagagtaagatctctgtagtcacacgaagaatggaaacagatagtggcatgataagacaggtataagaatagtctcatttgggacagagaccgaaatggactaatccttttgatagtgtattcctcattgcaaaaaggatatctgtggcgggaacaaatggattacgaaatggttgaagtcacataacagatcaaatatctggctcatttaggtaagtgtttatatggggtactagcatagaatacaaagaatggagactagcaaacattataaggcttttgaatccaattagagggatttgcataatgaaactttcaatcgaaggatcacgtgacttgaatgttttgggtatgtgagatttggttcagcaaacggatcttgctgttgtagatatttcttgggagtcagtataaagggaggtggttaaaatgtagactactgttcaactcttatggatcatatacaaagggtatgaaggtgaatgaaccacgaatcataagttatcgacgtggttgataagcattgtaggttatataaattttacatattgactgaataattaagcaaggtctaacgtaaaacaccttaatttttaagcatttcttactttaaaagatttatataatacctaattagtaaggcatggcgtaatatttaatttagaatccgagcacaagaggtactaagaaatacggggtgaaaagtgttgttgtttacaccttaataatgcaggggcttcctatggtggggacccgaaagggcgttgggcaatggggtttagaaggccaaaagatgtaacgggggggaa

SEQ ID NO: 711274 - DNA, 213 bp, Homo sapiens
atcccacggattgcgctgctttgcgcaaacagcgggtgagggcaacagtgcggccgtgactggggtaggagagggcggtccccagtgcagatgggtgcctcgcgttgcacacatggagtctctggtgtctatgcttggaactgacctagctcgtgacaggggacactcggctagcggccccaagagccaatgctgacacggatacccgagctc

SEQ ID NO: 711275 - DNA, 340 bp, Homo sapiens
acagaacatcagtttcaatattttaaacttgtactaggtccagtatacccctactcatgcggtgttgagcagaactatggactgtccttaggctccagccttaaagtattggataaccaaccttgagtaagaatgagaattctttgaaaacctcagaccaaatctagatgtgtagtatagttttttgtagtattattacttctaaaggatataatcttaacaatgcatccaatggcaaaattgctgttgacttgacattacattacattttatttcagctgtataacattgtcaatagattgtataatgaaatgcatgtatccattcttgaggtcgacgc

SEQ ID NO: 711276 - DNA, 750 bp, Homo sapiens
ggggctggagggtgtctccttcactggcggcaagtgccgccgaactgggtcaagtgcgcgggtttcatccgggccgacgatgtcattgcgctgtcggtaccctgtctgccctgagtgccgaaaacggcgcgtcccacgtctggcgtgtacaaccggacaacacccttgaacgcactcccgtgcgcattggtgcctttggcgagaacaccgtaccgatactggaaggattggccgccaccgattgggtggttgccgcaggcgtgcatgtactccatgaaggccaattagtgcgcccggtggatcgctccaaccgtgtggttaatctggcggccaaggagtagtccccatgggtttcaatctttccgagtgggcgttgcgtaatcgccagatcgtactgttcccgatgatcctgctggccgtggttggcaccttgtcctacaccaagctggggcaaagcgaagacccgccctttaccttcaaggccatggtgatcaagaccaactggcccggggccacggcccaggaggtatcgcgccaggtcaccgagcgaatcgagaaaaaactcatggagactggtgagtacgaacgcatcgtgtcgttctcccgcccaggtgaatcccaggtcacctttattgcccgtgattcgatgcgttcggcgcagattcccgagctgtggtatcaggtgcgcaagaaaatcagcgacatccgccacaccttgcgccggatatccagggtccgtgttctacgatg

SEQ ID NO: 711277 - DNA, 449 bp, Homo sapiens
tgagcagaatactggagaaggataagcggagccagcagatgcgtatgcagctggttgaaggcgaagctgcagatgccataccagagcggggagttcaaggcgctgaccaggcgccatgctaggtggagccccggactctgatcaagcagatggccggggtgcctgaagtactgcacgcgccaggcccccgaaatcccctgggaggagcagttgtcccgtgctgctagacaggatgcccctgggaatctgagcctcgatgtggagcaggccccgttgggtcaacactcgtcagtgcccagctctcaggtcagcagcagaggctcctggccttcatcaagtgctgcctgctcactgaccagcttgcccctcgcccagcacctgctggtcgtccaccacgggcagcggcagaagcggaagctgctcacgctggacatgtacaccgccgtgat

SEQ ID NO: 711278 - DNA, 282 bp, Homo sapiens
  misc_feature (198)..(198): n is a, c, g, or t
  misc_feature (206)..(206): n is a, c, g, or t
  misc_feature (236)..(236): n is a, c, g, or t
cgcctcccaaagtgctaggattacagacttgagccacctcatccggcacagtgagtttcttaaatgattcggtcagtatcagcagctgaagcccatgtgacctttagagcagatggggaaagctctctctgaagaaatgcagttagcatctttcacaaagaacccttcctgcctctccacgtgccagagatcttcagnccgagaanggagagttgaagaggggcacagcctgttangggaatacaattgacgtttagtcaaaagagggcggcttccacttgg

SEQ ID NO: 711279 - DNA, 159 bp, Homo sapiens
ccgtcccctttctctgctaggccctggcacttccagaagctcctttctcatatttggccattttttttggttgaggacctgggaccttccccacctacagtttccttggtggggtaatgcagaagggatgaccagcagtgtgggggatggagcacccat

SEQ ID NO: 711280 - DNA, 545 bp, Homo sapiens
gggtcaaatagcaaaaagtgaaaaaagccaaagaagtgtcaaatgtacaaagagggagtgaaaagtgccacagagcagtcaccgtgtgaggaaaggcgccagtaggattctaagctcatggagataggacagggaagccaggttaccctcttaagaagccttgactgtgtaagagactaattacatagcaacaataacgaatgtgattcccccttaatctcaacacctctggggggcggggggaagcagcactgtatttcaaataaaaaacgaaatcaaaactcttacaaaatagtctggtaattttcaagcagttcataatgtatttgagctttgttctcattacaaggaacgtttaaaagttttacctcatcacctggctggccagttagtttctgtagttgcaaaataattccatcaatattctcctgaatccaaataaatgcatcatcaccggctgtttcaaactgcagcctttaagaaaaagataaaaagtgaaaacagaggaaccaagttatgttataccggaaccaagttatgttata

SEQ ID NO: 711281 - DNA, 1238 bp, Homo sapiens
  misc_feature (664)..(664): n is a, c, g, or t
  misc_feature (940)..(940): n is a, c, g, or t
  misc_feature (1238)..(1238): n is a, c, g, or t
ggtggatgacgtcaccattgtcaacatatagaccaagcgtatcaatgcacagagagaggatatagccttcgcctaccagagaaggagctaaaaaaggatagcttgctagtcattcacatgagatgtcacgctcttcaatcttggtcacaccgtgggatgcacggcgattagtaattctaagagtgcccctagttcgtaatgcacacacattagcttcgagtactgactgcatctaacgtcgagtctaagaaaggactttcccatgacatgggcgcatgggagataccgatgaaggaacatctcttcacttgagatcagtctagctccacaaaactaaccatggagctgtctcacgacacacaattaagacaggaggctcctgactgaagggcacaactgtgtgaccaagtcacatgacatcctggggagcaagtgcacgatttcatgttacagcgtagcgacaatcgtgggtgaacagtacgcatgcacagactgcccatggattagtcccttggccagaaaggcgttaccacagtcagtccagagtgtagtgcggttgcttggtgcgatttaggcaattgaatagcaaacttggcaacttcgcacaccaatagacattgcgtccgcgggcatcgtcctaactcgccatcgccttgaggatagntcgtaccacacaggggtacacaacgggaagattgcgcaattagtactccatcggcaccggtaagggttatgttcacgcccaatagggattccgtacaatttgcaattggagagcattcgcgttagcactcgccttaagtcttccccacgaaaacatgtaagtctgtggcgactgctagtgtgtacgaagaaagaacgtgggacgaggtgccccacatcaataatggaagcctttagcgttaccgcggaaacaaggacgattttgtctaggttgccnataccagaaagaggtctcaactagggagaaagaaaacaatagagggagaagaattggacattatattctcgtaaggacacaagcatttgtgcgttccgaaatgtttgaataacttttcctattgtaagagccaacacatttcgcggacaacttaaggtaatatttgtgtggcattgagaaattgcggggctttcggatgattgacatatctccatttgaagattggggcggacaagaacggggggtaacctgcgaaaggattgcaaagcggaacgttggtaatccaaagaaattacan

SEQ ID NO: 711282 - DNA, 964 bp, Homo sapiens
ggatccttccaaaatcacagactctctgatggaaccagagctctcctccaaaggtgctaacttcttgttaggctgacaggctcttccccagatccgtctctttggtgtgtgtgtgctaaccatagattctaatcacacaaagagtaagagtcccatttgctatcctcgtgggtgctaaccccatacgtcattatccatcgtcttgttccgccagaagacccattcatgctgtcgtccatttatgtgatcgatctcgcccatgctcgctttccccagtgcctggagtttacgcgttatacattcatagccgttgactggtgaattttctcaacatattctactcgatataatagtctaccattctatctgagctgaactctgtggccagataccctatataactagagtgttgatataatgagctctaggaaacgttattatctcaagacgaactgtatgaccaagtgtgataagtatcctcatacatcaaagtaactgagtatcgtgatggacaccaggtgtgactccaaacgctcagtgtgatctgtgtgagtgtatacatcttccactagctcattaaatattccacttaggtactccgaggacgtagtgttattatcttattttcacagatgatggaaaacccgagtatacgcaggtcattagacttctcattaccaggttcccaacttcttctggatggccctccaagttactcctagcctcttcgggccattatttgccagctctgtgtgtggcactattttggcacactagccaatgctgccgtccggagcggcgcgtcagttgggcgtggccctcagaccatcagcttcatgttcatgctccggctgagataggccttctcgcctcgaccgcgttggcccaccagtccccgggcctcggtcttccaccccaggctaggtcggcgttaccccgccttcccgggtctcactctcctatt

SEQ ID NO: 711283 - DNA, 743 bp, Homo sapiens
cgccgccctcgcaactaatggggcctgagcgcgcgggggagaagcggtagcgggagcgggagcggagctggctggcgccgtctgggcgccgttgccggtgccatgtgatgctgtggcctgtgtctggccgcggcgctgctgttgctgctgctgctggtgcagctgagccgcgcgtgccgagttctactgccaatggtctgccctagtacttgcgctgctgtgcttcactggtgtcctgccgtggcctcgctcgtcttgcctgctgctgccactggccggccggacgtgtggagaaccattgagcattcatcggcctggcttcgctgcgaatgcttcagagtacgttttactggcgctccgccttccgacggtgcctggtgaccctgtcgcagggctgccatggatgtgcccgttccccttgtagtcgatctgtctaccaatccaaccgagaggcagtccgtggcacactgcatgcggccttcactgcgaggatccgttccgtgtagctgcttgcctgtgcaacgaaatcgcccaaagccgtggaggctagctcattcactggcggccctgtgtggccctcagtccatcgtacgctcgcgggtgctgtccttcgttcagtcacacctgtgcatgcgcttcttagcatctgcccattgacacgtgcatggcccgaccctgtggctgacgctgccattggtccaggtggagtatatctccatttcggtgctggactcctagtccct

SEQ ID NO: 711284 - DNA, 138 bp, Homo sapiens
atatagaaggtggagcgattagtaggttaattccgataacgaacgagaccctggcacctcctcagtgctgtccacctcctgtgtgggtggagcgacttgtctggttaattccgataacgaacgagactctgtgcgtgt

SEQ ID NO: 711285 - DNA, 367 bp, Homo sapiens
  misc_feature (27)..(27): n is a, c, g, or t
  misc_feature (79)..(79): n is a, c, g, or t
  misc_feature (122)..(122): n is a, c, g, or t
  misc_feature (133)..(133): n is a, c, g, or t
  misc_feature (149)..(149): n is a, c, g, or t
  misc_feature (171)..(171): n is a, c, g, or t
  misc_feature (187)..(187): n is a, c, g, or t
  misc_feature (270)..(270): n is a, c, g, or t
  misc_feature (334)..(334): n is a, c, g, or t
tgcaagctgactcccaagcacaccccnggaatgcacttactgataagatattgaggcaaagtgtacccagcagcccccnggggacgtgcctcagtggagggtacccaagcccctgcatttanccctttgtganagtttaagcccctgcncccgggaactgtgtatttttcngtaactatctctgtanccattaattttttttaactttttgcgtgttctgcttctgtaaaaattgcttcagctaggctccccctgccctatttagaccanggtataaaaagaaatctatccccttcttcggggctgagagaattttgagctctagccatctctnggtcactggcaataaaagaactcctgaattagt

SEQ ID NO: 711286 - DNA, 161 bp, Homo sapiens
gcttccttcgttatttggagccaggccgtacagcaccagcgagcgcatgtccaatggacctgcagatggtattgatcttggcaacactctactcttgtgtgggtgtgatcccgcacggacacaagtcgagataatggccaatgatcagggaacccgaacca

SEQ ID NO: 711287 - DNA, 652 bp, Homo sapiens
  misc_feature (200)..(201): n is a, c, g, or t
aggggggttgtcattgggacgtttcttgggcagtgtaaatgtccatgttgcattcagacaatcatcatgttcacaaaaaacaccagtcactcccttagtgttctgcagtgtatacactcgagtaaagacatgcgcacaaggatagtaaatgtgatccatgtcatgtgatcacaccatggtcgtacagatcagagccattnnaagcctctggtttgtcagcaaggaaaattaactctcttatgtgaccatacactgggactatgaatgtgcacattatagtcaaggatgatgcaaactcaatgtccttctcgtgggactatgaatgtgctcttcagattatccatagctcttaatgtgcatatttacatcagcagtatggatttccattgtctaagccatttcaaatgtctcattgattagttctgagtctttcatagcgagtccaatccagatcttatagatcgagctaatatcttgacttctcagcatcatagaaggtggaggtcattccctagagtctctctaacataggtattatgcacaatagtcgtcagaccggctgcgatctctctcaccagtaattgcagcacttcaggatgattagctagtaaattcccagtctgccagaagtttcagatgatcctgtctcggc

SEQ ID NO: 711288 - DNA, 218 bp, Homo sapiens
atctgtcgcttcggacgttcccggcatcgcactgccgtgctcggccgcattccctcgccggaagaactcgattacctgtgccgaaggcggatttgccggctaagaaaaaggggacggaggggattaagtcgtgtgtgccataaacgaattaatcccctccgtcccctttttcagtgccgatcagtacttcggcacgccgattgtccacgtcttcacgt

SEQ ID NO: 711289 - DNA, 835 bp, Homo sapiens
gctccagcgctcttccagctgcgaatagcggccttcgctggctgtgggtccacgcccaggtgtaagggatcttgtggctgtcaggatggcagaggagcaggagttcacccagctctgcaagttgcctgtacaggcctcacacccacactgcgtgaacaacacctaccgcagcgcacagcactcccaggctctgctccgagggctgctggctctccggagacagcggatagtcctcttcgatgttggtgctggtggtggagggcagactagcatcgaggacccatcgctatctgctggtctgcgtcctgtcaattacttcagaggaatgtttgctgggggattgaaggagatggaacaggaagaggtcctgatccacggtgtgtcctacaatgctatgttgcgcaacatcctacatttcatatacacctccgtagtctggtagctcagcctgaatgcaatgtagcaacgacgacacctggtggctgcctgccagcttcagactcccagaaattatccatttctgcttgtgatttcctcatgtcctgggtggacgaagagaacattctcgatgtctaccggctggcagagctgtttgacttgagcccgtctgactagagcagctgtgacacctatatcctcaaaaacttttgtggccttctctcaggacctgacacacgtaccgccagcttccagttggtacgaaaggtctacgtcccgtcctcagcaggcaactcgcctggaggtctcctgcgagaccgaggtatatgagggggcccttctctaccattatagctggagcaggtgcaggctgaccagatctcgtgacgagccccca

SEQ ID NO: 711290 - DNA, 151 bp, Homo sapiens
aaaaaggggaaatttttttttagtttttaattggggggtggaaggggccgggaggttttctataaaccgtacccttttctcctaaggggggagggccccccccctttaaccaaggggattgtgattttgcctaaaaaaaaaaaatttgtta

SEQ ID NO: 711291 - DNA, 540 bp, Homo sapiens
gcataataaactggtctgtatacagacagtatgttacgataaatgggataacgtcaactgggtcaaggttggaacgaaaaaggggtggaagatgagtgcagtggtagagaggtgatcaacaaaagagtgactttggtggcactgtgagagtgctcacccagtggatggacatacagtggatgcgtgtacctggtcattcgggtattataggcgatgaaaaagctgacagattagtctgataaggagctgcccaatcgggagactgagccatgtgacttgattcctggggagaacttgaggccacgcggctgtcttgctggctgtacttactggtgtggaaaatagccatgcaggtaggatcatcgcagagatgggcagatgcgtcttacagacggaatcaggaacagtggtgttctgtgacatgtgtggatcagaacgggttaagtatatgataagtcgagcatcttagagattggagaattatgtgagatttccacattatgtttactgtgttcaatactgtccttgcttgttccgctg

SEQ ID NO: 711292 - DNA, 797 bp, Homo sapiens
gcatcacttcctctcaagctcggcgtctgtttggtggggttacagcgcgggtacaacatgcgtatcgaaaagtgttatttctgttcgggggcccatcatatcgctgggacaccggtatgatgttctggccaggccacacgatggcacatggtgtccagatttttgcaagtccgtaattggtccataaagaacttgtcaagaagagagagcgcaatcgctctgctaaagtatagcgtcggaccagagctattcctggtaaagcagcgtgtgttaagagagctatacagtggagataaatgcatcttggaatttgaagaaacgtagaaatagaacctattaaatatcatgcgagaagcatattggtaataaagagctagttgagtggcggatggaaagagatgttgaatgaatataaacactagaagcgcctaagctataatttataagtgaaacagaattgagaggaaaagaattataaagaagctacaagaaaagttcaggatgtcaacagaaagtcaatggcatagaacatccagtcttatcactgagagccccttcttgacaggacaaaaggggtacacacgagtcggaagagaaacagggtacagccagtccacaagggaggatgtggacctggacacgatgctccttaaaaaaatctctgtaacatgcttttgatgtaacatgggaaaatgccctttggatcataggaaacgctaaattatttcctcttttacctaaggtcacttagatgaaagcgattaaagaccttttccgtttggctccactaaatccga

SEQ ID NO: 711293 - DNA, 663 bp, Homo sapiens
attcattctcttgctgctgatcctccttgcctctatgtttagaagccaatagtcagatagaggatcactgaatactctgcattaggctgtatcctgctggaggttgagtcgcacgttagtgatcgcataacacgatctcagtctcgtgtttctcggaacggtatctattagatcctgcggagcttgacctgacaagaagctatacgcaggggatgaatagaaacgataatcgtagtctccagtgtgttgcatcacaaacgcagaattggtataaccagtatgacttcatagttgtgatctcgagatagaaagaaggaatttctcctttgttgtcttgcgagttaatgtaagaagtactttaaatctctaagcttctgaagtgttagaggtagagatggtctagtaaagatgtagtagtaatgttttatccatttagcatgtgtttatttttttcatatgtactcaaaggtgacttattggttcacctcagtgatattacaggtaaaaaaatcattcattagcaaaaggaaaagtggtctcaacctaacatcagaagtgtttcttattattattttatattgagttgaatattgaactctaacagttttctacatacaaaacacagtgtcatgaaggttattcataattgcattatagaggaag

SEQ ID NO: 711294 - DNA, 163 bp, Homo sapiens
caacgatggtcctcagctatcaggaggctgaggcaggagaattacctgaacccgggaggcagaggttgcagtgagctgaggtcacaccactgcactccagcctgggtgacaggtgtctcaagaaaaaaaaaaaagatagtatactagctgaggaccatcgtgg

SEQ ID NO: 711295 - DNA, 129 bp, Homo sapiens
ctacagttggaccaacatctctaaaaagcaactgacatggctcgtcaataggctcgcaggactagaaagacttcctccgtagcaggctgctcctaggtctgcagcgctctgccctcgagaacctaccag

SEQ ID NO: 711296 - DNA, 242 bp, Homo sapiens
ttcaggactcttacccagctactcagtgaggcgacgtggatttcatttgaggtcgggagtacgagaccagcctggcaacgtggtgagaccccacctgtactaaacatgcaaagattggcgggcgtaatggcatgcggctgtagtcccagctaactcaggaggctgagggaggagaatcccttgaaccccggtaggcgacatgttacagtgaaggcccgagatttattgccacttggccttcc

SEQ ID NO: 711297 - DNA, 313 bp, Homo sapiens
acaccggatacacggtgtatcatctcatctgagaatcgctccttgggtgatatctgccctatactctcttgttttgtacagagggaggaccttcattcagtaacttagtaaacccttactaaatatttcaaaaataaaaccaatcatcatcaaacaaacaggagccacttttgtaggtcaggtaaatcacaggataatgtatggggataactctgtttttttaaaataaaaaagccttacatggtcagggattgatggagtggggatgacaaatgcacatttcagactttcatcaccaatgaaaaaataaagc

SEQ ID NO: 711298 - DNA, 220 bp, Homo sapiens
cgctggtcccttaaccggtagcgtccgttctttacacgcgggaacagcggtgtccgctgtgtgggctgcagctcctctgtgtgtacggcccttcactctccgggacgtgtgtcttcagtttaattctcattatattctatactgcacgacgattttcccgcggggacacaacaccagcaataacattcatatctctggagcagctacctcatacacgtaa

SEQ ID NO: 711299 - DNA, 131 bp, Homo sapiens
gtccccactgacaccaagagacaaaggtaggacggacacaagacaggaagactacaaaacggacgcaggaagaaacttacttagggacaagattagcatcatacatacctaagagtgggggaccaggaact

SEQ ID NO: 711300 - DNA, 183 bp, Homo sapiens
  misc_feature (163)..(163): n is a, c, g, or t
actaaggaccaggtctcagattgttatttatatgtagaagacactgtatagcaaatcgcatgaactaaagaatctctgtgctttcatatgcaatatattctccagagtgcctggtgtgctccaagagtcatgttacttctttctgaaactccttttcttagtngtgtattcttgaaaacactc

SEQ ID NO: 711301 - DNA, 1024 bp, Homo sapiens
tgcattggctcacgcctgtaatcccagcactttgggacggccgaggcaggcagatcacaaggtcgggaattcgagaccagtctggccagcacagcgaaacctcatctccactaaaaataaaaattaaaaaaattagccagtgtgcgtgctgtgcgcctgtgatgccagccactcaggaggctgagcgccggagaatcgcatgaacccagcgacatggcaggtcagcagtgacgccgcagatcatgccaccgcacctccagcctgggcgacagctgcaacgacatccactctcagccaaacacacaacaaacggaacacaccacccccacacagctcctgctcgctcacactgcacccacttgccacactcccactctctacaccccacgcaaacctccacactcaccccctcccacctacacacccactcccccacaccactcactaccccctcactctcccccggccctcacatccgcccccccaccgcaccccaccaaccccacacacgggcccccaccacactccacgcccaccaccccacacgccccacagcgtccacacgaccaacgcacgcaaccccacgggaaacccccccgcaacccgctccctccccctcacacacccccactagcagtcgcacaccgccgctcacaccccccacacacagcacgcgctccccccccgtacgcgcacgcacgcgacaccacacctctcagaacacacaaccacccaccgaccccacaccgctccgcccactcccccgcccccccccacacagacgccccccacacacacatacactatcgcaaccctagcgcacaccccacaacagtccaacacccgcggccacgacaattctcgtcccacagcgacaacccggagacgcaccacacgctatcgcgtcccttccccaataacaaacacaacccggccgtacacaccgcgagcctgtcgcgcacacaccaacacgcgagcaacgaccgcaacacaccggccctctcaaccaacgaccccccgccgc

SEQ ID NO: 711302 - DNA, 479 bp, Homo sapiens
atacgcatggaaagacatctatcactctaaaagggagttagactggcagtaggggatagcacaggagatactagctgtgatggcttggagcaaaagtgtaaacgcagcagtgtaaacaagagcaggacatttatgagtagttgagaacagtgaataggagtatgactagacagaagatagtacggatgacaagtttttggggtgcagtccaagttgggctggtgtctggaatgagcctggagcctaacaaaaaggagcgtccatacagaagctcaaatgggctgtaccctgtagcatcccgaggacaggcctgaattctgagaagggcaagtggtaaaagtattgtccagtcctttttaagttggaggctgaacttggcgaggtgtgtttttataagaccattagtccattttacctttcctgaagattgaggatggtaaggggcctgaaggttccactgaataccaagagcctgagaa

SEQ ID NO: 711303 - DNA, 293 bp, Homo sapiens
acgatctggagctactcggagctatctcgggcttactcggagcttactctaggagtatgagactacagacctcagaacttcggaccacccttcttgtgacagtcaaactcagtagggtacagctgggggactcaacagggaggaaagcgcttcggcaaacccagaacctgaaagccccgaacgggtggcgtccagaggaaggaggggtggctccccaccccagggtcggaaggtcaggccagcagcagggtcagaggggtcagtgtgcggtcaggaccaggttaagggtccgg

SEQ ID NO: 711304 - DNA, 218 bp, Homo sapiens
tactctacgccatcgctgatcttcgccacattccccaggcgcagggcggttccattttggttgctgaccagtagaggttcgtagtccttggccttttccagctggtcgttggcctggatctgccagttgcgctcactgtcttccagcgagcccttgggccggcgcacgttggcattggcgatggtgttacgcacatcgtccagggccacgccgtactg

SEQ ID NO: 711305 - DNA, 962 bp, Homo sapiens
  misc_feature (33)..(33): n is a, c, g, or t
  misc_feature (78)..(78): n is a, c, g, or t
  misc_feature (114)..(115): n is a, c, g, or t
  misc_feature (157)..(157): n is a, c, g, or t
  misc_feature (161)..(161): n is a, c, g, or t
  misc_feature (163)..(163): n is a, c, g, or t
  misc_feature (175)..(175): n is a, c, g, or t
  misc_feature (177)..(178): n is a, c, g, or t
  misc_feature (200)..(200): n is a, c, g, or t
  misc_feature (334)..(334): n is a, c, g, or t
  misc_feature (443)..(443): n is a, c, g, or t
  misc_feature (588)..(588): n is a, c, g, or t
  misc_feature (641)..(641): n is a, c, g, or t
  misc_feature (658)..(658): n is a, c, g, or t
  misc_feature (678)..(678): n is a, c, g, or t
  misc_feature (716)..(716): n is a, c, g, or t
  misc_feature (728)..(728): n is a, c, g, or t
  misc_feature (741)..(741): n is a, c, g, or t
  misc_feature (755)..(755): n is a, c, g, or t
  misc_feature (785)..(785): n is a, c, g, or t
  misc_feature (798)..(798): n is a, c, g, or t
  misc_feature (854)..(854): n is a, c, g, or t
  misc_feature (858)..(858): n is a, c, g, or t
  misc_feature (861)..(861): n is a, c, g, or t
  misc_feature (867)..(867): n is a, c, g, or t
  misc_feature (876)..(876): n is a, c, g, or t
  misc_feature (881)..(881): n is a, c, g, or t
  misc_feature (885)..(885): n is a, c, g, or t
  misc_feature (959)..(959): n is a, c, g, or t
tctgttcattaagaaacatgctaaatagaagtnaatgttttattcttccaactaaattccagtactacaagggcagtnaaacaatgatacactgggaaaaaaaaaaatgcggcnnttaacatttgttaaaaagactgatagaataaataaaactacnaaananaaaaaaatcttncnnaccctttctggaacccccgggngtcctgggttccgggattgccctcctccttccctttttcccggggggccctgcgggctttttgcttttttttgtcctgggttttctttcttaatttggtttctggtttcggctcggttgtggtgcccatttttnttcccccttccttcttctggggtgtctttcttcggttttttttttaccaccggtggggggcttgttctgggttcccggcttttttccttttcccactttttttttgggngcccatttgtcttggtccggccaattggggcccctggtgttgttccgggtggccggggtccccctccgggtggtcctggcttcggggggttttcccacacccgttgctgctgcctaggggtggttgccactgacgaaagcttganataacctgttttcacagaaggggtattggcattgctgcatgtcataattgggncctcttgccacaactcnacaagggacaaggcggcccncaaatgcggggtacgtgatttatgaaacatagctagcnggctgttctccntatcgtcgcattntttgatcatgcgtnaacttcacaaacgcatcatattgttctgcnagttttgtgttcnatatttcttcatattcttctcgaactttctcttcacgttctttcaacaaacgttcncagntcntccccncctgccgtngggtnaatnagggctgttctttttttattggtgggggtgctgcagatgaagtccctggtggagctggtcccctggggaggaantgc

SEQ ID NO: 711306 - DNA, 534 bp, Homo sapiens
  misc_feature (188)..(188): n is a, c, g, or t
  misc_feature (509)..(509): n is a, c, g, or t
  misc_feature (514)..(514): n is a, c, g, or t
tgtctatgaagtgtaggctatataggtaaatatgcacacagggagagctagagagtgccctgtgctaaggactgcaggataaatatgtctacagggatttccatagcctacggttttctcctgttcctggttcagttagtgctagactgttgcaggggagtccgcgtggtgtttggaaagagcctagnctttagattcaggcagatgtgggttaaaatagtggccttggccgagtgcggtggctcacgcctgtaatcccagcactttgggagtccaaggtgggaggatcacttgagctcaggagttcaagactagcctgggaaacatagtgaaaccgtgtctctacaaaatataataatgatgatgatgataaatttgccaggtgtggtggcgcctgcctgtggtctcagctacttgggaggctgaggtgggagaatcacctgagcctaggaggcggaggtttcagtgagccgagatcatgccactgccctccagcctgggtgacagancaagnctctgtctcaaaggaaaaag

SEQ ID NO: 711307 - DNA, 92 bp, Homo sapiens
tacccagtagactaaccaggacgcagaggttgcagtaatgggattgtgccactgcactccagcctgggagatagagagataccctggtcccc

SEQ ID NO: 711308 - DNA, 416 bp, Homo sapiens
  misc_feature (25)..(25): n is a, c, g, or t
cactctccttgtcggccccggccantgggcctctcaccccgccgactctcccttgggtcccctgagagcagaaccgttggacttcctttgggactaagggcagggaaacgctgctcccttacggggggttaaaaaagtgcaagggcttggggaggattctggggcccaggcaaccccattttttcccagctgaccctgtgagcccaagcaggcctgctgaactcaaaggagaaagcctgagtgagtaacccctcattttggccgaaagtagggcagctgcctccagactttggggagacgggggctaaatttgggggtcaaaaggccctgctttttcccatccaagtgaccaaatgccctactcagcttccatcccccctagcaatatgtattaaagtttgaagggttgccatgga

SEQ ID NO: 711309 - DNA, 1046 bp, Homo sapiens
  misc_feature (256)..(256): n is a, c, g, or t
  misc_feature (343)..(343): n is a, c, g, or t
tatggcgtctctttgcttgcgggcgagcgattggtgcgtgcgtttgggccccgtgcggagagctggagccagagcggctagcccgaaagctgcgggccgtagcttgaggccgcgctggggaagaagcacagatgggcggtgatagctccacgtggcctccctatgcgccttggatttcgtattcgcgtctcgattccgggatcgtgctaccaggctagtctgcagagaaaggtgattccgagaacgtagtagcccntccgatgatgcttccgtacgggatagcgcagttgagaatctagtctcccgagaagggttgtcgaaggccttccaagggatagcaccnatggaagcttattgttgcacctgtgcctggacgcacagggattcaaatggaatacatgccttgcgcgcaatggaagtgcaagtagtacagactggaatcgaccgcggcgaaacagtcgtatctttgtcgatgggagtactagagaacattgggttgcggaactcgttcaatgctgaaaccttggtggaaaaggcacgacgttgcaggaatcagttcgcacatgtggctcctggctacagttcaccaaatcctttcacagtttctcactttgttcgagcgcgcttgggcttggcttgcacctctacggtcatggcagcgtctaaccggttgcgaaattgccaaaatattattcctgtcagacacgtagatagttggcccttcggccgcgcgtgcctaagacttgtctactttgactctgttggaccgtcatagtgagctggggttactggcccgagggctggtatgatcagtgggtgcagcggcgaaatggaagggcgagtctggggaagaaaccgttgtgaaacgttgggtgactttcagttcaattcaaaggttctaggagacaagacctcttgtgagcggctttccaaggcttccaaattgggcaagtcacactggacttcagtcaaaagcccattccagtaactttttgggtgactttccaagcttccaaggttagttctagaagaggaccaaagccccg

SEQ ID NO: 711310 - DNA, 144 bp, Homo sapiens
ctctctgggggctgaggcagaagaatagcttgagcccaggaggtggaggttgcagtgagctgagatagctagaggagaatgatgccttcagagtagcattatactttggtgggagtataatggatccgccctcagaactgtagg

SEQ ID NO: 711311 - DNA, 356 bp, Homo sapiens
attctgtctggtctgacaggcataaggaggtctggccggagaggcgcggaaggaaaacgggctgaaggcgtgtgaggaatgacccatggctgaagagcactgcaggcgggagctggcctgccgaagcggcgagaggcaggagctttggactgcggaggccgcagtgaggcgagagctagctgggcgtggagagtctgctgtgaggcagaggctgggcctgtgcaggccttcgggaggcaggaggccgggccttgtcgaggcctgcagaggccgccaaaagtcaaaagcggggcctgggaaggccgcccagaggcatgagctgggctgggccgaaagaggccactgggaggcaggag

SEQ ID NO: 711312 - DNA, 265 bp, Homo sapiens
  misc_feature (74)..(74): n is a, c, g, or t
  misc_feature (112)..(112): n is a, c, g, or t
  misc_feature (130)..(130): n is a, c, g, or t
  misc_feature (136)..(136): n is a, c, g, or t
  misc_feature (236)..(236): n is a, c, g, or t
gaaacttccactatggcagcgcagaaggaaagtttgggctttaagcccccacacaggaggccacgatcctccanactccagattaataggcccaccaacagctcgcactctnagtgtggaggagctgcangcactnaacaccaacccagcccatgaaatcagccatgggggctacaccctgcaaagccacaggtgcactctcctggtagaggtttcccatgagcctctgcctctgnagcaggttaattcccaccttcccaccacc

SEQ ID NO: 711313 - DNA, 860 bp, Homo sapiens
ggacaccacccctggtccctggctctgccccacccggtacctggggctccgtctgctgcactcggtcctgcgcctccagcagctccttgtcaatctgctccaggcgcgaggcgcggatctgctcaggaccacacgagggcaagtgctggagctgaccccgcccccggctctgaccccgcctctccctgggatgaccccagcctgggctctgaccccgcctcttcctgataaccccgccccaggccctgaccctacctcttcctgggatgacttcgccctgggctctgactctgccttctccctgatccagccctgccagctccctaagccccgctcctaagatatgacccaccatgtctaaaccccgcctttagtccatcccaggctctgactcctcccacttcccatttgggctccacccagaacctagacctcgtccttctaggccccacccacctgctgatctggccctgcccacaggcatgccaccttccactgtcgcaccccaccgcccttgtgctcaggctctgagcctcctgactccaccacaagactccagttctggccccgctcctgaaccagaagccgcgccccccaaccaggaggcataaagactccctcccgatgacccagagagccccgaccataatatctggactctgatttgccactggcgcaaggacccgcctacgcgagcgaacccgccaacgccgaacctgatgccgctgaccaactcgtcagaagcggcgagcgccctccatcagacagggatggtgggctcgaatcaagtgtgcgatcaggcaactgactacaaaggggcaaggaggggggggcaagaggaggagcgggaggacggcccc

SEQ ID NO: 711314 - DNA, 883 bp, Homo sapiens
tcctcctctctggccttgccccaggcctgcagcggtggttgtcacaccctgacttcagggaaaggtgaaacagggcttgtccctccaactgcaggaaaaccccttaataaaatcttctgatgagttctaaaaaaaaaacaaacgcacaacaaacaaccaaacaacaaacaacagaaacaactcacacacgaaaacaacaacaacaccaacaaacaacatgtggaggcgacgccacacagacaccagcaaagagatataacaacccaacatttgggggagcggccccaccacacggaatgatgaaaacagcggcgacaaaagagggtccccagaagaaaaacccggtgagaaagacacacgtgggctggattaacccacaaaaaaaaaaagccggggaggggacaacaacagacgatgtagacaacacacaacccaacgagaaattagcgaacaataagaagaccataaaacaaacggggagctcaccagcgcacgaacaaaaaaaaacaaaccccgtcgtgtcgatctgaaaaaacaaagacacgaaaatgacaaaagaaaagaacgacacagaaacgaacagaaaccaaaacagacaagaaaaaaacaggacagaaaaaggcgacgagcaagggaaacagcagaggggaaagggaggaagaagaaggaagagagaagaaacaaacaaaccagacgcaagagggcgaggagagacagacagagaagaaagagagaacagaagaaagggagaaggaagcacagaacagacgcgacacaacgagagaaaggcgaacaaaaacgagaaggacaaagagacggaaaaagagaagaaaagagcgagcaagaagagagagagaaagaagagaccgaagagacgaagaaa

SEQ ID NO: 711315 - DNA, 475 bp, Homo sapiens
catgacactagggtgataaagacaaacatctgaatctgaacaaagatgaccatagatcgcctgataggggttcatccctggattatgtctaccacgcatagccaaaacacatctaaggtcgtacacagtgtacagtatactttttattttattttagagatggagtctcgctctgtagtccaggctggagtgcagtggcatgatgttggatcaatgcaatctccaactcccaggttcaagcaattctccggcctcagactcccgtgtagctgggattacaggtgcctgccaccatgcccagctaattttgtatttttagtagagatggatttcaccatgttggcccggctggtgttgaactcctgacctcaggtgatccacccacctcagcttctcaaagtgctgggattacaagcgtgagccacagcacccggcccagcatagttctttactttattccctcttctattccctt

SEQ ID NO: 711316 - DNA, 251 bp, Homo sapiens
attagaggatcctgtctagctcgccagtgtggattacaggtgtgagcacttgctggctttttttggttttaagaagcaaagtagaattattcccaggctgttttggaaatcacctaaaaacaggtgatataaactctatttggaattatgaggcatatgtaatccgttgtatgggaaaaagggaaagagaaagaaatagtaaatggattagcagaagagaggtgggtcaaacccaagtggttcagggagac

SEQ ID NO: 711317 - DNA, 583 bp, Homo sapiens
aagggaatctagaagatccgacaactgacatagatcgcaggatatgtgtatgtatatacagatgtctacaccatttaaatataaaaggacttgagtcttctgtggattgtggtattgttggggattcctagctactactcccccatgcatactaggggattactaagctataaaattactgaagtattttattgaatactactttagaacatgttctacatccatgttacctgatactgtactgggcattttcattcagtttgctttgccatttcataagctaactttcccatatgaagcacatgaccagcaaacatggctgtcttcctcattagaagtaataatctcaatataacaataaagtgtgattactgaggatagtataaaccagcacttatttgtacaagttctgcagtggagactaatagtcaggggttactggccgtggtaattcaaccttccatcaagcacacaaagcagaagggtttacctacccaggtgatttaaaagtgcaacaaaatttgggaacaagtggataaagtaattcggacagtctacttctgaaacagctaccttacaaaag

SEQ ID NO: 711318 - DNA, 150 bp, Homo sapiens
aaaaaaaaaaaaaggagccagctaatacaggacaaaataattatctctctctctctcttttttttttttttttttttttgagaaggactctgtctgtgtcacccaggctggagtgcagtggtgtgatttcggctcagtgaacctgcaacc

SEQ ID NO: 711319 - DNA, 475 bp, Homo sapiens
tggagagaacacacacaaacccgatataaaatacacccccctctcgtgtggtgtggtgcgcccactcacgcgtgtgcagagaggtaggtagagtcataatatgtgtgagtggggggaggccccccctccccggcggcaagacatctatctctctcctctccgggcgcaggaaaagagtggaggccgcccacactgagacgagagagacgagagacgacgcgcacgcacgcgcaggaggggggggggaaagaaaagaagaacacaactcacacccaacccaccgacacgcacgagacgcccgcgacccgcgcggccgggagcggcgggcgcggcgcaccagcgggcgcgccccgcggggaggagggggaggccggcacgcgagaagagacgagagagagagacgaccgcgacgcaacacagcccaccaccacaacccccgcgcgagcagaacgaacacgaggaggagggaaaacac

SEQ ID NO: 711320 - DNA, 215 bp, Homo sapiens
  misc_feature (60)..(60): n is a, c, g, or t
  misc_feature (64)..(64): n is a, c, g, or t
  misc_feature (93)..(93): n is a, c, g, or t
cgactttagaggaacccctccttgtaatccaagcagtcgaagacgtgtcacattctggangtcnaaaaagacctggccggtgaagtcgccgtngaccaggaagccaagcgccttgtgcgcgtgcgtgaaaaccttgcacgcctgggcctgagcgccgagctgatcgccgccgacggccgcgacaccgccacgtgcgactgcttggattacaagga

SEQ ID NO: 711321 - DNA, 415 bp, Homo sapiens
tcttacttgcccacgacctggccttcttactgtgaacagccaaacgaaaattctgctacctgaaaagttgtatagtctgttccgatttcaagttatgtaggggggcttacccctatggctggggagccttttggggaattaaataaactatctaactacggccggttttcctggaagctgcccaccaaaggtcaatttcttcctgcacactgggtggtggacctttggttttgaaaaaaaggctaattttgggcctggcctttggccaaatggaaccccaaaaacccttttgttggaaaccaaaaaggagtggtttattaaactttttttttttgagaacccccccctttgcagaactttttgtcccccaacccttgggcttgttttttccccccccccgggggggttttttttt

SEQ ID NO: 711322 - DNA, 173 bp, Homo sapiens
cgcgtgtagcaaaacgtgcatgctaatcgtgttcagtaaggacgagttccccgaggtgtacgtgaccaacagttatcgagaactatgtggccgacattgagatggacggcatgcaggtagagctggcgttgtgagacacggcggaacaagaagacaacgaccgcctgcggccg

SEQ ID NO: 711323 - DNA, 187 bp, Homo sapiens
ctcgaatccagaggattccttcggatcttgagaagcacagtagtgttctaagtgctgagtgagttataactgtaacaaaacgatgcctgccacttgagaaacttacagggttatgagttaaaagtgcacacattccataaggtaacctgtgcataatggagaaatgctagtgaggaaaataaattgg

SEQ ID NO: 711324 - DNA, 617 bp, Homo sapiens
aagtgattcactttaagcccctgcccatttagagtttctcccctcaaagaccgtaatgacaggtgtccccatcagttaggacaaaagagttattcaatttcccataaattcataaagtggcaacattctccaatgtattagcaaatccaatgcgctcaaaggacatgaagttatataaaaaggttatacgaagatctcgtactagagctcatagagatttacgcatgcacaattaaggaagtcgtatcatgtgttatcacatgtgagtcatcgttatgaacgtctcatagcagtaactaagaatgttatcatgcgcaagtcagcatcttgcaggtctgggcccacatatccttcgagtgacagacgcatttgccccaaagacttgcatcaatccagatcaaatgacgtagtttcagtacctccaggactgatcagtcacatacatgggcttcacacttaggtactctaattctatgtagacaggtcatagtacatgtctatatttccatgacaaaataattatgatactgtaattagacatctgtatgtgcagataatagcatggcctatgaagcactatatcattaggtcgagagttatagttcagcttactaaac

SEQ ID NO: 711325 - DNA, 734 bp, Homo sapiens
tgtttaatgatacattagaatagtttctcattggcaatgatctcttatcctagtacctaatcgctttgaaacaagaaaggtattgcttggtggacagatacaaaatgtgaaattcagaaatccccctggaggagacaacctggaagaacgatttaaaggtacaacaaagcctgtgaactggcttaaatccgagtttacatgctggattctgagccagataataatggattcataaatgacggattttattgttcggatgcgtactgcagcattacctacttttcgcaaggttgtatcgtcttgatagaaaggaacaagtgatttacattcaatcattaccagctggccgatactctttgaatgtcaccatacagtatccttttctggctgggtatacagattcatagagcttgacaaggagtcgagtccaaccttatatctgtatgtggcatgttaccttgtgctttagtttcggtctctgcacttctttacaccaagtactgtgtggttatctgttgagaatgtcattttcaacatttacgtcttctagaaaatgttttgaattcggtatataccttggtactggggtatgacgcatatgtggggtacaatttacttacaaataataggtgcttgttaatcaacaagctaggtattttacaggggagatcgtaattggggcttacatgtaacggccaatgagagtacctaacattggtgttgagtggtactgg

SEQ ID NO: 711326 - DNA, 447 bp, Homo sapiens
taacagagtcggtgtcagagcataataactagccactcagataagaatttatagtttaactatctcttaggtactacatcagctagcaagacaaaatctatgtagtaaataatacttaaacactgaataaaaaaactttcccctacaattggaatgatcttagtattgctttgagttttgttatctagcatctatataagttgcacagggctctattgaggtcctatgtctctgatttcttttttaccccagaataagccctggagctgtctctggaaagtagctcgacgagagttaccttaactatcactgaagaaaggaaattttctgacacactgatggcatgtgacttgtctcctaggtcagcgaggcatcactttgtttgcatcaagtgtacggttagtaacggccttagtccttgtgagatgccaaccagttgctagtctg

SEQ ID NO: 711327 - DNA, 230 bp, Homo sapiens
gatgatgtgaactcccagagagctctgttagtctggggcatcccagtgaactggtgatgaggctgaaatcgaagagaccctccaggctgcgatgcccaggtctctacgaatgcttgggagatgtctcgagggagaaatccgaacagccttattagactcactgcgctgtagatacgcgcgatcccaggagatgccggcaaggagggtctgaagtgtattagcccactctg

SEQ ID NO: 711328 - DNA, 174 bp, Homo sapiens
gatctctagaggaccccgtcagccatggtgatgcttgtaatgacttacacagctaggtttggcgtttcacacacagtaaatccttcacccacagctttatgctagaccggccttccttaatcacgtttccttccctcttgtgtgtgtgtgtgtgtgtgtgtgtctgtgtgtgtg

SEQ ID NO: 711329 - DNA, 151 bp, Homo sapiens
cgggcttttctgctgcccaggcttggagttcacagttgggcggggattctcaatttacacggccaaccatctgacattcctgggtttaaagcatatttcttccttgccaccagtcgtgggggaccaccgggcaacagtgccaccataaggc

SEQ ID NO: 711330 - DNA, 437 bp, Homo sapiens
gggttgacacggcttccagttcttcatagacagtcaagacagctggatagattgcaagcatgttgtgtttggcaaacgttctaggagtggcattgcaggtggtgcggaatcgtggagagcaccaagacagacaggcgggattaaccccttaaggatgttatccttggcgactgcggccagatcgaggtagagaagccctttggcatcggcaaggagtaaggcaccgggacatctttctttgagttgaccgtctgtgcaggccctgtagtacggcacagggctctgaactggactggccccggtgctggcatatggtggagcggacccactccccttacattacacaggcccattggactcacttttgttacaaactcctaccaacactgaccaataaaaaaaaatgtgggttatatatatagtaaaaaataaaataa

SEQ ID NO: 711331 - DNA, 152 bp, Homo sapiens
gagaggcaagtagaccgaacagacggtactagacagtaagggacaccgctattgtagaaatagtggaggttatagtagagcgcaaactacgagcttgtgtagttggtgtcaagtagatttagtaacttaatttgcaaagacctctaattcct

SEQ ID NO: 711332 - DNA, 170 bp, Homo sapiens
attaaaaggcatttggcaggtctaaaaataatcaatacagaacatgctgggcgcagtggctcacgcctgtgatcccagcactttgggaggccgaggcaggcagatcaccagaggtcaggagctcaagatcagcctggccaaaatggcaaaaccccgtctctactaaaaat

SEQ ID NO: 711333 - DNA, 945 bp, Homo sapiens
  misc_feature (945)..(945): n is a, c, g, or t
ggagagagagagagagaatagtctcgggtggcgggaagaggaggcgcgagaatggagtgtggaggccgtctgtggtgtgtgcgcgggcgagggatggacggcccaggactctgacccatggcaccatgccgttcagcaagggccaccccgtgcagcgccggccactacgaacgtgccagtggggttgacacaacatatacggccatgatacagccgtgaattgaaagttgtcagggaatgaatgacagccgatggagcacgagctagcaaggtcttatgcaacggagaacgcgacactgtgcaccgaacattcagtcaatatggcggggccacatccaaggaaaccgagccaacagacgcaccaaggcgacattctgttgactctgagacaccggtgacaccatgaattggtgcacacagaatacttcaacgagcactgccactggtttggcgacaaccatcaacactggacgtttcagcacttcgtactcagacggggacacttacggaccgaggatatgcgtcggcacgacgaaaacatacccacactccaaacaccaattgatagacggcgatccacaacccaacacagacccgacatccacacatacgtaaacccgccgaagtacgcgcccgcggaccaaattaaaagacagaagacatacgaaggtatacattaggtgaaattagaataggccaacgaaacactgcatgagtaggagacactagcaatgtgggggcaggcaacaccacggccaagagggggccatgatagaacagcagcaacgaacgccccccaatgtgcgagaaagagatgtcctgtagacctaacatacagagaagaggcgcgtcacagagtgctgggcgtgatgagcacgccccgacattctggagctagctagatagagagtctgggcattagcgcaggagacttcacacgcgagn

SEQ ID NO: 711334 - DNA, 1430 bp, Homo sapiens
aatttgagaccagcgaaagtactatgtgactatcattgatggccccatggacacagagacttgatcaaacacatgattacagggaactatctcaggctgactgatgctgtcctgatatgtatgcctgctgggtgttcggttgaagtttgacagcatggatagtcgtccaacgcaatgcggcatgacccgagaatgccatgaccgcatctctggccttacgaacacgtgtggttgatgacatgcatgcgtacattgatcgagcagtgaatcgcagacaatggatatctcaccgtgaggcctacctcgtaacagaccaacacacgagattatgtgacggaacactaggctgaacgtgacatgtcacgcgagcgtaaaccagtttagagcaaaaaatggtgtctaccaaccgcgccgacactacgtaggcagtattcgtggccacaattgtctggggtgtgggcacacttgagtgatcgcaccaagtgtctcgtgagcccgaaggtggcgtagaccattgtcgctctgcgatttgcaacagagagtactagggagaaggctccaagcccccgataaagcggacttgggctcacattgacgcagggctcggaaaccccaaacgtcattgccatttgaagcgcctacagtgtgtcactgtgcattcccataagccatcacaaaactttctgctccaccaagggcgttagaatcacatgtcgcacatttgtccgtcgcatgtgtcgcattcgttccgcaagtgcaattggtttcataagcaacacgcagttagggcatagagatcaagcttagggataatccattcggcttagccgcactaagggttctagaggcagcctgtaggacgtttgtggaacgcacaccatttgggtctctgttttcccattacaatacatcgccaccagtagcaagtctggtgataggggttccaaaccatcgtgttcaggttctatccctatagttccagattcgtgtttctgaaccaaccggtcgaacaggtcacatatactttcatatagcacacgaaagattagacaatgcacattggaaaaggtctattcttatcacatgagaaatcatcctttacccttgggccggcgaaccactaaacggttgggagaacggttacgatattgttctcaaagaaacagtgctgtgcatggactaacgtggaataggttctacatcattggttcgtaccactccgctattatatctaggattatgcttacaccacaatcatttagtaccctaacctcaactgtgtattccacccgttggtggttattcaccatgcgtcacgcgtcggagttaatcaccggatagcaccacccgacgcagcaaattatactacggtagtaccccgtatatgtgtaattataaacacaggcatcaataagataaacacatatgaa

SEQ ID NO: 711335 - DNA, 254 bp, Homo sapiens; identical to SEQ ID NO: 636686

SEQ ID NO: 711336 - DNA, 1019 bp, Homo sapiens
  misc_feature (25)..(25): n is a, c, g, or t
  misc_feature (118)..(118): n is a, c, g, or t
  misc_feature (316)..(316): n is a, c, g, or t
  misc_feature (324)..(324): n is a, c, g, or t
  misc_feature (340)..(340): n is a, c, g, or t
  misc_feature (361)..(361): n is a, c, g, or t
  misc_feature (369)..(369): n is a, c, g, or t
  misc_feature (378)..(378): n is a, c, g, or t
  misc_feature (411)..(412): n is a, c, g, or t
  misc_feature (464)..(464): n is a, c, g, or t
  misc_feature (721)..(721): n is a, c, g, or t
  misc_feature (819)..(819): n is a, c, g, or t
  misc_feature (845)..(845): n is a, c, g, or t
  misc_feature (959)..(959): n is a, c, g, or t
cctagaattgtaatgtgtgggatanaaattagtttgtataattctcttaaaaatcaaagatgatctctatcacttagccacctgtttgatgtgcagtggaaactggttaagccaaaanttcatacttcctttacaaatataaagatagctgtttaggatattttgttacatttttgtaaatttttgaaatgctagtaatgtgttttcaccagcaagtatttgttgcaaacttaatgtcattttccttaagatggtcacagctatgtaacccgtattattctggacggacttattaaaatacaaacagacaaaaaanaaaacaanacttgagttctatttnccttgcacattttttgttgtnacagtganaaaaatggnccaagaaaatgtttgccatttttgcattgtttnntttttaactggaacatttagaaagaaggaaatgaatgtgcattttattaatnccttaggggcaaaggaggacaataatagctgatcttttgaaatttgaaaaacgtctttagatgaccaagcaaaaagactttaaaaaatggtaatgaaaatggaatgcagctactgcagctaataaaaaattttagatagcaattgttacaaccatatgcctttatagctagacattagaattatgatagcatgagtttatacattctattatttttcccccctttctcatgtttttataaataggtaataaaaaatnttttgcctgccaattgaatgatttcgtagctgaagtagaaacatttaggtttctgtagcattaaattgtgaagacaactggagtggtacttactgaanaaactctctgtatgtcctagaataanaagcaatgatgtgctgcttttgatttttcttgcattttaaattttcagccaacctacagccatgatttttagcacagtgatatccccatgacttcacagacatggtttagaatntgtacccttacccccatatgaagaataaaattgattaaaggtttttttggtgagccttta

SEQ ID NO: 711337 - DNA, 128 bp, Homo sapiens
gcagcagcagcagcagcagagacggcgcaaccacgttgatggttccagcaagcctgcggtgctggcggccccgtctggcctggagcgctacggcctaggcgctgcggccgccgccgccaccgccgccg

SEQ ID NO: 711338 - DNA, 1061 bp, Homo sapiens
  misc_feature (25)..(25): n is a, c, g, or t
  misc_feature (118)..(118): n is a, c, g, or t
  misc_feature (316)..(316): n is a, c, g, or t
  misc_feature (324)..(324): n is a, c, g, or t
  misc_feature (340)..(340): n is a, c, g, or t
  misc_feature (361)..(361): n is a, c, g, or t
  misc_feature (369)..(369): n is a, c, g, or t
  misc_feature (378)..(378): n is a, c, g, or t
  misc_feature (411)..(412): n is a, c, g, or t
  misc_feature (464)..(464): n is a, c, g, or t
  misc_feature (763)..(763): n is a, c, g, or t
  misc_feature (861)..(861): n is a, c, g, or t
  misc_feature (887)..(887): n is a, c, g, or t
  misc_feature (1001)..(1001): n is a, c, g, or t
cctagaattgtaatgtgtgggatanaaattagtttgtataattctcttaaaaatcaaagatgatctctatcacttagccacctgtttgatgtgcagtggaaactggttaagccaaaanttcatacttcctttacaaatataaagatagctgtttaggatattttgttacatttttgtaaatttttgaaatgctagtaatgtgttttcaccagcaagtatttgttgcaaacttaatgtcattttccttaagatggtcacagctatgtaacccgtattattctggacggacttattaaaatacaaacagacaaaaaanaaaacaanacttgagttctatttnccttgcacattttttgttgtnacagtganaaaaatggnccaagaaaatgtttgccatttttgcattgtttnntttttaactggaacatttagaaagaaggaaatgaatgtgcattttattaatnccttaggggcacaaggaggacaataatagctgatcccccgaaatttgaaaaacaaggaggacaataatagctgatcttttgaaatttgaaaaacgtctttagatgaccaagcaaaaagactttaaaaaatggtaatgaaaatggaatgcagctactgcagctaataaaaaattttagatagcaattgttacaaccatatgcctttatagctagacattagaattatgatagcatgagtttatacattctattatttttcccccctttctcatgtttttataaataggtaataaaaaatnttttgcctgccaattgaatgatttcgtagctgaagtagaaacatttaggtttctgtagcattaaattgtgaagacaactggagtggtacttactgaanaaactctctgtatgtcctagaataanaagcaatgatgtgctgcttttgatttttcttgcattttaaattttcagccaacctacagccatgatttttagcacagtgatatccccatgacttcacagacatggtttagaatntgtacccttacccccatatgaagaataaaattgattaaaggtttttttggtgagccttta

SEQ ID NO: 711339 - DNA, 132 bp, Homo sapiens
actcttacttatacttcatatcccggctgaagtattaagcgtgaggaagtataaagcgtcgagaagtataaagcgttgagacgtctaacagcgttgagaagtataaagcgttgagaagtataaagcgttgag

SEQ ID NO: 711340 - DNA, 699 bp, Homo sapiens
  misc_feature (505)..(505): n is a, c, g, or t
  misc_feature (524)..(524): n is a, c, g, or t
  misc_feature (582)..(582): n is a, c, g, or t
  misc_feature (699)..(699): n is a, c, g, or t
gagagagagaagacagtaggtgttgtggtaagtcagggactccaaacggagggactggctgaagccatgacataagaacgtggattgtgatgatttcatggacatttattagttcccccaaattaatacttttgtaatttcttatgcctgtctttactacagtctctaaacataagttgtgaatatttcatggacacttatcacttccccagtcaatacccttgtgatttcctatgcctgtctttactttaatctcttaatcctgtcagctgagggggatgtatgttgcctcatgaccctgtaataattgcattaactgcacaaattgtacagcatgtgtgtttgcgcaatatgaaatctgagcaccttgaaaaaagaacagggtaacagcaattgttcagggaataagagagataaccttaaactctgaccactggtgagtcgggcggaacagagccatatttctcttctttcgcaaatgggagaaatatcgctgaattctttntctcagcatggaacatccnctgagaaagagaatgcacacctgggggtgggtctctgaactggcccccctcccccggnggcgtggtcgtctcttatggtcgaggctgcagagatgaaataaacttcagtctcccatagcgctcccagctttataggaagaagtttccgcttacatttggtcagccggttgtcttn

SEQ ID NO: 711341 - DNA, 173 bp, Homo sapiens
cggcacgagaaaatacaaaaagtagccaggatggtggcacttgcctgcagtcccagctactcaggaggctaaagtggggggaccatttgagcccagcaggaggccgaggctgcagtggtgagccatgatcatgccactgcaatctagcatggacaacagtcagacctgtctca

SEQ ID NO: 711342 - DNA, 241 bp, Homo sapiens
ttttttttccccccccgttccccggggggcccccccccccttttttttcccccctttaaagcccccggggccgtccccccccccgggtttttccttgggcccgggggggggttccctttttcccccgggacccctttttcccctttggccttttttggggcccctttttccccgttttttcccaaaaaccgggggggggcgggccggggttttccggggttttttcccccccccggcccca

SEQ ID NO: 711343 - DNA, 349 bp, Homo sapiens
gcgtcgacacagaatcagaaactgtggcacagcagtctgtggtgttctttgaaatagggtttcacagccaagcgcagtggctcatgcctgtaatcccagcactttgggaggccaaggcaggcagatcatgaggtcagaagttcaagaccagcctgaccaatgtggtgaaactccgtctctactaaaaatacaaaaattagctgggcgtggtggtgcgtgtctgtagtcccagctactcgggagcctgaggcaagagaatctcttgaacctgggaggcggaggttgcagtgagccgagatcgtgccactgcaactcctgcctgggcaacagagtctcgctctggtcgacg

SEQ ID NO: 711344 - DNA, 397 bp, Homo sapiens
aaaaaaaatgtggcccctttccattttcaaaagagatggaattaatgatggatggcccctggagggaatctccccagccgacttccactggggtgacagactttgctgcccacaggggaacgatgtttttttcttttttcatgatcagacataaacttagctttttaatggaagaaaaatgaggggaacttcaattatgatttattaaagccaatttttattacccccccctttatgccaagggacctttttaggggtaaaagtaaaaactttcccaccccttttttttttttgttggcccaacattgaggccttaaaccctgaggctcctgggcctgatggaattcttgtaacaaacccttgtgtatcaaataaaaaaccccctctgtttttttta

SEQ ID NO: 711345 - DNA, 474 bp, Homo sapiens
acacaaggcaggagccaggtgagagctgatgaggagggcacacagaaggacccaggcaagctgggcggatcaaaatgaccatatgtattagttccctagacctgctctaacaaaaataccacaagtaggtgacttaaaacagaaacggattgtgtcacaattctggcggctagaagtctgaagccaaggtgtcagaagggctgtgctctcttggaaggctcttgggatgggggtggggagggcaggattcttccgcgcttcctcctagctcctggtatttgctggtaatctttggtgttgcttggcttatggcggcacaactccaatctctgcctctattttcacgtgaccttataaggacaccagtcattggattaaggcctgtcctaatccagtatgacctcatttgaactcgactatgtctgcaaagaccctgtttccaaataaagtcacattcacaggtaaaaaaaaaaa

SEQ ID NO: 711346 - DNA, 765 bp, Homo sapiens
  misc_feature (4)..(4): n is a, c, g, or t
  misc_feature (8)..(8): n is a, c, g, or t
  misc_feature (19)..(19): n is a, c, g, or t
  misc_feature (584)..(584): n is a, c, g, or t
  misc_feature (587)..(587): n is a, c, g, or t
  misc_feature (695)..(695): n is a, c, g, or t
  misc_feature (711)..(711): n is a, c, g, or t
  misc_feature (720)..(721): n is a, c, g, or t
gcanctgntgcctgagtcnctctgaggatccccggtgcgggggattgttgctgctggaggtttgtggaaatttgaacttcagagagatgatttagggtatctggcggatgaaatttctaagcaataaaacattcaagaggtgacttgggtgctgttaaaggcattcaattttaaaaaggaaatagaggctgggtgcggtggctcatgcctgtaatcccagcactctgggaggccgaggtgggtggatcacaaggtcaggagatcgagaccatcctggttaacacggtgaaaccctgtctctactaaaaatacaaaaacaaaattagctgggcgcagtggtgggcacctgtagtcccagctactcagcaggctgaggcaggagaatggcgtaaacgcgggaggtggagcttgcagtgagcccagactgcgccactgcactccaacctgggtgacagagtgagactctgtcttaaaagaaaagggaaatagagcataaaaatatggaaaaattgcagcctgacatgtgatagagaagaaaatcctattttctgaggagaattcaaactgctgcaaaatctgcacangtnatgaagaccgaatgttatcccaagacatggggaaaatgtcttccagcatgtcagagacctttgtggctgcccttcagtcagcaacaatcccccaccggtaccgactcnatcgaatatggcatantgttcctgnngaaatggtatccctccattccacacatcgacccgaactaatgga

SEQ ID NO: 711347 - DNA, 175 bp, Homo sapiens
agggaggccaagaaggttctagtgggtggaggaggacatgaggtgttggttataaggagcagcgagagtcgggtgaggtcagagcccccacccccaccccaggaatcctccttcggagggagtaggcccactgtggacaaggctgccactcctgaacttcggcatcgactgcgct

SEQ ID NO: 711348 - DNA, 292 bp, Homo sapiens
tctgaggctgggaagtggaggttgcagtgagcggagatctcgccactgcactcaagcctgggcgacagagtgagactctatcaaaaaaaaaaaaagggccccccgggggccgggaaaaatttggtaaaaagccccccccggattaaaacggaagggcccctgttggaaaaaaaattttttgggccccctaaccggggaaaaaccgggggggggaaaccgggggctattttcaaggttgggggggcggccaggttttagggcggccatttttccgggcccaaaaaaaaccaaa

SEQ ID NO: 711349 - DNA, 633 bp, Homo sapiens
tgaattttttctacaaaactagtgctccccacactattattctcaccacaacatcactatagcggagtgtcttgtacaacaacaccacctctcctcctctagtagctattcttccgcagaagtactctacagcagagcacaactactccccccccctgctgtaggtgtgtgtacaacacgcagcgccacccctcctactacttttgtataacaatccaaaatagttgttccctttcattgaatgccctgcctttttttggttgtccgacctacccggcgactgtttattataggagattttcctcctctctacgcgctcggtgatgctgctgagcgatctcgtctcgtcgcccgcgcgcgtgcatatatctccgcgcgcccgcgcggttatctctactatttgtgatcgatctcgccataagtgatctgcctcgccctccctttctctcttcgagatagcgcccacacccagatatataaggcgccctcttgtctctctccatgcccgccctctctctccccgctcatatatcgagaataactctgtctctctctactcttatatagatatatatatatctccccacctcgcccccccatgaactccgcgggctataacaaataacaaaaaac

SEQ ID NO: 711350 - DNA, 745 bp, Homo sapiens
gaccgcacgttgacacacacagtgcgcgagaccatggcgacctgatgtcgaacagatgctcacggtctgttcgtgtgtccgaaaatgtcgcggtgacattcactctgggagctttcctagccggatgggaatctcggccccttcgagatggttgagaaaaaatgacacctcgttagaatggaataccgtagtggccgtggttgacctcgcgatctagcgctactgtcattgcagtctcaccagttatcgtacaatagcatatgtcgccacgtagctatgatgagcgcaagtattgtcctcgtgattctttaagggtgtacacgaactgactggacaatatggccgaagactcagaaagaccatggctcctatgaatagacgttgatgggggtatctgtcggtgcgatcctactgtctcataaggccttactacttagtgtgatcaagacataaaatggtcgctttcagtgacaaagctaacgaatttcacgatgtgaacgtgtgaagttgtcgcagtacatcagttggattcccactttagccatctgtgccgtggcataaatacaccgaagaaagaatggtggtttgggccacatgaacatcgcactcttgtcagacttgaactaagcagatttcccgagactacggtgtgctgttaagaaggttctggtctcgcactaagaggtctcttcaataatggacccaatggagtccatcaagcatttgagcgtcaacgatctcccgg

SEQ ID NO: 711351 - DNA, 799 bp, Homo sapiens
  misc_feature (124)..(124): n is a, c, g, or t
  misc_feature (126)..(126): n is a, c, g, or t
  misc_feature (137)..(137): n is a, c, g, or t
  misc_feature (169)..(169): n is a, c, g, or t
  misc_feature (214)..(214): n is a, c, g, or t
  misc_feature (394)..(394): n is a, c, g, or t
  misc_feature (488)..(488): n is a, c, g, or t
catgatacaggcatcctgaagagtacctctcacaatgtcctattctcattgctgaggggaggcctgaactcgctgtgtcgaggattagacagtggattgttatgtgtgtaggagaacagcttantntgtctgtccangtctgaacttattgcagaaattgaaaagtacnaagaagtggaagaagaccaagacccatcatgccccaggtaacttngagcaattatggatgcttaattctgtgttgacacctggagatgccaggtccagggaaaacaagagtgtgttcaatttcatgttttcaacgaaggttgaattactcctactgacatggctgttggttttcattgcagtagatgtttaggtttccatttcttcctccccttatcatttactnacttactataggttgaccatacctcaaaggctgtatggcaactgcatggaatcttgagcaagtttatggaaaattattgagcccactcttttcntgatcactgttcgctgtgtgtcccgagggcactaactcagagtgtcctttgaccccttcatcagtgtgtcacccggccaactcgctgagctcactttctcctctctctctctctctctctctctttctccctgtctttctctttcattcttctctacctggccctggtctatcccaacataaaggcaataattcattacctcattaatggatctgtcctttttctttttaaacagttccttatgttagccatgaaatctagctggggctgtgtggtttctgattccccctggctaacataaggaactgttt

SEQ ID NO: 711352 - DNA, 365 bp, Homo sapiens
gcgtaccgctgatcgcttagggggaatggactttcagtagaatatagatctgggaatcaactgcatggaggaggtagttataggtgatgagatgtctcaagcacaaagtttggtagaaggagaaaagatactaggctggtacaaaaataattgctgtttttgccattacttttaacagcaaaatccacaattacttttgcaccaacctaataggatgcaaactggagccatctgcatcagagggtttgatgaagatcaacaaagtttgggaacacaggaaaggagcggggagggtaatgacttgagggcataacagggatgatcaaggtttttcttgttagcatgtggagacttaagcggatcag

SEQ ID NO: 711353 - DNA, 799 bp, Homo sapiens
gccgtccgtgccgctagggagccgagactgccggaaagaggagcggcaggagggggcgtggttgtgcagccccacccccgggaggggctttaggcactgggaaggaaagtcctgttggaggagttcggtggctgttcacacccgcctcgctgtcttggagtcttgatctgtcgtcggcgggtcgctggcacaggactaaacatggctgaggctgggctccagccagatctggctggggacagcaccgcgtgggcccaggatccacccagagcaggcaggccttgctggggccccagtcaagtccacttccagtgaggagagccagccgggaggtcagtgccagagctctggtggagcccagaccctgccttccctgagggccgcccctgtcgccgccctggggtccctgtcctcctatcctgactcctgccccagggccaccacccctgaactgtgccctggggcccccaccctccacctggccgactccagttcagataagggccagtgtgtgtccctgaaggtcaggccagccgggggaggggtccatgctgcgaaaattcagcctgcaaaggctcctctccccacttgatcaggcccagaccaggtgggggttggcgctggcctgtgttgcaggggacaagggcccacccaggccttggaacataagctctgcccctgcacaccctcatgtcaccacacctgggatggagacatcaggtggcccagcgagagatggaggactgatcctggaacgtgaagcagctttcaataaaccagctcctggggaaaaaaaaaa

SEQ ID NO: 711354 - DNA, 1346 bp, Homo sapiens
gctgggttcgagcggcagcacagcctacccagttcgacacatccctattgggctgcctggctgcaacagcatccaagtggtggtcactggggtgtgtcgaagctggagttcgagcggcagcacagccgtacgcacagttctgagcactcttgtgggcatgatggaggcgctcgtaccagatcccaccgacagtcctcgcgcgcagcagctagccgcaccaacagcgcgtcccccagccaggtgaacgcgctcgagtagcgcagaggtcccatgcatcggcctcctgggacgtaggtggagccaacagacacgcagtgcgccatcacgcgcgggataacatctgctgtcgcagcggcctccatcagatcagcagacaccatcgccatggaacacagctctagtaccagacttccagcgccatcatgaaccagagctccaggctgctcaccacaacagcgcccgacctggtagccccgtcgcagcgcccaccccaaaagcaagctcatagatcccagagcgtcacagacgcacgcataccgcgtacgcaaaggacaatacaagacgacctggcaagccaacccatagacagcaacgacacagacagcagagaccaccctgggtgacacaccacgacaaagaccatcatggaccaacacatggaaaaagaaccatgagaatacccacctgaagcacactcggacaacaccacaacgcaggaaagacaacgcaagacaccacagaaggacgcgatgaaacccaaagggacccgatcaagagagaccggaccaccaagagaggagagcatccggccagcacgagaagcaaaagcaacacgcacccctgcagcacaccaaagtacgactcacacaccgccacggaccaatccaggaacatcacaaacaacaggcgaacaaactcacccgcgaccaaacgaggatgcaccggcgccaacacaccagccaaactacgctgcggacgacaggatgcacccacaacaaagaaaccggcgaagcaggcgcaaacgaacccaacaagcaagcgggcaccctcaaccacaaaagggagcacaagcacggaccacccggaaacaagagaacaacgcacagccaccgaaataaactgccacacaacagagccgacagacccagacccacgcgcaccaccccagcccgggacgacaaccaggcgacactcagagacgccaacagatggacaccaacatacaactagcgtgagaactgaacagtacaaacacaaccacgacgatacactcaaatcaaaaacacagccacgacacgcctcaaccaacccataccagcacatccaacgaacgaaaggacaacaaa

SEQ ID NO: 711355 - DNA, 566 bp, Homo sapiens
aggtccggtatgagtgcaaaaacgtacttctatactaaaagcttattacctctttgtgatatattctaaataatgaaaaaaatgcgatggacagttgtgaacctaattctgtgttttgcatattgagttgcagtacctaccccagctaactggcagcagcatccttccagcttaggataataagaagtactactgtgataccaagaaacttaactaccgttttccaaacatttaaaggagctaggagacatgattttaaaaaaggcaatcaatagatgctttgaagaaaataaaacttatacagttgattgaaaacaattacaatgttgaaaacacaccaggagaaaacataagcaagaaactgggaggccaactggcaacatatgaagggaaattccagatccagtcttccatgcttgatgatggtgtccagaaaagaaaaaacctgtttggagttgcacttgtatttcagtttatgtaagtagccgaacttatggacagaatatgaactgtccatacctctgggaaaactagatgatatcaaacagatttatgcttcagttgga

SEQ ID NO: 711356 - DNA, 636 bp, Homo sapiens
aagatttaagaaataaacgcgctggatttttttacacccagtctacaattatttggggaagtatggaataatcggctgtcgtgaaagcacataagggaccaaggccaagtcataaaattaaaaggccctactcacaccagtaataattttggcgcatggatatgttcagaatgagtattttttcaaatcactaaaaccatagctgaattcagaaacgagagcacaacagcagcaggtaaagtacatgtggaatacaatcatggggcctaattttcataaccacagctttcagagaataccaccacccatgccaggtgcccagacgatcccattgtctgttttagccgtgtaggggccgctgtagtatacaccattcaggtttgcagagtgacacctgttaaaccaccagccagagtgatcttcttctgcgcagttcccttcatagttgtcatgatctctgtcccacgtgataagtttcattctttggtgacgagcccgccactgcacctcaggatgaaaattccccgcaagggaatctccagctgttccagaatatccctcaatatcgcactcgtagaatctctctacatctcacactctgaatctctcacactgtgtatcacgctaactctctcc

SEQ ID NO: 711357 - DNA, 2014 bp, Homo sapiens
gccgtccgtgccgctagggagccgagactgccggaaagaggagcggcaggagggggcgtggttgtgcagccccacccccgggaggggctttaggcactgggaaggaaagtcctgttggaggagttcggtggctgttcacacccgcctcgctgtcttggagtcttgatctgtcgtcggcgggtcgctggcacaggactaaacatggctgaggctgggctccagccagatctggctggggacagcaccgcgtgggcccaggatccacccagagcaggcaggccttgctggggccccagtcaagtccacttccagtgaggagagccagccgggaggtcagtgccagagctctggtggagcccagaccctgccttccctgagggccgcccctgtcgccgccctggggtccctgtcctcctatcctgactcctgccccagggccaccacccctgaactgtgccctggggcccccaccctccacctggccgactccagctctgggcctgtcagtccacctgggtcctctctgggccctgagtgcctggaccctctgtgccaagcaccagcaagcaaaggggatgaccttgggcacccccaaggtgctgagactacagccagtgagcccctgctgggggccaaagccatggagggtgcctgggcccttccaacctggaaggaggaggggagagagcaggcagcagggcagggggaagaggaggagtgcccgatctgcacagagccctacgggcccagagagcgccgcctggccctgctgaactgtagccacggcctgtgtgtgggctgcctgcacaggctgctgggctcggcctccagtgccgacctgggccgggtgcgctgcccgctgtgccgccagaagacgcccgtgctggagtgggagatctgccggctacaggaggagctgctacaggccgacgggccctcacgccagccccgccgagaggcccctgcatcctatcaccgcaaccctgggccctggggctccctggagcaccgctaccagctgcgcttcctggcagggcccgtgggcggccggggctgcctgcccttcctgccctgtccaccctgcctgggtgcccggctctggaccctgcgggagcggggaccctgtgcccgccgcctggcgctgctgagcctgctggcccttgagcttctggggctgctgctggtcttcacgccgctcctgctgctgggactgctcttcgtgctcctggaccgctctggccgctgagcagagcccaggacagacccgccgccaacaggccagggggcccagactggcccacgtacccatgcctgggtgctgtgaggcctgatgaccaggctggaaaaacccaaggttgggtccagggcagtggccttcaatcaagacctcccattgctgaacccacaaccagggctacccagaggcctgaccctgccagagtccatggctgcactgctgcccagacactagctgaacccaaggacaccagcgcccaaggacagctcctggaggaggccagcccagcaggaaagtctgtgagcaggaccccattcaccctgcggcagacgggcaccgtactggccacgggctgacgccggccacacttcccctccgagggccagctgagcacagcaggcatgaaagcaaacagagatacagcagtgagtcagttccttggagagggcagggactccgcccaccctgtgttcagataagggccagtgtgtgtccctgaaggtcaggccagccgggggaggggtccatgctgcgaaaattcagcctgcaaaggctcctctccccacttgatcaggcccagaccaggtgggggttggcgctggcctgtgttgcaggggacaagggcccacccaggccttggaacataagctctgcccctgcacaccctcatgtcaccacacctgggatggagacatcaggtggcccagcgagagatggaggactgatcctggaacgtgaagcagctttcaataaaccagctcctggggaaaaaaaaaa

SEQ ID NO: 711358 - DNA, 349 bp, Homo sapiens
  misc_feature (13)..(13): n is a, c, g, or t
  misc_feature (23)..(23): n is a, c, g, or t
  misc_feature (39)..(39): n is a, c, g, or t
  misc_feature (56)..(56): n is a, c, g, or t
tataaaacccttnattgaaaagnatcctaagaaaatttnaatggaaaacacattgncccttattaatcctataaatatagttttaattaaaaattcccaatagggggccccaggtacggtgggtatgcccagtatttcccagcacattgggaggcccaaggtgggaggattgcttgagccctgggagttctgaccaacatggtgaaaccctattgctaaaaaaagacaaaaaaattagccaggcgtagaggtgtgtgactgtagtcccagctactcaagaggctcagttgggagaatcgcttgagcccagaagtcgaggctgcagtgaactgtgatctcaccactgtac

SEQ ID NO: 711359 - DNA, 404 bp, Homo sapiens
  misc_feature (40)..(40): n is a, c, g, or t
tgctcttcgtgtggctcgttgcgtggctcattggggggcncctcgtgtggctcttggcggggcccttggagagggcagggactccgcccaccctgtgttcagataagggccagtgtgtgtccctgaaggtcaggccagccgggggaggggtccatgctgcgaaaattcagcctgcaaaggctcctctccccacttgatcaggcccagaccaggtgggggttggcgctggcctgtgttgcaggggacaagggcccacccaggccttggaacataagctctgcccctgcacaccctcatgtcaccacacctgggatggagacatcaggtggcccagcgagagatggaggactgatcctggaacgtgaagcagctttcaataaaccagctcctggggaaaaaaaaaa

SEQ ID NO: 711360 - DNA, 583 bp, Homo sapiens
gattctgaagtcgtgtgatgagcacagcaattaaatgtggttgtgtggaacgaaagttgtaaaatcttttactttttggcccctctggaggcttttaacccgtaaatggtgtctgatgtatcgggaggcttaggtgtgcaattctgtgccaaagagagggagatgaatgagatgtctcatggcctcattctagcgcttaaagagtgtgaccatttacgagtgaccttttagtgggctccaaagaggttctttgaaagccatttctttcccaaaggccccccctttaaagaaaccttttttgtggcacccaacgggaacaacacaggggggttaagcttcagagcaattcgtctactttttcccggtggacggtacctcgcagggaaggtccacagccaagtgtacttagcagctgatcattaaggctccttcaagtgcagggctacagatccataattctcgaatgagccactaggggggcacagccttgggttgtatatgcccagctttgtctcttcccccaataccttaaccttttcccctttcatgggtgttaccctttaaggcccaaacccttgggttc

SEQ ID NO: 711361 - DNA, 837 bp, Homo sapiens
  misc_feature (600)..(600): n is a, c, g, or t
  misc_feature (634)..(634): n is a, c, g, or t
agaaggtgggtgtgggacccttataagaggaaaaccctgggggcctcccgtgcctggcggaagaaaggccaagccaacccgcctgttttgggtgctgttttaaaaactattgagggtggagaacatctgggcaaaattccacaggatacatcttcgctcaagtgttgaaggcaaacctttattttgagctatgtaatggccacgtgttggagccagaaactgtgacggtaaacccaaaggaaccaatccagtgttaccttaaaaattaaactttgcaccgcaaagaatccaagtacagccgggcaaggcaaagatgtatttttgactcaccgtaagatctccagcacggacgcattgtgaggcattttttcccttccctcatcacaaatcagggttattaatcgtgtcctttcatgttgcaatgcacggccagtttctagcgcaaagttccacaccatgctatttttgttatagccagctcaagttcttataaacgagacgtttcgaccatagatgaccagccaatagctggtgacacttaataaccagattcacaaggtcaggcatgtccagttcacctgcaacatatggtcattaatntcttgtggagacatgatgagcctttcctggccgnaagccgttgctggtgtgtacccacactaagtaaggtctatgaactcagtcagtttctcaccagtaggtcgataaacattggactttagaggcatcattaatttaggcggcctcggcagcaattgacagattagaatcatgttccatgaagatatcttaccataaccccgatgtctctgttccaaaataaccctagcaatgcag

SEQ ID NO: 711362 - DNA, 788 bp, Homo sapiens
  misc_feature (788)..(788): n is a, c, g, or t
ccttgtgatccgcccgcctcagcctcccaaagtgctgggattacagtgcgtgagccaccgcgcccggcttcctctggtaatcttacacctttacagaataaactggtggctcataaatgatattaaaaacaaaaaaaaaaaatctgggatgcaggtgggctcattcccttattagtcccaggcaacttaggggaaggccaacggacgaggaaggcatcatcttgaagcccagtgaatatgggaggagctgatagtgtgaaactatgaatcagtacaatgtgtcagtccctagaccgtggggtgaaccaagagtgtgaacaccccgtgatcgctcgataaaagcgaagacgaactccaaggcccagcgcagcagagccacacgcgtttgtgtattatcgccccctgtgcacaagccctcttcggcgcaaagggcccgagacgaccaccgccaggtattgcgccaagggtagaaaacgtccgtaggaaaatattaacgttgttaggaccacacgactaaacagcttgcacgtgcgtacacaactgtgggggccacacgaattaagtggcaagttccagtttccggagcccgaggtgtcgaattggagtacgtggcatcgtcgagaagagaaaggggcccctttatgataatataaaatgtagaaagtcgggccactggggcgaaagcacacgtacagtggggacagcaggaaacattttcggagcggaacactgatgacaaagttgtggaggcagcgtgctttagagagtcccccgctgttgtaaggccn

SEQ ID NO: 711363 - DNA, 115 bp, Homo sapiens
cccgtatggactcacagagtatctctgggttcgcctgccgggtagttcaccatactttctgggtcctaacacgtgtgcgcgtgtccacctccccgccgtaacgggggtgttgccg

SEQ ID NO: 711364 - DNA, 410 bp, Homo sapiens
gcctgctgaggggggattacactttcttttcttttttctttctaagacagggtctcactctgtcacccaggctggagtgcagtggcacaatcttggctcactgtagtgtagacttcccaggctcaagggatttctcccaccccagactcccaagtagctggaactacgggtgtgcaccaccaccacacctggctaatgtctcttttttttggtagacacagagtctcactatttagcactgattggtctccaactcctggcctcaagcgatcctcctgcctaggcttcccaaattgctgggattacaggcatgagccacaatgcctggcctctgctagttccgtattctctagagttgtctttactttgtgctagtgtgtccctcattgtgctgatcctctgtaaaaatt

SEQ ID NO: 711365 - DNA, 242 bp, Homo sapiens
cactaagtgagtgagtggtgcaatcatggctcactgcagctccatcttgtggctcaagcaatcttccaatctgtagctgggactacagatgtgtgccaccattcctggctaatttttttttttttttttggagatggagtcttgctctgtcacccaggctggagtgtaagggcttgatctctgctcaccacaacctctgcctccgggtgtcaagcaattctcctgcctcttatgtctatttt

SEQ ID NO: 711366 - DNA, 100 bp, Homo sapiens
agggagaaggctctgcaagagtccagtggcaatacccccttgtgtaagggctttgtgtgcgacagggaggaagtttcaataaagcagcaacaagcaaaaa

SEQ ID NO: 711367 - DNA, 140 bp, Homo sapiens
ccttagagaaaatgaaaggacactccagagctggcctcctctcaccgctccccttcaccgaggccctggccctgggaggctgtttgcatagcctatgatgttcctctctcttcaaattcctgctctttccttgtaccagg

SEQ ID NO: 711368 - DNA, 195 bp, Homo sapiens
ggcaacttagcaggctgaggtgagaggattgcttacgccaggagtttgaggtcggctggggaacatagcaagacccttctctacataaatacataataataattatctgggtatggtggtgtgagcctgtggtttccacctactcaggaggctgaggggggaggattgcattacgccaggagttagaggctgcag

SEQ ID NO: 711369 - DNA, 363 bp, Homo sapiens
gcgctgtacgtgccacgcgggcctacacacggccgcttgtgctctagacacgtgtctagagagacctgtgaagagccacaatatattgcgagagctcaacacacaacatatgatgtggccgcgggtggccacagctgggtttgaacttctggccttaatggcaactggccacttgggccttccaaagtgcttggaatacacagcctgagccactgggaacgggccaaaggtaaactcttgtggaaccggttatatctggaaagggtgtgggcccaagatatgctcaagtggtgtgtaggaaagcgcacattggcctcaccaagagaggccgagaactcacatgggatgtggcacgtgagcacc

SEQ ID NO: 711370 - DNA, 194 bp, Homo sapiens
agatcccacactggtttcgagttctggcggctgcttcctgagggttcaccctgcctgggacgtacagtccgcatctgtgttctcagccacttgagatcattctgtggttttgctaccaagctgataacacagttgggctgactcattttagcttttagggtaactttttaaaaatctgttttttgttttttttt

SEQ ID NO: 711371 - DNA, 134 bp, Homo sapiens
aatcaactgccatccacgtccaacataatatcacacgtcaataataaatgacagagctcaagacgacatcagtcccatttgtcttaagtcctggtgttgtgtggatgacaagcagaagccagtcgtgatgacag

SEQ ID NO: 711372 - DNA, 1373 bp, Homo sapiens
  misc_feature (353)..(353): n is a, c, g, or t
ggcatcagtaggaggccgaggtgcgaattccgttagagtcgtcgcgtaatccgggtgcatctcgaacatcggtcgtggtcgagccgagtggcggcgaaggttcgactcacaagggatcactcaagagggggtagtacactgaggatgcagacggaagggtggacagctacgggtggccaggttcgtgacccaggacgccggcaagactgcgagcgccgcgtggggtctttgtgctcccagaaacacagagctgtgggctggaatcgtatctattgggccgggaggaagagagggggtggagcatgtcagatgggcccttggaaggggaattgacgaggtggagatagcggtgnaacgcgagtgtgctatgaagaccagaagtatggcgcgcatggatgtgacggcgatggttcgccctttctcgttgtcccctatctggacgcacggtgaactcgatttctatataaggcctctttcaaaggaggaagaactccaacgcgaaccgaagggatccagggagacactgtatacacgcgaggacacacaaagcactttaccacggcagcacagtgcgggaaagtagttcagcgtctctgtgcactgaagaactctgagtccacgcgagtgtgacaatcgggacgagaaaatcgcgggacaagcccgcgagtgcgcgtgttgagtgcccaagccaggagagcgtcctcctgggaagaacgcgaggtgtgacacacaggcagaagtctcctggcggggaactgtgcccgcgaggatctaaagcggggggcggcggtgggtctcaacactcctgtttgagaagtgtggtggggccgggtccctaattctcccgtgctaatttgtacattacttccaaatccctgtaacttggtacacgaagttccaataacccacatggcttggtggttgggtcttctggtttggcgaacaagtgtgggcgccccatgaggccccacacggttggtgaacatttgccaccccgacaccacggggtggagacacacagcgccatttttttatcgaacacttcacaacaacgcggggaaagttcccaaggttgtattgggaaacgaaaatagccttcggcggttgtggaggacccttctggctttctgcccggcaactgcttggccattcccccaagaaagtcgaccacagggtctgggcgcgcctcaaccaaagggatccaaaactgggttgggcagcgtaataaacacccccgggcgaaaacttctcttttgggagccccaggaaaattattgtggcacccacaagagtgggacgccctttggcacccagagagcctataatcactctatgatgagacacaacacccttccgatttcccttatatcacc

SEQ ID NO: 711373 - DNA, 764 bp, Homo sapiens
ggaaggtcctctacttatccgcctgtcactagacaaggacgagggcacctacacgtgtgcactccaccactctggccattccccacccatctcctcccagaacgtcacagtgctcagagacaagactggtcaagtgtgatgggcatcagcctgtcatggctcgaggaacacctgcggtggctgctgtcgtgctcctggctcgtccctctccctcgctcgcaggccacggatttgcatgtccctgtgagtggatggggcccactggaggagacaggaatgccctcaagttaccagtgctacgagatcgcctacttctctgagatcatgcgtgagccccctcacccgcgagatcccatcaaaccttgaggaggaagatggggatcgcccattgccctcagtcaggagtttccaggtggctgcatgcgattgagtctagccccacggtccgacgcgggcacctcaccctctccgtgacagccgtctggcgtgtgcgttttggtgctttctggttccagagtctgtcttctgtctggttcatttaggtgtgatccgttccttttcttggagagttcgtgaagagggaagccaggatgggggagcctgattggaggagtgacgagctactgtgagggcgtagtgggctggtgggcgtctcagccagatggatgggcgttcgatccgtgctcgcatcggggaccctgagaatctgggaagagagcttggcatgacgcactgagttgtcctgtgcctgggtctaactgggc

SEQ ID NO: 711374 - DNA, 399 bp, Homo sapiens
agtctgagataatatgggatataccattatgtataaagtcctagaaacaatgtcgaaaagcattatattgtatgttatctgggatgggagaggagagaatctacagatttgcgttcagttaaaaatcaaaactccagcataggaaataggcagttcacatagccggtcaacgatgtgaggtatcatcagggtgagacaaggtcccggtcggtgcctataggcctagctgacgctaacaaaatgggaggcttatggctctgcacagcaaattccagcaggacaagatgactttaagcccgtattcagagccctagaagcagggcactactgagtacgtagtatttagaggtgaaaatagtgcaagagcccctgatggtgcccccctacctgctttgtcca

SEQ ID NO: 711375 - DNA, 150 bp, Homo sapiens
gccgtttatacaccccacccaaagaaatcaaatccagatactcaagtctcatataaacggcatggtattttgccatataacctatgcacatccttctgtatattttaaatcctctctagattatagtacctaatacaaagtaaatggttt

SEQ ID NO: 711376 - DNA, 197 bp, Homo sapiens
tagcggagattgcagtgagctgagattgggccactgcactccaccctgggcgacagagtgagactcggtctcagaaaaaaaaaaaaaaagacctgctccacttttaaatgtctatagctagtaccctggccctttattgtttaattggaatagatttttctttttcccgtgaccaatctgcgccttaggggtaccga

SEQ ID NO: 711377 - DNA, 937 bp, Homo sapiens
cgagcgattactgcgcgaggacgcggtgggaagggcgcaggtgatgccgacaagtggcacagccggattgggccggaatgccgtaatggggagccgccgtcctaggctggctggaacgtggggggatcccccgcggcgggaaaatagggcgggttttacgcgccgggcaaaacgggttctgggcgacagtttggcaaaatctcccggggtgggccgccaagtcggccccgctgtagatggcccgcggcccgagatgaccccggggcgttccaagggacgccacttaccaggggcaggcactaattcacaaggacccacagctgtttagtaggagaaagtatctagccccacggaattttggctgtgcgccttaaaaaaccgggggaaaggtcccgtgcgagcgaagacgacgtcaaggcgtgctttcatccggagattgatgcgagtcccaggatgtgctagcagaaccacagaaggagggggagtgatcgccttttccccaccaccgccaatagtggaagtatagatggggaacgcccataaagctaggtggggcgccccagcttgacagcggcgcggaaatgattattgcccccaagaaacaaagtgggagggcgccccgctaggcgataacccgcactgttggtggaaaggtactatatcgagaacgtgggcaacacgggcaaagcacactttttgtcggagaaaaggagaatatggtctatgcaactgatgcggggttacgccgaaagaaagtcaatctgttggattggtgtgcaattgttgcctctaagaagaggggattatagacacgtttttctttgtaataacacttcggtgtggagaagacgtcgatagatacgcgatcccggtagacagatagctctaggctgagaggtatactccccaattttttcaaattaaacagccacaaaac

SEQ ID NO: 711378 - DNA, 263 bp, Homo sapiens
gtatgttgttgtttcagtttttgttttcgacagagtttcgctccgtcacccagggctggagtgcagtggcatgatttcggctcactgctgtctccgcctcctgggttcaacgcagttctcctgcttcagcctccgcagtagttgggattacaggcgtaagcgaccatgcccagcctgcatcctcattttggatgctgtactgtaggaatcaaaaggtgtaaagcgggtggactggaattgtgttagtactgaccaaagcttga

SEQ ID NO: 711379 - DNA, 209 bp, Homo sapiens
catccaatcaagtatgcaagtaaataataaacatgtaagcacactcccatatatatgcacatggtccatataattaacattgggggaactcaaaaacatactgtcaagtataaaacaaattataagcaaaaaactgcattcataaatctcaaaggtgtagaaaaatgaaatagtaacataaatactgcctatagctgtcacttaaactt

SEQ ID NO: 711380 - DNA, 178 bp, Homo sapiens
ggatgcctcgcgcagcactgcatgggtctgatcacatatgtggattccataagatatttcggcacgagaagaattggcggggctgagaatttgtttgaggatggccaaggatacttaaaggaggaaggatatcccggaaggcccaatgatagggtttattgccttggttggcaagggt

SEQ ID NO: 711381 - DNA, 102 bp, Homo sapiens
gggcgtatggaggatcactcaagttcaggaattataggctgcagtgagcccgtgatcattgccactgcaccccagtctgggtgaaagagaaaggtcctgtct

SEQ ID NO: 711382 - DNA, 113 bp, Homo sapiens
tatcagactcttcacagattacacatgcaagcatccccataccagtgagttcaccctataaatcaccacgatcaaaagggacaatgcatcaagcacgcagctaatgaagctgt

SEQ ID NO: 711383 - DNA, 319 bp, Homo sapiens
ataaattatcttggttaggagagtgtggagaatagactagtgagttcaggcatgtgcactcttggagatgaatcatcaacgaaaatgcaatacttctgtcatggctatttaggtgtttagttcagctgctgaggcggtgagaagttttcatgtcagacgtacaggtagcattttaccccactttcctctgtccaaagcgacatacaagtaacaggcctgcttcgtgctgccattcagaacaggcataaaaagcaactcatttactttccggaaacagagtccagctgcacagaggaaagtggggtaaaatgctacctgt

SEQ ID NO: 711384 - DNA, 230 bp, Homo sapiens
  misc_feature (113)..(113): n is a, c, g, or t
  misc_feature (118)..(118): n is a, c, g, or t
  misc_feature (160)..(160): n is a, c, g, or t
  misc_feature (168)..(168): n is a, c, g, or t
  misc_feature (194)..(194): n is a, c, g, or t
  misc_feature (227)..(227): n is a, c, g, or t
attcagtgaattttaaaatttcagatcttggccaagcacagtggctcacgcctgcaatcccagcaccctgagaggctgagactacaggcgtgacaccacgcccagccagatcntgtgnttgttagacctaaaattcccatttggctcatttaaacatgtntcctcgcngagatttccggcactttgttcattangcgtgcattccccctcaaaccgaaaaaaagaanaaa

SEQ ID NO: 711385 - DNA, 525 bp, Homo sapiens
cgacctgagttctcatatagccccgggtcgtcagtcagatccccctgggtgtgtctcatgatactgattcacgtgcaggtaccagatagattggattagggtctatcctaacggcctgacgtttaacctggtcacctcctcaaatgtccttgtcttccggtcttagttttttccttggttaaaaggaggttgggacttcaacctaggacactgggaggaccacagttcagtctattacccagactttctgatatctgaagccagtttcttgtttccttttctgtggtcactttgggtggggcaggagggtaggacagaaggtggtgggagagatgaagggaggtcatggagatcctggaagtcgcctcggacagaactgtcagcgcccaccaggccttctctggtttcctgctcgcagcacacggttctcagtgctggccttggcatgggattaactactgcgacctcgctggaaggggactccaaatgaagccggaagtgctcaaagacactttgcatccagag

SEQ ID NO: 711386 - DNA, 273 bp, Homo sapiens
tagaggatcacctgatatatctggatcatgttttgctgatagtctatccacttagaacattttagcctgtcagctgtcatctataggcaatgattgtaacgtctatattgtacccttcaaggaaaatgacaattccggtatgaatagtcctccagcttctcctaaacattctcataaaggcatccacacttgtaatcaatatttggaacacatccaaactttgttggatgtgtcttctcaagttgatcctcaaatttggcttacaataaaact

SEQ ID NO: 711387 - DNA, 137 bp, Homo sapiens
ccaaggatctcgagcttagtctgaaccctgaagaagatgggacagagacttatgatttcacacacatttcaggaaccttgtttttgatttattataggcaggaagtgtttttgctaccgtgaaacctttacgggtac

SEQ ID NO: 711388 - DNA, 306 bp, Homo sapiens
  misc_feature (87)..(87): n is a, c, g, or t
ccctttccctggaagaggaatccagtgaatgttcctgtttgatgggacaggaatttccccgggcattgtttcccccccctggggccngcaggccccccagggaccccgggggaggaggtgaaccctcccgaacccgcccaaaaggaaggagccagccccccgccccctcatcgcaggggtcatgattttttccaaattatgttttaattccaagggtttttgtttcaaggaaggaggaaaaagttttattgaaaatgggggaactttatttaaaatgatttttaccattatgagagacggccccga

SEQ ID NO: 711389 - DNA, 868 bp, Homo sapiens
  misc_feature (868)..(868): n is a, c, g, or t
gctctacagctgtgtgtaggcctgggggcgagggtcttcggaacgtagcgctggctgcggcccgcccggctacccagcgggccgtccggcagacggatcgcgccgctccgcgctctgtctggggccagccacctggcgggccgctccggtgcgcctgcccgcgcttttcactgacaggcgctgttccccacagccagcgccgcccgccacgtcccagctctcggccaacggagctgcgcgggggtgacctttccgagcccagcgcgatgacggctccttgctccccagccggcgcagcttcctggacgccgccagctcgggctggtgcccgttcccgccgcgccgcggggacgccgttgtgtggctgtgatgtgatgatggccgcgtgggccgggcgcggtgggagagcggagacctggagttgttgacttagtgaaggaggtgcagctcaattctaccagttcctcggaggtgcagaggatgcatcatcctgagacatcagaaaagcatattgtaagctttaataatttaattccagacaggaataagatgacaatgcggaaactcagtttagacaaatgctgggcatttatgaagtttaaaggatgatgaacgaaggcagaggtatgatgatattctgatccaggggacttccagattgggacagctgtattccactaagggggggagaaaaaggagatgtgagtggattatctgtcatattctcagggggacataagaggggtgggaatcaactggaaacagggtgagttaggcaaaaagaaagaaaaattgggggcgccagatctaacacggggggcgggaaagagtgcgagggaaggtgcaaaccggcgaacagggtattggn

SEQ ID NO: 711390 - DNA, 881 bp, Homo sapiens
  misc_feature (539)..(539): n is a, c, g, or t
caaactaggctagtacgaggctggtgtgctgggacgcccggcccctgaacgctttgcgtccgatgcccgaggtcctcgcgtgtgcgcaccgtttgcgacttggtacttggagaaatggacaggattgtgaaatgtaaactgcatccacactggacagccctttggggaatgctggtagctgtctggttgtgagcaggtctgccgaaataagctcctgggcaggggacgtctgcagctgaatgccgtggatgggtcccagcccccgctgcggttctcggaaggtccgggagcccctgtatgcggtgcacgagcctggctgaatgcctatttccaccagcccgaggctatcgaagagttccccgtgtcggctcttcaccatcccgttttccatccaagagtcgttcaccagacaggtgttatggaatgctgctgaaggttgtgcacaattcggaggacagtgactttcttaccatgcatattagcatgccctggcagtgccaccctcagaagccgcgcgcagcagtgggaggagctagatngagcagtgcgaatcctgtccccgatccctcattcccgtgccacgacagtgttctgcacgcaggcggtacgccggtggtgcaactaactccgtagtgacttggccgtcattaaaggggtccttggcccttggggccaccggttgggtccaccaggcttgtaggggcccaagtctttgccagggccctggccaagggacccgggacctcaacctcgggcttccccggcctggtggccgaaacttgagttatgtgcccggtaagatggatgttttgagccgacacacaccgtttaacactgctcggatgcggggcgtggaggcccgctgtataaggaagtgcgcg

SEQ ID NO: 711391 - DNA, 419 bp, Homo sapiens
gcgtcagcctcatccccgaccgcagctcttactcgtgtgccgatatctgccctccatcccattatgtgccggcccttccttcccgtacccaggagacacctccggcccagatgtatggcttcctcaatcgttaacacgagtgggaggcccacaatacgaaagcctcaagcaggtcctggaacaaagtatatagtgtcataaataaccaagaaatgggtttctacaaagaatgcaaagactgctgcatctggaattccctaccacagcgaggtccctgtgaattagaaagaagctgtctgcgaagtggcccttgcattaccaaaagaagaaacacgtatacaaactaagactacatgatggccatgagtacctctaccaagccaaagacgatgaggcaatgaacacatggatccaggcta

SEQ ID NO: 711392 - DNA, 115 bp, Homo sapiens
atgtaaaactttccgatgcctgaaagataacccatttccttgattgtgctcggaacttgctggacgcacattagagaataaagcaccctactaaaactccaaaaaattagctggg

SEQ ID NO: 711393 - DNA, 108 bp, Homo sapiens
gaaaccctaatatacggcacttacggttatacccctttgcaataccctactgtgggtaacgacttcatatacatcccttgctaactagcagtggctgctacggtttac

SEQ ID NO: 711394 - DNA, 340 bp, Homo sapiens
gctcgactgaccctacaggagctggattttaatggaatatgcctttgtcacaggtgctactggcctgctcggaaataatctggttcatgcgcttttaaaacgaaatatcaaggtaaaagcgctggtccgttccgtagaaaaagccaagaaacaattcggcaatctgcctgtcgagtttgtccaaggcgacatgctcaatgtcgacgccttcagccatgccctgcgaggctgcgacgccttgtttcatacggctgcctatttccgcgacagttacaaaggcggaaagcactggcaaaaactgcatgacaccaatgtgaccggaaccgagcgcttattgcag

SEQ ID NO: 711395 - DNA, 928 bp, Homo sapiens
  misc_feature (598)..(599): n is a, c, g, or t
  misc_feature (622)..(622): n is a, c, g, or t
  misc_feature (627)..(627): n is a, c, g, or t
  misc_feature (635)..(635): n is a, c, g, or t
  misc_feature (646)..(646): n is a, c, g, or t
  misc_feature (659)..(659): n is a, c, g, or t
  misc_feature (671)..(671): n is a, c, g, or t
  misc_feature (675)..(675): n is a, c, g, or t
  misc_feature (813)..(813): n is a, c, g, or t
  misc_feature (821)..(821): n is a, c, g, or t
  misc_feature (827)..(828): n is a, c, g, or t
  misc_feature (843)..(843): n is a, c, g, or t
  misc_feature (864)..(864): n is a, c, g, or t
  misc_feature (869)..(869): n is a, c, g, or t
cctttgtccctcctcactgttctttttttctcggacaccgcccctggtgctgaatgctccgtgtgtgccggggaatgtacctccggccccccggggtgatccccggtggtgctcatgccgccccggccacaggttgtctcttgggaggaccctcggttgtgtgacttttcccacagagtcgacgcccttgtatagaaaccctcattggagttctgccccctcggacaagggccccacgccgcttttttctcggggcacacccctccacggctttattaagtgcccacctttccccccgccccttataaagttttcttctcgtgtgtggtggttcctcggggggacccacacgcacagcactctcgtggagcgagaggctataagcgccccctcgggatattctccccccaccacgtggaacacatctgagagggccctctgtataaaatcctccaccacaagaatatataaaaccgtgggttcacacagagaagccttggccccaagagatgcattgaaatgcgcgttgttgtggccctcaagagaatcttctggaagtccagacacgagttccccggatcctcggcccacggtttannatataggcacggaaaggttcccntcccngctcacancaccacacganaaacactggtggnccacaagtggantganggtgaagtccaccacatcacagttgcccaatgaacgaaggtgttaagttctggctgtaggctgttggtcacacctgaagatgaccacgacgatgagcttggtgtataacacatcaccctcggctgtcaaatttttggngtccttgntcacannaaaactggcagaatntccgggccttatatatccagngcccnctgggcaagcccccgcgcctatattaaggcacatttgaataaattttattacccgttta

SEQ ID NO: 711396 - DNA, 127 bp, Homo sapiens
  misc_feature (12)..(12): n is a, c, g, or t
  misc_feature (19)..(19): n is a, c, g, or t
  misc_feature (72)..(72): n is a, c, g, or t
  misc_feature (111)..(111): n is a, c, g, or t
tttattcttcgnacaaatnttttacagttttatttttaaattatttacacatattcatacaaaggaaaattnatttcaggatggaatcctgggaccatggtagtttaaaanaaaaatctctctgatc

SEQ ID NO: 711397 - DNA, 205 bp, Homo sapiens
tagggtagaatcgtaactgcagccactgacctacaccacagctcatggcaacactgcatccttaacccactgagcgaggcatgggtgaaccagagtcctcatggatactagtcagattcgtttctgctgcaccaggacgggaactcccccactcagtcacttttaaagctaggaaacacgttcaccagtcaatccatcccacttc

SEQ ID NO: 711398 - DNA, 148 bp, Homo sapiens
  misc_feature (71)..(71): n is a, c, g, or t
  misc_feature (84)..(85): n is a, c, g, or t
  misc_feature (89)..(90): n is a, c, g, or t
  misc_feature (96)..(96): n is a, c, g, or t
  misc_feature (143)..(143): n is a, c, g, or t
ggagtctcagtccgtcgcccaggctggagtgcaagactcttggaagagaaatgaggttctcatagggtcanagtagaatgcatnnaganncaagancagctctagacctctaccctgaagatgggagtggagagggaggtatncaacc

SEQ ID NO: 711399 - DNA, 311 bp, Homo sapiens
  misc_feature (87)..(87): n is a, c, g, or t
  misc_feature (135)..(136): n is a, c, g, or t
aaaaaaaaaaaaagttttttttttgaaaaagaaaaaatttaagaatcacattatgtggggcccccaagaatgttgtgtaataacttnctaagaaatgattctaagaactaatgtaatgtttaaaaattaactttnnttaattgaagtgtacagggtgtcccattttttgacggttaaggcattggtccctttaaaggtcaacatgaacgtttgaatttgcaaaacatttcctatagcccgaacttgtaatatggtggttgcctcccttaataaaacagccctgacccataatgttttattatttaaattta

SEQ ID NO: 711400 - DNA, 423 bp, Homo sapiens
  misc_feature (53)..(53): n is a, c, g, or t
  misc_feature (62)..(62): n is a, c, g, or t
  misc_feature (339)..(339): n is a, c, g, or t
  misc_feature (377)..(377): n is a, c, g, or t
  misc_feature (384)..(384): n is a, c, g, or t
gaaccccctgaaatataaacctatggtgaatatggtttggcctgtgttccccnaccccaaanctcacccttgaattgtaataaaccccccatgtgtccaagggtggggcccaagtggagataattgaatcatgggggtggtttcccacccatattgttcttgtggtagtaagtctcacgagatctaacggttttataaatgggagttctcctgcacaagctcttttcttgcctgctgccgtgtaagacatgcctttgcttctcctttgccttccaccatgattctgaggcctccccagccatgtggaactgtgaatcaattagacttctttgctttatnaattacccagtctcaggtatgtctttattagcagcatnaaaacanacagacgcatatgggaatctaaagtcaagggccaagaaa

SEQ ID NO: 711401 - DNA, 1188 bp, Homo sapiens
  misc_feature (246)..(246): n is a, c, g, or t
  misc_feature (290)..(290): n is a, c, g, or t
gtgccgactgggagagctagactaagttggtcatgattgcataagctactcaaatgctcgtcggcttgtacctggactcttgctctcatcctggttctgaaatccctctagttgtcgaccaggttatcctacgggagagcagcctaggtgaccgatagtgtgtgtgcagcgtgcaaatccaagtcaccagttagttctgcaggatacctgagctttgaaggcaaaacaggcaccaatgcttcgganacttacttccatggttggaatcgcgatcacaagatcactcccgnacatgggacgaacctggaacacttatagtcctaaagtacgccagaaatgccaaggtacgttgtaatacgtttatccttgccacgacatatatactgataggaacttacctgcgtgggattcgaggacttgcggtctccccggagcgtccgaggccttcgtgggatcgagaggattcctggtgggcaggtgtgcgttcctaaaacggtgtagatatgggagacagcgcatttacgcaacttcatgttaatggaccgcacatagttgcattgcttttcccatagaacgaaccgttcagagtctcttttggacctagtgtaaatcgttgccgctccagaactaggcccattggacttatagtggtccaaccaatagcgcaattttaaggacaaggagcgcatttctcaattgcttcacatcaagcacaacgcaggggaattttttccgcgcgaagcgcgtttgaaacaacccaagaggggcccaaaatggatcagattttgcacgcccattaattggcttaattggtaaccccgaatggcggtttaattcattcggaattttacaattccttttggggggcacccaacagaggcacaattttctcgtcattcacggcaagaacaagtttctctctccacaacaccaaattccgttggaagaacacggcgatggaaaagcttttcaacaagtttttttgtggaagattccaattcgcgttttatacacactgttggtccttcccatggcaagactttcccccttcggaacaacaagggcacatttcattggcctttttacagatgggcgttggctttacttccttaattcttttcattgggtttcctttgggaaaagaacattaccccttgggccactttattagaagaggggggttagttc

SEQ ID NO: 711402 - DNA, 199 bp, Homo sapiens
  misc_feature (164)..(164): n is a, c, g, or t
gggtagtattggctgtatagtggcgggtggatcagtggaacttcagcagtcccggtggagggggagattcaattgtctggtgtacatgtgatgtggacgcgtgtctatggcatctcacgtggtacattgaggctgtgacccaggcatgtacgggctgtcccggncctggtacttcccactgcagaagtcctactggctg

SEQ ID NO: 711403 - DNA, 148 bp, Homo sapiens
acctgaccttgggatcctgcccagcttggcctcccaaagtgctgggattacagtgcatgagtcaccgcgcccagccgatatgctatattgcggtatgcctggccgcaccgtaggctggggtacaccaatgtcaccacaaacaagtgag

SEQ ID NO: 711404 - DNA, 343 bp, Homo sapiens
tttctggccacgactcggctgcagcaggagctggacgacctgctgtggacctggaccaccagcgcagagcgcgtgaaccctggagaagaagcagaagaagtttgaccagctccgtggcggaggagaagaccatctctgccaagatatgcagaggagcgcgaccgggctgaggcgggaggcccgagagaaggagaccaaggctctgtcgctggcccgggccctggaggaagccatggagcagaaggcggagatggagcggcttcaacaagcagtttccgcagggcgatggagggcacttaatgagctcaaaggatgatgtgggcaagagttgtccacaagctgg

SEQ ID NO: 711405 - DNA, 236 bp, Homo sapiens
  misc_feature (14)..(14): n is a, c, g, or t
  misc_feature (60)..(60): n is a, c, g, or t
  misc_feature (95)..(95): n is a, c, g, or t
  misc_feature (129)..(129): n is a, c, g, or t
gaagagacaggtangctccttaccctgtgcccaccttgctctagccagtggttctcagcncaggggtggggcataccccgacaacccccaagatnttgggcaatatctggaaacagggttgtcacaatntgggggtaaggatggatgtgctactggcatctggtgggcggatcttgaggtcgggagatcgagaccatcccggtaacgcggtgaaacctcgtctctactaaaaatac

SEQ ID NO: 711406 - DNA, 235 bp, Homo sapiens
  misc_feature (12)..(12): n is a, c, g, or t
gcaaagctctgnagagggtttttacagggccgtgttagagccttcacccatggaacagtacaagacatgatgctactccgagaataccgacagctccaggaacagcagtccctactacccagcctctccccccaaccatcgcccctatccagcaagaagcagccagaggacaacggcgcccctcttctattacctattaaaaggctgggaatgttagggaacaagttgcaccaga

SEQ ID NO: 711407 - DNA, 227 bp, Homo sapiens
cgtggtgaaggtcaacgtcagaccaggtcacggctctgtcgctctttcctccttagccccactccccatcagtaggaaaaaataagtgacaagtcgctcgtgtgggcccataaagaggcaggataaagtattctttgttttccttccttaaaggcctctcacttttattacaggtaacttattaaaatattttcctgatagcagttcttgtcctaaaggagagtgtc

SEQ ID NO: 711408 - DNA, 408 bp, Homo sapiens
  misc_feature (217)..(217): n is a, c, g, or t
  misc_feature (299)..(299): n is a, c, g, or t
gagagagagagagagagagagagagagagagagagagagagagagagagagagagagagagagagagagagagagagagagagagagagagagagagagagagagagagagagagagagagagagagagagagagagagagagagaggaaaaacccaccccagacgagagcggccacgacccgacacccccgcccgcaggcccaaccaccaaaaacncaccacagacgcaaacacccccacagcacccgagccacacacgggcccacacccaccccaaccaggagccccacaaacaacnaacccgccccaaaccgaaacgccaccccaccacaaaccaacacaccagccccaaaccagcgccacgagcgaaaccaaaaggacagaccgaacccgaaaaaggcccccgc

SEQ ID NO: 711409 - DNA, 197 bp, Homo sapiens
tccgtatgctgtctcatgtacgggcatagtaggtcggagagtgtagtgaggaataaaatcttttccttagaaaaatattcaatcaggtggacaggcaggtggttggccggctctgtgcattaccttggaccgggtggggttccacttcatattataatgtcttgtgtccagaaaaagtttgggcaacagggtgtggc

SEQ ID NO: 711410 - DNA, 560 bp, Homo sapiens
cagcgcctgcatccacctgtgcttgagtgatgatgtggtgttggagccaccacagtgatgttgaaggagaagctggctgagctgaggaatgctgtgccaatggtgctgttttttctgggtaggatgtgagctgcaagaatgtggccctgaactggctgtctgccctcagataatctcctcaacgcattcccagcatgttcgctcaatgtgtgtgtgccctgtgctctatcccatgagagtggaccatgatcgttcacttgatggtgtgagattgacaactgttatgagaaatgtcatcagatgatgaccttgggccttggaatgaactgcaacatcttggcctgagcatgtgctaaggcttgccctggccacatgatgaatgccgtgttgtttgctactcataaatgaacatttgaatgctacagattgatgtgccactgtgacctgacgatggttgcgagtatcttgctcatataagtgccagagtttaccaatgcccctgtgcccctgtgcctaatgtgacaatgaattgggaccctgtgtgcagagccaaccccgtc

SEQ ID NO: 711411 - DNA, 154 bp, Homo sapiens
cctaaatatacttttagggcaagaggagcaccaaagaagacaatcacttccaaaaaacttgcttgtggtctatttccacattaggtatctgcacatcaccttcctttattgacaatcattgatttttaaataaaagaaataaaacaatatccat

SEQ ID NO: 711412 - DNA, 421 bp, Homo sapiens
ccaacctgggtgatagagcaaaaaaccaaaagaaagaagaagaatgtaatcccagctattcgggaggctgaggcaggaggattgcttgaacccatagtgaaacctcatctcaaaaaatttttaaaataatgggagaggccaggcgtggtggctcacgcctgtaatcccagcactttgggaggccgaggcagatggatcacctgaggttaggagttcgagaccagcctggccaacatggtgaaaccccatttctactaaaaaatacaaaaattagccaggcatggtggtgggcacctgtaatcacagctacttgggaggttgaggtgggaagatcgcttgagcccaggatatttgaggctgcagtgagctatgattacacaactgcactctatcctgagcaacagagtgaggccctgactca

SEQ ID NO: 711413 - DNA, 4696 bp, Homo sapiens
atttattgctcccaggaatgaatctaataatcttgccagtgacacctttatcactcacaagaaatcgtcatttataaagaacataaatcaaggcagttcatcctcagtgatagaatctgatgaagaatgtgctgaaattgttaaacaaactcatatcaaacctactaaaattgtttctttaaagaaaaaagtgtctaaagaaataaaaaaagatcagcttaaaaaagaaaataatcacggtattatagattctttagataatgacagaaattccactgttgaaaatatttttcaagaagacctaccaaatgataaaaggacatctgtatctgatgtccttttatcatttggtaggtcttcttgaaaaaggacatcagatacagatgaaattgctgccacatgtactattaatgaaaatgttattaaagaaccgtgtgtgttattaacagagtgtcagtttacaaataaatccactagttcacttgctggaaatgttttagattctggttataacagtttcaatgatgaaaaatctgtttcatctaacttatttcttccattcgaagaagagctttatattgttagaacagatgaccaattttataattgtcactcattgacaaaagaggtactagctaatgtagagagatttttatcttattctcctccgcctctcagtggactctcagacttggaatatgaaattgctaagggtactgcacttgagaatttgcttttcttaccctgtgcagagcatttacgaagtgataaatgcacctgtttgctgtcacattcagctgtgaattctcaacagaatttagaattgaattcacttaaatgtataaattatccatctgaaaaaagttgcctttatgatatacctaatgataatatttctgatgagccaagtctctgtgactgtgatgtacataaacataatcaaaatgaaaatttagtacctaacaatcgtgttcaaatacacagaagccctgcacagaatttagttggagagaacaatcatgatgttgataacagtgacctcccagtattgtccactgatcaagatgaaagtttgctgttatttgaagatgttaatacagagttcgacgatgtgagtctttcacccttgaacagtaaaagcgaatctttacctgtgtcagacaaaactgctattagtgaaacgcctctggtctctcagttcttaatttctgatgaacttttgttggacaataattctgaactccaagatcaaatcacccgtgatgctaatagttttaaatctcgtgatcagagaggtgtacaggaagaaaaagtgaagaatcatgaggatatttttgattgctctagggatttattttctgttacctttgatttaggattctgtagtccagattctgatgatgaaatattggaacatacatcagatagcaatagacctctagatgatctatatggaaggtatttggaaattaaggagataagtgatgcaaattatgtttcgaatcaagcactaataccaagagatcatagtaaaaattttactagtggaactgttattatcccatcaaatgaagatatgcagaatccaaattatgtacatttgccactgagtgcagcaaaaaatgaagaattgttatctcctggttattctcagttttctttaccagtgcaaaaaaaagttatgagtacaccactctctaaatcaaacacattgaactcattttctaagataagaaaggaaatacttaagacaccagattctagtaaggaaaaagtaaacctacaaagattcaaagaagcattgaattcaacttttgattattcagaattttctctagaaaagtctaaaagcagtggtccaatgtatctgcataaatcctgtcattctgttgaagatggacaattattaacaagtaacgaaagtgaagatgacgagattttccgaagaaaagttaaaagagcaaaaggaaatgttttaaactctcctgaggatcagaaaaatagtgaagttgattctccacttcatgctgtcaaaaagcgcagatttcctgtaaacagatcagaattatcatctagtgatgagagtgagaattttcccaaaccatgttcacaattagaagacttcaaggtttgtaacgggaatgccagaagaggcatcaaagtcccaaagagacagagtcacttaaagcatgtagctaggaagtttttagatgatgaagcagaactttctgaagaagatgcagaatatgtttcatcagatgaaaatgatgagtcagaaaatgaacaagattcctcattacttgactttttaaatgatgaaactcaactttcacaggctataaatgattctgaaatgagagctatttacatgaaatctttgcgtagtccaatgatgaacaataagtacaaaatgattcataagacacataaaaacataaacattttctcgcagattcctgaacaagatgaaacctatttagaggatagtttttgtgttgatgaagaggagtcttgcaaaggccaatcaagtgaagaagaagtttgtgttgattttaacttaataactgatgattgctttgcaaatagtaaaaagtataaaactcgacgtgcagtaatgctaaaagaaatgatggaacaaaattgtgcacattcaaaaaagaaattatccagaattattttaccagatgattcaagtgaggaggagaacaatgtaaatgataaaagagaatctaatattgcggttaacccaagcactgttaagaagaacaaacaacaggaccattgtttaaattcagtgccttctggatcttctgcgcagtccaaggtgcgttctactccaagagttaatccattagcaaagcagagcaaacagacatcgctgaatttaaaggatacaatttccgaagtctcagacttcaaacctcagaatcataatgaagtccagtctaccacaccacccttcactactgttgattcacagaaagactgtagaaaatttccagttccacagaaggatggtagtgctttggaggattctagcacttcaggggcatcctgttccaagtcaagaccacatttagctgggacacatacttctcttagacttgcgcaggaaggaaaaggaacctgtattcttgtaggtggtcatgaaatcacttctggattagaagtaatttcttccctaagagcaattcatgggttgcaagtagaagtttgtcctcttaatggctgtgattacatcgtgagtaatcgcatggtggtggaaaggaggtctcaatctgagatgttaaatagtgtcaataagaacaagttcattgagcagatccagcacctgcagagtatgtttgaaagaatatgtgtgattgtggaaaaggacagagaaaaaacaggagacacatcaaggatgtttaggagaacaaagagctatgacagcctgctgactaccttaattggcgctggaatccgaattcttttcagttcctgccaagaagaaaccgcagatttgctaaaggaactgtctttagtggaacaaagaaagaatgttggtattcatgttccaacagtggtgaatagtaataaaagtgaggcactccagttttatttaagtattcccaatataagttatataactgcattaaatatgtgtcaccagttttcatctgtgaaaaggatggctaacagctcacttcaagaaatctccatgtatgcacaagtaactcatcagaaggctgaggagatctatagatatattcactatgtatttgacatacaaatgttaccaaatgatcttaaccaagatagactgaaatctgatatataatcaagctgctcaagatggggttttcaaagacctctcacaatattaaatgcacttcaataatcattgctgttttatgtttatttgtaaataagagaatattttatttaaatattttatattgtatacatttttatttatagattatagaaattattaaaaaagaaaaatctgatgttcagtgatcattttgactagattataaaactaatttttcttattaaataaaacaaggtttattaaaagtgttactaaggatagtttaagaaagtaaaagctaagctagagatatactttggaatgtttcccaaaattaaagttgtactgttgtgataaatagtaaagttgacatgtctatgactacagccaacttgtcgattttccctatgtgtagatagtatacttttaagtgtactgattctaaatacatgtacttggtaaggtgtgggtgatgggtgggttgtgagataaatgacccagtaactaggaaagtagaaaacttaactgaatgtttatctgaccaaaggtgtgtcccagttaagtactgtcaaatctattaatatgaactctgatatggtttggctgtgtccccaaccaaaatctcatcttgacttgtaatctgaattataatcccaatatattggggagggacctcctggaacgtgattagctcatgggggcggttcccccatgctgttctagtgatagttctcagaggatctgatggttttataagcttttcctctgttcactctgcagttctcttgcctactgccatgtggaaaaggaaacgtttgcttcccctccaccatgattgtaagttcccgaggcctccccagccatgcaggactgtgagtcaattaaacatcttttccttat

SEQ ID NO: 711414 - DNA, 142 bp, Homo sapiens
tctgaccacctgatccggctgctcggctcccaaagtgctgggattacaggcgtgagccaccatgcgccgccaacaggaggataaatagtccgtttgaggtgttggttgatatagacagcaggacggtgggtcagaacatcag

SEQ ID NO: 711415 - DNA, 401 bp, Homo sapiens
  misc_feature (31)..(31): n is a, c, g, or t
  misc_feature (44)..(44): n is a, c, g, or t
  misc_feature (50)..(50): n is a, c, g, or t
  misc_feature (54)..(54): n is a, c, g, or t
  misc_feature (138)..(138): n is a, c, g, or t
  misc_feature (175)..(175): n is a, c, g, or t
  misc_feature (237)..(237): n is a, c, g, or t
ccctcgtcgactgttgcttgctggtcgcagntccctgacccctncctcancctncctaacctcggtgccaccggattgccttcttttcctgttgcccagccagccctagtgtcagggcgggggctggagcagccgagncactgcagcagaagagagaaaagacaacgacgacccntcagctcgccagtccggtcgctggcttcgcgccgccatggaatgagacagacgccgctcacntgctctggccacacgcgaccccgtggttgatttggccttcagtggcatcacgccttatgggtatttcttaatcagcgcttgcaaagatggtaaacctatgctacgccagggagatacaggagactggattggaacatttttgggtcataaaggtgctgtttggg

SEQ ID NO: 711416 - DNA, 668 bp, Homo sapiens
  misc_feature (16)..(16): n is a, c, g, or t
  misc_feature (67)..(67): n is a, c, g, or t
  misc_feature (122)..(122): n is a, c, g, or t
  misc_feature (125)..(125): n is a, c, g, or t
  misc_feature (127)..(128): n is a, c, g, or t
  misc_feature (136)..(136): n is a, c, g, or t
  misc_feature (142)..(142): n is a, c, g, or t
  misc_feature (151)..(151): n is a, c, g, or t
  misc_feature (159)..(160): n is a, c, g, or t
  misc_feature (221)..(221): n is a, c, g, or t
  misc_feature (226)..(226): n is a, c, g, or t
  misc_feature (228)..(228): n is a, c, g, or t
  misc_feature (233)..(233): n is a, c, g, or t
  misc_feature (246)..(246): n is a, c, g, or t
  misc_feature (250)..(250): n is a, c, g, or t
  misc_feature (262)..(262): n is a, c, g, or t
  misc_feature (266)..(266): n is a, c, g, or t
  misc_feature (273)..(273): n is a, c, g, or t
  misc_feature (297)..(298): n is a, c, g, or t
  misc_feature (301)..(302): n is a, c, g, or t
  misc_feature (307)..(307): n is a, c, g, or t
  misc_feature (316)..(316): n is a, c, g, or t
  misc_feature (330)..(330): n is a, c, g, or t
  misc_feature (334)..(334): n is a, c, g, or t
  misc_feature (338)..(338): n is a, c, g, or t
  misc_feature (340)..(340): n is a, c, g, or t
  misc_feature (348)..(348): n is a, c, g, or t
  misc_feature (357)..(357): n is a, c, g, or t
  misc_feature (359)..(359): n is a, c, g, or t
  misc_feature (361)..(361): n is a, c, g, or t
  misc_feature (364)..(364): n is a, c, g, or t
  misc_feature (366)..(366): n is a, c, g, or t
  misc_feature (369)..(370): n is a, c, g, or t
  misc_feature (373)..(373): n is a, c, g, or t
  misc_feature (378)..(378): n is a, c, g, or t
  misc_feature (380)..(380): n is a, c, g, or t
  misc_feature (388)..(388): n is a, c, g, or t
  misc_feature (392)..(394): n is a, c, g, or t
  misc_feature (425)..(425): n is a, c, g, or t
  misc_feature (430)..(430): n is a, c, g, or t
  misc_feature (445)..(445): n is a, c, g, or t
  misc_feature (453)..(453): n is a, c, g, or t
  misc_feature (459)..(459): n is a, c, g, or t
  misc_feature (464)..(466): n is a, c, g, or t
  misc_feature (469)..(469): n is a, c, g, or t
ttgcccaggggaagtnggagagaaagctcgcccgtgtgcatgtttgatataggctgtgtgtgtaggnagggagtgggctagaggaccctggacaccttggccagcctcctaggcagtgagtnagngnnaagtggantaggtnttgcacctntgtcatanntcgggatccagacagaccaggcagcgtgttaatattggtgttctgcatggtggacccaagntaaantnttgtntgtagccaagtgnctgngcacggaccatntttnatcagcncagggcccaggcaaagggccaatnnttnnggatngtggacacngtgttcccattttnagcncggntntagaaggnactgttttntngnttntnatnnctnttgtntnggcagggnctgnnnaggtataggtggtgctgggtcttcagttggnagaanttgtttttgttgganaacgggtngtcatnctcannncanaggtggtcgagcagggtccccaggccgtgctccattctgggcaggggacaccagggggcagggaagagacaaggccagaaaactggggtccttgggctggaaggggctgggtccccagtccccctccttggccgcacacccactcagggcagcacttgcccaggacctcgaccctcctggggtgggggcagtcccagct

SEQ ID NO: 711417 - DNA, 1622 bp, Homo sapiens
  misc_feature (1622)..(1622): n is a, c, g, or t
agctgggtcgtgctcctggctgcgtgctgctgctgctggctgccctgcgctccgtgtgctgctcctgcctcctgtgccctgcctgctggaggctgcaagtcttgctgctgccctgcctgtgctgccctcaagctccgttttcctgagccctgcctgcgatggtgatgctgctgctgtgtgtgatcccctgtgcatgatccctgcctggttgccctctgctcagctgtccttgcttgctttgcctgcttgcttggtgctgtgtacccatggatcaagcccatttgtctttccagtcaactgccatggcctggtaccttcccctatttgaagttgcacgttgccatgtggtgctgcctgtgtggctgcttgcatatctggcttgttggaggtgtcttgatgtggcgtccctggtgtggctccctgtggtagcagttgcttgtaacgtggcgcatttgcttcctgagatggttgtgtgcgcacccattgttccccaatgggaacaacctagtgagggctgtgctggtatatcgtggcacccaattcgtggcgatgccatgagcgctttgaaaggcctatttagccacggacagttggttgtgaacccctgggggcgttggcaagggggaaccttcatgtgggccaacgcccgtatatcgccaagggtttggattgtttgggccattcagtgtgaattttgaatttggtccagctgttgtgggacggaacactgacaacgtgccccctggagaatgggttggcacgaaagacatggcccgagtcacccgtttttaccaaatccagactacacaaagacgttgggtcacggtatttggatcgtggccacacagtgatccgcactgtggttggaggtacccgatcgggagataggcctacgtcccacaggaacaccgatcccggtggaacacaggtcgtgtgggaacgaaattcacccgatagggcgacagagcagaactggaaaaccgcaccagaggtgtagtgtgcccaaaccaaacgcagtgagtgccgagggtaagtagggcaccaagccacagttttttcgcaacttttgctggtggtcaatgacgcccgcagtacctggtggggccgacccaagcagcgcataacagcgcgcacagaatttggtgagttcataccgcatcagcaatggcaatttcgtggcggggagcgcgacccggccgacgttagtgtaccttttggcatatgggtgtacgcaagcgatacggcgagagcgcgtacgaatagcccaatgaggaatcaagtggtgagacgtagccaagaacgtgtggaagtgtgcgatggagaacacaccagtaggaagcctgatgacctacatcaagagtgggaccacagagcagttggtggggttgacgcatcgtgaagtttgcgaagtaaacatggttgtgggtgcgacgttggtgacaatcttggcacgcgtttgcgatgatgaggaggggcaccatctgaaaagatgagttgaagagcatgtatataattagcagggagacacatgcgtgagtcatgatatgggctgcagagcgaagagtgaggacagtcagtgagaagagcgagtttatgcaacagctccaagtattgtgtgaagn

SEQ ID NO: 711418 - DNA, 101 bp, Homo sapiens
ggcatcatctgtgcaagctctcatcgtcccgtgcgcgaggtactgcgggaacaagatcggcaagccccacactgttccttgcaatgtgacaggttaagggc

SEQ ID NO: 711419 - DNA, 156 bp, Homo sapiens
ccgcacctgatgatggacgacagcgaagcgccgcaagcggtggtgcacagcctggaactgcgcgaggtgcgctacagcccgccgccggtggaaggcagcgaaccgttccacctgggcccgatcaacctgaacatcaagcagggcgacatcgtcttc

SEQ ID NO: 711420 - DNA, 785 bp, Homo sapiens
tgctataatatgaaatgttttatgtttgtaataaaatcagttaacacggttaacaaaaaaaaaaaaaaaaaaaaaaaaaaaaaaaaaaaaaaaaaaaaaaaaaaaaaagaagagaagaaaagaaaaagaagagagagagagagaacagagaaagagagaaaaaaaaaaaaagaagaaaaaaaaaaaaagagagaaaaaggagaggacgcaaaaaaaaagaagggcgccgatcaagagagcagcacacacgaacacagacaaaaaaagacaaactaaaaaaaaaaaaaaacaagaaaaaacagaaaaaaaaaaaaaaaagaaacaaaaaaaacaacaagacacaacatacaagcgggaaagcaaaaagacacagaagaagacaaaaacaacacaacaacaaaaagaacacacaagaacagaacgaagataaacaacgcaaagaaaggcgaccagaaagaaacaacacagcgaccagccaagaaagacacacgacagaaacaaagaaaatggagaaaacatagaggtaccacatagataggacaaaatgaagaaggaacagaataatgaagaaaaagaagcaggcaccacgcagacagaacgaaacaacgacgcggggagagcgcagacaacgcacatccaccgacggaggagaagacacccaggcacgaaaaaagcacgaatacacaacgaaaacagcgcaccaacagaacaaaagacgagacaaacacaaggaagaggaaagacgagacaacaaaacaaaaaacacacaacaaagagacggagcc

SEQ ID NO: 711421 - DNA, 200 bp, Homo sapiens
  misc_feature (39)..(39): n is a, c, g, or t
gggagggagagagagagagagaaagaaagaaagaaagangaaagaaagaaagaaagaaagaaagaaagaaggaaagaaagaagagaagaaagaaagaaaatagaatgtaagggtcaagaagcaatatctgcctcacaactcaacagggaaagcctagggaaccagcggagtctacgtgacctgagagagcaaaaaaaaaa

SEQ ID NO: 711422 - DNA, 218 bp, Homo sapiens
ttgagatggagtcccgctgtgtcgcccagactggagtggagcgcagtggcgtgagtcttagtcactgcaacctctgactcctgctcccgggttcaagcgactctcatgcctcggcctcccgagtagctgggaccacaggtgtgcaccaccatgcccggctaattttttgtatttttaatagagacggggcttcaccacatcggccaggctggtcccga

SEQ ID NO: 711423 - DNA, 202 bp, Homo sapiens
  misc_feature (64)..(64): n is a, c, g, or t
ggattatcacgtgcgaatataggccgaactgttatggacccccaaatactagagagttcctgcncacacgaatactgctgttgacactccagtggaattcccagcagccttgttacagtgcacttgaacgtgggagaatgctgaccctgatgacttgtactgatacctgagccttaacactgtgctcttaccttctgtataa

SEQ ID NO: 711424 - DNA, 440 bp, Homo sapiens
  misc_feature (124)..(124): n is a, c, g, or t
  misc_feature (235)..(235): n is a, c, g, or t
  misc_feature (244)..(244): n is a, c, g, or t
  misc_feature (374)..(374): n is a, c, g, or t
ggcttacagctatttggttacaaattaagtgtctagcagaaggaggagacctgaattccttggaattcaaatcacttacagactcattaaatgatatcaaggagtacaatacgacgcttctacnatatcagctgtgctttcagcacataaatgtacgaaattccagtgtgtgcacatttattccagacgctggcctaggagccccagattgcggacaacctttacattggccctntgtgccacngcaaagttaacagcccaacaggagcactgacgtacacagatttccattatttccaaactgcacggggaccatggttttcggggacagttccttttccctttactatacgcgccttcccaaaagaccgaanatttaagccctaaagctgggctggcgcaacacaccacaggggcgacaactcttcaaagttcgtcac

SEQ ID NO: 711425 - DNA, 474 bp, Homo sapiens
ttaaggtgacagaatgtgtacgttagcactgtaaaaagcagctaattggtagcagaacgtgctagctgagaatacgttgtattctacatcactgataatgatctgaagtgtacaagtcatcagtatcagatctatgagagtttttgtagttttgctctaacataaatttctctttgccacctccaaagttattatattaatagtaaaagtaatgctttggagagggtggaagggggtatgccctagcctccacagctcctgccacaaactgcccaggtaagcaggacctgagtgtgttgaaaggctgagttgaagagcagattgacacaggagggctggaatgaacgttggctagagcaggtgtgtccaatcttttggtttccctgggccacactggaagaagaaaattgtcttcagccacacataaaatacactaacactaacaatagctgatgagctaaaaaaaaaaaaaaa

SEQ ID NO: 711426 - DNA, 415 bp, Homo sapiens
  misc_feature (166)..(166): n is a, c, g, or t
  misc_feature (170)..(170): n is a, c, g, or t
  misc_feature (173)..(173): n is a, c, g, or t
  misc_feature (182)..(182): n is a, c, g, or t
  misc_feature (184)..(184): n is a, c, g, or t
  misc_feature (204)..(204): n is a, c, g, or t
  misc_feature (217)..(218): n is a, c, g, or t
  misc_feature (221)..(221): n is a, c, g, or t
  misc_feature (248)..(248): n is a, c, g, or t
  misc_feature (262)..(262): n is a, c, g, or t
  misc_feature (270)..(270): n is a, c, g, or t
  misc_feature (274)..(274): n is a, c, g, or t
  misc_feature (281)..(281): n is a, c, g, or t
  misc_feature (284)..(284): n is a, c, g, or t
  misc_feature (294)..(294): n is a, c, g, or t
  misc_feature (309)..(309): n is a, c, g, or t
  misc_feature (326)..(326): n is a, c, g, or t
  misc_feature (344)..(344): n is a, c, g, or t
  misc_feature (352)..(352): n is a, c, g, or t
  misc_feature (361)..(361): n is a, c, g, or t
aaataaatttttccccccctaaaccagtttttgagtgattgcagtatgactccatttccctggggcattcaaataatagttcccctggtgaaaccaatgaagattatttacaatgcccccctgctttttttggtgtcctgaacctggaagttgggctttttaagtnttanaangtaatcagngngatttcccttcctgaatttngatgaattttaanncangggcaagatcgggttgtaagccctttnagatttaaggccangccctggntcanggtgaanttnccaaagcaancaatgcctgtgaaanggtcctgcagcacccanccagtgaatttttttggngacatccngtttttgtngtaaaactttatattcctataaatccattaaggccccaataaagtttgttttta

SEQ ID NO: 711427 - DNA, 208 bp, Homo sapiens
accaaggcccaggcttgagccccagctttagtttcagcttagggttcccaaaggtcccagggcccttcaaaaggtttaaagtagatatttttttccaccttaggaataaaaggttggtgtgatcccccccccccgcccctggggtaccatttttatgggggtggggttctcctttggtatttgttcaaataaacctggggccggtgta

SEQ ID NO: 711428 - DNA, 1029 bp, Homo sapiens
aggacggaggcctgccccacccccttccctttcctccaaacgccctaactccctccagacacccatgggcaataccctctgccccacaggattgaatgacgtgcttggcagtcctcccaatcccacacctccgtgtttgccaggggaaagaacctaaatgacttcgtgtgattgggacgggtggcagacagtgaagaaaacatgtccatggcccctggtctccatagatgaatgtgttgcttatgtccaatgacaacgtatgagttgctgattctccgggaggccgttccaatgggtcgaggtttgatgggaagacttccttcccaaagaacatagatcctaccatgcaggatctaggagagtgactgggtgtgccaaaatatgcccagggtcctgccctcagcactagatttaatggggccaagagggtccaaacccctggctgaccataccacttctaggtctaactccttcacctttccagcccttcgaggcgggaccatgagaacagaaatgaccttatgaaaagctacttctgttcctgctttcacctctcacgtattgacggtagattgtcttcggacctccagagggtgaacctcttcaactcttgcgctgccagccttctcaggggacttggccctcctaagcagagcagcgctatgaggtagctggctgactggcaaaccatggagagccaattaccaccctctggtgctcacagcagcgtacccctggcactaacagctcttaatagacccatacccagagagacttccattgacaccaggggaccctcacccaaaagagaacacacgataacaggacgagaatggaacaggggcaaccggcacacgagtaaccaacgcgtgcaaacaccgtatgagcaccaaggacggcagaaccccgcggggccacatcaacacaagcagcgcacacacagcgctcacgagacacacacgaagcaacaatcatggcgacgcccgcgcgacccacaaggtcacacagcgctgggacaccacaaaagga

SEQ ID NO: 711429 - DNA, 260 bp, Homo sapiens
cagcactttgggaggccgaggtgggtggatcacgaggtcaggagatcgagaccatcctggctaacacagtgaaacgtgttgttactaaaagtacaaaaaactagctgggcgtggtggcaggaccctgtagtcccagctactcgggaggctgaggcgggagaattgcttgaaccgcgggatggaagaaggtggcaggtgagccgacgattagtgccactgtacctccagcctgcatgccgagagtgagacacatgtgtact

SEQ ID NO: 711430 - DNA, 507 bp, Homo sapiens
cactaagggtcaactgccttgggttcctaaagagctgggattacaggcatgagccactgtgactgacaggttttatgtgtgcatatgtgtgcagacaggtcttcctgtgttgtccaggctggctcgaacttctgggctcaagtgatcctcccaccacagcctcaagttttgggattacaggcatgagccactacacctgagtattgttctctatagtggctgtactaatttacattcccatcaactgcatacaaggattatcttttcaccacatcctcatcagtatttgttattccctgtctataaaagccaccctatgaggtgagatgacatctcattgtggtaatgtgtgatttgtatttctttgatgtttagccatgttgagcattttttccgtatacctgttggccatttgtatgtcgttttttgagaaacaagtattctgacctttggccaattttttgatcggattttttttttttttttgggctatcagttgaatccctt

SEQ ID NO: 711431 - DNA, 308 bp, Homo sapiens
ggctgtagatcccctgagacaaacattataattgtgatggatgtggcagctctttattcaggagcaatacctggcattgccattgatgggatgtcacactggtggagaaaaccttacaagtgtaaagagtgtggcaagacctccagtcaggagtcatcccttacctgccatcgtagactccatacggaagtaaacggtgacaatggtaatggagtgtgggcaagaatcttgggtcaaattccagcccttctatttggatagggcaatggatcacgggagaaattccttacaggtgtatggatgtgggg

SEQ ID NO: 711432 - DNA, 255 bp, Homo sapiens
tgaacttcaagttgtaactacagtatccatctactcctgcttatcttaccagaagaacactgattttgctcagcgtgcaataatggactatcctcaaatctccaaggttctggaagacagagacgatcctatgacgtagtactcggtccataagttgtcatatttgagatgacttgcgctgagttttagaaagctccttgactaggggcaagctaaggtgatcattgtaactcagggtacccaggagccgggtat

SEQ ID NO: 711433 - DNA, 286 bp, Homo sapiens
  misc_feature (90)..(90): n is a, c, g, or t
  misc_feature (142)..(142): n is a, c, g, or t
aagctctgtccccatgaaacactcactctccatccatcccctccccaactcctggcacccaccattctactttctgtccctatgaatgtnatggctctagggacctcctctgagtggaatcagacagcattttccttttttnactggcttatttcactgagccaagtgcggtggcacacgcctgttaatcccaaaactttgggagaccgaggcgggcgcatcacctgaggtcaggagttcgagaccagcccggccaacatggtgaaaccccatctttggtaaaaat

SEQ ID NO: 711434 - DNA, 375 bp, Homo sapiens
ctggaatggaaaaaggcccttaggtacccaactaaaaaaatttgaggcccggcccagtggctcatgtttgtaatcccacccctttgggggattgaaccaggcggatcccttgagccccggagtttgagcccaggttaggcaccatggcaaaaccccgtctctccaaaaaaatacataaattaccccgggggggtggggcatccctgtagtcccacctgcccagaaggctaaggtgggaggatcccctgagtgagcctggggaggtcaaggctccggtgacccatgttcccccccctgccctctagcctgggccccaaagtgagatcccgtttcaaaaaaaaaaaaatttgaataaactatggcctttagttaata

SEQ ID NO: 711435 - DNA, 943 bp, Homo sapiens
  misc_feature (748)..(748): n is a, c, g, or t
ggctgtgcgaagggacgcggtgcgcatgcgctgatggctgcggccaggcccagaatgtccgtccttgtatgtaaaagctcccatggagccttccttcctattcaagatgcaatttaatacggcactcgcgagaatgacatttaaaaacacgtctcatctcgaaaggaacaagtgtttgtatcacaattatgagaaatcgatgctggggaacaaccgtaactgattgaagccttccagccagccagtgatctcttttgacccattaccttggattctccatcagagtgtggatcacctcccaccttgaggggtccccaatgatttttgacacatgttcctccaggtgatcctttaacagagaagagacccttctcaaaacaaaccgcagcattttgaatataccctgcgcccaatggctcttctaggataggcaccagaattatcaggtgaaagactcttttacagtggtctcagcgggctaccgtgtaaagcattatttactatgggcttgagagtaaaactcctagaaccagttcctgtttctgtaaccagggatgttcctttaaggagtcatgagaacacacacaagctaaaaattcatgcgggggaccatccttgaagtcttgaaaagaagaacctgaagatgccttctgtgttgtggaatagcactgattgttttacccaagagacttgtgcaagtttgtctttggacaggccttcttgacagatggtggtggcaaattcagcnttgcaggatggagggatttataggatgacaataaaggccagtgagaaggctagaaattttggtgagtattcatctggcaacatatttccaaaaacagttgtcacatgcctgtgaataaccgggacggcatttgttgacgccggtgttctttaggcacagagagaagggccaatacattgtaccgggggggtcaaa

SEQ ID NO: 711436 - DNA, 146 bp, Homo sapiens
cgtagccctttgtcccgctttcctttgagcttcttttcagtcacggttccaaggaggaggcaaattttagtggtctggagcgttaaagacaaaggttttgggtttaaggggtgccgctttacacaagcattgttaaccaagggtta

SEQ ID NO: 711437 - DNA, 148 bp, Homo sapiens
acagataggcaagaagaggcggactcgagagacaccctacacgattttattctacagccacaagcgcccggtgggcggggtctggaccagtggcaactcaggtggccgagggctccacgcacccaccccccttttctaggggagagag

SEQ ID NO: 711438 - DNA, 847 bp, Homo sapiens
  misc_feature (1)..(1): n is a, c, g, or t
  misc_feature (165)..(165): n is a, c, g, or t
  misc_feature (183)..(183): n is a, c, g, or t
  misc_feature (200)..(200): n is a, c, g, or t
  misc_feature (207)..(207): n is a, c, g, or t
  misc_feature (236)..(236): n is a, c, g, or t
  misc_feature (238)..(238): n is a, c, g, or t
  misc_feature (685)..(685): n is a, c, g, or t
  misc_feature (706)..(706): n is a, c, g, or t
  misc_feature (717)..(717): n is a, c, g, or t
  misc_feature (726)..(726): n is a, c, g, or t
  misc_feature (729)..(729): n is a, c, g, or t
ngttatgggtgaggtgagtgtggcgctcaaggagcagcaggccgccgtcacctccagcatcatgcaggccatgcgctcagctgctggcacacctgtcccctctgcccaccttgactgccaggcccagcaagcccatatcctgcagctgctgcagcagggccaccnccaacacaggccaaccancaggcgccgacagctgnggcgcgngggggggggggcgggaggtgtgtgaaacngnggacccagcccaggtttttgggcagccaccctgcccgctctcccagcctgtgctcctttccctcatccagcagctggcatctgaccttggcactcgaactgacctcaagctcagctacctggaagaggccgtgatgcacctggaccacagtgaccccatcactcgggaccacatgggctccgttatggcccaggtgcgccaaaagctttttcagttcctgcaggctgagccacacaactcacttggcaaagcagctcggcgtctcagcctcatgctgcatggcctcgtgacccccagcctccttagctgctaagcctgccttgcccaggggtgggatggcactgaaggccagcagacaggcctaggctggggcagggtcacggctggcctttacctgctcaggcccccatctctggggtgtttgggggtcagggagcagggacactngccgtgtctacagcggtgtantcagaagttanctggcccanggnagtatgccctgctgggtctgcatgcctgacctgaacttagacggcaccacttggtggaattcatgtcttttaccctattggactttggtttgaaacaatggaattaataagcttggat

SEQ ID NO: 711439 - DNA, 158 bp, Homo sapiens
agagttcccttcacatgtttatgaaaaagacatgaataaaagtcattcttattttctttacatctttctcttgcattacctagagtatgcccagggcactgataggggaatttagggaaatgagctatccttaggatataaccacagattcaataaag

SEQ ID NO: 711440 - DNA, 695 bp, Homo sapiens
  misc_feature (84)..(84): n is a, c, g, or t
  misc_feature (86)..(86): n is a, c, g, or t
  misc_feature (533)..(533): n is a, c, g, or t
  misc_feature (554)..(554): n is a, c, g, or t
  misc_feature (565)..(565): n is a, c, g, or t
  misc_feature (574)..(574): n is a, c, g, or t
  misc_feature (577)..(577): n is a, c, g, or t
ggacatcggatacccaaggagacgaagctgaagcaggcgctgacagctgctgacctgaacctggtgctgtatgtgtgtgaaacngnggacccagcccaggtttttgggcagccaccctgcccgctctcccagcctgtgctcctttccctcatccagcagctggcatctgaccttggcactcgaactgacctcaagctcagctacctggaagaggccgtgatgcacctggaccacagtgaccccatcactcgggaccacatgggctccgttatggcccaggtgcgccaaaagctttttcagttcctgcaggctgagccacacaactcacttggcaaagcagctcggcgtctcagcctcatgctgcatggcctcgtgacccccagcctccttagctgctaagcctgccttgcccaggggtgggatggcactgaaggccagcagacaggcctaggctggggcagggtcacggctggcctttacctgctcaggcccccatctctggggtgtttgggggtcagggagcagggacactngccgtgtctacagcggtgtantcagaagttanctggcccanggnagtatgccctgctgggtctgcatgcctgacctgaacttagacggcaccacttggtggaattcatgtcttttaccctattggactttggtttgaaacaatggaattaataagcttggat

SEQ ID NO: 711441 - DNA, 337 bp, Homo sapiens
ataagacaactcagtacatgcccaaaccaagatgatcagatatgacatattagaaacatgtgacacagtctttatgggaaccattatgaaaatgcttcaaaaagcaatataagccaggcacagtggctcacacctgtaatcccagcactttaggaagctgaggcaggcagatcacttgaggtcagaagttcgagaccagcctggccaacacggagaaacccccatctctactaaaaatacaaaaactagccaggcatggagtcacacacctgtagtcccagctatttggtaggctgaggcaggagaattgcttgaacccgggaggaagaggttgcaa

SEQ ID NO: 711442 - DNA, 918 bp, Homo sapiens
aactgaatgcgtaaacgaggacgactgatcgaaagtgtgacgccatagacggtagaccactctagtctaagcatggtcgagcttcatctatcgacagggacactccggcgcaacttaacggcagtatctaagaaactcgatatcttcttcttgcctacccccggttctctgtggcgactattgtctgaatttggagcattgagtttgtgcggagctggatgttgagcgaagacgcttcagcatctaaaacaacgaatttggcaagcattcagatattccaactacattgaacaggagtcctcgtcttccgaatagataacattcacctgtagtcagtagatatgaggtaatatgtggtaacatttcctatgtggcgacggatgaaaagtcttggtcggtgtgggggcatattctctaggtgagaggttttgggccagatagagtgtcagtggggcgtggtatgtgcattacaaggagttgttgtccaacggatcggggtaatggtggacttaagaaggactcctgctcgcgtggggttaggatgggtaccatggagaaggactcggcaagaactggatagtgggccaggcgttgagaggatgttttcactccggctgggataggatagtcgagaaggattgggtccttgggaaaatattcaaggggctttgataaacgattatggcacggggtcgattgtcccgggttccttccttttaggacttgggaagtgatgattttaaacgaggattaaggcatggatggggactgaactatgttggccaagacagatgtgtctgttcctgcggcataatggcagggcatgctggacgtgaaacagtcacgctggttttcgaagaacctgggtgatgtaaaagtgtgttgattgccaggatgacaggggggacgcagattgaa

SEQ ID NO: 711443 - DNA, 298 bp, Homo sapiens
  misc_feature (7)..(7): n is a, c, g, or t
cctttcnccttttttcccaaaaaaatggatttccccaattttcctttttaggggttaaaaaccaaaaaccctttaatttttttcccctttggggttttccgcccaagaaaggggtttttgggccaattattttttcccggttttaaggggggggggggcccccccccgcccctttttttttggggggggggggaaaattccattttggcccccagggggcgggctttttttttgggtatttttggttttttggggtttttggggaaaaaccgggaattacccccccaatgttgcccca

SEQ ID NO: 711444 - DNA, 883 bp, Homo sapiens
gcactccatccagcctgggcaacagagtgagactctgtctccaaaaaaaaaaaaaaaaaaaaaaaaaaaaaaaaatttttggggaaaatttattctttgtccctcattaccctttttaaaaattattttttattttatattcttataacactacgtgtctttatagaaaatttctggaacaagaagagaagaaaaatttgcctgcaattccatgaattacacctgatagttattttttctgactgcaaattctggtcatttaacaaagatacacattcttacctattcttagcatgtattatcttatatattcttcatattctgtgtactcacattacccacaatcataaaattttccttgtgttttcccctttttctacgttgttttcccaaatgtgggcagcattgttctttaaagttttttcccgtgctctcacggcaaattggtgacaggtttcacgcagccaggtggctttaccacagtgtcgggccttgttgtagtgtcagtaaattgagagccagtttattatgacggtcatcccctcagcattctgcggggatgggttcctagacccccggggttttccaaaccccttggttgctcaggtccctgattttacgggggttgctcattgggccttttaagcctgtgcagctttcctcccagtgttccttacatcctctctagattagctttataatcctaataacacggtacgcgcatgttgccttgttgctcccctgcttgggttttccctggatcaatcccgtggcgtgtgggccccccattttccatgacccgggtggacacctgcgggcaccccgggttgagcaccgtctttactcccactatgagaccccggggccaggttcccgcgggtct

SEQ ID NO: 711445 - DNA, 825 bp, Homo sapiens
cctgtttgaatgattaagaattggtaaaatgatgatacaagtatattgtactaagaagtaattgaccaaaaacaccgttttaatgttctgctatacgggtactattttcccttcaagtggtctgacaaaggtcaaatggtacttctctgtacacagactgttaaaacacaacttaatccctaacactgttgcttacaaacaattatttccctgtgggatacctcctacttctatggtatttctttcaatggcctttgaaaaaacttctgcaacgggtttacatcccaaaaatccaacatttgtttataagaccattattttttgacgacagaaaaaaaaatgtaacctttcaaagttattccaagcccttgtttaaacatttttcccagtggaacgaaatttcgggttgacagggacaataaattaggtaataataaggttttaaacggttatttgggaccaaagaatcttttgggcacaaaggttttccttttcttttaaccaatgtggggcacaaaattaccttccaaaataattcgttaacacttcccaagaggttccagagcgccactgtggcaggcacttactcccacggatatttttaaaaccccacttggggcgcatttcgttctcacacatgagtctgcaaatcaattctctaaattaacagttggtgttccaaaaacatttgggcaaacggcatttacagcaacttttttcaccattactttttgggtcccaccaatggtgtgttttcaaccacacaaagcgggtacaacctttctttaacatttataacattaacaggactcttttttccaccca

SEQ ID NO: 711446 - DNA, 211 bp, Homo sapiens
  misc_feature (11)..(11): n is a, c, g, or t
  misc_feature (24)..(24): n is a, c, g, or t
  misc_feature (34)..(34): n is a, c, g, or t
tacgtttgcangacatagaataanctaatgttcntcaacagaggaatggataaagatgtgttatatatttacaatggaatattactcagccataaaaaacaatcttgacgtttgtgacaaaagggatggatcctagatggtgttatgataagtgagagaagttagaccagagaaagacaaatacggtacagtgtcactgatatgttgaaac

SEQ ID NO: 711447 - DNA, 384 bp, Homo sapiens
  misc_feature (52)..(52): n is a, c, g, or t
  misc_feature (130)..(130): n is a, c, g, or t
  misc_feature (343)..(343): n is a, c, g, or t
  misc_feature (350)..(350): n is a, c, g, or t
  misc_feature (352)..(352): n is a, c, g, or t
ttaaggtagagaatgggggtttccgcccatggttagcccaggctggtctggnaaagcatttttaaaacccaaaaggtttggtatttaacttaccttactaagattattgtattccgccagatgcgggtgncacgcctgtaatcccagcacttcgggaggccaaggtgggcgaatcactagagccccaggagtttgaggccagcctgagaaacatagtgacaccctctctctacaaaatataaaaaaattatccaggtgtggtggtgaatgcctggagtcccaactgttcaggagtctgaggtgggacaattgatactgggaggtcaaggctgcagtgagcccnggaatgncnaccgcactccagtctgagcaacagagactctg

SEQ ID NO: 711448 - DNA, 644 bp, Homo sapiens
  misc_feature (288)..(289): n is a, c, g, or t
ggtgctagcagccttttctctcataagaaatacctagaatatagtatagtgcaagaattggtattgtggcctttagcctgtaagattttactatgatgaagacatctccttatatataccagaagcatattggggtaaggcttacagaccttgcaagtcagtatagtgaaatattcacttctccgttgcctccgtcttctgccattataatggatcaccagtacagtctcttacttctagagccatgttgaagctttcttccccagaagttgtaatgtccttcttttnnttgtgtcgtgtcctaaaatcctactctttggtacaagatgaaggtatatgaagagataatgaaggaaacaaattcaatgtgtttgccaagaacacagtcttttaaataactcttaaagggttcgtttaaaacagtgtaataaattgtggtaatctagtacacaaagctagtaggaacctcgtttattaataatatttcaacattgagcaggatagtgctgccctctactgctcaatgttgaaatattattaataaacgaggttcctactagctttgtgtactagagggcagcactatccttcttttgcaaaatgttgagcactcttgagaaggaaaataaaggcaaagctcctga

SEQ ID NO: 711449 - DNA, 150 bp, Homo sapiens
gcaaatgccgtcttgggaaaacacccgaacgcttggtgcgaacacctgtttgccccccagtggagtgtccccgtcatgggtgccgtgccgaggcgccaagggcgcgcccacgaccggggcggggtcccttggtcgggcccgtccggttgt

SEQ ID NO: 711450 - DNA, 239 bp, Homo sapiens
  misc_feature (13)..(13): n is a, c, g, or t
ccaaggtgggagnattgcttgagctcaggaatttgagacccagcccgggtaacatagtgaaacccccatctctacaaaaaataaacccacattagttgggtttggtgatgggtgcctatagcagcagctacttgggaggctgaggctggaggatcacttgagcccagaaggttgaggcttcagtgagccatgattgagctactgcaatccagtctgggtgacagagtgagaccctgtct

SEQ ID NO: 711451 - DNA, 104 bp, Homo sapiens
ctctttcttttatagatacaacctgattctttatgaattcgttccaatgtttcatgattattgatacgtgttgttagaaaaggtcatagttaaaaatggaaacg

SEQ ID NO: 711452 - DNA, 359 bp, Homo sapiens
  misc_feature (40)..(40): n is a, c, g, or t
cctcggcctcccaaagtgctgggattacaggcatgagccnccgcgcctggctgaaaagtggaaattattaaaaagaaaaaccttgtaagttgagttcagtaccaatatgaaggaccaatgattctttttctttcttttccttttttttttttttttttgagacagtctcactccggcccggacaacaggagtgaaactccatctcaaaagaaaaaaaaaaaaaaaagaaaatttaggccaggggcagtggcttacgcctgtaatccaagcacttttggaggccaaggtgggaggaccacttgagtccaggagttggagactagcctgggcaacacagcgagacctcatatctaaaagtg

SEQ ID NO: 711453 - DNA, 1430 bp, Homo sapiens
  misc_feature (915)..(915): n is a, c, g, or t
  misc_feature (1155)..(1155): n is a, c, g, or t
ttcgctgccctcacctctagtgtattgtgtgcgaccgccctgccttcgctcgtcttgtgtgggttgcgacccttcgagagtgatgaatttgggtgggacagcatctgactggctcgttcgatttagttagtgtctcccgcaatgcgtcccgatattccgcacgggagttttttttggtgcgccttaatggcgacggggtgtgcccccgacaagttttctcacatcgtcggtgctctccgatggggtgcacttttttgtcgccctacttgggcagcctccttgtcctcagggggtgtgacccgcgggtcgtcgcccacagtggggttaaagctcgtgttgggacgccattattctcgtggtgtggccccccaccagggtttttttgtcagttgagagctctcctctgccccccactgggtggtgtccaaccagatccctcctcgttaacagagagggattctgggtgttttttgggccacacgcagggcacctcgtaagagaggtgcaaattttgtttgtgccggccctttagttcgcaaggagtggtgttcccactgccctccccacagaataggggtccgcacaccctgtgtttggccgccttcacagggggcacaccgcgccgttgctccggagagcacgatagagatgggcgcccaccgtcacggcgctgtttcacagagggttctccacgtagagagagaggttggtgaagcctcgccctactctggcccacggggagtggtcccccaggtattccacggacctatcttttaaatatgccaatataaaaagggtattatacccctctttcccacggttttctattttcccccccaagaagagtaatttggtgaaaaacaatccccacttccacacaccacagtaacgctcggtgggtttcccgcgcgcttntatatatgcacgcccacttattctcccaaagatggttccacaaccgcgttattggcacaccacaccccccaatgttcccacattccaccacgcactgtagattatagaccactgtaaggtgtgtttctcggtcccacaaccacacatgggaataattaatttgggccactataaaaaggaaagggcaatttctgaacgccacatgtcccaccacgccctcgaggtgtagatttcctcccncacaatatttatcgcctatagtgtaagagacgcccactcccgacgtttattgtgaaaatgtcccgcaatatggccaaatctgtgtaatcacgagacccaagcaccacattggtggttgcccggtatctgtgaaggaagagatgacaagaggcactgaccacgcttaaccgggagcgggctttttttgtgaaagatgatgtaaattttggaatggatggttgccccactttgtggaaataatagaaaccccatggatttaaaactttgggagctga

SEQ ID NO: 711454 - DNA, 365 bp, Homo sapiens
gtgagatatgatagattctacacgcgctagataggctcccgttgccctacacatcgcagtaattatatcagtgcgcaatacccgtagtgctcagctgcagatttctagtactcatgtctcctacctgctccaagaactatcgataactcctggagccaaggaacttaactatgacatacgcttacacaaatcagcttatatactgtaaacgatactctcttatcacggacctccactttatgcactcctctaaatgcccatgtacgaacgcccccaatacgctggagtcaataggtacattgcacgcagtaactcttaaaaaactagcgcggcctactggtactaatatcgtcctcagcactaca

SEQ ID NO: 711455 - DNA, 369 bp, Homo sapiens
agcccttgccctgtttcagttgaaaattacaaaaacttttagaattgatttctttggcccatgttatttaaataatcaaactaaatcaactctagcctgggaattccctactggggagtcgaggatgaaatgagaggatgcttttgaaaaccctttaacaagaggtggttatttatttaaaaaatttgttttgaatattccagttgttatgagcccacccttgttggggaggggctataaaaactaatttttaatgaaacataggggtaataaggcagccattaagaaaaatataaatcccaccccttgaaaaaagctggtattatagatttttaaaaaggccttcaataaattacaaactggccatta

SEQ ID NO: 711456 - DNA, 343 bp, Homo sapiens
ttttttttttaactttttattagcctttatttaagtaataaaatcactaactccttgaaaaaagtatatttatgaataaatttatctcatataaaaccattccttggcttcgatttacaattgttctattatctccttggttttactaaccacatcctcaaagaatatgaatatcctttctttacatagtctacattttagtgttttttaatcttatccacctaaatatcaataaacagcccttaaaacatttacacaaaagtcttgagggcataaataccacatttggcagttatttcctctggtgggtgaggctgagaggaagagggaggatatgtccact

SEQ ID NO: 711457 - DNA, 995 bp, Homo sapiens
  misc_feature (376)..(376): n is a, c, g, or t
ataaacttcgccttatattttaattattcaacaccctcctagccttactactaataattattacatttttggatctaaccataattcaactggctaccattatgaacataaatccagccccttacgatttgcggctttcgaccctactatcccccgtaccgcgttcacctttctccactacatacatttctctctttagttaggctactaatccgttcttactaagttctgattctaggacaaagttgccgctccttttgagcgcccttaccattgagtccgctatcaaatcatactaaacactgtcctagcgtaattagattatgtcatctccatcttattacttcatgcatccgtatgccctaagtctggcctnatgagtgtactacaaacacaggagttagatgtgtaacgaaggaaaaccacaataacatcttagcaatacaacgagcaacacaaccctatctagcggcgtgagattctcatgtgaggccattcgatgagcacttcttaacctaatagacacttaatagcgatagagtgcgagagcggaggagaacctcattttgaggcttggttgcgccccatgaggcgttatataccgttcgtgaaccctccgggagagaatatcgcggcgggactgccactaaaatagcgtgagtgttgaagggtcttgacctacacttgattcaccataaaaaacaactcccagtgggggaaaagccacagacgggtctgtatttgttaatacacatgttttgccacaccaagtcgtgagtgcaactctgagagaggggcgaccactcatggagggcgggcctcacttaattacactcaggagtggctgtgcccctaaggagagaatcctctcccttataaatttcaaatatatcaattgcccagcaggttctgtatggggggaaactaagttccattacttgtatactaatagcctcacttaccggaaaagccaaagagtctaatgacgccgagac

SEQ ID NO: 711458 - DNA, 231 bp, Homo sapiens
taggctcggaccgatctcgcggcgctgggcttacagggatcacaacagcctggctaattttgtattttcagtagagatggggtttcaccatgttagccaggctggtcttgaactcttgacttcaggtgatccgccctcttcggcctcccaaagtgctgggattacaggtgtgaaccactgcacctggcctaccttgccatttgactttacaaggcagcgacagggaggctg

SEQ ID NO: 711459 - DNA, 183 bp, Homo sapiens
aggctcccgactgccaaggaggcggggaagcctgacttggacagacacagccccctgggctgccttgcccgttgggcatctgtgcccactgcctccctgtgctgtccacctcctctgtgctgtccagtgctgtccacctcctctgtgctgtccacctcctctgtgctgtccacctcctctggc

SEQ ID NO: 711460 - DNA, 2096 bp, Homo sapiens
  misc_feature (2096)..(2096): n is a, c, g, or t
tcaacttgctgctgacaacacaggagccacaaacctgtatatcatctccgctgaaggggatcaatgggacggcctgaacagacttcccgctgctggtgtgggtgaccatggtgatggccacagtcaagaaaggcaaaccagcagctcagaaaaaaggtacatccagcagcggtcacttcgatcaacgacaagtcataccgatagaaaacgactggcgctggtcactctcttatcctcggacacgataatgcagcgagatcaatagctgcaaccaactcaaacgggcgacgcatgacaacgcgtacatggcccactaaacacgcgacccacgctaagccaaacagcgagctgccggcaaagaacatctgctagagacccccgggcacttggccaattccgaaagtgcactgggcccacgccaaataggccaattggcatcaccgtcacgtagcctcactaagtcaccagtccaggagggagacggagttaaatagacagaggacaggagaggcttaaggagaagcggccagaaagtattaacagcgacacacgaaaagacgaagaagcaagcaggaaaagcagacaacgaaagagtgcgacagagcagatgaaaaaacgagacgggcggcgcgggccgccagcgcagaggaccgcaaagaggacgagaggaagcggaacagaagcaacaaacagaggaggtcagcacagcacaaagcaagcacaacccaaagcagagagagcagacagcacacaaagagaagaagacagcagaaaggagcgcatcgcgagcgcaacccaaaaacaccgggaaggggtgagagcacagggggaacaagatcagcgtggagacgagaggacagaggtaggggcagagaaggcatggtagaccggtgaggccccaggaggtagacacagtgaggaagcagaataggaaggacacaacacagatagacacgcggcgagagcgcaacagcacgcagtgacagggcgcacgagacgaagaggcagaagcaccacggccggacgaacaaagaacagaagaggaggagggaacgacaacgcgcagggcaaggaaggaacgagcaaaaagagaggatgccggggaggagagagcggaagagcgggaggggatgaaacaaagagccaacaacacggactggagaaggggaggaggggaggggcagagcgagagcggcgagcacagcgcagggaagggagacacaccggcgaagaagagggacagaagcaccaaatgaaagggaggcgcgagcaggcacgcagtaggaaacacacagtcacagaacggagcgaagcacgcagcaatcgacgcacagaggggacaggaaacagacaggacgaggatcggaagaaaagagacgagacgaatgcactaaatcaggcgaacaggtgactcgaaatgagacggaacagatggaccgggcagggaggagaggggagcaacaaggaagcgaagggggagaagaaaggaggcacgcaagataggacgcacgcaatcagcagaaaggagcaacgggcgcgagcgagacgacgcgggagagagaggcagcagaggagggtgaaagacaagggcaggacgtaagaggcaggagaaagcaagcccaagtaagacacgccgcaagagcgcacgatgagagaggcgaaggcggacacgcgagcacaacaggcggcaagcaaggacggacgagcgaagacacagacaagggagtgacaagagagaagaacagcacagaaggagagaaagcacaggcgacagacgtctgcagagagagaagggagtggaatgagagcagaggcgggcgtggcgagacgaccggccagaacgtgtagacatagcgtaacgggagcacgcgaagacggaaaacccgcagtgcgagacacatgagccgagacacgtaagaccggacacacagagaagaacggagaacggcacgggaggcatacgcactcgagacgaagacaccggagtcgagagacgcacagggcagaatcgcgccatgaagaccagcagagaagaagtgatgtgagaccagcaagtaggcacgagtacaatcggccgggactagcagtgcagagcn

SEQ ID NO: 711461 - DNA, 488 bp, Homo sapiens
ccctgggcagcgctgggaagggcagagctactgcggataacctgcgaacatcggagcagccagaggtaccgaacgcagaggcacaacggacgcagtgcctcatatggaacatatctggacaccaactagtatccttgacagtgaatacccatgggcacctgaattacggcagaaagccacacattgtgcactatgcctcacctattcccactgaagttgagcacaggaaaagcagtcagtaactcacttgaccctagaacgatacacgtgccacacggcgagaacatgtgagcctgcctcactcacaaccccacatgccgttacaaacccacccaccaagtctgcccacaacgcacggaatgagagctacggcgaaacccctgagtaagtgcccagagcacatccgcgtggccacatattccataaaacaagaacaatcacctgacaagaaaaaccactaacacattgatgagaagtattggcacacc

SEQ ID NO: 711462 - DNA, 515 bp, Homo sapiens
actctagaggatctctcaccgcaatctggatggagttggagatcattattctaagtgaagtaactcagaaatggaaaaccaaacattgtatgttctcagtcataagtgtgagctaagctatgagtatgcaaaggcataagaatcatacaatggactttagtaactccagggaaaggctgggaggggagtgagggataaaagaatacaaattgggtacagtgtatgctgctcaagtgacaggtgcaccaacatcttagaaatcaccactagataatttattcatgtacaaacaccgcaatctaaagaaaagaaaactggaggctgtgcgcagtggctcacgcctataatcccagaggctgaggcagggcggatcacctgaggtcgggagttcgggatcggcctgaccaacatggagaaaacctactggaaatgcagagttagccgggcatggtggtgcatgcctgtagtcccaggctgctcaggagactggcaacaagagcaaaagtccagctcaa

SEQ ID NO: 711463 - DNA, 343 bp, Homo sapiens
aagcgtcccttcttcagaatcgcggtctcccctgaaattctccatcaagctcaaaggtggcctccttcgtagcatcggagcagagtgtccagcgtagggggtatctagttgagcgataccacctagtctgctcccacaacttcctcaagagcctggccctgtctacattcaccccatgtgtccccaggcaccacaatttagggccttgcgcatgtacggaatagcttaagtaaattgtataccacactaaataggacgcaacatctatctcagatggaagtagaagtacgatgatcaacttcccatgctcagacaccaattatgtatcttgtagtctggaccc

SEQ ID NO: 711464 - DNA, 124 bp, Homo sapiens
gcctgctcgcagtaattcatgctgttgctgctgacctgatggtgctgtgaccggctgtggaagccacacgtgtccgctgtggtgcgtgcctcgaacctgcccatgtcagtatcattgtgggtgc

SEQ ID NO: 711465 - DNA, 371 bp, Homo sapiens
  misc_feature (16)..(16): n is a, c, g, or t
  misc_feature (320)..(320): n is a, c, g, or t
tccagcctgcaggttncgcatttagcccaggaatcgtaagctgctgccctcacccagggctgaccagggatggacggaatcatgggccaagggtggaactgacccttcccacagtggaggacgagccccccccgaaaacagcccttttccaacacatcagcagagatgggctccctctgaggccttctccttgcagctgccagcccgtccatcccagataaaagcagacaacctctgccaagagggctgggcacattctccagaacctgaaccactggaccaggcttggagggtggggatgacgtctgggggttgaaaanttgtgagctgtccctacggtggcagttcagagtttacagttttatgctggg

SEQ ID NO: 711466 - DNA, 404 bp, Homo sapiens
ttctccgtatccccggcatcagggcgagcgtgctactcctttgtgacatgggatcatgtctcggttcgtctctcgttatggctgcattccaagggggtggagtacatccctttctatgcaggttccctgggtgcctttctccgggatctggagaactccttctcacactgtctacagtgtgtcgcttcgtcatctttcagccatgcgtgattctacaatgccagggtcattcaacgcaggtcacattaccttccttctctccctcggcgagctccccacaaggtccaaatctagaagtcaaggtttctcccaactcagttcccaacaaaaccagggcaaatcctattcttcaggcccggcaccagacccagactcaaactcaaactcagctgcaacaaaagacg

SEQ ID NO: 711467 - DNA, 205 bp, Homo sapiens
cgcacgaggctgcggcgccaggttcctcctgcactggatcatctcggctccatgctcttcagtcttcttctcgttctctttggcctgtgccaggatctcctcacgagaggcgcgcggtgtcatccacgctcgcgcatgcagtccttcatcatgggcctgcagcttccgcagctctttgatggcttcgtcccggttcttgttgggc

SEQ ID NO: 711468 - DNA, 279 bp, Homo sapiens
gtcgaccaaaggtcacttaagattttctgtaagtttttggctgggcacagtggctcacgcctgtaattccagcaatttgggaggccgaggcaggcagatctcttgaggtcagcagttcgagacgagcctggtcaacagggtgaaaccgcatctctgctaaagatacaaaaattagctgggtgtgttggtgaattgcttgaactggggaggcagagactgcagtgagcctagatcacaccactgccctccagcctgggtgacagagcaagactctctctc

SEQ ID NO: 711469 - DNA, 254 bp, Homo sapiens
ttattagaaaaaaaaagacagaatctagcacagtatataagatgtaacacatacacacacacagtcatgtgtcaccatggagtgtacttacaaaaacctaaatggtagagcccactgcacacttaggctacatggtatggcttattactcctaggctacacacctgtacagcattttactgtaccgaatactggaggcaactgtagcacgatggtctctgtgtacctaaagatttttttttttttttgaaacag

SEQ ID NO: 711470 - DNA, 158 bp, Homo sapiens
  misc_feature (19)..(19): n is a, c, g, or t
  misc_feature (114)..(114): n is a, c, g, or t
agcagctgaagcaggtggnggaggagccgtccccccagctcccagccgaccgtttatcccccgagtttgtggacttcactgctcagtgcctgaggaagaaccccgcagaggtantgagctacctggagctgatggagcaccccttcttcaccttgcac

SEQ ID NO: 711471 - DNA, 785 bp, Homo sapiens
agcgggtagaggagaacggacggggatggcaacgatggctgcaaatacagatggtgatgcggagggtgtggtggagatgggggggtgactgaagatatatgagccagcagtcatcgatggaggactgtgagtggcctgaacaggctcagtggatgaccagatagaaaatctgtgcgagatgttggagccgagtaacagtacgacatgcgatggccggtgcagtaaaagcttggctttcgttgttcgagaagaaaagctactggctatggatcaagttgtggacggcaatatcggtgcactggacggggaccaatagatgtccatcgagcgttccacgtggcatcgtatcgagcgaatagcccttcagatctattcaaagattgagatacatactggcagtcctcgatggattggaactgtgtgtaaagggggaaggatgtctgtagcctgaatcacaagacatgggtgcctaggtatttacacttgtggtcacgtgtggatataggtcatatagcagtgagtcaggaacacacctatgtgatagtgcgagggatcagtagaaagcatgggcaatgaatttcatagaaggtcggacaatgtacccgagtagaattgatgattgtgcaggaacaatgataagatcaacatttgatgatggtcgagattcaatccgattacagattcgtattgggcttaattttgcagccaaagatcatggaagccggtttgtcggttggagggacaaggaagatactcggcttttgggtcaaagaaatcatgaaaag

SEQ ID NO: 711472 - DNA, 314 bp, Homo sapiens
ccttagttccttgatgttcaactttctttgttgtgtcatacaggccctgagttggacatttctcaaacttatatatgtggtgttatatagaccttaagtccatttgtaccctggaacattttggaaattattccatctggagggaattggcagtaggctgaaaatactgactgatgcatagtagaaatctcagataatggacctacacaatgttttgttttccaaggggttataaactattggtcaaaatagttgtgtttatttaccctgtctctaatagtggtattctaatttgatcacaatctagtcaatgc

SEQ ID NO: 711473 - DNA, 171 bp, Homo sapiens
attcgcggccgcgtcgactttttttttatgttttagctcatcagctatcgttagttttactgtattttatgtgtgacctaaggcaattcttccaatgtggcctggggaagccaaaggattggacatccctgcaaagtctctgtgcttcagtttctttggctgggatatggg

SEQ ID NO: 711474 - DNA, 109 bp, Homo sapiens
atcgagatcaaggtacggtgggaggtaggtggaggttgagggagatggggtaggtggagttgagggaactgggcagggcacagtcacatccggactggattctatggtg

SEQ ID NO: 711475 - DNA, 273 bp, Homo sapiens
  misc_feature (1)..(1): n is a, c, g, or t
ntaaaaaaaccccccccaagggggggccccccttcttttttgggggggtttcgggggggggggttttttgggcctccccccccccccctttaaaaaaaacccggggggggggggtttttttcccctggaaaaccccgggggccaagcccctttttttttccccccttaaaaaccccggtttccttttggaatttttttttttaaaaaagggttttttttaattttgttccccccccccggttttttaaaggaaaagggggggtttttggggga

SEQ ID NO: 711476 - DNA, 1118 bp, Homo sapiens
cgcaggggcttctgctgagggggcaggcggagcttgacgcgaaaccgcagataagtcttctactctttgcaagatagagattaatacaactacttcaaccacaatatagtcaatacggttactaacgatcatgcttagcgcttaagctcccacaccgtaactctcacactagcttaacgcacttttcccgcacgacaaatatgcacacacttacccacacgagctagcccacttggcacggcacgcacacacaccgcactaaaacaggtcttctcttaacacaccatgaacgcgacgcgtctgacgccatcgacacgccttcctttccacttgggcagcttacaaaccacacactgtaacttccacacacgacaccactcgacgaagccccccggggaccctacccaggaaggccccccgcaactccacactaacccgaactcacgcacacggggccacacttgccgtctcaccacgactctcacccacgtggacaggagctgcacctccacacaccaggctactaacccgatcttctacgtcccccaaccaaacgctcgtaacgggctggacttatacaccaactcacacctcccgccacgtggccccactccgtactatacaaaacaacgcaccacctttcccacccgccgacaacagggtgcactctacacgacacgcacccctttgccccacatccccaatctcaaccgcccaagggccacccaaaattatgccgcgcttcccagtgttaaacacaagcccccactaactaccaacctcgccacttttcacccttaacctcaccgacacacaacccgccaccaacagtggtgcccaaccccatttcacacctgcgcgcaagctgtggtaacacgaacacgcgacaacgcaccctcaggggcaccacacccatgccccaccgccctctgacatccttccacaccaccccgcggcccgcaaccacccacactatccgggccacgcgcgcacacccacaccgcaaacaacgcacactccaccccccccaccaagcaccgaagcccccaccacacccacccgccgccccccaaccgtccccccccacacacataccaaacacaccctccccagcccgc

SEQ ID NO: 711477 - DNA, 871 bp, Homo sapiens
gggattgcttcagggcaaagaaactgttctagaactagcgaatggggggggagcaggacattcctctgtccacgctcagaatggcgctgcttgaagccaccatgctgcaaagccggatgcctcaagattcgtggccttcgcctctcctgcatcttgacataaagcgactgaggggcaaagaggagccattagtgaccaggtgctgtcgggaggcctgttcctgggaccttccattgggactgatattcgcccactggggacttgtcgccatgcaccatgagtaccggagcctctatgcctccatgtcctactgcacctggagtctgggaggtctccatccgaaccaagtgtctgtaaagatgacgtattgaggatctccccagcaaagcactcttcagaactgtatcagacaccagctgaggttagggtcaagggtgcctggggtacgcggtgagtaatcgctgcattgctaaatagagagggtctgtccacctcctctccacgtcccagaactggccccagctgcaggcactaagaagctcctcacctgagacaagtgaggggtaatcggtgaaaggcagatggacaaggggctcagggctgctgccgttccatgtacctctggatgagaagcgcgcagcaaggctgacggctgcacccttcctctcctgcaggactcactgccttgccctccatcctggccctcaggaaaggccaaagatctcaggtgactgccctcattctgttcattgtaaatacacaaccgtgcattggtacagtgggacctgctcaagcgaaatcacataccatggttcatagacctagctaacatggtacttcaaccctaccctaccccgagaagggcagagac

SEQ ID NO: 711478 - DNA, 285 bp, Homo sapiens
ggcccgcccgctccgacactgtcacacagtgtcagacagctggtcagggatatggcgtctggtggatcgtgtccgttttgatgtatacatgacggagcttggagtgggtatagctttgcgtatatatgggcgccatggtcaagccagcattgtatcatcatttgtgatggttccaatctcactataaaatctgagagccttttgaatactacacagttgtcttgtatccctgggtagagatgttggagacgtagatgccacagctgatgtggagacaatgggctg

SEQ ID NO: 711479 - DNA, 445 bp, Homo sapiens
taccaaaaaataaagaataaaaaattagcctggcatggtgatgtgcacccttagtcccagctacttggtggtttaggtgggaggatcacgggaggccatgaagttgaggctgcagggtgccgtgtcattgcgagtgtactccagcctggatgacggtgagagcatgtctcaaaacgcgcgcctgcacacacactcacacacacacacacacacacacacacacacacacacacacacacatctatctatctatctacaactagaagggagaaatgggaaatataaatataggcacaaatctcatatatgctaagcacttaacaaatatctcatttaaatcttataatacgcccctgagagaatcactgttgtcccattgtgtggaagaaagtgtgtcttagagaagtcctatatgttgcccaagggtacgcacccaagtgggagg

SEQ ID NO: 711480 - DNA, 657 bp, Homo sapiens
ccagagactgtcagtggagtggggagtgaggaggcggcggcggcgaatggcaggcgtctggggcctgtctccagggctcctgctctgccattcctgaactggtccctcgtccccgtgactctggcatcagggaagcgaactgttaggcgagaggaggaggcagccagaaccatatccccttcttcctcggggcggggtgcctgtgccaggcctggctgagcctgggggagggctccgtggagggagtgcctggccaggccggctgtctgccgcgatggatgacagtaaggtggttggaggcaaaaggtaacagaagcccggtaaacgtggtcggaagccaagccaaaatttgacttgacagcaaaaacttgagaggagccggccagaggtgcaagagactgcctgagcccgacaaacagctgagatatcagtatctggaagacgttggtatccagtcgagacacgagctatacttgtgccctcagcaggacggagcctgggaccattgtacaacgccagtgggtgccttggcacatggcgaccaacgggcagaatccctttcttgaaacttaagggccctactcacctgggagaagaagcagaacagattctcacccgaagtccaagccgcgcttaccaaggtgggaaccacccgac

SEQ ID NO: 711481 - DNA, 144 bp, Homo sapiens
gaaaaagtttcactgtgtagagaacatatatgcataaacataggtcaattatatgtctcattagacaaataatattgggcaaccatgttctaggaccttaggttacaaaaataatttcaagggtgaaatctctaatatttatta

SEQ ID NO: 711482 - DNA, 107 bp, Homo sapiens
cctggggctaaaactaatcaagatttggttcttctgtacacttaaaagtggttaaaatggtcaattttatgttacgtatattttaccacaatttaaaataaatttga

SEQ ID NO: 711483 - DNA, 428 bp, Homo sapiens
ctcgaaggagcagtgaaatcgaaacgttggccatttttatttgtattatctggggccaccttctggcgttcagagaacaaaccagccagtttgcctcatcagtggcaggttgggtgctcaggaaacttctcacggagcctctctaccctacccttccttcaacaagtacatctctttttctcttactcactctcgctctctgtttacaaatccgtttgcctagcgaatacgttttatcaattctctcttgtgatttatcttataggagttatgtttaccgtgcttcccgtttacatcaccctgggtgtgcgtgtcactgtgcgcccagagacatgatctcgtcgtcaagcagggaatctgtggcactgggctgctcatggctggcctgctcgccatggcgggtgggcgttcctgggtagggagtcttc

SEQ ID NO: 711484 - DNA, 240 bp, Homo sapiens
ctactctagaggatctcgcgaatctctctctctctcgggacaagaaaacaccagaggcaaacaaaagggctcaaaccaacaggaagtcagccccaccgcaagcctggactacaactaaatcgtgctctccacgctcaggggtgaaagccaaggctgtgccaggccttgccaagggccaagcagggattgacagcaaaccgcatacttgaacggtgtagccaatcagggtcccccttgtaa

SEQ ID NO: 711485 - DNA, 779 bp, Homo sapiens
tcccagccatacacttgcctttatttaaatcagtttttttcaaaatgcagccaaatctttatgattgggacagcccaaagtacccagccctattccatctgatttagtttcccccacagcagttaaaacccaggtgctggtttgtggtctcctgtggcccatgtggtgtgggacagcgtgaaggtgatggagggcctctagcacaaggaggtgctgagttgccaccggcaggtgcttctgcagacagcctagagcaaggataagcaggagcactcgcttcagaaccgaggcggctcggaccaaaggcaggcacttttcctccacatgtggcaaagggacaagggttgtgttctctcctacctcatggctttactaaggggtcaggctaggcattgaccgattcaaggagtgggtagggggtaaaagtggaggaggaccattgactgattgaggtgcctggaaacctgtaggggtgtaggctgcggggcccttggaggtaaagggcttgggaaatagcagggtgacacctgaatccctgagtgaccctgcagtggtttgggatgaggccagccggttctcaggcatacttggtgagctgcagccccttccagaaaggttggcttgatgataccatctccatcctgtgtcaatgcttgaaagtctgaaattccctcagctaaggaaggagagaatgtccaagcattcttgttttggtcgtccccggaattgccaacgcgttgaggggacctccggaaggtaacattataaagggcaagtgt

SEQ ID NO: 711486 - DNA, 826 bp, Homo sapiens
agcgtgctggggcaggagaatggtgtgaacccgggaggcggagcttgcattgagcagagatcgcgccactgcactccagcctgggtgacagagtgagactctgtctcgaagaaaacgaaaaaagaagtagccctcttggccaggcatggtggctcacacctctaattcccaacaacttgtgggaggctcaagcaggaagatcacttgaggccagagtttcgacaccaagccttgggcagcaatggttaggacccctatctctacaaaaggtttaagaaagtgggcaaggcatggttggcacattgcctttgagaggctgagtgcaggaagatcactgttgagttgtgccactgcacctccagcctgggcgacacagcaagaccctgtctctgaaaattaaagggggcctcttgtcacatttcttccctatcttcgataaggtagctaccctcacctctttctagttgtggtcccgtggtacttatctccatatttcaaagttaggcctctgtcgactatttcttatttaatcagtttgagatcttcagcttatggagctcgggccatggtacgaagaggatgtagttctcgactttagagcaaaatggactcaatatcttctaaccgaaaggacgttaccaagagtgtccgtggacacatgcatgtgaacacagacagacagaagaaaagtcggggtacgaaattgacgcactttttccgagcacaccgagggaaaactaggggcccctataaggcgcttcccagaacaggggaaaattatacaaccgggggtctaaccactaagtaaaggggttccgagaattcg

SEQ ID NO: 711487 - DNA, 536 bp, Homo sapiens
aatcccagcactttgggagaccaagatcacttaagcccaggagtccaagaccagcttgggcaacatagggagaccccatgtttacaaaaattttttaaaaattcgccggcatggtggcacagacctgtagtcccagttactcaggggactgaggtgggaggatcacctgagcatagaagattgaggctgcagtgagctgtgattgagccattgtacttcagtctcggcaacagagcaagatgctatctctaaaaaatacaaataaactaaaatccttggttcacactaaaaaaaaaatacaaacaaaaaaccagaaccacactaaaaagtatctaatcagcctcttgagtagtggggattacaggcactcgccaaccagaggtccagctcatttaatatttcagtagagacagggttacaccagcctgtgggcaaaattagtgagaccccatctctaaaatttaacaacaacttcgtgtgtttaacacaaatatttactttaagtacacttcatttctttcggtcctcggaaatgc

SEQ ID NO: 711488 - DNA, 355 bp, Homo sapiens
ctgaaaaaaaaccttattggctgctaagcgcaaccatgattaagtgagagatgcatgtggggatgttaacactgtcgtatttactttcccttcagaatgtctcgatgacagaatcgatccaggatactcaagtgtgcttggctcatccttgtcgaagggatctagacaagtgtgatgttgcacatactaatcacaatatggtactaattgtgtttaatttcatatgtatttagccaaagaagtgccctttctagtactaataatctatgttggggataatacattttttcacctaatagtttgagccgctattgtgggtggcttttttacttcctatttgggtaattttgtggcc

SEQ ID NO: 711489 - DNA, 1037 bp, Homo sapiens
  misc_feature (257)..(257): n is a, c, g, or t
  misc_feature (302)..(302): n is a, c, g, or t
catgcctggtcagcaccaattcaagccatgccaggaatctgcctacctgccaggttcagttcttttaaggtgcctcttcagggacacagtgtgtctctctgattgggcttctaaatcaaaagcctgatgttcgtgtccctctcatagggggagctttggacacaggaccagtttggaaaagggtcaggtaagggtttccactctgcaacattgtagaagggaacactcctgtaggcccactgggtcccttatctagnagaggttgagtgaatttgccttcagttaacatgggaccttctgtntaggcttcctcttgcttcccaaagattttaagcattttgtaaatgtataaactcacctctggtaacagtggcccagacgctgctttgtgctaaaagcatgggaaatgtaaaggcagtctttctctgggaaatggatgctattctattctgctgcccctacctgttcctgaggcctcatttagaaagaaaatcccctcagaaggctgtctggcacccagtgtcctagccaggccaagtatatgagaaaggtaagtccattttccccttcaggtcctcagtggattacttaaccactgctgtccctcggtccctttttcctaaacgggtttagttctgtcttttttctccttttttctaaatgctggtaaatatttacattcagccagggaagaggaggccagaggtcgggccagctgccccattcttttaacgttgtagggcctgcccatggagcggaccctcctctttgggcctcgtgagcttttttgcttatcatgttccatttcgtgccgctttcccccttcaagatgccatttggagggtaggggatctgcttcccactgtgactgggctatgggattctgactaccttgcttacagattcatggtttgataaatttgttgtattcaaaaacttgaaatgcaggacgccattaagtgtctgtttatatttttggaatatttgtattacttacaattaattaataaaagtgggtttaaaaaacctttccagga

SEQ ID NO: 711490 - DNA, 831 bp, Homo sapiens
  misc_feature (96)..(96): n is a, c, g, or t
gaaacccaatatgcggaatttcgtcctccacatgtggaaatgaaacctactaaaaggtgagtgaatttgccttcagttaacatgggaccttctgtntaggcttcctcttgcttcccaaagattttaagcattttgtaaatgtataaactcacctctggtaacagtggcccagacgctgctttgtgctaaaagcatgggaaatgtaaaggcagtctttctctgggaaatggatgctattctattctgctgcccctacctgttcctgaggcctcatttagaaagaaaatcccctcagaaggctgtctggcacccagtgtcctagccaggccaagtatatgagaaaggtaagtccattttccccttcaggtcctcagtggattacttaaccactgctgtccctcggtccctttttcctaaacgggtttagttctgtcttttttctccttttttctaaatgctggtaaatatttacattcagccagggaagaggaggccagaggtcgggccagctgccccattcttttaacgttgtagggcctgcccatggagcggaccctcctctttgggcctcgtgagcttttttgcttatcatgttccatttcgtgccgctttcccccttcaagatgccatttggagggtaggggatctgcttcccactgtgactgggctatgggattctgactaccttgcttacagattcatggtttgataaatttgttgtattcaaaaacttgaaatgcaggacgccattaagtgtctgtttatatttttggaatatttgtattacttacaattaattaataaaagtgggtttaaaaaacctttccagga

SEQ ID NO: 711491 - DNA, 647 bp, Homo sapiens
ctgtcctcaaaaaagaaagggagccctatctcagaacttaaagagtcctgctcaccctcatattacttctgattttttttcccagctactcaggagggcccagctactcaggaggctgtctggcacccagtgtcctagccaggccaagtatatgagaaaggtaagtccattttccccttcaggtcctcagtggattacttaaccactgctgtccctcggtccctttttcctaaacgggtttagttctgtcttttttctccttttttctaaatgctggtaaatatttacattcagccagggaagaggaggccagaggtcgggccagctgccccattcttttaacgttgtagggcctgcccatggagcggaccctcctctttgggcctcgtgagcttttttgcttatcatgttccatttcgtgccgctttcccccttcaagatgccatttggagggtaggggatctgcttcccactgtgactgggctatgggattctgactaccttgcttacagattcatggtttgataaatttgttgtattcaaaaacttgaaatgcaggacgccattaagtgtctgtttatatttttggaatatttgtattacttacaattaattaataaaagtgggtttaaaaaacctttccagga

SEQ ID NO: 711492 - DNA, 139 bp, Homo sapiens
gttttagagctgcctcctcccgttgacgggtggcaaagttccagaagctccgccactcccgtccttcttgcccccatgtctctgtgaattgggcattccctttcccctgacatgaagaagggaaaaaagttggcggccg

SEQ ID NO: 711493 - DNA, 400 bp, Homo sapiens
gaattccgcggccttccaaacatgccttccttccgtaattcagtcggaaactaacttcacctcctcaagcggtgcgtgcctgctgcttcccagcggcagcaaccggatgcaccggcgcattagactgccagcatggccgccccggacctccgactgagcagctgcgagagccggaagttgccgggcgccgggactgcgagggggccgggagttccccaagaccggaagtgctccgaggccgggagcccgcgggaccccggagcgcgcggggccggaagaggcgggcggccagtggaggtccgcagagtttgggcccaggcgagacggcagggcttaaagttccgggtgaggcgtgggtcccacaaccgcttggaatttgctcccggtccgctctggaagc

SEQ ID NO: 711494 - DNA, 110 bp, Homo sapiens
tggttaaaaccttttttataaagtgggcaaagggcgaatttggcaaaatccccctccacaaaattttcttttttttaaaaaaaaaaggggttccccctatttctttttgg

SEQ ID NO: 711495 - DNA, 174 bp, Homo sapiens
tccccctggaatccacgcatggcatgggagggaacaaggaaaacatggtatcccaaagggaactgtcagcgagagcacaaagattctatcgatactgcgagcaatatgggcgtggagtgggtgctcatcctgagactacagaatgcaatgatctgagtggttaagcataaaaca

SEQ ID NO: 711496 - DNA, 308 bp, Homo sapiens
  misc_feature (5)..(5): n is a, c, g, or t
cctgncgttgggcaaagcagatttcgagaaacccaaagttttcgcctgggaagtcccccctaaggggctgggtttgcccgtcccaaaaagcttccccaggggggggggttagaggggaaagggcccccccctgttcctcagtttcagcctggccccctcccctcctttggcctttgaccctttttccccagggggccccccccttttgggggcccccgggtttttttttccccccccccccccctcccccttgggtttttttttgttaatgttgggggggaatgaataaataaagggattttttgcca

SEQ ID NO: 711497 - DNA, 299 bp, Homo sapiens
ccccgagcactgccccccgcaagtggaaggaagaggacagtgtgggcaccagagggccctggaaacatcttaggggccccccagccatgggccgcccccatgtgcgatacttttaaaacttcaagatgggcacatcatagtcctccttacattttctccatggttgctgtcatctggacctggtttaattttcagtctcgtgtgagtagaagaggcagcggagacctctaagcatttccctcaatctaaaaattatgagttacagggcggggggcgctggctcggcgggggtaccgagc

SEQ ID NO: 711498 - DNA, 764 bp, Homo sapiens
  misc_feature (55)..(55): n is a, c, g, or t
  misc_feature (124)..(124): n is a, c, g, or t
  misc_feature (176)..(176): n is a, c, g, or t
  misc_feature (239)..(239): n is a, c, g, or t
  misc_feature (253)..(253): n is a, c, g, or t
  misc_feature (259)..(259): n is a, c, g, or t
  misc_feature (313)..(313): n is a, c, g, or t
  misc_feature (332)..(332): n is a, c, g, or t
  misc_feature (344)..(344): n is a, c, g, or t
  misc_feature (346)..(346): n is a, c, g, or t
  misc_feature (350)..(350): n is a, c, g, or t
  misc_feature (356)..(356): n is a, c, g, or t
  misc_feature (359)..(359): n is a, c, g, or t
  misc_feature (364)..(364): n is a, c, g, or t
  misc_feature (369)..(369): n is a, c, g, or t
  misc_feature (372)..(372): n is a, c, g, or t
  misc_feature (392)..(392): n is a, c, g, or t
  misc_feature (395)..(395): n is a, c, g, or t
  misc_feature (397)..(397): n is a, c, g, or t
  misc_feature (418)..(418): n is a, c, g, or t
  misc_feature (448)..(448): n is a, c, g, or t
  misc_feature (451)..(451): n is a, c, g, or t
  misc_feature (456)..(456): n is a, c, g, or t
  misc_feature (479)..(479): n is a, c, g, or t
  misc_feature (503)..(504): n is a, c, g, or t
  misc_feature (540)..(540): n is a, c, g, or t
  misc_feature (577)..(577): n is a, c, g, or t
  misc_feature (593)..(593): n is a, c, g, or t
  misc_feature (595)..(595): n is a, c, g, or t
  misc_feature (623)..(623): n is a, c, g, or t
  misc_feature (626)..(626): n is a, c, g, or t
  misc_feature (634)..(634): n is a, c, g, or t
  misc_feature (643)..(643): n is a, c, g, or t
  misc_feature (666)..(666): n is a, c, g, or t
  misc_feature (675)..(676): n is a, c, g, or t
  misc_feature (730)..(730): n is a, c, g, or t
ttttttaattttcttccaaatactactttctgctcctttctttattgtaatagtnatctgaaagtacacaaaaattaacaaattgcttttactatgcaactctgaaatatcaagtctgcctccnattaaaaaaaaacagtaactacttttataacattaaggtcaagtcatttgtnaagataatatcaactgagactttttggcacttacgactaatccattataaacaactgtcagtnttaaaaacacagtnccagtnaacgtgtagttacactgggtacagataagaaaatacaagggcagcatggtagcncatgtctgtcctcccaganctttgggaggcngnggcnggtgantcntatgnggccnggngttcaagaccagcctgaccnacncngcaaaactctgtctctactanaaatacaaaaaaaaaaaaaaaaattcgccnggngtggnggcatttgtccataatcccagcnactcagggggctgggcgcctgggnntcccttgccccccggcagccgtggttgcagtaagcnaagatcgtgctactgcactctagcctgggtgacagancaagcaaggctctgtntnaaaaaaaaaaaaaaaaagaaagaaagtncgngaagctcnctggctgtnctaaaccaaatgaatggaaagcnccaaaagtnnttttataccaagggtccatccatacaaataaacaaaatcctatcctcttctttntatattttttttcttacatttcttatacaaataa

SEQ ID NO: 711499 - DNA, 331 bp, Homo sapiens
cctccccgatttgtagatgtttggggcgccccataggttggggaactctcaaaatagggatccctcaggtgtagaaatacctccaggggggttaggagtaccaggagggctgtgtgtacgcaacttttggagggccaaaaggtttactataggaggaaggatccagtggccctaacagaaaaggaatgtatgctacgggtaccccatagggcgagtacgcacgccttctgtgggaagggcccgagcggttctcccgagacatgcgtgcggacgaggggtcacgagcgccgccttgtcgtgggacgccacttggttcacgtggccgtacgca

SEQ ID NO: 711500 - DNA, 335 bp, Homo sapiens
gttagcttgtgctagtgatgtcgtttgctggtcaatagtcagcagttgttgagttacatcttcaccaaccgcgtgtttaattaataagctgtttttccaattaaatagcatgcgctgtttatcgtctaaatgttctaaatcgacataggttttcaattgctgacttagatgactaattgtgtgtgtttcagagaacgatagctcgtcagttaacgcgtcaaatgttcatgatttcttatcttttcgtcaagattatgttatttagcttgagcgtttctttgcgctctaacttgttgaattaaatcctttacgattttttcttggctgtaatgcct

SEQ ID NO: 711501 - DNA, 256 bp, Homo sapiens
tgtgcttagggacggcgggcatggtggcctacactgtaatactagctactcaggaggctgaggcgggaggattgcttgagtccagaaattccaggctgcactgagctgtgattatgccactccactccagcctgagtgaccagagaaactcctcaaaaataagtaaataaaatttgctttcagaaagcttgttaaccagcttacccagtattaatattagagggtgctatattccttgtcaccttcaccaatgcta

SEQ ID NO: 711502 - DNA, 2455 bp, Homo sapiens
  misc_feature (1804)..(1804): n is a, c, g, or t
  misc_feature (1902)..(1902): n is a, c, g, or t
  misc_feature (1920)..(1920): n is a, c, g, or t
ggacacatgatggtggctccggacggagcccatttgcctgatcaataattagagccaagaatcagaaggagccatggggatgcaagggtgacgctggcggtgacctgggctgaacctcacacgtcatactacccagctctgctccgcatgggaagggagactgagccctgggccacgtgcttgtgcagcagagggaatgcgggaggtaacaaccagaccccagggcatggtgggaacgactggaatctaatgcttggacctgggcggttcctcctcgttctcgtttagacccgggagcctgtctttgattgcctttgcctttgaggctctgtggctgtggggctgagtggcatcatggcggctcagaaagatctctgggacgccattgtgattggggcggggatccagggctgcttcactgcataccacctcgccaaacacaggaagaggatcctcctgctggagcagttctttctaccacactcccgaggaagctcccatggacaaagccggataatccgaaaggcgtacctggaagacttttacacccggatgatgcatgagtgctatcagatatgggcccagctggagcacgaggctggaacccaattgcacaggcagactggattactgctgctgggaatgaaagagaatcaagaattaaagacaatccaggccaatctgtcgaggcagagggtagaacaccagtgtctttcatctgaggaactgaagcaacgtttcccaaatattcggttgcccaggggagaagtggggctcttggacaattccggaggagttatctatgcatataaggccctcagagccctgcaggatgcaattcgacagctaggaggcatagtgcgtgacggagagaaggtggtggagataaacccagggctactggtcacggtgaaaaccacctccaggagctaccaagctaagagcttggtcatcacagcaggtccttggaccaaccagctcctccgtcccctgggcattgagatgcctctccagaccctgcggatcaacgtgtgttactggcgagagatggttcctgggagctatggtgtgtcccaggcctttccgtgcttcctgtggctgggcttgtgtccccaccacatctacggactgcccacaggagagtacccagggctgatgaaggtcagctatcaccacggcaaccacgcagaccctgaggagcgggactgccccacagcacgcacagacatcggagacgtccagatcctgagcagctttgtcagagatcacttacctgatctgaagcccgagcctgctgtcattgagagctgcatgtacacgaatacccctgatgagcagttcattctcgatcgccacccaaagtatgacaacattgtcattggtgctggattctctgggcacgggttcaagctggcccctgtggtggggaagatcctgtatgaattaagcatgaaattaacaccatcttatgacttggcaccttttcgaatcagccgtttcccaagcctggccaaagcccacctgtgacctctggccagaagcctcccttctgtgcacaggagccagtttcacagatggagaagatgtctcagatgaagggagtgtcccctgagatatcatccttttcttctgcctcgcctgaatcccccataaacaccagatgattgagtctaccttctttccttggcccgctccctttttcttctgcctcacttgaatcccccgtaaacaccagacgattgagtctgaccttcttttcttgtccacctccccattcacaactactttctcgctcccagaaggntgatcagatattctacaatcacagagtagcaaggacgtttgagatgggtatatcagtaagaagagggcacaagaactggctctggagaccaaagcagntgttataaattctctttnctgggggccgggtgtggtggctcacacctgtaatctcggcactttggggggctgagacagacggatcacctgaggccaggaattcctgcagcccgtgaattcaagaccagcctggccaacatggtgaaaccctatctccactaaaaatacaaaattagctgggtgtggtggcgcatgcctgtaatcccagctacttgggagactgaggcaagagaatcacttgaacccgggaggtggaggtggcagtgagccgagattgcgccattgcactccagcctgggcaaaaagagtgagactctgtctcaaaaaaaaacaaaacaaaaaaaacctctttgctggtatatttgaagagcttgggatggatttgactaaatctgccccgaggagggtgaacaaggtgatctcagagatcactactgctcttggagttccttctcctaaagctaaggccagcctccatcacaaatgcccataaaatctggctcgtctttgatgaacaataaatatttgttgaacaaataaataactgccctgc

SEQ ID NO: 711503 - DNA, 116 bp, Homo sapiens
gctcatatacgatcgcttttgcgatgcatcacgtttttacacgttgttgtcgtgggaattggcaccgaagacgcttgcaattcaaaaagccgaagccacgtaagacataaccgcgg

SEQ ID NO: 711504 - DNA, 1101 bp, Homo sapiens
  misc_feature (614)..(614): n is a, c, g, or t
ccccgctgcgtcgccgatgctgctggcctggaccttgcctccgtgccttgcgcccaggcggcctgccccgcctccgacgacctcaagcagtcggaggggacgcgcacttgcgcccggctctagtgacgagagcgacccctagtatgacaactggtgcgggggcgccggatctggtcgcctggatctcgtggcgcagactctgcccgtatccgtgcccatccaactgggtcaacgccgtgcgtctctcacttgtgtgtggcccctgggcgtgtcgagctcatcctcgtgatgtgctctcccgaatagggcgaggacgggctgatgatagccatcaagcttcgtcttgcgcggtcccctagcccggcgcctgggatggagttccgccggtgggcgatcgttagtgagacgtgtgtcgctagactgcttagtctccgtcgctcgtagcttgcgaggtgcagtgtgatgcgacttgctgggtcgtcctcatctgcacgtttctcgactaagatagtgccaagagtctccgcgtcacctcaatggctcattcccttggtgggctctgcatcgcggggggcccctcgatagaacccaaggcaggtagcgagctgcttttngccctggtgccccctcgcgtagacatcctccgtgcaaataatcaggctttctggtgctacctttccaatcgaaataacaaacgcccgaaaatcacccaggggagggtgcgcactttccggagcgaattactaatgcagttgaggagctcgatgccttggtggggccgccgcaattccggccgggtattgaaacgacggggtggcccccaatgaaagaaaaggttcgccacaataacaagttgagcccggccccttgtgagcggcagcagttcagacagaaacaatgtcgttggtaccaacttggggggcagacagggggggcatgacgtgagggaagcacgatgggggaagaagacaagcaaccggaagaatccaacaaggattggtgccagaaaactgtgcgtccaaggcgttgtaccgcctgggcagtgtataaaccggttgcgaagggcaaagcaagaagaatggcatgtggagggtgtaacat

SEQ ID NO: 711505 - DNA, 877 bp, Homo sapiens
ggagcgcagagcggttgggtcgtcggtgggcggtgctggttttcgctcgtggatgcggtcttcctctgggcatgctgagaagcgggcgcgcggggtcgggagaagggtggcctaaaaactttctgcgcgtgggggtggaaagaaaagtggcccggaacacagggcaggatgggttcgtaaaggttcccacccgtgtggtgggaaaaagggccccccgggaaaaaccaggttgggccacgagaaaaggcccggcccagggaaaaaaaggggggcttccctcttctttaacgcggagggggggggtgaaaaagaaaaaggcacttcaatgtcggggcattaagaggggggccccgggggagcaaccgtggtggggggggccttttgcagaagagaaaggaaattccggggacggggttatacttacaaggaaagtgtgttggaccgcggggaaggtttgggctgtcaaatttcacgggagaaagaggttgtgtgcccttttttcccaaaagaagggtgtttcgggtggttgggaagggggcagaaagaacttcggggaggaccaagggagtgatttttcacagaagaagaaagcggaggaaccactgtaggagggggtttatccaaagaagaatggctggcacacggccataattttggggtgtgtatggccagtgtttggaaaggtagggagaggggcgcataaagggcaagaacagaggggaggtgtgaacccccttgggggtggggggacgacatcatgtgggatgtcccagaaaagaattatatcttacccaaaaatctctgtggggtggtgttgcgaccataattcaagagtggcgtactataaaaggaagggaagggtttcaaccactatgtg

SEQ ID NO: 711506 - DNA, 489 bp, Homo sapiens
cccatatttgattataattatgatggccattttgatgctccagatgaaattaccaacatttagccaacactgatgttcccatcccaacacactactttgtggtgctgaccagttgtaaaacaagagccacacccggaaaactgccctgggtggctggatgtcctaccctttatcatccctcaccgacctaccaacgtggagagctgtcctgaaggtaaaccagaagctctttgggttgaagaaagatttacagctcacattgcccgggtccgtgatgtagaacttctccctgggcttgacttctatcaggataaagtgcagcctgtctctgaaattttgcaactaaagacatatttaccaacatttgaaacccctatttaacttaataatgtctacttaatatataatttactgtataaagtaattttggcaaaatataagtgatttttttctggagaattgtaaaataaagttttctatttttcctta

SEQ ID NO: 711507 - DNA, 1271 bp, Homo sapiens
gccacacgacaagtccttcagcgctggagtgtgctgccgtgcgcttacgggagcaggataccggacgggatacgcaagcgttctggccctcgaacgctggctgtgctgccgcgtagtcggggatcttgctatcgctctctctacagcctaatagttctatcaagagaagatgtagtctatgtaagcacgaagatgattgtaatcaggaccgtctggaaaacagtaagtcaggacgtcctaggcaagcggtccactactcgtaggaggtctagtcattgagcatcaaagcaggtttgacaacaccgtttatttggaccagttgacatctagcgagtcgtctatcgagtcaaggaacacttgcgctttgttgaggagcgttcgaaagcccagattcgttgtactagcacttaccacgacctacctagccaagaaaccacctttgaatagtctggagttctcctaggacgcacccttccgacggtgggcgattccaacgaagaaagcacgaacaagtatatggacactagcagaggcattacgtttccacttgcattgaaggacgttacactttgtatcatcaaaccgacgtccgacgaaagtacggagttcgcatcgcaataggggccgcaaatcgaacagagggaacatatcacacggggttacttaaagcaataaaggcttgggctcctccggcgcggttggctaaggattgtgagataaggcaccgatattcccttaggggcacctatatacccgggaacgcatcccaaggacaaacggcccgagttggaaaggttttcctttgtctacaaagcattctacaatttcacggttgcaaattgggcgaaaagaactctaaagagccgacatcaaagggcccggtagtatacggacttcaccgccaaggtacattaatcggttggcgcgccagacaggaggccggtgggacgcggccaaatgatgcaggaaccagcttttcgccttatccatacacccattgcggcgaaggaggcggcggcaggggctacacgtgtgggcggcttgataggcacttcgaaagcaagtttagggcacacaccacaatctgtggggcgacacaatttgagcagaacgcgttcccacacagagtgcatcagttgggcccacttggagtagccagaagatcgaaagggaatggacccaacgcaaacattcctttgcttcctttccagagaacaatgaaagagaaccaacacatacatattatgagaggcaaaacaatcaaacacaaa

SEQ ID NO: 711508 - DNA, 160 bp, Homo sapiens
cttaacggagcacaaaagggacccgatgcagactcaggccacagggcatgccatcggtgctgggacctgtgagcactacaggaggaaacgcgagacgtgatgaggacttggctccagagcacacagtgcgacgggcaacgaaggttggaacacgcaagcc

SEQ ID NO: 711509 - DNA, 777 bp, Homo sapiens
  misc_feature (445)..(445): n is a, c, g, or t
actagctgctcggggagccgggcatcaccgagtcttgggggccggaggcatacactccagacggggaaagccgataagtttccactggagatcactatcatggccgtgcagtttgacgggggcgtggttctgggggcggactccagtaatcaaccattgggtcctacatcgccaatcggagtgactgacaagcgtgacactctattcacgaccgtagtttctcttggttgtcagcctcagggcgtctaggcttggctgattactccatggctagtagcattgattgcctgtcgagtctaccgaggcttcgggtttccaacagcgatttgaaagcgtggaatagaggcctccacttggtctcacacaagctaggcacagccttcctttgaaggagatgtgttgacgcgataccagggaagacctggatggcagtgcgcaatcatcnatcgcgaggcttgggacccctcgaaggaagcgacgggcaggttgtacgtcagattgccgtatagggagggtattgcatgggtacacggcagtccttttggccattggatgtgctccgggggaggcctcccgtagcattccgtatcgggcttatggtgtgactggcttacgctaacccgggcgtaagctcaatggatcccagaggcaatgaaaggtgtacttgccagagtgtccaacttgtcccagattgcctcctcgacttttatgggccccattcggaggccggggaatggggcttccccagtgggcaaggcaggttgaattcctggcctg

SEQ ID NO: 711510 - DNA, 214 bp, Homo sapiens
gaagtaggcacaaatgagctgttcgctactccctgacaggagtgagctcacagggtcgcgtagagatgcagtctcacaggatccccaatggacggatgtcatgaacagagcagcacacttagcccatgtgtaaataaaatctaactctcatttgacaagcagagaaagaaaagctaacttcgcagagaagcctttgatttgtggattgtatgca

SEQ ID NO: 711511 - DNA, 1639 bp, Homo sapiens
tggaaaaggttaaataaatcatttataatttaaaaaagggcgggccctatctttatctggaaaaggtggacaaggttctggggggtttttaaaggtgggcaagagatttctattttgggtgtggagccttagaagacaaaacaagggaatctggtgaacaggtttccgccattttctcttaaaactggagatgtacactctattttataaaatatacatctttacactattttttcaaatatttgccaatatttatcagcacaacaccgtcccctaatatcacaaatataactaaagagagtggcgaatacggttataaatattaaagaatgtttgggcgacaccacactattatattacccaacacattattacaccttttttatatgtgtgtgacacacgctttttgagatacatatgggtgagaaatatatattttcttcacaccaacacgtgggtgtgtatataaacatgtgtgcggtggagaagtccacatatcctacacgcgggtgcgcgatgtgtgtgcgagcgccgtgtgtgcacacttcgggtgctcccacaccagaagttatatgtggggcgcctacaacagagcaccacacaacacacttactgagacaaaacacaccaacacgtgtggtgcccacacattattagacgcagacgtcttacaacccaaaagcaccactagttctcgttcacaactatttttcaccaacaacaaatcacacaacacaaaacaacaacaagagcagcggcgtttctatactctcgacgtctgggcaacgcgaggcgtctcacactgtgtggcgccacacgtaccaggatacaagacgacggccagttcttgtcgcctaaacctcttgtcgtcgtccccaccacaaccaagagaagcaaacaactcttcctcccacaacaacattttggtggcgccgccgatgacgacagttctgtgggggcaagaatattacaataattcccgcccacacatctgtttagttaatattttactattggtaactggttacaaaacaacaacaccaaaatttttgtctgtgggtgcttctacaaacaataacagaatatgacatcgtccaaacagtacgaggaccccagcagataattaggtttcattccccggggggggcaagctcaccaaaaaaaacatggcttcttcactgatgtaaaacaagaagggagcaggaagggaggcggccaacaaaacaaaacaacaaagtgggcgcgcacggggagacaacacccaccgccggcaaccatacaatcctctctaaaaccacccacgcaagcaaacagacgcatcgaccacaccgcacgcaggcaccgcaaacacaacacatacatgaggcggccacgcgcgagcaccacaccccagcacaccaaacacagggggcgggcaccgaaagccccacatacaaacccccgcgtcgctcctttttcaaacaaccatcggtcgcaacaacacagctgctacttaaacaaaaaaacacaacgcgcggcgtccaacagcggggcgtcccccacacgccaccatcttcgacgatacgagaacagaaccgcccccaaccacgagcgagaccagcacaccgcgcgggaagcacacacgcgcgcgaacgacaac

SEQ ID NO: 711512 - DNA, 117 bp, Homo sapiens
tgctgggattacaggcatgagccaccgcgcctggcctatgctttttatttatttatttatttattttaattaaaagcacttcacgccctgtgattgcaagctggagggggccgcgcg

SEQ ID NO: 711513 - DNA, 642 bp, Homo sapiens
  misc_feature (506)..(506): n is a, c, g, or t
catgagccggccctgatatgggcacagaaatcctgtttatcagagttgactggcttattggattctcaagataagcgtaggttgagtttcatcacgaaaagatttgtatcgtttgtagttctacaaacccccaactttattgaattccgctctccggggcatgagtcagtcagaattgttggagacaaaactatgatggtctcttccgttccgccagtcgccgcttcacttatcgccaccaccgaaaatattttgcatatcgcacctgcgtcgagaggctggaaggctgacgcacccagcaacgtagtgtttatccctccgacattaaccaagcaagctctgcttatacagattggacttctgcggccatcaacgatcattgtcgcggaaatttctgtgcccatttcaaggcacagaaatttgcagatgaggaaattgaggcccagaaattaagtaacttgctgaaggacagccaactagaaagtgggagaacaaagactccaccntggcacctgggctccagagttcaccaatgaattttcaaagacagatcaacaccataaacagcactcatatgactccctcagcatcagtcccagccgatgcttctaagcaggtacatgaatttcatgtcccaatatc

SEQ ID NO: 711514 - DNA, 659 bp, Homo sapiens
ccgggttcacaccattctcctgcctcagcctcccgagtagctgggactacaggcgcccaccaccacgcccagctaatttttttttgtatttttagtagagacggggtttcaccgtgtttgccaggatggtctcgatctcctgacctcgtgatccgagcggcgtcggctgcgaaagtgctaggattacaggcgtgagccaccgtgcccgggcgattgtagctcgtttttaagggagtaattaggttagcaatgtagtgcagggacatttgtatatttgggatctgtgctgattattggaatggaataagatgtcaacgggggagaggggtgatggggtggggggtgtgggggggggtttatacgagtggatccttatgactatgaaatgagggaagttggcttggttatagagcgagctggtgagaatcatctgtctgctcttatttggatcatgagtggtgtcattatgcagggcgtgtgcagatgatccagttgattgcctgtagactgtgtggtttattttaggttggtaggaatggtgtccgagctttgggaaggagggagattggcatggcatggctgtgtgatcagtaatgttcgtgctgggtgtgggggtgtgaggtgagtggaggaaccggtggtggtggggggtgtggggg

SEQ ID NO: 711515 - DNA, 481 bp, Homo sapiens
  misc_feature (345)..(345): n is a, c, g, or t
cagtcagccggacccagctctcgacgcaggtgcgatatgcaccatattttcggtggtggcgataagtgaagcggcgactggcggaacggaagagaccatcatagttttgtctccaacaattctggctgacgcacccagcaacgtagtgtttatccctccgacattaaccaagcaagctctgcttatacagattggacttctgcggccatcaacgatcattgtcgcggaaatttctgtgcccatttcaaggcacagaaatttgcagatgaggaaattgaggcccagaaattaagtaacttgctgaaggacagccaactagaaagtgggagaacaaagactccaccntggcacctgggctccagagttcaccaatgaattttcaaagacagatcaacaccataaacagcactcatatgactccctcagcatcagtcccagccgatgcttctaagcaggtacatgaatttcatgtcccaatatc

SEQ ID NO: 711516 - DNA, 103 bp, Homo sapiens
aaaaaaaaaagtaacaacgggaaggttagggtgaccttactaagtaaaggcttttgggggaggattgaaggtggaacccagggtgcagtagggtgaggactgg

SEQ ID NO: 711517 - DNA, 211 bp, Homo sapiens
agacgtcactactctgggggccatccagactgagcttatcttgtctcttcagttcatctcagaatttctcaggatagaatatcgtttacttgtgataatattgagagttacatcatattcttttacttcgcaccatttgcccctttagttgatcctacctttttttttttaaatttcctgaccttcttaaggcacattgttcagcgtttga

SEQ ID NO: 711518 - DNA, 206 bp, Homo sapiens
agtgtcttcaagacaggaagtaaaatatacggctaggttcactaagttggtttgatagtacgaagaaggagaagattggcagcatgttgaaattcccaaagacgtagtgtcctccaccaccatgtttcaaaagccttcagcagcctcgtcccctcaccagcaaccacatgatttcctatccctgctctaatgaaggaactacatac

SEQ ID NO: 711519 - DNA, 130 bp, Homo sapiens
tgcaaaacggtcatcgccattgatgtggggagccaggatgagatggacctcagcacctacgggaacagcctgtccgggtgatggatgctgtggaagcgggctgaatccctgggctgacaaggtacacggt

SEQ ID NO: 711520 - DNA, 139 bp, Homo sapiens
  misc_feature (96)..(96): n is a, c, g, or t
gggaggtagaggctgcaaggggctgagagtgagtgttcggatggtggcaggagaccaggacagcatgtcatcatagaagtcaagacggtaaagggnttcgaggaggaagggcaggagattagcagtgtcagccctgaga

SEQ ID NO: 711521 - DNA, 920 bp, Homo sapiens
gcgctttgctgcatgtcgaggggcgtcaagactacagtgcatcccaggcagttcttagtgtggaccagtgaaatgtgtcctggtttccttctacttcgggcgaatcatgcatgagagcttcactttcgacagagagagctgcacatgtgtagccacagagccacccgcgaggcatcacatgtatggcaagataaagcaccaaagggactgacctcgcgagctcaaagattaaggtggagccaactacagccgttactgacgaacacggtgttctctctaaaggctacgaaggtatatcagttcactgatgaggtacaccattgtgaacactcctcagactcacgatgttcatgcactcacaatatctagtcactgccaaacagttgacttctgactaggacacggactttgtactggaagttctacaaatagccaaccaaaaggtgtcattggagatccatccgtgcaaacatgcgcaaacgttgatagtagaacgctgcgagtgcagcatgcgtgcagtgtacagaacccaaccctgatgagcccgctcatggcgtgaccatatccgtgcagcaatcctacaatataataagccagccttcctcaagaatgccagacagtggacagagaagcatgcaagacagagaacaaaaggctgatgaggaagagatgcttgataatctaccagaggctggtgaactccagagtacacaacgtctaacagcagataaaggaaggccagtcagctagtaggcatagaaaagaaatttcatcctgatgtttaggggactcgtccatggcttcatcttaagttaatgtgttcttagccaaggtgatctaagttgcagtaccagtgaattggtctttctaaatatatttgatgacataatttgctgtgaagactgactttatcttgacag

SEQ ID NO: 711522 - DNA, 126 bp, Homo sapiens
gtgctatagagagaaacaatacaacatcaccagcacttctctggtttagagtgctcttcaaatgcctcagcattgataacactaaatcttttccgttctctgacctacgcaaggatgtgcctctct

SEQ ID NO: 711523 - DNA, 826 bp, Homo sapiens
  misc_feature (109)..(109): n is a, c, g, or t
  misc_feature (298)..(298): n is a, c, g, or t
accacgcgtccggttgtttatcacgacctcaactcagtaaggcctgagattctttcgaaaaggagctttgcttcccatgacgcagagggaagtgtcaactgggatattnctggtaaaactgaaagcaagaaaagcaggtgctagcccctgtgggactgagggtggaggctgggggagtttgggtgccatcctccagtgacagatggatggacctttcatctaagagaaaggaggagacacgttggcaaatcagcctcaagcctaagattgcttgtgaagcaatcataaggaggaacanaaacagacacaaaaacagagggaaagagcgaaaagacaagaagggcgcaaactgtgacagactcaccgcttcactaactactcacttaaactggaagcaaaatgtccctaaaattgccaaggaactgggatttcaacctgaaagtggaggctgcgaaaatagctcggtcaaggagtgtgatgactggcgagcagatggctgccttccatccatcgtccacccccaacccgctggagaggcccatcaagatgggctggctgaagaagcagaggtccatcgtgaagaactggcagcagaggtactttgtgctgagggcgcagcagctctactactacaaggatgaaagaggacacgaagccccagggctgcatgtatctaccaggatgtacaatcaaggagatcgcacaaacccagaagaagctgggaagttgtctttgaacatcattccagcctcatgggaccagaatccgctgggacaggactcctatgttctcatggccagctctcaagcggagatggaggaatggt

SEQ ID NO: 711524 - DNA, 786 bp, Homo sapiens
ccgagccttcagagtgaggcattattttctcctctctcttgtcagatactgactcccacgcaggaaaaaggaagcaccttttgtcagatgctgtggccacttcctcttcagaaggctccagccaacctttcggtttgcagaatgacggggcccgccgcggtgccggactgcctgtgcacggggccaccgactgcagcctgggttttattcttggcctggccctgaccgggagctggcccctcggctgcttctctggctcgggggggactttctctggctcagatccggacccctgaactggacctggttgtcgtccccccgcttctcagccccctctggggttcctctctcctctccgcccactctttgctcactgccccatgtccctcggtcagtcggcctgtctgttcctctctatagctcggtcaaggagtgtgatgactggcgagcagatggctgccttccatccatcgtccacccccaacccgctggagaggcccatcaagatgggctggctgaagaagcagaggtccatcgtgaagaactggcagcagaggtactttgtgctgagggcgcagcagctctactactacaaggatgaaagaggacacgaagccccagggctgcatgtatctaccaggatgtacaatcaaggagatcgcacaaacccagaagaagctgggaagttgtctttgaacatcattccagcctcatgggaccagaatccgctgggacaggactcctatgttctcatggccagctctcaagcggagatggaggaatggt

SEQ ID NO: 711525 - DNA, 981 bp, Homo sapiens
gcccagctccggtcccagccccggtcgcccggcgtcgcttcggagcgcggtggtagctgactgcgccttcacgatcgtgggacccgcgagccccgacgcgttatgaacatccgcaatgcgaggccatgaggacctatagtgaacatgctagcactgcaacctcctctgcctgacccgagaactaccagatgaaatactacttctagcatggcctttcctggccccagctctcttacattgctgaggacgagaatgggacgattgtggggatatgtcctggtcaaaactgtgcagatgaggatccagtagtgattgtgccccatggatcgatatcacctcgattggtcagtgaacgcgttcccaccggacgccgtctggtctgtgcctctagaacactgcatggtacctagggcctcctcgtagcccatgtatagtagtaacttcatagtagccaatatatgtctccctgtcatgtctcggaagagtaaccgggtcggcctgcacctcgtattccaacacctctcaactttcagatcagtgaagtggagcccaaattactagtgcatgatggggaggacgcctatgcctatgaagcgggactcacatcagatgggcgacgagctgaggcgggacctgtagctgacagagaagggcaggcacgtggtgcctgggtgccaacgagaacaacgtggagagcaaaggcaagtcacctccgagctcaagagagggctgtcgcgaggagaaggcctggctgccgaggatagtggtggggacagcaaggaacccagcgaggtcaggagatcccagagagcacggctgtccaggacgggtcaaaggcctccgagtacagctcctagaggcgtgcccagttccctccttacccacgaggttctcattgattcgtccgtggcccgcgactacactttgacgctgggctggcattggccttcaagacacttgcaacctctttccgggtgacac

SEQ ID NO: 711526 - DNA, 1194 bp, Homo sapiens
gcccgggctgacagccagagagcacaggggctcagctcctgggagagtgagggttcgaagaaagcgggagggcatggcctgcctgcgcccgctggtctcccattacgtgtcgcgttcctgccacgcggtgccccggcgaggccgttggtcgaacggctcctgcgccgggcagagatcattgtgattggctctcgcgagtgggcgtgcgtgctcctgtcgctctctctatcgcccagagctccgcttctaatccgctgccctgtcggttcacgccactccgatgtgcttgggcgttcgtacctgactcaggttccatccgtggagactggacaggcctatgcaacaaattctgtagccattgcgtttatatccttgagcaggacccgtgttgcgcttatcttgctagtagcatggtggggaaacctgtattcctggtaccacgtgcatccgatatccccagactatcccagagatctggtgacactgatcgccggcggtcgtggggcatcctagcggccttgacgcctgttagtcatttccaacggtaacgcgagaaacgacggggagcgggaagtgcatttggaccgctaagggtcatgaagagccaattccgggaggtttgcaccattgccacggataggccttcagcggcccctggtccgaggtttcccttgaacgagtgccctatattcggcgcttgtggaaaacgtggaaatacccgttcacggcatgcgttgaatcaggtggcgcagggtcgaaccggttagcttgggccttgggtcccaggggtccgctttagtgaagttcaggcgggggatgccctcgtgggcaggcggagccgaaccgcttggtaacgaagtgcccaccaaaatcggaaagggggtccctgtaagctgagaaccaaggctgtgacccttagccctggatagagagcaatcccaattgaaccgtggccggggaagaaatcacagctggaggactcgaaaggggggggcaaacagcggtgttgcaagcgcccaaggtgtttgagcccggtggcgggcggggaggaaaccacgcggggcccacggggctcacacggggtccacccgcccgggggaaacccgagaaacctggagactcgggagggaaaactccccatatgtcacggtggcgccccagaaaaggtgcggcacgtggagactccccgtcaag

SEQ ID NO: 711527 - DNA, 116 bp, Homo sapiens
  misc_feature (48)..(48): n is a, c, g, or t
gtctgcagatgggcagaggtcctcctcactggtgggcaggaggcagcntgctgcctgggcagatgcagaggtcaggtgcgccagcatctgttccacttgggccagctcatcggcac

SEQ ID NO: 711528 - DNA, 274 bp, Homo sapiens
ccagctggtgtagagtatcgctagagtagggagagagaaagaggtgagaccttaggaccgagagcagaggaggtcagggtgggagtaaagatgggaaaagtgattccgctgaggagtgagggagagagaagagaggtgagacctgaggaacgagagcagcaggaggtcagggtggggagggaaggtgggagaagtgattccgcctgagagtgagggagagagaagacaggtgagaccctgaggaccgagagcagcaggaggtcacggtggggag

SEQ ID NO: 711529 - DNA, 709 bp, Homo sapiens
  misc_feature (709)..(709): n is a, c, g, or t
cgacgcaggcctgattttggagaaatctgcgagactgagtttttcaccgcaagcgagatggagagattgcgcagggccatgatcgaccaaggtactcccggctcatcaagatcaagtcactgcctatgacggaatcatcgaccatggctagcaatgtacgagcctccatcgactatgcactagtagtcatagtgcaccagcaggatcagacgctgatgcgagagctgactcagaccctgctaaacgatgatatcagagtcaacagtgtttctcgtgacagtgggtgacaatggctccatagacatggagcgcgactgctgcatagtagtcaacatgggcacgcgctaaaccatcctggtgcgcaaagtctacagcaggcccaagagcctgatgccccgcactatcccatgaagggtgcgggccgttacagttctgcgctgcaaggacccagcggttcaccaattgaagctgcaattggttcacccagttggcctaacatgctgttcaaactgtttagtcaccgacctgtggttcacctcaagaattcgggaaacctacaacctaggcaagtttggcacagcacccttggaatattgcctaggccacatttgtcacacctcagactcttaagaaacggtctcaacttcatgatacgagataacgacaactccttaagggcgtactgtcgccccgctagaccagttctccn

SEQ ID NO: 711530 - DNA, 394 bp, Homo sapiens
tcatcgagctcggaccagtctgttctaccatgatgatcccgatcctgtgttgaatcacgctaatgtgtgtgtttgcgttctttgttttctttttttgaggcggagtctctaacccaggttggactgcggtggcgtgatcttggctcactgcaaccttcgcctccccaggttcaagcgattctcctgccacggcctcctgagtggctgggactacaggcatgcgccaccacgcccggctaatttttgtactttagtagagacggggtttcaccgtgctggccaggctggtctcgaactcctgatgtcaggtgatccacccacctcggcctcccaaagtgctgggattacagggatgagccactgcacccggccttgtgttttaatttttaacaaa

SEQ ID NO: 711531 - DNA, 608 bp, Homo sapiens
gaaaactgacatgatggcaggtgtggttgtgggcacccgcaatcgctacctactcaagaggctgaggcaggagaattgcctgaaccctggcggtggaaatcgcagtgagccgacatcgagtacattgcactccatgcctgaaacactgacacatagaggcacggtacagtgctgagactcacagtagattggcccctatatcctagagctgagcgtttcaacttgtttggaggaggtggcggtggcagggacgtggacggaaagatgaggcataggtgatagcacatggaacataacaggagggactggctcaccttggcccaaacgcagcacagcaggcccggggaaagggtgggggcaggaagcagccggcctccctctgaccctccctgtcgccttggcagggcccagacatccaaatggtcacttcccaacctcttcagaggtcaggaagcggggaggggcaggggagagcggtcatcaccacagagaacttcggcggagggagggcagagcattatgacagaggctgaaatgcaagtctggtggccaacagaacgtagcttcccaacttctcccttcgctggtctctagggtctcacagccac

SEQ ID NO: 711532 - DNA, 677 bp, Homo sapiens
  misc_feature (14)..(14): n is a, c, g, or t
ccgcacgagctcgngctgcatttcttctcgccccttaaaatttagtatgatagcggattttatagatggttttaacgaattaattctgctttctaaatacccccgccacagcttcctaaagacctatagctctcacaagtaaagcacgtccttgtgcaccaaagataagtaaagcactggctctcttgagcgctcataaaaaatgccgcacgcttgagcacccttgtcactccatcctcctcataacagcccataacacccccccctgtggttttcccgaattttcgaaaattcatatggtgccgcgaccacccctgctccaccacttaacaccttttaggcgcccccgcgacaccccctcacctttacactaagttcccccctccctctaaacccccccgaattacccccctccccccccaaagtcccactcttttcccccttttaaaaaccccctgggggagttccaaatttaacccccccgtgggcccccaacccctccccccttaaaaaaccttttcctcccccccccctccctccaaaaaccccccccctttcccgaccccccccccccccctttgccccaaatttctcccctctttaacccccccactttcttttctcccacaccaaacccctcccccctcccaacccccccgccccggcccctcccccct

SEQ ID NO: 711533 - DNA, 854 bp, Homo sapiens
tttcaaaaggggggggtaataacgtgttgttaaacaactatcggtgtgcgcagacaaacgatgggccaatgtccctagcgccctcccctcttggaggtaacgttcaggttcgtttcccccggcgtcaaagctgagccatgggtatggaaaggaggactcccccgttcgtggctagaagcgtggcttccttgttcccaggattatgcctaccgacccttagtttggtatcaggtgtgccaaccccgcagttacaatctggcacactctcatgttgtatataataatacttcgcgcccatcccctgcgctgcgcgcgcacgctcaactcgccacgctagaaaagggctttcaggtgaataaggggttctcttaaaggaagcgcgttacagagaagtggatagtaccaactttttattaattctatggatacacacgctgactgagtgccccgcaccccccccctcctgctctcgatggttctctgtccatatgaattttagattgcttcgcgcgccctctcatctcgcgatgagtggactatattattgatcggagcctttggagtacaccgcccaccccctctcgtggatgtttttatcttcttcgccatcaccctgttattattttggcacacgaacgcttgcgcacgtctgggtgtattgaaacgcgaacctaagaggaccgcgcccctcctatcatgtccctccacgcctcttagtcccaccctccactctctctctcctaccctcgcatatagagaacctcactcgcccgcacattttcattgaagaaaaaacaacaataacgaaatgaagagacattaatatcaaaaacgaaccaataattagacacaaa

SEQ ID NO: 711534 - DNA, 849 bp, Homo sapiens
aggcaagcgacagaaaagggggcggtcggatctcggattctggaccaaggggcgcgccgggggtgcccgagagaagcgcccaggggcgacgccctcatgggcagagcaggcttgggagggaccgcagccgtggggcaacaatttcaaaggggcaggggaccacatgaactgccccccaaaggtggggcgaggcacaccccccccggaccagagacccgagatcttggggagaacccgtgttccccagggaacgcagacaaagcagtcgaaatcatggctgtgggagatcaccgggaattcttctggaggatagaccactcttgaggcgtcgtgcaccatgttagagtccccccgaggtgttttcctccggctcccaaggtggagtgagaactgtacgccacgttttacaggcgtctactctctctccccaggaaggagctcgccccacgaaaggtgggcgcgcctttgctgctcgctacctgtcttagagcacgggagacacgaggttcctaaacggcccaagtagcccccctactgggaatcccaactaccaaggtgtttagagaactttcctagctttttcctatggagcctcccaccacccaaaggagttacccacattgccaaattaataaggtgaacttttgtatcaacgaaggtcacaattatgaaagcaccctcagaatttttcaacattaaagacgaaaaaattttttggggtttctctgccccacaccaagttaacatttttttttattttggggtttattatttttccccccaaaaattggttttatttgaggaccccaagtttacgtttccccaaaaaaaaaaaaaatttcccacata

SEQ ID NO: 711535 - DNA, 106 bp, Homo sapiens
aacgttggaaaaggggtcgggctttggtgattagggagtatttccccttggtcgttcactccaggggtgtataaaccctacaattcattccccaggacttggtgtg

SEQ ID NO: 711536 - DNA, 815 bp, Homo sapiens
  misc_feature (161)..(161): n is a, c, g, or t
  misc_feature (242)..(242): n is a, c, g, or t
  misc_feature (335)..(335): n is a, c, g, or t
actgtgatggtcactcatgatgtgcacatagcgatgtgtagttatcagcttcagtgattctagcatcaccgacgtacatgctactagtctgctgctagtcataacaacagtcgtcatgcagctatacggcatggacatgactagtgacaacgtctctaagntcagccatacacgcagcagcatggtgccagaaggactatatcgcgacagctcattctcgtactgtgcgttgtagacaccanatcatacacatgctactgtagttgagatacatcgggcataggctacctgtaatagctaacagtgtacatcgatgcgagatatatccatcatgntctacgatacacgtccatgcagtcgttacaattaatgtagagactagatagttgcacacatggctctgggctatccatgtcgtagagtgctctatgtactacaattctgatttgtgacagctggcagtgctatctagtaccatacagtctgagtctacatgatctacagcacgtatgcacacacagttcctagagtctgattacgtgtgtcacactgtctgatacctgatacctactggctgatagtacaagacaggacgataatgatacagtatgtagcaggctctctatctgtatcgcgtgtcttatctgacttctacacattcttgtatagtggatgaacgattgtatgcacagtgtcacacgcttcgccagcatcgctcatgacgtcgtcagctattactgatcgtctcgcatcatctcagagtacagatggttgctcatagatgatgttctatgtagctggtacgtgtgtgactt

SEQ ID NO: 711537 - DNA, 102 bp, Homo sapiens
atgggctgccacaccccagggtctgtgcagtatatctaggctgttcagtttcccagcagcagatcttttctttctagctaattgtctgtggatcaccaccca

SEQ ID NO: 711538 - DNA, 706 bp, Homo sapiens
ggttaatactagttgtgaccttagtgtttctagtgcatggtggcaccagcgaagggagtgcgagtatgtgtttgtcgtgtgtgtgtgtgtgtgtgtgtgtgtgcgtgtgtgcacgttatggtgtgtctccctctcactgtctgagagttgacgttgtagcagaggggccacagagagaagctgtggtggtttatacctttgtgcaaaaaggcagtgagtctcgtagaacgcctggaagttggccatgtgtcttaagagtggctggactttgacatgtggctgtgctgaatacagagacaggacaaagggacgggagaaagcatcatgtgctccagtgagtctacgacactctgtctgccaagcaatagatactaatacgcccgcgattgtctctgctttctcttctgcaagtgtagcatcactgctttgagacaagagagaagccttccctctccccacacccctgtgtaacttgggtaggactgggaaccaggggcaccctacaaagattgtcggcgcaagggaagtcacacgcttcaggatggagcggatgggcatataatcgagcacgacatctgagctcatcattctgcctctctttgcgtgctctctccccgtcgtgcccgcaccacaccccgggaattggcacatagttcctcttgggtgtgcacatactgtttgacgaaatacgaggagaagaaagagg

SEQ ID NO: 711539 - DNA, 145 bp, Homo sapiens
gtattccctggcgacctatcgtgatctgcctgcccagcgcattcggagactgccgctttactgatctcggggtgccccgatcagcgctggctgagttgtgcatcagcagttgcacgtagagtgactggttctgggtgtcatcagc

SEQ ID NO: 711540 - DNA, 518 bp, Homo sapiens
  misc_feature (9)..(9): n is a, c, g, or t
  misc_feature (41)..(41): n is a, c, g, or t
  misc_feature (50)..(50): n is a, c, g, or t
aaagacccnaacgaaagcgaaaagttgttctgctaaaaccncacgaagcngggggccaaggaggcgccatttataaggatgggacgggagcacccacaaactgaaagaaaaagcgaaaaaaccgaaaggtcgcggctttggctcccaaaaagggtccccaacgccgatgcctgaagattatgacaacgtggaacaagatggcgatgaacccggaccacaacgctctgttgaaagctggaatctctttgtaactggaatccatgaagaaaccacccgaaaaaacatacacgacaaaattccagaaaaaggggaaaataaaaacattcattctaaccccgacaggcgaacaagataactgaaggggtaaactctagttgaatatgaaacatacaaggaagccccagctgctatggagggacccaatggccaggatttgatgggacagcccaataagtgttgactggggttttgttcggggcccaccaaaaagcaagaagaaaggtggccgaagacgcaac

SEQ ID NO: 711541 - DNA, 172 bp, Homo sapiens
gttattcatagttcgagccctttgctgtacagcgagcagaagaaatgcatctgttacataaatgagagaaagctattatgctgatggagcatgctttttagatcctttaaaaacactcaccatataaacttgcatttagagcttgtgtgttctattgttaatgttagagata

SEQ ID NO: 711542 - DNA, 829 bp, Homo sapiens
gcttagtgctccgtgcgtctgcagtgtgtcgccgagctaaccctgtggctagtgctgagtggtggctggggcggctggcaccatgtctgaggcagtgctgaacctgtggcacctgagagcaagaaaatggtaacttggagctgctgtgacctcggctgggctggggctgaaatttgatgtgctgtacatgtggaatggtgtgccctgtgctgcctgatgctgcggagggtgcgttgtggaaaatgggccttccttgtgatgctctgtgcaagggggtgaatgcctctttgcttggggtcactcctggggggcggttccaagtgcatgcgtagatgggtggaccctgtctgggagcgaatgttcccccctgggagggactgaccccctgccccccaatgggccttgagttgcaaagctcttgtccctaaatgccaagcaaagcaactggactgaggctcttgagcttcttcaaccccttgaacctattgtggttgcccttgggttcagcccgcaggcttatttgtaagatgcgagcctatttgaagaacttgacttgacacgattgtagaaagtaaacaccatggtcttgggaccagacacgactgggggcttttagaccattttggggcaggttccctgggccttgaattttggcaatggattttcctttggggcattcgggggtccagaaaattggttctgggggcaggcgtgcccaattgcacctttttactggtggggcaaaaccttggctgggcttgtgcaactttggccaaatggtttgagctgttcccaaaggaattggtcactttggggccgtcaacttacc

SEQ ID NO: 711543 - DNA, 508 bp, Homo sapiens
  misc_feature (68)..(68): n is a, c, g, or t
tgcacaaagaaagcttagcaagaaaacaattatgggatggacttcaaatgatctccaaatggccatanaatagagatgtagtcaacagagaggcaggagaaaaaaaaattaacaaggttttgtttgctaaaatctaggattcatttgattttaaagctgtgtgacccacttccattctttctcccttccatcagctttctgcacaaaccttttgccaccctcatttttaacatttgtattcctcctctactgcccagagcctttctactctgtgttctccaattcatcctaaaatcaagaccaaggtagaattctcgaacttggcctattctgaaaaaaatggacatggctgggacagagagcttgtgtgaatattcccaattggtaaggaatgagtttgcacactcatttattctgccatcaagcatttactggctgtctggtttgtgcctgaccctatgcacttccttagggaatggaataaaaaaaaatacatgatcttctcctt

SEQ ID NO: 711544 - DNA, 135 bp, Homo sapiens
cacgaggacagtcatcggccggaggtatttctaccacagctcccagactggggtgtaagtggatccagctccattgatgggtggcatgctcgcacgaggtacatcacattggaagtccttcttcaccggaaaacg

SEQ ID NO: 711545 - DNA, 312 bp, Homo sapiens
caggaaagttgaacaggattcaaacctaattacaaaatgtagatattaactgtcattcaaatgttcattagcctctagaatcaacttcatttcagccggatgcggtgggtcgcgcctgtaatccagcactttggtaggctgatgtgtgtggatcacttgagatcatagttcatggccggcctgttgaaaccctctctctactaaaaatacaaaaattggccaattgtggtggggtgcgcctgtggtcccggctactcgggaggctgaggcaagagatttgcctgaacccgggaggcagaggtgcagtgagcc

SEQ ID NO: 711546 - DNA, 479 bp, Homo sapiens
aaatggttaagtagtaaatgtacattgtggttttacatataatttcagtagcaacaaactaaacaggctgactgatatgaagacttatcaaatgagatgtggatatttcaaataaagcaaacgccttttatccataaaataaaagagtcctttaacatgctgttttaagctggggagaaaggaagggaaaaagaagaggaaagtgtgcacagatgaaactattttattattctgtgctattaaatacaatcatttcattctaccctatcctatcctattctatcagcttgtaacatatagtttccttcagcacctgtgggggttagttccaggacccctatgaataccaaaatccatagatactcaagtctcttatatagaatggtaccgtatttgcacatgacttatacatatcctcctgtatgcttaaagtcatttctagattacttataatacctaatacaatgtgaattctatgt

SEQ ID NO: 711547 - DNA, 732 bp, Homo sapiens
gggccttccgagccagctgtgggctgcgccccacgccagcccgcgccccgcatggctgccgccggggccaggcctgtggagctgggcttcgccgagtcggctgccggcgtggcgactgcgcagcgagcagttccccatgcaaggtgggcggtgcgtgccggcatggcctgggcgcgggcggggctgccggggccccaggcccctggccctgcgagcatgtgcgggccgccgctctccattcctgctgccacggctgtatgcgccggctgcccttggacgcccggacgccttcgcaaccggctgcatctttccatcttctggctgcccggtgatgcacgccggtggcatgtgccgggcctggcggaggtccaccaagggacttccaccctaaccccaggggaaaaacagccgattgcctataaccttcagttattgcaggcccacacttacctggaacgaactcggtagccacgcaagcaacaaccagggacgaacatcacgtggttgctcatcccacgctacaaggtacttgcgactgtcttacaattcttcctctgccacgcgggttctatgctggcacatggattaaaggggcccgaccaaaaacaggttgccctcccacgcagttgccccacacaccagggcactacactacacctgcccacgcacaggcgactgcaattcagacccccttaactaccttggcgcgacctatcggggcaccacttaagc

SEQ ID NO: 711548 - DNA, 304 bp, Homo sapiens
  misc_feature (60)..(60): n is a, c, g, or t
tccccgcgcgcctgggcccggccaaccaagcgatcccccgcggtgggcaagcgacgcctncgccatcggcgcctaggggccagtaaccattgacgacggccgttgccacaggccgagagccaatcagcagcgatcgccggggctgtttcaaaaacctaaagcaaacaacgaaaaacgctacatcgttgggggaggggaaagattgagaggacccggggcccctccctgaggcctcacgaccacgctcgcgccccggaggcgtgagccgtacaaaatatacctcacttggggtagaaacacaaca

SEQ ID NO: 711549 - DNA, 226 bp, Homo sapiens
gcgtttacagtgctggttgtagtggcagaggttgtgctcgtggtaggcacagggctgggagtagttccagtgaccagaaggttgtgcatgattgtagtggcagatggttgtgctgcttataggggcagaggttgtgctggtttgtaggagcagaggttgtgctggtgacaacggcctccgttgtcagtgggttatgtatttattctacgttataggtaggacaggg

SEQ ID NO: 711550 - DNA, 405 bp, Homo sapiens
atgtggctggtctagttttagctggatccgctgacttttaaaactgaactaagtcaatctgatatgttagatcaggtaagtaagaatgtaggtactttattatgtaagaaccctaggtaggagtaggtgagtcctctgtgtgaacactggaacagaaacatctttataaaattccttgggttaaaaacttgcctctgaattaaacagcaggtttacagatgtttaacaaaaaacattcccctgtgcttatctgaaccccttctctactgaaatcaaccaatattaggtgggcttcttatggatcctgaggaggttccttgtttagttgggaagtacagaaattggctgtagaatggagtatgacttcaaagaaactaaaacctgttccttattttctttttctga

SEQ ID NO: 711551 - DNA, 1228 bp, Homo sapiens
ggtatagcggagcctggctgggcgtgggaacccgatggccccagagctgtaggtggacaggaggtgagttatggcagtctggagcaaagaagggtcgaagaatagtgggtgcggccagacggattacctggtttggtggaagtcctcgctaggacaaggttgggtcctggtctgagatgcttcgtaactggctgcaactctcctctagacaagaagagtggcacgggttacgcagggcctctggcagagcttgacttgtgatcgacgaagcgagggaggatagccgctgcgagcgtgcatgcaggaatcgctgagaggaatcgctacctggaggggatcgccgcgagctgagtcggtgcacgtcgtgcggatatcgtgcggggcggaaggcccgtgtgggccgtcttcctcgcggaggccgtagcgcggctgatgggggtgcgctcgtagcgcgcaggagcattgcacgtagcgaggcgcgtgggcgtgggccgagggcttcagcctcatagcacgtcgggtagcgctgtattgcaaatcgatgggatgccttgcgtgcggcctgcgttgccagatgacggcatggggaccgtcgtttggcatgcgacgagaaccgtagcgtagggctgcttgatttcttggaggtatcagccggatccttatacccccatggcgagacgcccgtacgcgggcttcccgggtggaagtgacaacgaagaacatggggcttcgaaggcatagggaggggaatagctgctttggtggagatagtctcgacaaggtggccgggcattcgcgggggggccccgggagggggcttggggccagacctggtggcgagagaggtcccgtcgtgtcggaggtcgccctcgcgtttggccaaggcgccccccttgggtttggccctcgtgcttccatgggtccgggcaggggtcggaggaggcacaggtgcggggcgcccggcacagccccaagatcagccactctgttggcgcaaccaagcggaacatattttttcaccttcgggtttggcccacaaggtgggggtaccaaagggcccctggttgattgttgggacaatttccgtgggcatggcattagaaaggccccttggaataaggtgaaacacattggcgaaggaaccggttttccggagaccgccggagcatccttgatgaggggggttccttccaacaactttagctgctcctgccaaactgtgtttgag

SEQ ID NO: 711552 - DNA, 128 bp, Homo sapiens
  misc_feature (8)..(8): n is a, c, g, or t
ggctgacnagaggaccccgttatttccttcttatggtggtgtatggtatcattggtttgaggttagttgattagtcatggtggggtggtgattagtcggtggtggatgagatattgggaggtggggat

SEQ ID NO: 711553 - DNA, 185 bp, Homo sapiens
ttccggactatggccgacgaaacgtgttgtgggaacgaaagttagatttacgccgatgaatatgatagtgaaactggatttctgtgcgtacggtattggtactacgggtgtacgcctgagacataggagaaatcagtgaatgaatgcctcctatgatggccaatacagctcctatttgataggac

SEQ ID NO: 711554 - DNA, 228 bp, Homo sapiens
acgggtcgaccacgcgtcgcctacacacggcatcccggccctttggtgggagtggatagatactcatcaaacatgcatgcagaaaacaagctattctagttcttctgcttatgatttttatggatcgatcggtcatcaggaccggcaaatacacaattaatcattcatatggatggagtgttgctagctcgttgtaaattaccatcatcaggtcatcatcttctctcc

SEQ ID NO: 711555 - DNA, 315 bp, Homo sapiens
aactgggcccccgtagaagcctgacagtgtcgggcccctgtgagcagggcactgtctgtgaaggatgtagagacagaattaaaatgactgaaagaggagttcccgtcatggctcagtgattaaggaacccctctaggagccatgaggttgcgggttcgatccctggcctcgctcagtgggttggggttccggtgttgccatgagctgtggtgtaggtcgcagacgcggcttggatctggcgttgctgtggctgtggtgtagacgggcagctacagctccaattagacctctagcctgggatcaggcttctcgggg

SEQ ID NO: 711556 - DNA, 401 bp, Homo sapiens
  misc_feature (30)..(30): n is a, c, g, or t
  misc_feature (84)..(84): n is a, c, g, or t
  misc_feature (100)..(100): n is a, c, g, or t
  misc_feature (120)..(120): n is a, c, g, or t
  misc_feature (122)..(122): n is a, c, g, or t
  misc_feature (133)..(136): n is a, c, g, or t
  misc_feature (145)..(145): n is a, c, g, or t
  misc_feature (151)..(152): n is a, c, g, or t
  misc_feature (155)..(155): n is a, c, g, or t
  misc_feature (161)..(161): n is a, c, g, or t
  misc_feature (164)..(164): n is a, c, g, or t
  misc_feature (175)..(175): n is a, c, g, or t
  misc_feature (193)..(193): n is a, c, g, or t
  misc_feature (198)..(198): n is a, c, g, or t
  misc_feature (202)..(202): n is a, c, g, or t
  misc_feature (211)..(211): n is a, c, g, or t
  misc_feature (218)..(218): n is a, c, g, or t
  misc_feature (224)..(224): n is a, c, g, or t
  misc_feature (226)..(227): n is a, c, g, or t
  misc_feature (229)..(229): n is a, c, g, or t
  misc_feature (235)..(235): n is a, c, g, or t
  misc_feature (240)..(240): n is a, c, g, or t
  misc_feature (273)..(273): n is a, c, g, or t
  misc_feature (287)..(287): n is a, c, g, or t
  misc_feature (291)..(291): n is a, c, g, or t
  misc_feature (296)..(296): n is a, c, g, or t
  misc_feature (308)..(309): n is a, c, g, or t
  misc_feature (314)..(314): n is a, c, g, or t
  misc_feature (327)..(327): n is a, c, g, or t
catggcctcaccacggggccagcgctcagnttcctgccctgccgatcatccagacatcagaggaaatgagagtattgctcaaangagggagactggagcnttattaaggaaacaaaaaanancagtaagaatnnnnaagagtggntaaaanntcnagaggnagntgtggaatttnttgtttgttccccctctnctgcntgcngcagatgangagacanggggangnntngctggngaggnttctcgcacttaataagggccccgtgggggtgnttctggggcttgcntccnagggngcaggctgaggnnctggngggagggccggtnggcggcggcgcggatgctgctcccttgtggccggcagggggcagcctgcagccactgcgcctctcccgccgcca

SEQ ID NO: 711557 - DNA, 224 bp, Homo sapiens
tcgacttatgaggatcccccatgctatgacaaggacaagttacatgatcgatgtgtcacgattcttcttgtgtaataaatactaaaatacactaacacacactcacacacccttcccataagattgttgttgaagattaaataagataatgtatgttatgtccccaacagctccttaaagcaggagtcagtcaacagaccccatcaaggacatagatagtagct

SEQ ID NO: 711558 - DNA, 109 bp, Homo sapiens
gatatgtccatatctctcgcaagacttgggaggtttttagctattatttcattgtctttttcgtttttcctttacttttgaagcacaatttcacagcatgaagaattct

SEQ ID NO: 711559 - DNA, 348 bp, Homo sapiens
ggggggggggggggccccccttttccccccaaaatttgagggggggaaaaaattttttccccccacccccccccccccctttttttttgggggggggggggggggtccaaacgtttttttttttttgcccccttttttttttgggggaaaagggggggttttttacccccggcttgggaccccccccccgggggggggggggttttttggggcccccctgggttttttttttgggggggggcgggttttaaatttttttttttttaaccccggttttttttgggggcccccctcccccccatttttttccccgttttttggcccccccttaaagggtttttgggggga

SEQ ID NO: 711560 - DNA, 197 bp, Homo sapiens
  misc_feature (31)..(31): n is a, c, g, or t
  misc_feature (44)..(44): n is a, c, g, or t
  misc_feature (116)..(116): n is a, c, g, or t
ggacaacctggtaagacctccgtctctacanaaaaatacaaaanttaaggctgggcacggtggctcactcctgtaaccccagcactttgcgaggtcaaggcaggcggatcacctgnggtcgggagttcgcgaccagcctgaacaacatggagaaaccctggtctctactaaaatacaaaattagccaggcgtggtgg

SEQ ID NO: 711561 - DNA, 127 bp, Homo sapiens
tctgtagttgggactacaggtgcgtgcacacacccagctaattcttcattcttattttttatagagacaaggtctcactatgttgcccaggctggtcttgaactcctagccttaagcaatccacttg

SEQ ID NO: 711562 - DNA, 339 bp, Homo sapiens
gacggcttgaatgtaagcactgagatcttacacgtccgtgctcgccagaaactcgagtctatacaaaagccttgagttctttacaactcagtagccgagtcttgcaaaagatcttctggttctattgaatgagattctggagcaagtaaaagatcggacatgtctgagagctttggagaaaatcaagattcagttagcacaaaaggaaatcaaagcacatttggtgcaccaagctgaagcagcacaggatgccaccttgactacaactactttccaaaatgaagcatgaaaagaataaagaagtatatatgcactccactcaggggtgtaaaagcaacc

SEQ ID NO: 711563 - DNA, 162 bp, Homo sapiens
agaatgatcagctctgcgccggattgccctagcattgtgcgggcaatgaatgaagcgaacagattttcgctcattttggctctcagggtttgttataattttttatttttatgggctttggtgagggaggtaggaggtcttggtatgtgctatctctcacat

SEQ ID NO: 711564 - DNA, 137 bp, Homo sapiens
tgcaacacatttttattacgggggataaagagggtgaggtaaagttcatggaactgagtgttatggactttggcatttccatcgcttaccacagcatgagaggggttaattgcagatcgcatcaccgcaacttaagt

SEQ ID NO: 711565 - DNA, 149 bp, Homo sapiens
agtatcagaatgcttaagtccaggaagattacactgggtgggccacagtactgccaccacacagcaagttcaggttacaagcctctaccagaatccttatgcttcagggaagagaagacaagttggaaatccctagacccaagtccagg

SEQ ID NO: 711566 - DNA, 122 bp, Homo sapiens
agtgtcgtgggtattacggatcctttaacctaatgcgaaggggagcggtgtagtgagtgaagagagggaggttgtatttgtgcatgcttggtagtcaaataattacatttgactgttgaggg

SEQ ID NO: 711567 - DNA, 363 bp, Homo sapiens
  misc_feature (15)..(15): n is a, c, g, or t
  misc_feature (17)..(17): n is a, c, g, or t
  misc_feature (27)..(27): n is a, c, g, or t
  misc_feature (31)..(31): n is a, c, g, or t
  misc_feature (46)..(46): n is a, c, g, or t
  misc_feature (53)..(53): n is a, c, g, or t
  misc_feature (67)..(67): n is a, c, g, or t
  misc_feature (71)..(71): n is a, c, g, or t
  misc_feature (85)..(85): n is a, c, g, or t
  misc_feature (100)..(100): n is a, c, g, or t
  misc_feature (106)..(106): n is a, c, g, or t
  misc_feature (113)..(114): n is a, c, g, or t
  misc_feature (132)..(132): n is a, c, g, or t
  misc_feature (137)..(137): n is a, c, g, or t
  misc_feature (141)..(141): n is a, c, g, or t
  misc_feature (153)..(153): n is a, c, g, or t
  misc_feature (158)..(158): n is a, c, g, or t
  misc_feature (161)..(161): n is a, c, g, or t
  misc_feature (181)..(181): n is a, c, g, or t
  misc_feature (183)..(183): n is a, c, g, or t
  misc_feature (187)..(187): n is a, c, g, or t
  misc_feature (191)..(192): n is a, c, g, or t
  misc_feature (195)..(195): n is a, c, g, or t
  misc_feature (205)..(205): n is a, c, g, or t
  misc_feature (211)..(211): n is a, c, g, or t
  misc_feature (219)..(219): n is a, c, g, or t
  misc_feature (234)..(234): n is a, c, g, or t
  misc_feature (243)..(243): n is a, c, g, or t
  misc_feature (245)..(245): n is a, c, g, or t
  misc_feature (258)..(258): n is a, c, g, or t
  misc_feature (260)..(260): n is a, c, g, or t
  misc_feature (286)..(286): n is a, c, g, or t
  misc_feature (289)..(289): n is a, c, g, or t
  misc_feature (297)..(297): n is a, c, g, or t
  misc_feature (309)..(309): n is a, c, g, or t
  misc_feature (328)..(328): n is a, c, g, or t
  misc_feature (330)..(330): n is a, c, g, or t
  misc_feature (343)..(343): n is a, c, g, or t
  misc_feature (349)..(349): n is a, c, g, or t
  misc_feature (356)..(356): n is a, c, g, or t
  misc_feature (358)..(358): n is a, c, g, or t
  misc_feature (361)..(361): n is a, c, g, or t
  misc_feature (363)..(363): n is a, c, g, or t
aaatgtacaagaccncnccggatgtcnatcnttgtatttggattcngaactcnttttggtggtggcntganaactggctttggcntgatttatgattccngtggantagtgcnnaagaaaaagtgatcccgnaacantagncttgcaagacantggcncgngtatgagaagaaaaagaccncnaganagcnncgnaaggatcgcnagaacngaatgaanaaagtcagggggacngcaaaggcncnatgttggtgctgncnaaaagtgagctggagattggatcacngcngaaggagnaaaggtgctgcnatgatgttagctgtgcccncngtggattttcgcnagacantaatacnanacngn

SEQ ID NO: 711568 - DNA, 392 bp, Homo sapiens
caaattcagtgattctcctgcctcaacttcctgagtggctgggattacagatgtgtgccacacgcccagctaatttttgtatatttagtagagagggtttcaccatgtaggccaggatggtcctgaactccatagcctcaattgatctactggcctcagccatcccaaattgctggaattacaggtatgtgtgcctggaccacaagggatctttataagacgacaagaaggaagcatgagagtcagtataagagagatttgacagatgctacactgctggctttgaagattgtttaaggatcatgagtcaaggaattcaggaagcccctagaagctggaaaaggcaaggaaacagattattctttagagcctctacagggatgcagtcctga

SEQ ID NO: 711569 - DNA, 233 bp, Homo sapiens
gtatgtatataagagccttctatcctctaagtatcctaagagggggtaaggtgggggtacactggtggacacaccagtcttactgaagtattctcttaatgtgaacagctgttttttttactacaactttttctctgatgtgcatttcctcaatcatgtacataaatgttcgtcataagagtatatgcttcttcccagaaaaaacatggctatctggaggaaaatatcagtat

SEQ ID NO: 711570 - DNA, 622 bp, Homo sapiens
gatcgacgacagaatgaactcttggagcccctccagaatctggccttctccccagccaccatggcgcatgcttttcttccaaccatgcctgaagacttgctggctcaagctcggaggtggaagggtctggagcgagtccactggtacagtaagtgttggggtctagatgacccacactcctttgagcttcaaagggtgtccagatgctatgaagcattgggttcgacttggggtccacgtggtttgtgcctcagggtccaaaaccacctgcattctaccggtggcgtctgcagaagacgaatggcttgaaggagctggcactccgccggctagatgatccaaaccatttcatttctttgtcgtgtggaaaaggccctctgtgatgcacttctgttctctggaatatgccattttgggagaagggagggactgggaaccacatcagagacgcattcaaaggcccaccacaaaacaaagtttttgacacaaagctcttctgaaatatatgaaatatagaaccgggagactgactcatataacccatgacatgtaaattttgctgttgcctgagtaaatattttaaaactagtttttaaagttgttataaaatatgctcatgcca

SEQ ID NO: 711571 - DNA, 717 bp, Homo sapiens
  misc_feature (235)..(235): n is a, c, g, or t
  misc_feature (237)..(238): n is a, c, g, or t
  misc_feature (401)..(401): n is a, c, g, or t
  misc_feature (416)..(416): n is a, c, g, or t
  misc_feature (443)..(443): n is a, c, g, or t
  misc_feature (491)..(491): n is a, c, g, or t
  misc_feature (537)..(537): n is a, c, g, or t
  misc_feature (634)..(634): n is a, c, g, or t
  misc_feature (639)..(640): n is a, c, g, or t
  misc_feature (647)..(647): n is a, c, g, or t
  misc_feature (652)..(652): n is a, c, g, or t
ggtggaggagcaagcgtctgccgcggtggccgggtgccgatttgacaagatcaaagctgcaggaaaatggacagtgaggttcagagagatggaaggatctgggatttgcattgatgatgcttggcgagaagcacaagctgccttatgaggatgtcgcaataccactgaatgagcttcctgaacctgaacaagacaatggtggcaccacagaatctgtcaaagaacaagaaatgangnngacagacttagccttacagtacctccatgagaatgttccccccatgtggaaactgacgctgtggtcctttcttgtggatggattttctcaaagtacacagattaaagcagtggttgtgtttcagtctccaagattcaaacccttgtgagtaataaatcagcanctcaagaatgtacancccatttagttggtggtagcaaagtgnaatggaaattgaatgagaaactgagatttctcagtaatggtgaatatntcgctctttaaacctagaatcttcatggagtagcttatatttgaanatgatggggttaaaacattttggccctctacctctgatttgtgcttgggttggtcaacagtttaaacacctctccaactacttatgtgtgtcctgtnaacannggtgatnacgtntgagagggaaggcaagaaaggggcagaaactaggagattattacttctcaatattcccacattgg

SEQ ID NO: 711572 - DNA, 765 bp, Homo sapiens
  misc_feature (293)..(293): n is a, c, g, or t
  misc_feature (449)..(449): n is a, c, g, or t
  misc_feature (464)..(464): n is a, c, g, or t
  misc_feature (491)..(491): n is a, c, g, or t
  misc_feature (539)..(539): n is a, c, g, or t
  misc_feature (585)..(585): n is a, c, g, or t
  misc_feature (682)..(682): n is a, c, g, or t
  misc_feature (687)..(688): n is a, c, g, or t
  misc_feature (695)..(695): n is a, c, g, or t
  misc_feature (700)..(700): n is a, c, g, or t
ggtggaggagcaagcgtctgccgcggtggccgggtgccgatttgacaagatcaaagctgcaggaaaatggacagtgaggttcagagagatggaaggatctgggatttgcattgatgatgcttggcgagaagcacaagctgccttatgaggatgtcgcaataccactgaatgagcttcctgaacctgaacaagacaaattggtggggcaaccaaacaaaggaaaattccttggctccaaacaagggaaaaacaaaggaaagattggacagttgtgactatgactttagcacatntaaccaggttaccgtccaattgagaatgttccccccatgtggaaactgacgctgtggtcctttcttgtggatggattttctcaaagtacacagattaaagcagtggttgtgtttcagtctccaagattcaaacccttgtgagtaataaatcagcanctcaagaatgtacancccatttagttggtggtagcaaagtgnaatggaaattgaatgagaaactgagatttctcagtaatggtgaatatntcgctctttaaacctagaatcttcatggagtagcttatatttgaanatgatggggttaaaacattttggccctctacctctgatttgtgcttgggttggtcaacagtttaaacacctctccaactacttatgtgtgtcctgtnaacannggtgatnacgtntgagagggaaggcaagaaaggggcagaaactaggagattattacttctcaatattcccacattgg

SEQ ID NO: 711573 - DNA, 309 bp, Homo sapiens
acatccccctgaaatcctactacccccttttttgagataatttggccagcccttctctttccacacactcactcaatgtcccccccttttaatccccaaaactgtttttgtggtctttgtagcctatagtagttttctcccatctttccccctagacttttttgtttttcagtttcagacaaaaaaacttttcagctttttccagtgggtttccttaacagtaactttaccccttgaaattttttttcataaaaaaactaaattggtgtggaaaggctgcccccaataaagttttttttttttccctga

SEQ ID NO: 711574 - DNA, 219 bp, Homo sapiens
caggaacagcggttcgccgttctgagtctcttactgaaaccccattttccgctatccgagttagttgtgtaggtgccatcctgggggttgaccctatgcgctgtcctgagtgtgctttgcagcatttgcatgactgctggcatcgctgttttcacaagacccattggtctcaccggtccgaagccggctgttcccttgggggtaccggagctcgaaatt

SEQ ID NO: 711575 - DNA, 1049 bp, Homo sapiens
  misc_feature (56)..(56): n is a, c, g, or t
  misc_feature (213)..(213): n is a, c, g, or t
  misc_feature (236)..(236): n is a, c, g, or t
  misc_feature (249)..(249): n is a, c, g, or t
  misc_feature (259)..(259): n is a, c, g, or t
  misc_feature (281)..(281): n is a, c, g, or t
  misc_feature (306)..(306): n is a, c, g, or t
  misc_feature (351)..(351): n is a, c, g, or t
  misc_feature (353)..(353): n is a, c, g, or t
  misc_feature (365)..(365): n is a, c, g, or t
  misc_feature (392)..(392): n is a, c, g, or t
  misc_feature (402)..(402): n is a, c, g, or t
  misc_feature (432)..(432): n is a, c, g, or t
  misc_feature (507)..(507): n is a, c, g, or t
  misc_feature (515)..(515): n is a, c, g, or t
  misc_feature (541)..(541): n is a, c, g, or t
  misc_feature (557)..(557): n is a, c, g, or t
  misc_feature (581)..(581): n is a, c, g, or t
  misc_feature (618)..(618): n is a, c, g, or t
  misc_feature (832)..(833): n is a, c, g, or t
  misc_feature (841)..(841): n is a, c, g, or t
  misc_feature (855)..(855): n is a, c, g, or t
agcgggatttatctcgttggggactaaggcgtcagttggcgcgcaacgggttctangctgcaggcagctcgaggacccgcgggcccgccccggctcggcctggcagatagcagaggcagcagggccgtgccgggggggcatgtatgctgtaaccagttgggccaggggatgttacggtggacagtgcacctggtagggcgggccccgcagggntgaagccatgctgcagtggctgntcgggcatcgggntatactcctntcggggggttacgtgctctggntgaagactatgagacactgtggtcnagatagatgtgcacattttcaatgcagtgtccttgcgttggacananagctgcgccccnggtgaagtcgtgccatccgtgggcaangctcctgtgngtaccctacatgcgctatggagcactcaangcgtcctcatcgactgacacagtcctcctttggggcgggcggaatgacaccgaaggggcctgcaatgtgctctantgcctttngacgtcaatacgcacaagtggttcanaccccgagtgtcaggnacagttcctggggcccgggatggncattcagcctgtgtcctaggcaagatcatgtacattnatgggggctacgagcagcaggcggactgtttttccaagtgacattcacaagctagataccagcaccatgacatggactcttatctgtacaaagggcagccctggacgcttggagggacttccactcagccacaatgctgggaagtcacatgtatgtctagggggccgtgccgatctgtttgggccattgccattccaacaatgagatttactgnnaccgcatncgagtctttgacgncaaatgaaggcttgggtggtaaggtcccccgacatccagatgttgcctgaaggggcgcccgaaagcactcgggctttgggtacaagggagcatgcaattggaggggaaaaagacaggtgaacaggagtcaggacccggaaagaaacacaggctaacatggcaaaattaacaaggaagggaagacacccacaaga

SEQ ID NO: 711576 - DNA, 1225 bp, Homo sapiens
ctgtgctgctgcttttctcttctccccttatacacttcgtcctgtgagtgcgtaccccgtttcctgtttttcgccctgtgtcgttctcttctcccccctgtgggttctggtacttttatcccttttgacatgagatttcctcgctgtgcctctgtttgtggtttttccctttttgtactctctgggtttgttccgtctggtactctaggtgtttgctttttgggtcgggattggtcgtacctccttgcgtagtgatgttggttcttaaacgtgggtttccagaacgttctgtgtccgaggtacttcggcgtattccttcccatcccaggggacagttattgtacccgcaacgttgatttactgctgatggcgtcgtaacggatcacctcagttcctcccctcaggattctgggcacagagtgaaactttctgcatcgcttgacgtcacttgggtagtcacaatgatcctactgtgaagctagtcgttgacaacctaggttagtcactgtagcgtctgcaaggtatgcgttctgctcaaaggacaatgcaaaggcatcgctgcttcgtctgtctgatattgcccagatctttgcattgtgattagcattgcgttttggggtctgcctatggtttgcaagtagctcatactcgcaatatagagtatgtaaaagaatgatgattcctttgcgttcatctagttccgcttctctcagcggtccatctcagcgtctcccttcaggaaccgctgagtgtcctctcttaacatccaagccttttaatgaaatcgtactgaaatcgtgtatcagctaagagtcactccagagtcctggtcccattaactccaagtgccttgtcttgacagtgacaacagacagtcgcctcgctttttagttgattgttggtatgttcttaacccctttaatggaactgcctggattttatacagctattaaaggatgtctcttttgctgtgtagaactgcatagctgcgcaagtgccatttcggggtcagcatcctctgtcttcaacacagtgtgctctctagttatcatgtgtaacgtgggttcattgtttagcgaagatagactagaggacacgttagagatgcccttccatgctgccatccctgtggcaccatctatggttatctttggctgtttagtatatacaggttacagtattaactctggaatcctactgggcaaatccctgcttcacccaattg

SEQ ID NO: 711577 - DNA, 167 bp, Homo sapiens
tcaactgcgccgcggcagatagttcagactcgtatctatttccttgagcgtctgagatgttagtattatttagttttgtctgtgacttgttagagactctgggcatacaggactaggaagcagataaggaaaatgattatgagggcgtgggccattcaccgcctccg

SEQ ID NO: 711578 - DNA, 933 bp, Homo sapiens
  misc_feature (56)..(56): n is a, c, g, or t
  misc_feature (213)..(213): n is a, c, g, or t
  misc_feature (236)..(236): n is a, c, g, or t
  misc_feature (249)..(249): n is a, c, g, or t
  misc_feature (259)..(259): n is a, c, g, or t
  misc_feature (281)..(281): n is a, c, g, or t
  misc_feature (306)..(306): n is a, c, g, or t
  misc_feature (351)..(351): n is a, c, g, or t
  misc_feature (353)..(353): n is a, c, g, or t
  misc_feature (365)..(365): n is a, c, g, or t
  misc_feature (392)..(392): n is a, c, g, or t
  misc_feature (402)..(402): n is a, c, g, or t
  misc_feature (432)..(432): n is a, c, g, or t
  misc_feature (507)..(507): n is a, c, g, or t
  misc_feature (515)..(515): n is a, c, g, or t
  misc_feature (716)..(717): n is a, c, g, or t
  misc_feature (725)..(725): n is a, c, g, or t
  misc_feature (739)..(739): n is a, c, g, or t
agcgggatttatctcgttggggactaaggcgtcagttggcgcgcaacgggttctangctgcaggcagctcgaggacccgcgggcccgccccggctcggcctggcagatagcagaggcagcagggccgtgccgggggggcatgtatgctgtaaccagttgggccaggggatgttacggtggacagtgcacctggtagggcgggccccgcagggntgaagccatgctgcagtggctgntcgggcatcgggntatactcctntcggggggttacgtgctctggntgaagactatgagacactgtggtcnagatagatgtgcacattttcaatgcagtgtccttgcgttggacananagctgcgccccnggtgaagtcgtgccatccgtgggcaangctcctgtgngtaccctacatgcgctatggagcactcaangcgtcctcatcgactgacacagtcctcctttggggcgggcggaatgacaccgaaggggcctgcaatgtgctctantgcctttngacgtcagcggactgtttttccaagtgacattcacaagctagataccagcaccatgacatggactcttatctgtacaaagggcagccctggacgcttggagggacttccactcagccacaatgctgggaagtcacatgtatgtctagggggccgtgccgatctgtttgggccattgccattccaacaatgagatttactgnnaccgcatncgagtctttgacgncaaatgaaggcttgggtggtaaggtcccccgacatccagatgttgcctgaaggggcgcccgaaagcactcgggctttgggtacaagggagcatgcaattggaggggaaaaagacaggtgaacaggagtcaggacccggaaagaaacacaggctaacatggcaaaattaacaaggaagggaagacacccacaaga

SEQ ID NO: 711579 - DNA, 122 bp, Homo sapiens
tgagcgtggagagagggtgtacaccctgctgagtgagagagaggtttctatccctcaggtgtgcagacaccccatctccatcacttagggggtggaaacctctctctcactcagcaggtgtg

SEQ ID NO: 711580 - DNA, 250 bp, Homo sapiens
tgtctggcatggagatccaagctgtgtggaatgtaccagcatagtccaggtcctagcttcacctgccctgcatctgattcctgtactcactgacatgtaccaggtaaccatctaaaggcttgcaatgcaactgtgacccttactcgtacacagtgtgtacgagtaaactataaacatcctttaatatatatcataccacgtgataattgcctgtttaccgtactgtatctcccactattatgtaacctgt

SEQ ID NO: 711581 - DNA, 177 bp, Homo sapiens
aggatttgctgacgggtcagatacagggtatgagtaaaagagaggagttaaggatggctccaaggtgtttggcctgaccacttaagactggagtggccatttatctataataacggggtttcaacagctttaagatttctagtactgccacctttcacccgttgtaggcatgtagcc

SEQ ID NO: 711582 - DNA, 259 bp, Homo sapiens
ggggggggttttcccccccgggggggtccctccccctttggggggcttttcccccccccgtgcccccccctttttcccccccccccgggggggggggggggggggggtttttttttttttcccaaaaatttttttttttttttaaaagaaaaaaagaggaattaaaaaaaaaagatcaagattttgaaaagtaaaaataaagggaaaaaagaatattaaaaaaaagaaaataaaataaaaccatttaaaaagaaaaaaa

SEQ ID NO: 711583 - DNA, 291 bp, Homo sapiens
acaggattaacagcgacctgcaataactgagaggctatcactgggtaaaatgcttcatgaattgactgaaaatccatttggaggtgctggagaacgttattcccagagaggtagcctcagtggaggcgcagtgtctcctacgcacctatctgagggctaggagggtgccaagggcagctgctgaccgaaatggtgcttcaggaagctagggtgctgggagaacgccacatagcacagaggcgctccagaggaaaaaagccacaaccaacaagaaagcacaaaggcaggcgg

SEQ ID NO: 711584 - DNA, 1003 bp, Homo sapiens
taccttttctcacttagtaatttaatggtatataaagacatgtgtataagtgagtgcgtacatatgaggtatgacctatagggttgtgttgtgggaattagctttctcctaacatacagaagtatcagacagtgttcatctcaccccgtcctccttagagaggtgtctttggtgagactatgtgctcattgactataagtgctgccgaagtatagaaatatcttgggaactccttctactagaatggccttcagggcttggcatgttcctttggtttacccttaagtagatgagaacatcctcctcctttgaggatggatgttaccgttctggaatatgaatctcgacgtgcttgatagcacagttggatgaaaaaagatggcaactttgaaggtagagttacagccgattttctgttgtctaaaaaaatccgctaatgaccattttcttggaatgagtcttgggacctcagaagccatctcaggagtgtccacttcaaggggggatcatcctcattagcagacagattgttaaataatcaggattcgtcttgccatgcctcctatgtgtgcacatctctgcataccggctacggatataagtgcggtaaatcattcatatagacatctggtaggtatactgtaagaactgtgttactttagtgcatgttatgtgtcatgtatgatggtgactggggtggtaccttcggcagtgaaaactttgcttcgttcacgggaaatgtgaataatgtcctttgatagtggactaaattatacaggggttgcttgtatagcccagaaggtgatgcagggagggttaaatgggatggggcaagggttggtaattaggacctgttgtttttaacaggtgaacatatttcatggtggtgaaaaggggtagggagggaactaagggagaggggcccacaaaaaagtgaagtaatgaagtgaattgtatgtacacgggtgagagggggaaaaaaccatgaggtagatagaatgtt

SEQ ID NO: 711585 - DNA, 785 bp, Homo sapiens
gatgatccgggccatggaatgacaaggataagaagaaagagaagaaatgaagtgaccatccagcctttcccaatgagacttcctctccttccacacccatcattgcctttttgcacgacattacaggtggatgatgttctgtgataatgaaaagcatcagaaaagctttagtactgtatgtgcgtttgcatctcatcctcggacatttttctgatcaaatagactggattagacagaatatagttaggagttcggcttgcatcttcctggggttacccctcgactaccccttggtgagtcaactcccaatcgtgtagacctcttcggctctatctcaggcatgtacgaccctcggtgctgcggattgaagaaagttggagatcgcagcacgaggggctggctcagactatcaggtagttcctgcttttctcacatccaaggattctacttacaactccaagttggacgcgtgaaaactgttcttgtgataagaagcacgaaatcgcgggcaccgtatccctatcacttcacttgttgattcggggtaatagccgtcaacagtatacacgtggtcgtgggaacttgtgagtccggtcgaagatttttgtcccactccggggaaaaaggagatgtttcacgtaggatccccaatatgtttaacctacaagaaccttgcaaaaaggcgtacgaaaactgattcatgggccctcgtaacgaacacgtatagaatagggaagtaggccgtcattcatgggtgggattgcttattgactgcaccttctagg

SEQ ID NO: 711586 - DNA, 410 bp, Homo sapiens
  misc_feature (20)..(20): n is a, c, g, or t
  misc_feature (34)..(34): n is a, c, g, or t
  misc_feature (61)..(61): n is a, c, g, or t
  misc_feature (66)..(66): n is a, c, g, or t
  misc_feature (76)..(76): n is a, c, g, or t
  misc_feature (92)..(92): n is a, c, g, or t
  misc_feature (102)..(102): n is a, c, g, or t
  misc_feature (115)..(115): n is a, c, g, or t
  misc_feature (118)..(118): n is a, c, g, or t
  misc_feature (138)..(138): n is a, c, g, or t
  misc_feature (141)..(141): n is a, c, g, or t
  misc_feature (152)..(152): n is a, c, g, or t
  misc_feature (157)..(157): n is a, c, g, or t
  misc_feature (161)..(161): n is a, c, g, or t
  misc_feature (166)..(166): n is a, c, g, or t
  misc_feature (176)..(176): n is a, c, g, or t
  misc_feature (377)..(377): n is a, c, g, or t
agggcggggcttagtaaatncggcttccatctcnccatctccggttagtcatccacaaganaaatntgaaattccngcaataagaaatgacnaaagattggngctgaagccctanagngcttgctttttgcccgttgnccngataaataganctatntgcnttatntatgcagcanggggtttttattatttttccctaaagacgtctcttttgggtaataccaaacgggttttttaaaaaagccgggtttttcccaaaacccccttaaaggtttttaaattgtttcaaatctgggcaagttgagatttttaagaacttcctttttaatttgtaataaaagtttccaccttgattttttcaaaaaagtcaccaaacngcaagcccctgttaataaaggtttttaataata

SEQ ID NO: 711587 - DNA, 162 bp, Homo sapiens
ctgcagttgtcgtgagccccgtgcttggaacattccccccaacgatgggatgccgggaggcccatcccgccaggtttctttcagggtcctccgcgggtcacagccctctgctgcacgcacatgcctccaccctcacaatcctatgcagcatagatgggaccc

SEQ ID NO: 711588 - DNA, 698 bp, Homo sapiens
aggctctagcctgagacatgcttgctgacctgggccagagctcttcccttacgcaagtctcagcccggtcgtcgcgacgttcgcccgctcgctctgaggctcctgaagccgaaaccagctagactttcctccttcccgctgcctgtagcggcgttgttgccactccgacaccatgttcgaggcgcgcctggtccaggggctccatcctcaagaaggtgttgcaggcactacaaggacactcatacaacgaggcctagctgggatattagctccagacggtcgtacacctgacagagacatggactcgtaccacgtctctttggtagcagcatcacacctgacgagtctgagggctatcagacaactaccagatgagatcgcaaccatggccatgggcgtgaagcctcacacagtatgtcccacaaatactacaaatgcgcacgtgcaacagaacgcatctcattacaactaacgggccagaacgactaaactgccgggatccccattctgcgagcactacggtactctacgaacggcaacaacaacacacagacgcaaacgtacatcacagcacctaatcgaactgcacccgctgaagcgactctacgacatgttgacaccaaacatgggacattaccagacacagaggagaataccacactaggtggtatgcaacagcatcgcccttcatggaggac

SEQ ID NO: 711589 - DNA, 219 bp, Homo sapiens
ggaagtttccatccctgatttgctttgaccacgtgtactgagctgagcctctgatactctgtcacgtttccaaaaatggtatccattacggactagaaagagacatgggtctgcagcaaatgttgcacctttcaacttgctccatgcaattccaggcacactggcatcgcaaagcactccactcctcccaacaatgcagcaaccagggcaagcaggcag

SEQ ID NO: 711590 - DNA, 425 bp, Homo sapiens
  misc_feature (356)..(356): n is a, c, g, or t
  misc_feature (363)..(363): n is a, c, g, or t
  misc_feature (406)..(406): n is a, c, g, or t
caccaaacacacagctcctggacaccccccaacgcacagtattggtcccagtttcacagcgtggagccacaggggccccagttgaggccgcagcaacacaaacaaaacaaacaagtgctgggttactgcctcctcctcatgctggcgggcatgggcctgcactacattgccttcaggaaggtgaagcagatgcaccttaacttcatggatgaaaaggatcggatcatcacagccttctacaacgaagcccgggcagcggccagggccaacagaggcatccttcagcaggagcgacaacggctagggcagcgcagccgccaccatccgagccaacccaaggccccgagatcgtgccncgggcgnccgccctgaggggctcacctggatggggcctgcaggtcgttcngcctttgcttccttccctg

SEQ ID NO: 711591 - DNA, 326 bp, Homo sapiens
tagagcgaacatgccctcactggagctctgagtatatatgactctgtgcacactcggacaggactacatataaagatactcatagatctagcattatgcatatttctagacagatagtttactaataagatgcattcagggactgctgcaggtgagtcaagaaagcatttctgggaattagagggctgtaacccctcatcatatattgcagctcctcttttacttcttaaatgcatcagctaagtccaagtatatatactttggttccccatctcaatctcttttcccttacctatataatcagatcttttttcttctttttcttt

SEQ ID NO: 711592 - DNA, 534 bp, Homo sapiens
agtagtaacttatagtaggtacataattgtatattgaggccatcttgcctcataggccatgatgatacgctaacatccgtttccgataggtaccgacggaactgcagctctatgtcgacagctcgactgataacataagcgggattgcggctttagattgacaactagattgataatatgagcgggactgcggctttagatcaacaactagattgatgacatgagcgggattgcggctttagatcaacaactagattgatgacatgagcgggattgcggccttagatcaacaactagattgatgacctgagcgggattgcggctttaaatcaacaactagattgatgacatgagcgggattacggctttagatcaaccactagattgatgacatgagcgggattgcggctttagctcgaccactagattgatgacatgagcgggattgcggctttagatcaaccactagattgatgacatgagcgggattgcggctttagaatcaccaactagattggtgacctgagcgggatt

SEQ ID NO: 711593 - DNA, 137 bp, Homo sapiens
caggactactgataattatcagtgcctgcttagggagatgtccgggggaaaaatcattaatatgtctaccttgaagtactgtccaaaaaggaaatcttcaacgcttaagaactagcccccaacacttttcttttttt

SEQ ID NO: 711594 - DNA, 234 bp, Homo sapiens
aatgcttttaaatccaactgcccaagaactttagtcccatctacaaattcagtgaaagagtgtaatcgctcaaattcctcttctcctgtagacaaacttaatcagcagcctcgtctaaccacactgacacgcacatgcgccctgcatacagcacagcagggcaataactgcacaagccttgcaacagagcacagagtagcaagcggcaacatgcaagcatgcaaagccgggctg

SEQ ID NO: 711595 - DNA, 587 bp, Homo sapiens
ggaggttcaaatcttcagccccacgtgcggtttgcaaagtctggctgtacctgaggccctaagaagccagagacctcactcccggggagccgagccatgtccactgcggtcctgtgaaaaacccaggcttgggcaggaaactctctgactttggacaggaaacaagctatagttgaacgacaacgtgcaatcaagaatggtgccatatctactgatcttctcgattctaaagaagagagtttggtgcatatggccaaagataatagcgcttattagaggacgaagtgatggtaatagcctgtacccacgattgaatcgtagaaccgttcgtcgatttaaaggaaaggatgcagctattgagactttttccagccccaataatgcggagtaacaccgttagcccgtgcacttgcatcgtgtacaaaaccagtcagtcagagatgcttgaggcaatgacgattggtgccactggtccatgagcttgcacgagatcgtgaagaaagaccacagatgccctgtgttcccagagaaccagttcgaagagcatggacagatttgccatgtcagatactcgagctatggagcgg

SEQ ID NO: 711596 - DNA, 121 bp, Homo sapiens
tcgtgatcaaacgtatccgacagtggacatgaggcacaacaaaaggtttgaggacatcaggcatatgactttatacttaacatcagatcttttctataatatcctactacttaggatttcc

SEQ ID NO: 711597 - DNA, 196 bp, Homo sapiens
  misc_feature (97)..(98): n is a, c, g, or t
atggtgccaattttaaatagttttatctctcatagtacgatgtaggctatgttatctcacttacaacttagcgacgctgtctgtattatagacgatnngaatggtgtaacttgtgcgctataacaccccctttgtgcgattaatcgctctacacattatatcagacgtatgcgagcaactagtcccagtatactgt

SEQ ID NO: 711598 - DNA, 662 bp, Homo sapiens
  misc_feature (23)..(23): n is a, c, g, or t
  misc_feature (341)..(341): n is a, c, g, or t
  misc_feature (450)..(450): n is a, c, g, or t
  misc_feature (463)..(463): n is a, c, g, or t
  misc_feature (489)..(490): n is a, c, g, or t
  misc_feature (499)..(499): n is a, c, g, or t
  misc_feature (504)..(504): n is a, c, g, or t
  misc_feature (506)..(507): n is a, c, g, or t
  misc_feature (509)..(509): n is a, c, g, or t
  misc_feature (511)..(511): n is a, c, g, or t
  misc_feature (516)..(517): n is a, c, g, or t
  misc_feature (519)..(519): n is a, c, g, or t
  misc_feature (522)..(522): n is a, c, g, or t
  misc_feature (529)..(529): n is a, c, g, or t
  misc_feature (531)..(531): n is a, c, g, or t
  misc_feature (537)..(538): n is a, c, g, or t
  misc_feature (549)..(549): n is a, c, g, or t
  misc_feature (558)..(558): n is a, c, g, or t
  misc_feature (597)..(597): n is a, c, g, or t
  misc_feature (599)..(599): n is a, c, g, or t
  misc_feature (641)..(641): n is a, c, g, or t
taggtttccagccttttattcanacaaggactcaaaagaacacacgtcacccgctgacactgagcggtggggggaccttgtggaggaaggacacagcaggcttggccactgccctgaccagtgaccactcagggctgccccttccagagatgagcgtagggtggggtctgagcgccacccctaggccgtctgtgtgcagcgggagtgctgctgtcctggcgcccggcatcactgtgccagagtccccagcccaccctggcactggcagggttattatggggtggacttgcctgtgttgggggctcctgatcccaaaacatctaaagtcaggttccagagancaagccatggggacctgaccagcaaccggggacctccgtccactgtgcgggacggtgatgaaaagcaaagcagcactaagcggcctcctcagggtcagtcggttcatgncagcttcccccanacccttcaagttcttcttcccctggnngaccccttnccaanannanancaccnntnccnagggccncntggcanntggggcacagnagggaaggngggcccgtccaggcctgcggcgcagggccctggatggcntnagtgagtaaaaggaggtcaccagggtccaaggtgggccctgnggccctccgaagccatttggg

SEQ ID NO: 711599 - DNA, 259 bp, Homo sapiens
tccccgctacgcgcgaccgctgccgtgtgaccctggtgttcggagtgaaccgcggggaggtcgatgggatcatgaggaacacagacctcaatcagtggccagccaggacaacgccagctcataccccttcaatcccagcccggcgatcgtcccggtgacatgcgccgacaccacactgtggtgacggaactcctcccgggctgcgatgttagagatatggacctcaatacaaggcgccaccaactggacgagggcatcg

SEQ ID NO: 711600 - DNA, 364 bp, Homo sapiens
  misc_feature (143)..(143): n is a, c, g, or t
  misc_feature (150)..(150): n is a, c, g, or t
ttgggggagtcccaatcaaaatgtaggtgtagaattggggataaatttattttaaatctgctttaagagagatgtgcagacggtgcatatgtacttcatgtttatctgtacttctgggacatttggtcttcatattgcagagnacagtgncacgggaaaacagattgtctcagttcacggtccctcactgaggtcagagcttaaatttcccagtgttccacttaggaagaacagtgctaatgtgtatcttttaagataactcaggctgaaagccatctgactttcagtgagaatgaggggtacactaggggagaaaataggcatcaaagtttggagagggctgtgctggctatagattttcttc

SEQ ID NO: 711601 - DNA, 1458 bp, Homo sapiens
tcactcgacagtgcaaaaaatttatatatgggggatgtgaaggaaatcaaaatcgattggaaagtctggaaaagtgcaaaaaaatgctggtacaaagagataatggcaaacagggatttataaagagacaacattggcacacaaagaaaacgccaagatttctggcttttgtgggaaagaaagatcctgggaatatggtcagaggttatattaccagggtattttaataacacaatccaggaacaaaaacagtggggaaccgtttacaatgtatgggtgggatggctcggggcaattatggaaccaatttgtggaagaactctgggaaagaatggcaaagaacctattggtgagaaagatgggtcccagaatggtgtttccacagggtgggataaatctatggagaaccccaggtctacaatgggctggggagaataaatctccccctggatctccgcgacaatcacaacccaaggggttccccaagctcttttgggagaattttctcagcggggtccctctcgagtgggtgctcttcaactctccgagccgagaccaggagggattgggtgtcccgggtgcccaatgtgagacaacgagaatttctatactatacaaattctccagctccattgggggaaatgtggccgccccatatttagaggtctacgaggggcgcagtgggtggggcggggacacagtgccaaaaccaaatttttataactttcccaaaaacacagaatgtgctcttgagggggccagttgctacacaacagagcggttttcaattcccaaagagcaaattattccaacaaggggagggccaaaaagtataaaaacgcaaaaaaggaaacacagggcaaaaggaacagcccgcagatcgctggcacacaatagcccattattggacacgccaactgtcgcgggctcacaccacactcttgctgcaacatcgtgcttaatcaacggccaatcgtggacaatcatctttaaatgtcccccaccataaaacatatttctctcatctctggcgccaaccggggtcctccccgcaaatggcaaaaattgtacccaaaaaataatgaggcctgtcgtaaaaaaacggcgcatcgcacgtccacaacaagtcggtcccgtaacaaacgttgcgataaggccgcaaatggtgacaccgggcggtccctcacacacgcaacacaacaacagaggggggcgggcggcgcacaaaaaaaaataacccccccgggggaggggggccacagacaaatagtagcgcaccccaccggcttctgttaacgaaaggggggcccacagaatgagggcacgacaagaaatcaaagcaaacagcagacgcggtatacaacacagctgcagtcgggagcaaaagcaacaccgaggaagcgtggaagaaaacacaacacgcgtggtgagcagacgaaagaccgcagcaaaaacatc

SEQ ID NO: 711602 - DNA, 946 bp, Homo sapiens
  misc_feature (23)..(23): n is a, c, g, or t
  misc_feature (341)..(341): n is a, c, g, or t
  misc_feature (450)..(450): n is a, c, g, or t
  misc_feature (457)..(457): n is a, c, g, or t
  misc_feature (484)..(484): n is a, c, g, or t
  misc_feature (498)..(498): n is a, c, g, or t
  misc_feature (505)..(505): n is a, c, g, or t
  misc_feature (508)..(508): n is a, c, g, or t
  misc_feature (514)..(514): n is a, c, g, or t
  misc_feature (522)..(522): n is a, c, g, or t
  misc_feature (559)..(559): n is a, c, g, or t
  misc_feature (604)..(604): n is a, c, g, or t
  misc_feature (618)..(618): n is a, c, g, or t
  misc_feature (622)..(622): n is a, c, g, or t
  misc_feature (638)..(638): n is a, c, g, or t
  misc_feature (652)..(652): n is a, c, g, or t
  misc_feature (659)..(659): n is a, c, g, or t
  misc_feature (677)..(677): n is a, c, g, or t
  misc_feature (679)..(679): n is a, c, g, or t
  misc_feature (696)..(696): n is a, c, g, or t
  misc_feature (727)..(727): n is a, c, g, or t
  misc_feature (762)..(762): n is a, c, g, or t
  misc_feature (765)..(765): n is a, c, g, or t
  misc_feature (818)..(818): n is a, c, g, or t
  misc_feature (850)..(850): n is a, c, g, or t
  misc_feature (927)..(927): n is a, c, g, or t
taggtttccagccttttattcanacaaggactcaaaagaacacacgtcacccgctgacactgagcggtggggggaccttgtggaggaaggacacagcaggcttggccactgccctgaccagtgaccactcagggctgccccttccagagatgagcgtagggtggggtctgagcgccacccctaggccgtctgtgtgcagcgggagtgctgctgtcctggcgcccggcatcactgtgccagagtccccagcccaccctggcactggcagggttattatggggtggacttgcctgtgttgggggctcctgatcccaaaacatctaaagtcaggttccagagancaagccatggggacctgaccagcaaccggggacctccgtccactgtgcgggacggtgatgaaaagcaaagcagcactaagcggcctcctcagggtcagtcggttcatgncagctgncggatggtcatgtccggcttggtgatnttcacctccacctnggggttnttnatctanttagtaangttgtcacccatgatctttgggaggtaccggcctctnagccatcccgttccatcagcggtcatcacttgcagttctcaaggncatcttctcactgnacantgtcccttggaagttnatcaataagttctngacgttnaggattatggcctttacntnaaagaccagattctccngcgtgcctgaaggtggcctctcccgcggggncagcttgctccggcgccgcttctcctcaggcccanggncctgggggttgaccttggggttcccgcagccctggatgaccttggccgtgagngtgtccctgttgtcctggagagcgttgatggnctccgccagccacgtgtgcacgctgccgatgacactctccacacccgatgtaccccagaacttgtcggtgatgagcngcatggagtccaggaggtt

SEQ ID NO: 711603 - DNA, 830 bp, Homo sapiens
  misc_feature (368)..(368): n is a, c, g, or t
  misc_feature (435)..(435): n is a, c, g, or t
gccctgagcggagaagactcgaacggctcccacagtcgcgggcgtagagggaaagaatctccggactgtgaaattgtgaggggattcatgcgctaagacgtcctcttccctctgtcgcatcccatccacaggcacatcgtcttacatctcacaacaatgatctcgtggacatccatggtgtgatgtgaagcttgacgactgaccgcctagagttggcgccacgaggccatcctcaccgtctcgtcattccaagctaagctagctcgataagttgtggtacaaggcgtgcggagcgcaacgtgatgagaccccttcagcgtggagaagcctagccaggatagctagaggtaaactatttctaaggtccntcatagccaccttcggatgtccaatccactgactaagcttgggcatggatggctcataacctgacgntcagctataacgaaggcataagtggtcgacttgtaccgtggcgtagtcatatgactgttggcttcacagaggtccttgtcaagaacaccactctcctagtcagtgattccagaaggctagacgaccttccagaatctagctgaccttgaacgggtgtgccggctagccggggggattccttgttctcacgacacaactaacgacaacccttgtccccatcccttgccaaggaatgtcttgcacctttcaaggctggatcaaaccattctttgtggaggattgccggggtcctgctaggcttgtgtctaggcgaaaagggaactccttggaaccccctccaagtgtccggaccttggggaaaagaggcttgcacgtcttgggatggttatttgcag

SEQ ID NO: 711604 - DNA, 410 bp, Homo sapiens
aaccccttgccttcccggggggtttttttttggggaggatgtttcctggttccatgttccttttccttgtgggaactttgcctggtagcctttttgcctgctttgttttccctacttaagaaaaaggggtttccattggctgatagaatatttttttttttgggccaaacttttttttgaagggttttgagggggtgaaggttggttaggggttagcccaattttttattttggctctgaaaaaatgttttttttttaacgtatttggtattcccatatagggctttaaaaatggggatgtttgctgtttaatgtgccctgaaccttttaccttaatattggactgttttaccttaatactgcctgcttttttttttgaattggataaagaatgtccttagccctttgga

SEQ ID NO: 711605 - DNA, 204 bp, Homo sapiens
cccgccccggcccaggtttgcagctcgggcgcagtcatcctcatgctctccctgggactagagttcgcattcctttacagaggatcatactgcgactgtaagtgcgttcgtagtctgattttgctccgctcactagtacttaggactgctaagtccgtgggctatctattagaatgactgcgccggttggccttcatgtcgggc

SEQ ID NO: 711606 - DNA, 301 bp, Homo sapiens
gtttatgatctatttgtagattaggattaaaatgggtttaatccctttttaaggctgtgtgaatttttttaaacaagaaccctttgcaatatggattttttagagattaaacccattataacttattagcagtcgcgagcccatgttcatatagtcaatgtaaaaataccctaatgagtatttggtaaatccccgtaggcttttccccttagcataattttgtgttggccaattaagttccaattacctctttaattttggataatattccttggttaccaataaagtgccaaaagctcca

SEQ ID NO: 711607 - DNA, 700 bp, Homo sapiens
  misc_feature (700)..(700): n is a, c, g, or t
gagactctgcagggccagttagaggagaaggcccaggcatgctaggtgcacagtcagatgtgccttagcctcggcccaacgggagttggctgccttccgcaccaaggtacaagaccacagcaaggctgacatgatgagttggaaggcccagtgtggccctggggcctggcaagaggctgatagtgaaaaatagcctcatcagcagacttggaggaggaggtgtccatcctgaatcgccaggtcctggagaaggatgggggagagctaatggtagttgaaagctgtgctggtgatgtgccgatgtcatgagaatgacgccagaagctcggatggagacggcttgcgcctgctgcgaggcatgagacagccagcaacagtgccatgagctgcagaacgcatgctctgctctgcgggaggaggtgcatgagcctccggtgaggcggctgatgaaacacgcggtgtggcttcaggagaacctgcgggaggcagctgacctcgacatggctgagcgtgcggaggatgctgggccaagaattgaaggcgtggcacggagaagttcttcctagaaacgagcaggccctctccaccctgcagctcgagcacaccgagcacacaggccctggtgagtgagctgctgccagctaagcacctctgccagcagctgctggccgagcaggccgctgcgagaaacgccaccgtn

SEQ ID NO: 711608 - DNA, 279 bp, Homo sapiens
ttgggggggtttgttttatcccttaaaatttgttccccttagttttgtggggatgggggttttgggtttattaaccttgggggggtccccttccccccaacccccctttggtgagaacatcccccttgccggtgcagcctttttgccccgggtaaccataaaaaagctcctttccttttttctttttgacgttggccctcccatccaatgttagttttatatatttgggctgatgaaaatttttaatttgcttttaccaaaataaatgttcctgggtga

SEQ ID NO: 711609 - DNA, 160 bp, Homo sapiens
  misc_feature (100)..(100): n is a, c, g, or t
ggtccagattcactgtgagaccaatcctacctccatcgtaaccccactaaaacactcaccaatgactcaacctctgacccccatgcctcagtgatactcnctcaatagccatctgctgtagtatacccaaagacaaccatctacttgttcctggtggtgt

SEQ ID NO: 711610 - DNA, 196 bp, Homo sapiens
tatgaatcacacaccacaatactatgcgtattgaatttaagtataatattaagtatgcatggacctagagctaatgcagctcgcccctgagttggcgagctgctagtattgtggtgtgttgaattcaatacgaactcaggggcgagctgccttccttggatgtggcatagtattgtggtgtgttgaattcaatacg

SEQ ID NO: 711611 - DNA, 276 bp, Homo sapiens
cgctcgttacctctcctgagcagcctcctcttgtcctcctcacttcacgtcactcacgaccggttggtcgggacctcggtcggcggcgctggcggccttcagccggtcctgtgccttctccttccggccaagcttgatcttcactttgacggaccgagattcggattcggagccttcctcctcgccctcttcctcctcctcattctcctcgccttcactgtcatcctccttctcgattttctgccgcacgctggtgaagaccgatggctcaggaaa

SEQ ID NO: 711612 - DNA, 199 bp, Homo sapiens
tgctgctgctggtgctctcgcgagctcccctacggcgccgcagtgcgtgtgtctggccttggtgctggtgttcgccggtggcaacctttttttggtgctggtgtcctccgcgtggcccttcaccaggacagcctctcccgccgcgtacacctcctcaggcggccctgagccacagtcttcgcctgctgggtaccgagct

SEQ ID NO: 711613 - DNA, 434 bp, Homo sapiens
cacgtcaaaagttgtcagaacaaaaggctgaagctgcacaagctgcctttgaagatgctgtcatcacaaaggctgttgaaaacgcatcagttgatggcgatgaaattcctgaagcaatgatcgaagaagacgttcatcgtcaaatcgaccaatacttgggtcaattgcaacaacaaggcatttcacgtgacatgttcttccaaatctcaggtcaaactgaagatgacttgcacaagcaattcgaagaaggtgctgcaacacgtgtcaagacaaacttggtacttgaagccattgtgaaggctgaaggtatcgacccaactgaagaacaaatcactgaagaagtgaacaacttggctgcacaatacaacatgggtccagcacaaatccgtgcacattgtcagattcattgttgaagattgcatttcaattcagtt

SEQ ID NO: 711614 - DNA, 205 bp, Homo sapiens
  misc_feature (90)..(90): n is a, c, g, or t
agaggtgtttgctggggtgactctagcaggatctcagacgacagaagggagaggatggtttctcttctggcctcactaagggctaggganaccaggagcaaattccaacacggcttccatctctcaagcaaggagaagccaacttgtgtgacgtttagttccaaccaattatagtaacgtggacgaagggattgggccggctccc

SEQ ID NO: 711615 - DNA, 313 bp, Homo sapiens
ctgctgttctgctgcggatcctcatgagtgctatgccccattgtccaatgaaggtcagcctcttgtggaagagtgtcataatagaatctaccgttgatagctttttgagcagcttgcagagtacacattgcagaatgcgctattagcccgttacaccaggatagtatctcaagggtcaactccaactattgcagacgtctctagatacctatgaatagtgaacagctcatgttgataacttgctgactcactgagagtgccctgtgcagaagactatctatccgtggtcctgccagttatgagggttgcatgg

SEQ ID NO: 711616 - DNA, 1077 bp, Homo sapiens
ccacgcgtctgagaaaacaggagggaagacagtagaacacagagcctgaccacattttcttttttctctctgttgccggggctggagtgcagtggcacgatctcggttcactgtaacctccacctcccgggttcaagtgattcggcctcccgagttgctgggattacagacacccgccactatgcccggctgattttctttttttttcttttattgaaacggagtttggctcttgtggctcaggcacgaagtgcaatggcgtgatctcggctcactgcaacctccgacctcctgggttcaagcgattctcctgcctcagcctcccgagatagctgggattacacggtgcccgccacacattcctggctaatttctggtatttacacgtaagagacgggggttacacccaatgtaggccacaggcaggtctcaaactcgtgaccttgtgatccgacccgacttggcctcccaaagtgctggacatcacaggtgtgagaccatatgcgcctggccatgcccagctaatttctacggtatacacagtatacgacacgggtcacaccatgatcggccaggctgaacccttgaaatcccctggcaaccctgccttacaactctcccgattattcccaaagtgctacgagactccacaggtagttgagccaaacaatatacctggcccggaccaagggaacggactatgactctcacttgaccctcggtgaatctagacacgaccatagcagaccgtccccaacagtgtgcctggaggcactctacaccatgggcactagtagaagaccacaaaaccgggtagacacccggggaaccggccccataggcgcctcgggacgcgcacttctatcgcaacacgcaatggcgcaaaacgcgcggaacattgaacgaaacatatacagcgacaccgggagaaaacgatagatgtgatcagcccccacacaacggtggatgctgactaaccacaagcgatcaacgcgtgcgcaatctaacaccctggaccacctagaccccgcagcgacagacggcactcacaggaaaacaaccacaaccgatgacgcc

SEQ ID NO: 711617 - DNA, 497 bp, Homo sapiens
taaattttttttaaaaggggggggggggtttttcccccggggggaaaaccctggaaaccatttttggaaaattccctttttttgggggggggggtttttttttttccccccaaaaaaaaaccccttggtttccaaggttttttttttatttttaaaaaatttccaaaaatttttttttgggggggggggccattaaaaggtgggccccccccttaaggggaaaggggtttaaaaaaatttttttttttcccaatttgggggggggggggtttttgacacaaaaattgggggtttttccccccggttttttttaaaaggaaccccgggaaaataattggggttttttaaactttgggtttcttggggggaaaggggttttgggttttaaaaaaaattttgcccattattttttggtaaggtttaaaagggttttttttctttccctttttgggggggtttttttaaaaaaaagaaaaaaagggccctttttttattta

SEQ ID NO: 711618 - DNA, 146 bp, Homo sapiens
  misc_feature (106)..(106): n is a, c, g, or t
  misc_feature (141)..(141): n is a, c, g, or t
tggctgacggtcgactctacgacggactccccccaacgcgttggacttgttcaccccacctactacgggacaccgtgacgctgggtttacgacccgtcgtgacganacggttacgttttacccctacctgactgactgtgnttgtt

SEQ ID NO: 711619 - DNA, 283 bp, Homo sapiens
gccaggatgggagtgcagcccgggctgaggtgtagcagtcatctgataccatgacatcatgatgcagcttcttaggcacaggtgcggagacgatgccagtgcccctgggatgcaggcatgaggcgtatcagcacagagccgcagcggcctgtcaccttgcaagggacagtgtggggcttgccgatcttgttcgcccagtagcctctacgcacggggacgatggagagcttgtgcaggatgatggccccacggatggcggtggacaactccttggagcacttaa

SEQ ID NO: 711620 - DNA, 163 bp, Homo sapiens
tcgtcgttgttcgtgcaggtgaggcttactagaagtgtgaaaacgcaggcgttggattaaggcgacagcaactttctaggatagttcagtagaattcagaatttgttgaagatgactaggtgtactgtcgattacaggttgtgagccactgttgcccggccca

SEQ ID NO: 711621 - DNA, 885 bp, Homo sapiens
gtgctcctccctttctttttatactgacttcttttaaaattatttaacctatttttagtattcaattttaatttatctattttagtttggctatatcactcatatttttagtgatggctctataaatctcatagaaattcattatttcatagtctgctgagaatcactattttacaaattcaaatggaaggtagaaacattaccataatattggtttataaccctcacacctttatgtgatactcatatatatttctgtacattgaaaacttcatcagatgcttataatttttactttgtcagaggtaaggacttcagggagaaaattagcctattttatggacctataatatttattatggctggtggctctttatgccaaagctaccatttggcctggacatcagcaagaagaatagagaactgatgcacctcttttttttatcagatgagttttttctaactgggaccataaaccaggtcaaagctctagttggctaaattttgaatcgatcaaagttttataaatattccttaataactctcttccttcttttcctcatcctgatctgatgcatgtgcctgtacacgtacacaattcacccaatatactcaattgacacattatattctatatagaatgtgcgttctcaacttttctgtttgccactattttaatctcctttggtaacttgggtcttaattggttttaccgtttgtgtgaccttttctgcgctctggaatattgccaatcagagctgcagggggcgtcacaattaacggggccttaaccccagaacctggcggggcttcggaacaagggagagacgcttcgttgttaagcaccatttgggtggccaccgagcatctttgcccaacacgctc

SEQ ID NO: 711622 - DNA, 449 bp, Homo sapiens
  misc_feature (425)..(425): n is a, c, g, or t
agagtcaaacagtgccccaacgaagttgacaatttgggcctgctgggatccatgtagtgagcactaggctgctctttggccaaggtcttcataagtgattaattttctcattatctgtcctctagccccacgccctgatttatatcgtggcaaaggaagaacttgaggtctagaccaaccaaatctgtgaattaaagctgttatttttttctctgcaagggcgcttagcttcaggtctgggctatgtgcagaacctaagcaggctgtgagagttagaagaggcagtattacatgttcggcccagaacaccatgggaaaaggtctatgtagtgtatcttagtggtctggctagctgtctctgggccaggctgacttctgatgtccacatttagcgtcgtacctgaaccctgttgctgaattgcagncctgttctcctgtaactattatat

SEQ ID NO: 711623 - DNA, 240 bp, Homo sapiens
tttttcccccctccccatcctcatcagccggatcgggggctgtgcagtgtggtcagcatggtgaaaaaagtcatttcctcgttgggcagtattcctttttatttttcattaccctggaaatgttatttttgctgtatcatccgggctcaacgttttagtttgtcagggtccccttttttttggaaagaatttggttaacttgacattccatgggccgctaataaaaaatattttgaaaga

SEQ ID NO: 711624 - DNA, 146 bp, Homo sapiens
cttatggtggatgggctgagcccggcagtcaagtatatagtgagctataatcatgccactgaactccagcctgggtgtcagagtgagaccctgtctcaaaaaacaaacaaacaaaggcacagagaagttaactaacttgcctgtgg

SEQ ID NO: 711625 - DNA, 475 bp, Homo sapiens
acctcctaccccacggaatcataaaatgggaagttggtcaaaatcacagatggctggcggggcacggtggctcacacctgtagtcctagcacttggggaggccgaagagggcagatcccttgaacccaggagttcaaaaccagcctggataacaaggcaaaaccccatctctacaaaatagttcgctgcgtgtggtggtgcacgcatgtggttccagctactcaggaggctgaggcaggaggatcacttgagcctgggaggtctaggctgcagtgagccgggacgatgccactgcactccagcctgggcaacagagtgagaccctgtcccagcactctgggcggcagaggagcccagttggagatcagcctgggtaatatagtgaaacttgatctctacaaaaaaaggagaaaaagaaatagcctggtgtggtggtgcgcacctgtagtcccagttactgggaatgctgaggtgg

SEQ ID NO: 711626 - DNA, 775 bp, Homo sapiens
accatgcgtcgggcgcgcgggcccagataggtatagtgatagcatgggtcataggctgttttcgctaggagatgcctggctcatgacttagtgctctggatgttctgcactcgaattagagaaatacgcccgggggaaaatccgtagcgtactagaacataatccagaatggcagttcatgaggtcgataactggaatctatcaactaggagttccaagtcgagacgtcggatattcagacacttacagtcccgcgggcctggaattcgactggactttcccctagttcgtcaggggctacagccctaagaccgaaaccgtacggccacaaattccatcttcgactaatcagtacttcagtcgggcgttaagatcctaagctcttcattcccagcaagcacatttcctcgggccgtatcgcggacatgcacccggacggttacatcgggactacacccggatgcgatacagccagcattgaagacgatcctaatcagtctggtagggctcagttcgatgttctcctagacaggcaggtacatattcaataactctttccatgactttgcagaacgcccttcggcttcgcaagcggaaacagttcctacatagctagcaagaaccgctccagtaaggcctgcgagtgacgtatatggactgcccccgcgaccttaccacacagttcgaacgaacccagtataccataacaactctagacaactctcggatcggaactcgaaccgcccccacaagctgggtttcaagcccaaagcgc

SEQ ID NO: 711627 - DNA, 231 bp, Homo sapiens
gttcggcacgaggtacaacaaacccctgtgacatgcaatttacctatatagcaaacatacacatgtatccctgaacctaaaatataacttaaaaataaaaatattttcttttcattttttgtattaccagtttagtgtcctataatacctctcattaagcctgttgcatagtctccaagctgtatttcatgcattccatattccccaaccaatatatctccacgtcggtac

SEQ ID NO: 711628 - DNA, 228 bp, Homo sapiens
acaagagtggtcatggcccaggatgtgtagccttgagttagatcaccttgtacgcactctcaaccacctgcttgtgcacctctttccacatgtgccgtatctatgtcagtcccataaatctgggtgcagagtcttgagcggagacaccagataaacattatgctttactcctatacagcgcacactacgactctccatgattccccaaggaactcaccctatgacagc

SEQ ID NO: 711629 - DNA, 127 bp, Homo sapiens
tcacggcaacctcagactcccggggtcacaattctccggcctcagcctcccgagtagctggggattacagggcgtgtgccaccacctcggtggcatggaaatgagaccccgtctggggtaccgagct

SEQ ID NO: 711630 - DNA, 918 bp, Homo sapiens
ggagagagagagagagagagagagagagagagagagagagagagagagagagagagagagagagagagagagagagagagagagagaggagcgcgctagagagacgcgcgcgcgctctcgtgggggccccccccgctgctgctacgtttcttcatgcttgtgttgtgtcgtcgttgagcagacgagatatgtcttcttcttgctgtgtagtatcatctctgcgctgctgttgtgtcggtcctcgtgtgtgtgtgtgtgtgtgtcgtaggtgtgtgctgctctcttctttttctctcacaggtcctatatcatgtgatgagcagcatcctcggtggtgagtcgtcgtcttctcttgtgggcggcggcgtattgctgctggctagctagtagctacaaagaggagtagtatactcttctttgttgtagtagtcgtagtactgacgattcggacacagcaggaggaggtactatttttcttctcttctccgtcggtatagtatcctacgaggaagagagtatacacacacaacatcatccatcatccaacgaagaacgaggtgggtaggaagcgtcttcttcttctactaggtagttgttaggtatgtctgtctgtcgtcagtagtgactgtctctctcttcatcgtaaatagctgtagtcgagtcggtcatcgatgggggggcgcgctcgctggtagaggatgtagcgagcgatcgattgtttctcccggccgacgtaggtagattgtaagcggccgcgtgtccttcattcattatgaagtagtcatagatcaccatgtggggcacaaagaaggagcgcttttatatggtttggtttatttatactaactaggctgttcctcgttgctgccgtgtggaggtagttaatagtgaaggagcacgaagaagcaggagaagaac

SEQ ID NO: 711631 - DNA, 582 bp, Homo sapiens
gctgttacagagatgtcttctttccttaaacgtcatgaggcaacttctgctagcttcgaactgttttgttgcctcaaaataaaaagagattgaggaagttcgttgtaggatggccaacacaagcgaatatcatgacacgatcatgaagcaaactgggacacacgtattgccaagcataatctggacacaagggctaattccctgtatcaactctacacgagatgttaactaaaatcatgatctagaagacaacttacaacacgaaggacgggtacaagggactctgaagaacctcagttataagacaggaaattctacactggctcaggtacattcactagtgacatacagagatgccctaaatcttaataatacgtaatcagacgggtacaatggaagaaagattcaccaacagggggtagattcgccgtagtgtgacaagaagcaaatttgtgaaccactccgtacatatcatatagacagttggtgttgtcacaagttatggaagatcgtaaacttttcgtcgctatctcacatagacagggtacgctggggaacaatggcagcatttatattagagac

SEQ ID NO: 711632 - DNA, 335 bp, Homo sapiens
gggaagggagaagcccacttacccatttatgatttgaaagtcggaaatttgtaccatttgttggagtctatgcacatttaaaaaatatcatatagtaaatgcacacatgccacgtattttataaagattaataacacacctactcttacctggcggtttacttaacttactgttttgagtcctaaacttagagatgctaatgcttatatataatctaaccaaagagttacacagtctggttttagttctagaactgttattttcttggtgattataaatgctgagtttggaatatattgcgcaaaagaagtttcattttggttacttagacctaa

SEQ ID NO: 711633 - DNA, 435 bp, Homo sapiens
gaccaagtacatgtcagacggatacagataacaccttacccggtctaggttatgaacacccggtccaggttgaacaagacaccttctacacggccagtgccgtactggcacgagcagacgaactcagctactttgggcaggaggggatgacggaagtgcagtgtggaaaggtggccttccagttccagtgctcctcggaacagcaccaacgggactggggtccaggatgggcagatccctgagctcattttctatgcctgaggtgcccggggaaggctgcagcaggtcagcgagtgagtggaggggaagtcaagatgctaactgcttcttgacaccatgaaaggctgctcttaactttgtctctctttgacatgtagtcggctgaagcttgactgtgtagagacattttccacacagccagaaccacaaatatcg

SEQ ID NO: 711634 - DNA, 1506 bp, Homo sapiens
  misc_feature (406)..(406): n is a, c, g, or t
  misc_feature (516)..(516): n is a, c, g, or t
tggaaagggatttccactcttggctgcccaggttgaagtgctagtgggctcaatctcgggtcagtggaaacaactcgcgcctccggggtcaaggttgattcgttccgtgcctttgagggcctcctgtgtagtagtacgacgggggatctaacagggctgcctataccagcaagtgctgcgggataattctgtgcggtactctattgagctaagaataaaggggatcttcccccactgtgttgggccgggcgtgtggtcatcaacacttctgtaggcgctcatctccaccccgtggccgtgcgggccctcccaaaagtgggctggaaattctaacggaggcgttgaagccgtcgcagcgccgcgggcaccccttggacaagatgtcctgcatcgtggagtcaggggntgagggtagcgtagtccaacagggggcatcacagtgcgggggacagaagaactggggcccacaggcgggaaggagagagaaaggactctaagcaagtgcactacctcggngggaaaacactgggggtgtgctcccacggagcacaggagagaaagcagcctaggggaccctcttcggcgaggagcaaaaccttccgatgccatggatattcagagtcatctggacccgaggcaagacgtacctgagtacaacactaaaccaagtgggtgataaacaccccctcactgggggggccggccattgtaatggtagcacaaatggtagcacgtatgtcaccataggggcaccgttggttataacaccccacgagagggggcgggagtaaccacccaacccccctttgtgagggaaagccctctggtggggacaacgagcgacaaggagtctctttccagtcgaggctggcacatccaaccctgggagtccgtccgtgggaaaagaggacgcatgcaccctaaggcaaaagatgtgggcgagacccgttgggaagcaaacacaggaaactcgtcagtcggtgggtcggtggggcgacaacgcctcaacaacgtatcaaccaccctttacgcacagtagaaagggcccatcaaacggaggagaggggagtccatccacgacacctatttgagagaccatccatgacaaccatccgtgtggggaggaaaaagataacaccactaagtaaggtgaggagagcaaacgacccacggtgttaccacctaccaagcaagcgccacaataggatccccacgaatgacaggcaaacgcacagaggaggaacgaagagcaccaccaccgagcctccccgaggcacgcgtgtgtgacacacagaggagacaacggccagagaggcggcggcgccaaaccaggggaaagcaacaacacaagacagaaaagatgggcaacgccccgacgtcgtgccgaacaggcggcactagcgacacacggttgtacaaaagagggtggccaaacatgcacaggctcaaccacgcaatgtgaagtggtcacacgggacaatacagacaacaagagccaaaaataca

SEQ ID NO: 711635 - DNA, 182 bp, Homo sapiens
gttcttcggagagcacctctttggagtctgatcttttcccgacgtctacttccctgagtcccttctaccttcggccacctccttctgcggcaccagctgtttgacactggatttcagaatgcgctggagaaggacagtttttttaacctggatgtaagcattttcccagagactcaagtaag

SEQ ID NO: 711636 - DNA, 368 bp, Homo sapiens
agaggaccaggtctgtatacagaatgattatcgagacatccgatacagagcagcagacgtgtgtggacagtgctaaaatgcaggactcaaacaggccattaatgtggacaaaagtcattcgaagaggaggcacacgtggtgtctgggaaaccattttatgtcctataatgcactgtaacaagggagtttgacaatgggcaccttctcttaggacatttgacaaggtaagtaggatattcataatagtgaatgctgaagatctagtgagctaccaagtgatttcataaaatgaaagcgtaatgctcctttgccattatgattatatagctttatattccaaactcaaattattttgtgccattatgata

SEQ ID NO: 711637 - DNA, 468 bp, Homo sapiens
agaagctttactctcgaaagcggggttagcatgagctatatatgtctgcggacagactgggtggtctagaacaggtatccccaaagccccaggccatagaccggtactgacctgtgtcctgttagaacccaggctgcacagcaggaggtgagtggcggctgagtgagcattaccacctgagctccacctcctgtcacatcagcagtggcattagattctcataggcatgcgtactctattgtgaaccgtgcaatgcagggatctaggttgtacacttcttatgagaatcttaactattgcctgatgatctgaagtggaacagtttcatcccaaaaccaaaccactaccggcaccccacctccgtccatggaaaaattgtcttccatgaagccattccttggtgccaaaaagattggggactgctggtctagaacgagctcaccaagaccctgggaccagcacaacctg

SEQ ID NO: 711638 - DNA, 652 bp, Homo sapiens
cattagttatcattagttaataataaaagagaaatatggaaattatttacatgacgaaagattccagaacttcaggggaaggggcagcatcatgtggaggccattccaatagtgacttattccagtctacgtacttcccaagaatgtcaccatctctaaataggaaataatcctggtcatctagaactacttgggtgcctccatattcggggagaagaactttatctccaactttcacgctaacgggttgaatctctccaccctttcctttagaacccgatccaacagcgactacggtggctggcaatacttttccttgagatttttctgggaagcataaggcctccttgggtgcacagtttcagcagcactcctttacaaccaatactcggtcaaagagtggaagaaactttctaaacgctggtccgggccattattccctcggctaaaagtcgtactcggctctagtgtagcgccgaaagagactcgcagtccggcccgggaaggaactcaatgaaaagaattaatcttacagtttaaatgtcgcagatttccattattgtatggatttcgcaacttaggatgttctggagcccatggtccattgcgatgcgtcaactctggttattcacactctctcggtgaaaaccga

SEQ ID NO: 711639 - DNA, 592 bp, Homo sapiens
tttagtttctctacactgtctgtaacctgtagtaggctctgacctagtcaggctggaagcgtcaggatatctttgcttcgtgctggtgagggctggccctaaacatcgcacctaatcctttcaaaatcagcccggcaaaagctagactctcctcgtgtctacggcatctcttatgatcataggtgccatacaaggaccccaatttgtgcttcagggggataatctccttctctcggatcattgtgatggatgctggaacctcagggtatggagctcacatcagttcatcatgggtgggtgtagagaattcggtgacatgccctagtgctgagccttggctgggccatgagagtctgtatactctaaaaagcattgcagccatgggtgccccatcttctgaccaagcagacagcacgaagccatcccacccaaagaaccccccaaattcaacgagtggatgtgggccctgtcacagggtagacagaacgctattaagattaacttcttttcattggcccacagtactccccagcaaaaatgattggttttgagatcccctatagttttaaactaccctcctctttaacactgg

SEQ ID NO: 711640 - DNA, 188 bp, Homo sapiens
atctgggatggtcagaacatttagattgtcctgtaatgcctctagtcttacacctatttccctcttctcctgctcactgcttcatagaagagactgcaaatgccactttatgttgagacagtgctgcctgcagtgccagggaatgcactacctggggcttgcagccctttgaggcagcatcccgggct

SEQ ID NO: 711641 - DNA, 175 bp, Homo sapiens
ctggttcgttatgacattaacactattctcaccagacctcctagtgcgacccagacaattataccctagccaacccctcaaacacccctccccacatcaagcccgaatgatatttcctacttcgcctacacaattctccgatcctgtcccttaacgaactacggaggcgtccttg

SEQ ID NO: 711642 - DNA, 309 bp, Homo sapiens
tgcaagggagccacacagcaggaggtgagcggtgtcgagtgagggagtgagggaagcttcgtctgtatttacagccactcccctttgctcacattcccgcctgagctccaccttctcagatgagcagcagcattagatgctcataggagaacgcaccctgttgtgaaccgtgcatgtgagggatcgaggttgcgctgtccttatgagaatctaatacctattgatctgtcactttctcccatcacgctcaggtgggaccatccagttgcaggaaaacaagcttaacaacgcccactgattctacattat

SEQ ID NO: 711643 - DNA, 556 bp, Homo sapiens
aggaatacagctatgacttacttttttaggattgtgacgatgatcttcacagggtaggcattatggcacatagctgaagtccaaaatgactaaaaagattctgagttctctttctgtcctgttctcaggttgaggttggctattgattgactgtgttgactccaccagtcctgacttataaaaccctagcggggagatagatccggtgtccaaaaaaaaaaacactggtgtacaaaacatgtctaatcaggtttcaagccaaacaaactcatccctgagggaagcttactcattgaggtattggggagttgcgctggcatgtgaggaagtgccctggggaaaaaaacgcagaggtgtgggaccaatcctgactgtgcacacgttttccgccatgtgcgggtttgaggcaccacggaggtccctgcaggagccctgggaaaggtacatccagagaggggagaagaggacagagcaaaactaggaacaaaactgggcttgaggactgtggaacagctgactattgaggaacagaagaactgactgaaagccaatgtgt

SEQ ID NO: 711644 - DNA, 290 bp, Homo sapiens
cccctttgtgcttgataggactgctggttttgactctcggcatcatgctgctgatcgataatttgcctgctcatcatattagccttgctgttgatcatagcctgactgctggtcatctgaatcttgttgaccatcgtctggctggtcataggaaggtgctcttccaccttggcttcctgataattccatgttttgcagcaatccctggttattatatggtagctggctatataagctctgcttatgattctcataagcaccataggactgtgaataacctgactgactta

SEQ ID NO: 711645 - DNA, 375 bp, Homo sapiens
gcaccatcttgttaaaacataaaagatcatgcagagtccacttaaaagcttaccaaatatctcattgtacttaaaataaaagctcaaatttcagcaatgcctagaaggcagcgaggagtggataggtattagaatggctgctgatgtggattgcctggatttaaatctttttcttccttttttttccccgccatgacaggatctcactctgagcgatactcaggctggagtgcagtgggccaatcatggctcgctctaacctctgattcccagtctcaagcaatcctcccacctcagcctcccaagtagctggtattacaggcatgcaccaccacacctggctaattttgtatatttagtagacaaagggaaaca

SEQ ID NO: 711646 - DNA, 1735 bp, Homo sapiens
aaagctgagtcgtgggcacctgagggactacctaccactgctcccggctgtgccatcgccaccagctcccagcctcctgctcagacccgggacagcccctccatggcccccgagatggaccagttctacaggtccaccatggccatctacaagagcatcatggagcagtttaaccccgccctggagaacctggtgtacctgggcaacaactacctgcgtgccttccacgctctgtccgaggcggccgaggtctacttcagtgccatccagaagattggggagcgtgccctgcagagccccacctcacagattctgggggagatcttggtgcagatgtctgacacccagcggcacttgaactctgacctggaggtggtggtgcagacattccatggaggcctgctgcagcacatggagaagaacaccaagctggacatgcagttcatcaaagacagccgccagcactatgagctcgagtaccgccaccgagcggccaacctggagaagtgcatgtctgagctgtggcgcatggagcgcaagagagacaagaacgtgcgggagatgaaggagagtgtgaaccggctgcacgcacagatgcaggccttcgtgtctgagagtcagcgggcggctgaattggaagagaagcggcgctatcgcttcctagcagagaagcacctgctactttccaacaccttcctgcagttcttcggccggatgttagctgatggacgcctggttgtttccactctttggctgtcatgaccactgctgcgctgagcatccatgtacgagtcttcatgtggacatatgttttcatctctcttgggtatataagagtagaattgtggggccatatggtaactctatgtttaactgtttgtggaacttccagaccgttttccggagtgtttccgtgtccatcagcagtttatgagggttccagttgtttcacgtcctcgctactttccaacaccttcctgcagttcttcggccggatgttagctgatggacgcctggttgtttccactctttggctgtcatgaccactgctgcgctgagcatccatgtacgagtcttcatgtggacatatgttttcatctctctctcaaaaaaagaaggcagccttagaataagatttaaagaactctaggtgcccgggcacggtaaattgtctttcttattcatcttcgctaattagtctttgcttagtccaagtctagtcagtaacgtgccttcccacctcatccttagcttctctcgtttactgcagctgtgcaaatgtatctccaggataaattcctagaagtggaattggtaagcccaagaatatagtcattggttgcaccagtttacacttccatcagtgatgtatgagtttctgtgcttctgcaccccttgacaacagtgtatgagcaaactttctgatcttggctaattagaaaggtaaaaatggtatctcggtgtggctttacctcatacttgtcttaaacgcgagcttgacatcttttcatgtttcaaagccattggattttctgtgctgtgacatgccagtatcttttcatccacttattaatttgtaggagctcttgatatgttactgaaaccagctttttcttggtgatgagttgcaaatacaatagccagtttgccattatcatttgcctgtgttatgattggttttgctatacaaaaacattatttttatttagtaaaatgtatcggtcttttcaagttt

SEQ ID NO: 711647 - DNA, 1225 bp, Homo sapiens
gacccacgcgtcgcttaaatgccatcgaaaggttcttagaaactgactttaagcaataatgacacgtagcacaactgttcttgaatgatgtcattctcccttaacgtggttctgtaacatcgactgaggcaaaacaaaacttggttctctgcgctcattctcacttttacttcttctactcttacttctctcttgacgacagcagctccttgaccctgctcgcccagtgctggcacgtgcaactggcacagatctcgcactcgactgcacacccgtctgtcctacctgggctctcacacgcacgactctctccctcgcctcacgcccctccacttacacgcgcgtgcatccacccgatgcctccgcgcctacactcccccctgctactcgtctctagttcacgcagtcggcggcttctcaccccactgcctctgcgcgcacggcctggctccttgcacactccttgacctccgtgcatcgcacccacccgctggaccatcccaaaagctgctgatctaccaggctgatagaggccaccactgcccagccaatgctcactcttcactattacaagctcacacactttccactgaactctcacacaagctgaggaccatgcatactatcctcgctccgccatgcccgctttcttcctttaccgcgacacctaacaacaggcccccactacttcacaccacttccactcttacctttacacgttctacaccgcgaacttccccacgaactccaccatataagctggtcccacactccgctccagcccccggacttcacctctgactacctgcttttccgaccttcgcttaccacccggcccacacccgccccgcgtcccctcgcaccctccaccctcacaccccaccctcctgcctcgcaggcttacctgccttcccaccgctccctccgcctttcgatccaaccccgacccacctccgcaaccccaacctcgcaccacatctaccccgaacgcccagcagcccgcaccctccaaactcccaaacccaccccccgagcacaggaccggggccggcaccgacccagcacacaatagtgacatccaaaacacacgaccaagtaacacagcacacagaacaagaccacaagcaagaaaccaccaccaacacgcgacataccgaaaaaacgaaccagagtgaaccgcgaaaacaaacacgtagagaaagaaaagactacaagaaacccccaa

SEQ ID NO: 711648 - DNA, 289 bp, Homo sapiens
cccgttgcagatatcctaagccaaagcctatcagagtgaggcctaactcgcctcatttctgtgaagacagagaggtgaggaagctgcggaagaaaagttggttcatgaggtttaaggaaataagctgtctctgtaacataaaagtgcaaagtgaagcagcaagtactagtggagaagctgcagcaagtcatccagaagatctagctaatgccaggcatggtggctcgtaattgatcatggtgtctatgatcccaccactctgggaggccagggcaggaggattgcttga

SEQ ID NO: 711649 - DNA, 204 bp, Homo sapiens
ctccacccggagggtgtgggggaggttgtgtcagtcgcagagaatgctctgtgggagagaatgacaggaacttgacatgatcaatgttacagtacagtaggaacagaggcagccagccaatttggcacagttaacggcaagtacgtcaagccattcactcttcccgaagccggggatgccaacggtccagcacagcacctttaa

SEQ ID NO: 711650 - DNA, 686 bp, Homo sapiens
tggattagttgaacgtctcctcatgaaatctgaaggtctgtatattgattgagactatctaaactcataccgtgtatgaattaagctgtaaggactgtattgctctggttgtatacttttgcttttcaaattatagttctatcttctgtataactgatttataacaggtttgtacatttcttaatactcatgtcaatttgagaacaacaggacatatgaggttttcgcgatttattagtgaaacttccgtttgaaaaactgcttgagttatgatctctgattcattgtccatttctactaccagagtattagctagggccttatgaatttctgtatatgaaattatatcttcgtcctattaagatctagtcacggaatgtcatttcatgcataagagctaaggtaatattgcgaatgccatatattcaaaaaatgctcaaacgataattttctttgactgatttatgttcaaataatattcaatatgcatattatctttgaaaaagttaagatgtttctttaatcttcaagaaatcatgctacacttaacttctcctagaagctaatctataccataatattttcaatattcacaagatattaaattaccgaatttttcaaattattgtgtagttaaatgaacaaaaatgattctctcccaaagaaagacacatttgaaatactcc

SEQ ID NO: 711651 - DNA, 109 bp, Homo sapiens
agggtaaaagaacgccccttgaacccttattctggttcaaggcggtttcttgagaaaaaacgaaccccttgtaaccaataattctgcttcagggggtttccttaatgta

SEQ ID NO: 711652 - DNA, 775 bp, Homo sapiens
  misc_feature (86)..(86): n is a, c, g, or t
  misc_feature (100)..(100): n is a, c, g, or t
  misc_feature (109)..(109): n is a, c, g, or t
  misc_feature (115)..(115): n is a, c, g, or t
  misc_feature (120)..(121): n is a, c, g, or t
  misc_feature (143)..(143): n is a, c, g, or t
  misc_feature (148)..(148): n is a, c, g, or t
  misc_feature (164)..(164): n is a, c, g, or t
  misc_feature (169)..(169): n is a, c, g, or t
  misc_feature (171)..(171): n is a, c, g, or t
  misc_feature (193)..(193): n is a, c, g, or t
  misc_feature (196)..(196): n is a, c, g, or t
  misc_feature (200)..(200): n is a, c, g, or t
  misc_feature (215)..(215): n is a, c, g, or t
  misc_feature (218)..(218): n is a, c, g, or t
  misc_feature (268)..(268): n is a, c, g, or t
  misc_feature (281)..(281): n is a, c, g, or t
  misc_feature (308)..(308): n is a, c, g, or t
  misc_feature (315)..(315): n is a, c, g, or t
  misc_feature (339)..(339): n is a, c, g, or t
  misc_feature (395)..(395): n is a, c, g, or t
  misc_feature (399)..(399): n is a, c, g, or t
  misc_feature (403)..(404): n is a, c, g, or t
  misc_feature (408)..(408): n is a, c, g, or t
  misc_feature (413)..(413): n is a, c, g, or t
  misc_feature (420)..(420): n is a, c, g, or t
  misc_feature (427)..(427): n is a, c, g, or t
  misc_feature (430)..(430): n is a, c, g, or t
  misc_feature (437)..(437): n is a, c, g, or t
  misc_feature (441)..(441): n is a, c, g, or t
  misc_feature (444)..(444): n is a, c, g, or t
  misc_feature (476)..(476): n is a, c, g, or t
  misc_feature (756)..(756): n is a, c, g, or t
tttaaaattcaaaaagaaaaaaaagaaaaaaagacgatggccccggaaggaatgcacaatttgttttagtttacagcacagagatntttctctcaatggnaatagtgcncttggnttcannaataagtgaaggaaaaaagatnttgcncattagaagaactgangggangngtagggagtccaagtaaaaaangangganaagataagcacacanggnaacgcgtccaagtaggaatggtcttccagtctccatggcatccacatgcnactggcgtaagtnccagatcttgaggaagctatcccaggnccctgtngccacagccatgccatcgtcagtnacgcccaggcagctgacgcggttgtcatgcccagccaagacacctgcccggtcggntttnagtnnatcncagangttgcantaaaaanaantcgtacncagnaangaggaggcgcccgctcttggagaaggagacanaggtgatcccgcagatgatgttgtcatgggagtaagtcatgagctcctggtcagcacgaaggtcaaacagcctgcaggtggcgtcgtctgagccaatgtgcaaatgcattgccatttggaaagaagcaaatggcattgatgtcagactcgtggccagtgaaggtctgccggcacatgccttctcgcacatcccagagtttggctgaagcatcacaagcaccagagacgaacagtctggtgtcaggagcaagagaaaggctcatgacatctccagtgtgtncggtaaacgtggtcgtctg

SEQ ID NO: 711653 - DNA, 883 bp, Homo sapiens
tcccaactctcctttttttaaacggggggaagagggcccggggccccccccctaacctttggcgcccttagaaaaaaccggggtccaaggggtcttgtcccctccctctctctctatagaagggggctctccgtccccctcctccgagggactcccggttcggcctatttccccccgttcgtgaggagcagtgtggccacagagcggcaactagttggcagtagtgaatgggtcttagtcaccccacccccagcgtatattacacagccactcctttgtgctcaacaaagaatctctcaatgtgtggcccaagaaatagacaacacagagggagagagaataaaacaggaacacacccaccgaggggttcacccaccaagctgggtgaggaggaatgcgccaaggaacaccccattaatagttccctcttataagaaggaggagcgcctcaaaggacgaattttaagtaaagttataataaagggcacgccttccacaccaacagaaggtacttgctaaaacccaaacccggagaacaacagacgtggagaacagaaaaccacaagaccaaaaggagcgagaataaaaacggacttactatcgaggaagaagagggcacataagagcacccacccaccctattagggaacccactgttgatcagaagcgggaacaacaaatgagggggcctcccaaaagagaacacgtgaagaggagcgccccatataaaattattcacccccctatattatggctacaaaaccaggcatacacatgacagggggacccccaatcacaagtagaaaacacccataaagggagacaacccctataaaaacgcccaaacaaccttggtggcagatgaacatattaagcccccggg

SEQ ID NO: 711654 - DNA, 1298 bp, Homo sapiens
tctctctccacccccgcgacccacggggggggccccggggggcaaggttaacacagggcccccacacagcgggggggggggggggggggggggaccacacacacacccgggagcgccggacatttgtgtgaaacaaaataggtctcccgccccacacacacatcccacaccacacacacaacgaagccgcacacgagacccgggcgaacaacgtgagggcgccggccacacggggagccacatcccccaccccgtggtggggaccagcgagccaacaacaatgcccggggagcacaaactcaacagaaccacaccacaggggaactccaccccctccaacaacagcgggatatcccaccctccaacccggggaggcacaagggggaaacacccacgaaccccacagggagatgcggcccaccagtgggacacacacacacagagagaaaaaagaggaacaaaaaacaaacaaaacaaaaaaagaggaaaacaaagaagcagaaaagtaaaaacgaggcccacgggaagcaccacaacactacacacacgcacagagaggaaccagggggaacaccacacgcggcaacaacacaccacacaaaagacccaatagaagaaaaaaaaaaaaaacaaaaaaaaaaaacaaaaacaaaaaaccaaacaacaagacaaaaaaaaaaaacaacagtggtgtgagatccacccccacaaccaacaaaccacgcaaaacaacgacacgcaacaaccacaagcaataacgaccaacaaccaacacaaaaacaacacagagaacataacacaccagtaggagataccaaccaacactcaaaaataacaaacaccacataggatacgacgacacacagagttgacacaccccccaaccacacaaacaaaaagaaacaaaaaaaagaggaagacaaaaacaaaaagaaaaaagacacaaaaaaaaaagaagacccaacaacagacaaaaaaaagcaacaacaaaacacaaaaaccacataaaaaagaaaaaaagacacaaaagagaaaaaaaaagaaaaaaaacaacacacaaacaggaagagaaaaaccacacagaaaaagaacaaccatgattaacaacaacaaggaggcaacaacacacctcggaaacacacaacagaaacatacacaccacagaacaatatgatacgaacgacaacaacaaatagaaaaaaaaacaaaacacacacaaggtgaaacacaccacaacaacgaggaacaacaaaacaaacagacacacacaacaaagaaacaaaacaacaagaacacac

SEQ ID NO: 711655 - DNA, 573 bp, Homo sapiens
tcgggacgtggagacgccggggtcccgagcagcgggcgggccgcgggcccaggtggggatgcaccgccgcggggtgggagctggcgccatcgccaagaagaaacttgcagaggccaagtataaggagcgagggacggtcttggactgaggaccagactagcccagatgtcaaagcagttggacatgatcaagagcaaacctggaggaattggccagcaaacacaagcaggagatccggaagaatcctgagttccgtgtgcagttccaggacatgtgtgcaaccattggcgtggatccgctggcctctggacaaaggcatcaggtctgagcatgctggggcgtgggggacttctattacgaaactaggtgtcacattatcgaaagatgtgcctggacgctgaaagcatcggacatggacggtctgatacctttgtgaggaacctacaatcaaccaggtgtttgcacgggaaggggcaagttcgaccatagatgtcagtcaagatgacctgatcagacgccatcaaacgaaaactaaaggcaacttgtcacatggcttcggcatcatccctgtgg

SEQ ID NO: 711656 - DNA, 274 bp, Homo sapiens
gagttcattttacttggagttacttgagctgcttggatgtttatatgcatgtctttcatcaaatttgggaagttttcagccattatttcttcaaacatagtcataagctgcataatgacattttggtcatcattgactggatataatgtgggtggccctcaaagataaaaaaacggtattttcactgcactttttatgtttatatgtacttagatacacaaatacttaccattgtgttataattgcctaagtattaaatacagtaacgtgctgt

SEQ ID NO: 711657 - DNA, 379 bp, Homo sapiens
  misc_feature (37)..(37): n is a, c, g, or t
gaaaaagcacatttatggtctggccctagggtaattnttaccttgatttcctctctgtcagatacaatttggaggaaactggtcattctgcagaatatcacattgacccattgtaccaatataatgatgttgatgatcatgttaatcaatacgtcacaaatactttggtaagacacttatagtcaagaggatggtaagctttatgaagatgtaggggcctgtcacaatcgtgaaacttaacaaggttgggagaagaagtccaacagtctgcaggattcaaggccatcctggaaaagacacttctttatttaagttatttgaaccactcctccagaatatccaatggggcctctttttctgggggaacttgtataaagag

SEQ ID NO: 711658 - DNA, 673 bp, Homo sapiens
tcccaaaaaaaggtttttttttttttcaaaaaacgggaaaaaaaaaaccaaaagggggccccccgggggggaaaatttggggtccccccccccccaaaaaaaggggggggggggtggtcctcctctaaccccctttttgttggtccactattggctgcccccctttggtctccactctgtggtgtggagactctctcctagggggggggcgcccccaccttcttctggtggtgctggggggttcgtcgggcccacccaacgtcgcttgtattgtccctcaacccctctttttctcccacaaaagtattttcttggcggggagggtactttttgtgcaaccaaaaaaagaggaggccacaatgaggagagaaaaaaacgaagttggcggcgccgctgtggatcagccagacagaaagagcgatgcgagttgtctatccaaaaaggttgggaagcttgtgagaaccaaaaaaaaacacaccaagggtggtccacaagagtagtgtggtggcgcaccaagaggagagaaacgtgggggccccacacccctctgggggtggagcacgagagagaacccaagagggggggtgttgctgacccggagtggaaggtggcacacccctagtagtgtgggggcgcccccaatgaggaaggggggaacacaagatgaggagcg

SEQ ID NO: 711659 - DNA, 162 bp, Homo sapiens
cccagtcagtttccccagcctgaccaacctggtgaaacctcgtctactactacacaatacacaaaattacacggggtgtaggcagatgcaagcctgattatcccagactactggggaggctaattgcattgaacagagagaatagctatgaacccggagagg

SEQ ID NO: 711660 - DNA, 185 bp, Homo sapiens
cgcgctgcatgcgagtggccgcggttggactatgggcgatcgatgagcttagagagagcttcgtgtttctctcgctttgatgagattgagctgtgtggtattagagcatatatgatacgagtcagtattcagaaattatgcaagactctgagttagacaaaaggataactattaaacttattata

SEQ ID NO: 711661 - DNA, 395 bp, Homo sapiens
  misc_feature (356)..(357): n is a, c, g, or t
  misc_feature (375)..(375): n is a, c, g, or t
tgttttgcgttgggttagtctggggattgaaatgtagatgagaatgatcctcagggataggtaaataatttgtggtgtaaatattcttagattccggacttttcgtcaagtatccgtagttttcgactgagtgttgtgacgggtgattagatgatacagcctatgaatgaaatataggtgctgcaggagaaggaggaaaatgacgaaacgcggcttaatctaatcggctcggggcccccgattatagcgcatcgttactgcctgactggctaacctgtaccttcatcaaaagtggtcatcacgtacccggggtttaccctcgggtgggtggtgggggcgggggcggaggggaaagnnggcccggggtttcccccncaaagggtgtggtggggtgc

SEQ ID NO: 711662 - DNA, 102 bp, Homo sapiens
aatgcgtcctatcctaacactaggactaaaggatggtaataaaccaatcagaaagaaatctctgtggggtcactttaaaaactactagctgaataatctcaa

SEQ ID NO: 711663 - DNA, 609 bp, Homo sapiens
  misc_feature (570)..(571): n is a, c, g, or t
  misc_feature (589)..(589): n is a, c, g, or t
ccgttgcataccaatagttgattgaccgcggcgaccccaggccgccccaaggccggaggtgtgctacaaagataggtagactcacgctttgtaataaaaataggtcagcggtattaaacgcgatgatatgaaagaaatatactacattgatacataacaagagctgttgagtactaaaggaagtattggactagtggtgcgaacattagatacccactgtgccagtttatgaaagattggttcatcagacccgatatttgcccttaacctttgttactgcgtacaccgttgccgccttttgtggcgtccacttgcatttgctacaccgtgtaagtaatgcgctctacgccaacggtatcagtctcaacatttgcggcgctgttaactagtcgaggattaagatgctgtactgccctgtggccactggtctgcttgaccagcggttcgtaccccgattatagcgcatcgttactgcctgactggctaacctgtaccttcatcaaaagtggtcatcacgtacccggggtttaccctcgggtgggtggtgggggcgggggcggaggggaaagnnggcccggggtttcccccncaaagggtgtggtggggtgc

SEQ ID NO: 711664 - DNA, 559 bp, Homo sapiens
  misc_feature (538)..(538): n is a, c, g, or t
catctctacaaaaaataaaaaattaggccaggctcagtggctcatgcctgtaatcccagcacttctggaggcccaggcgagcggatcacctgaggtcaggagtttgagaccagcctggcgaacatggtgaaaccctgtctctactaaaaatacaaaaaaattagccaggtgtgatggcgtgtgcctgtaatcccaccgccaaggaaggctgaggcaggagaatcgcctcagcctcagagctcgggaggtggaagttgcagtgagccaagattgcaccactgcattccagcctgggtgatagagcaagactctgtcttaaaaaaaaaaaagtatgtcctaaatgccactggatatggggggttggtttttttggttggttgtttgttttttgtttttgagacagagtctttctggggctctgtcacccaggctggagtgcaatggcatgatcataacccactatagcctgaaactcctgggcacaagtaatcctcccacctcagcctcccaaagtgctggggattacaggcatgaggcnttgcacccagcggccactgaa

SEQ ID NO: 711665 - DNA, 581 bp, Homo sapiens
  misc_feature (542)..(543): n is a, c, g, or t
  misc_feature (561)..(561): n is a, c, g, or t
gcgaagcggaccacgggcggctgaacgaataagaatgggctgcgacgattaattattagtgaccggcaacaatgcctacttggagtagcaccgggtacccggccggtaccacggcagtaactgcgacctttcaggcggcctatcgcgcattagacaccgcgtgcggtacgagaatctgtacctaggggtgggttcttaactgcggcaagcggcggaaagatggaccgttgggaggactatgagattggtggcaaccacgttcaacaagacgacggggggacagacgactactaggcaacaacagtggaggacaaattggaaaaccgtcaaacctgatagtttaccaatgttacccacggagatgcctgctacaacgacccctagccgggctaggtgcagtatcggtgaccagcggttcgtaccccgattatagcgcatcgttactgcctgactggctaacctgtaccttcatcaaaagtggtcatcacgtacccggggtttaccctcgggtgggtggtgggggcgggggcggaggggaaagnnggcccggggtttcccccncaaagggtgtggtggggtgc

SEQ ID NO: 711666 - DNA, 531 bp, Homo sapiens
  misc_feature (492)..(493): n is a, c, g, or t
  misc_feature (511)..(511): n is a, c, g, or t
atattgataaacgagaatacaacagaagatacaaccccagctaaaggataatcacgggtaaaaataaattgagaagccgggagaaaattaggagatatagggcttaggtaacattgatacgtaagtacatacggataatttggtaagactgactttgtaaaagaacaaagggaaacaaaaaaggaaaaaaaaaaaaaagggcggcggggggggtagtgaggaaatagttgcccttgagaagctgcacgggtgaaaagggtactgcgggaacaccaataccaatgcgggtggcaacagagaaaaatgttttacgaagacccgggggggatgcaatacataaacacccaactatagtagaccagcggttcgtaccccgattatagcgcatcgttactgcctgactggctaacctgtaccttcatcaaaagtggtcatcacgtacccggggtttaccctcgggtgggtggtgggggcgggggcggaggggaaagnnggcccggggtttcccccncaaagggtgtggtggggtgc

SEQ ID NO: 711667 - DNA, 544 bp, Homo sapiens
  misc_feature (505)..(506): n is a, c, g, or t
  misc_feature (524)..(524): n is a, c, g, or t
gcatccaatagtgaataacgaggaataaacgcgactagcacaaatgcaatgagaaaggacgagtaagggatcacccggaaaaggacaaacaattggggagctgcgggaacagggggaagacggaagaaccgcggggacttgaagtaacagagatacgtgaaaggaaaaaaggaagaccgcgtagtgactaaaacagcagaggagaaggacgaagaatataacaggggcggggccgggggaagcagggcggggggcaaaagcaacgacaagttactaacacgcagatggaagtaagcaaaaagggaaaaaggccagaacttagtaaaataaagcggactgcgggatatcattacgctttaagaagacttagaccagcggttcgtaccccgattatagcgcatcgttactgcctgactggctaacctgtaccttcatcaaaagtggtcatcacgtacccggggtttaccctcgggtgggtggtgggggcgggggcggaggggaaagnnggcccggggtttcccccncaaagggtgtggtggggtgc

SEQ ID NO: 711668 - DNA, 521 bp, Homo sapiens
  misc_feature (482)..(483): n is a, c, g, or t
  misc_feature (501)..(501): n is a, c, g, or t
aatagttgatataatagaaaaaacttaccaaactaccggtgaccaaacaccaatattgcaaatgacattaagaagcccggcctgaaacgcagcgccgagccgtatttacgcacattattgtgatcctaacacgtaaactacaacggcgtaacgtacgctgtgaacggcggtcctgccgctactattgagtactctgtccactgcgaccacgctgctggcactttacctatttggtttggacaatatttacgcaacataattatacggaaaaataaactataaaattcggcggcaaaactagcatcagttgtcaggccaaagggaatatcaacgacagagtttacttaatacgtaattgggtccccgattatagcgcatcgttactgcctgactggctaacctgtaccttcatcaaaagtggtcatcacgtacccggggtttaccctcgggtgggtggtgggggcgggggcggaggggaaagnnggcccggggtttcccccncaaagggtgtggtggggtgc

SEQ ID NO: 711669 - DNA, 362 bp, Homo sapiens
  misc_feature (202)..(202): n is a, c, g, or t
  misc_feature (323)..(324): n is a, c, g, or t
  misc_feature (342)..(342): n is a, c, g, or t
gcttgtctgtaggacgcacgtctctgacggaccgacggtcgcaaagtttgtacatttagttagtagattgctcgggttgtgcttggcccggtcctctaacctgagagttgttaagtgacaataaaaaaattgccacttaaggtatacataccctgagggacggtatattgcatgattttgtggttattacaccaccagatgnccccgattatagcgcatcgttactgcctgactggctaacctgtaccttcatcaaaagtggtcatcacgtacccggggtttaccctcgggtgggtggtgggggcgggggcggaggggaaagnnggcccggggtttcccccncaaagggtgtggtggggtgc

SEQ ID NO: 711670 - DNA, 285 bp, Homo sapiens
cacctgggtactagactttgcagaggagtgcagtgtgcatgtagtccaagtatctgaacacagttcacatcgaccttattagcaaaagtatttaagaaataggcatctatcaaagaagcactagcagcatatattcagaaatatcaaagtggaatatatgtacatgtcatcagtggtacccaattcccctttttactgtagggtggataactacttaaggatttaactcttagaatattatctctatgaataaagcatagtagttaatgtaaactccctaaaaga

SEQ ID NO: 711671 - DNA, 499 bp, Homo sapiens
  misc_feature (460)..(461): n is a, c, g, or t
  misc_feature (479)..(479): n is a, c, g, or t
tatgcaggatagtttgttatgcttatttgggcactacccgaagtggcccacgctagttcactacctttggggtaggtaaatgggcacgtaaatgggtgtaattaataggtttgacgaagattaaaatggggttaacattagggattaatgcgcaattgggtgaaattgtacggtttgagtaatgacgcaaaggggtggttggggtgcaatgtaaacaacctgggcgttgatatagtttggcaggcgaagaaagtatcaagaatggaaagcagttcgtgttattgattgaggttagtgtagaacattgtagggtgtatttagttacgaccgcggttcgtaccccgattatagcgcatcgttactgcctgactggctaacctgtaccttcatcaaaagtggtcatcacgtacccggggtttaccctcgggtgggtggtgggggcgggggcggaggggaaagnnggcccggggtttcccccncaaagggtgtggtggggtgc

SEQ ID NO: 711672 - DNA, 941 bp, Homo sapiens
gggcccggagggcgctctgcgttcgtgtacgtggcgctgcttgggcccgctggcggattgtaatgcctgctggcttattgcggctgggcaaggagcggcgagacgggttcggcactttcttcgctcgggatccccgcaaggatgcagtgctgccagagagtctcacccgcatggggtgaaagcgttcagcctcccagacgacgatctgggactctagacaatctgggaggcacgcagacttgggctaatgaagcagagaaacacaaaagttcttgagacttactgggatgcagcgaaagacaacgaacatactggtcgctcttgctataggacgatcacaaatcaacatctcacttccgaaccggggaagaagacaagaaacatcaatgaagaactggagtctcaatatcagcaaagtatggacagataaatcatcaggcacagatatcggcgacattgtggacttggcttcagtgaggctagacggaccatgactgggacgaaggtgctgtggcctggagaatgactgcatgactgaccgatgatgattcaacctgatcctgaaagtccagcaacattctgaaagcgattcagagtcagagcaacgacgcactctgctgcaagaactcccagcctgctgagacccctgatgacaagcggaggcatcccaaaaacgacaagcaagatgcaaaaagcaatgatacaaagacggacgacaactcccgcggttcatacgtcccaaaaggccaagcaattgtcaattaccacgaagccctaattggacaccaagtgccagcggaacgacctggctatataaagcgcacacgccatggacgttcatattctaaaacggctctgttaaatcattcaacagaagtttcgctacaaagtaccagaccacactacaggggcacatatcacattgcgaggcagacttttaa

SEQ ID NO: 711673 - DNA, 556 bp, Homo sapiens
  misc_feature (517)..(518): n is a, c, g, or t
  misc_feature (536)..(536): n is a, c, g, or t
cgacgctacctttgggactttggctgcaatgacagcacacgtaaatgcactttgctgtcttccctttggcaacgacgcggctaccatatgtacggcagaaaagatggcatattgcgcacctagagcaacctgggcctgcgttgctgttgttccatatgttatacttgctaggggtaactgttccgactgcgagtcgcaatcttgatgatcggttagctgcgtttgccgtctgcgtacccacaatgtgcgggcaacggccatttgtaacgcgggccgtaggcggaccacgctttgtctacccccgccccaccccgacgacacacaattgcggtatgggattgctacgaacgctttatatgcactgcacccgagagtggagttttaaatgctgatattccccgattatagcgcatcgttactgcctgactggctaacctgtaccttcatcaaaagtggtcatcacgtacccggggtttaccctcgggtgggtggtgggggcgggggcggaggggaaagnnggcccggggtttcccccncaaagggtgtggtggggtgc

SEQ ID NO: 711674 - DNA, 710 bp, Homo sapiens
  misc_feature (263)..(263): n is a, c, g, or t
  misc_feature (265)..(266): n is a, c, g, or t
  misc_feature (288)..(288): n is a, c, g, or t
  misc_feature (361)..(361): n is a, c, g, or t
cggaacatcggcacctgggcctctgtgcccgcactgttaccagccactcctccccagtccggcgggacactcccctgaagtcccggaagttcccccgagcccggaggtgcagggctgtcttttccgtaaggatgacggcgtccaccagatgcagaacctcctcaaacaccgctgggaggtacgcccctactgtggtgaccagccattcttcccctgtcaccctctccttgccgtcccggtcccagcctccttgcgcctgagcncnnagctggtctgctgatgatgtgnctgaatgatctccacgacctccacttccttccgggggatgtacgtgccaggtccctcgaaaagccactcatcncctgccaccaccttgtcgccatctttatcctcaaaatcaagcagcgcctttagatggaggacagtgttggccagaaccacctgcaggggtgtgatgtccttttccagcacctcccctggatacagggggaagggctcctgggccagccggatctcgagctcagcgtggcgaagccgaacttgccctgtgacatcaatctgtcacacaaccctggcaccccgagacaaaggtttcgaccatctgctcagtagtaactgggcgaacgctcaccaatgcgccatgcggccaaccagtactcgtcatagtcccgcccgaattcggtaccgagctcgagtcgtatcatgtcatt

SEQ ID NO: 711675 - DNA, 463 bp, Homo sapiens
  misc_feature (424)..(425): n is a, c, g, or t
  misc_feature (443)..(443): n is a, c, g, or t
cccgttccgagctgtctctaggtggttggagtatacacggggcgcacgtgtggtaaatagggtataacatacttgacgtactacgactacttgtactaacagtgtactctattagcgaaagaaagaaaacgcgtgccaaaagtattaacatgtttgcgtaccgcagggccctctggttatgctatggttattgttatttgcctaagggacgattattacatatgcttatttggcagctatccgttgagtttgctaggaaaaatagaaaatacagcgcgtcccgaaaacaagctctcactacatccccgattatagcgcatcgttactgcctgactggctaacctgtaccttcatcaaaagtggtcatcacgtacccggggtttaccctcgggtgggtggtgggggcgggggcggaggggaaagnnggcccggggtttcccccncaaagggtgtggtggggtgc

SEQ ID NO: 711676 - DNA, 669 bp, Homo sapiens
  misc_feature (25)..(25): n is a, c, g, or t
  misc_feature (50)..(50): n is a, c, g, or t
  misc_feature (94)..(94): n is a, c, g, or t
  misc_feature (123)..(123): n is a, c, g, or t
  misc_feature (127)..(127): n is a, c, g, or t
  misc_feature (170)..(171): n is a, c, g, or t
  misc_feature (175)..(175): n is a, c, g, or t
  misc_feature (183)..(183): n is a, c, g, or t
  misc_feature (199)..(199): n is a, c, g, or t
  misc_feature (201)..(201): n is a, c, g, or t
  misc_feature (221)..(221): n is a, c, g, or t
  misc_feature (233)..(233): n is a, c, g, or t
  misc_feature (247)..(247): n is a, c, g, or t
  misc_feature (254)..(254): n is a, c, g, or t
agcggaccaggcgcagatcatggcnggcagccggctggaaaccgtagggngcatcttctctcggactcgggacctggttcgggccggggtgctnaaggagaagccccttggtttacgtatatnacgnctttcccccctgagggagcccgtcttccaaaggcctcgagtcnnattngcaaacanagctccatccaagcantntggaccagactggattaagngaagtttatcantgtatgggtctggnaaagagnttatggatctattcaatccaaatcttcaagtctacctgtcaacggtttcgtggcacgaacgtacatctgagtctacacgaacacttgggcgacacgcagactgaacgaagcaaagttactttcggctggaaacgagggaccacggctttacttgcgcagaaagggtgtcatgttcatacgacgaagtaaggctgaagcaacggactcaacatcgggaggtagtcacggtttcccgcgcaaatcccgaacacttgagctgtcagaacccacagccctggcggttgggcacagaaaaaccgaaggaacgtccatgaaacaggaacggttccgactagggaacccaggccacttctgggaagtggcaaccctgcctggaacccagggtccgcagacgggtccttccatgccccttccc

SEQ ID NO: 711677 - DNA, 313 bp, Homo sapiens
tctagagttacccttacagggtcttccctgactgctgatctaaaataacagccagtcacactttcatcccagtaccctgcttttctttttccctgcagagccaagataacattacctttatgtattcttgtctattatctgtctcttccactggactataaagtcctgtgagggcaggagatttgtctttttgggtacactgatgtcatcccagagttcaggatagcacgagtcacacacccatccattccttcattcattatctgatccatttattcattcactcactcatctgatgggtgtgtgattcgtg

SEQ ID NO: 711678 - DNA, 430 bp, Homo sapiens
caatggccatgggggacacatcatgcctcccacacaatcgcagtttggagagatgggaggcaagtttatgaaaagccaggggctaagccagcctaccataaccagagtcagggactcgtatcccagctgcaaggacagtcgaaggatatgccacctcggttttctaagaaaggacagcttaatgcagatgagattagcctgagggctgctcagcggccttatgaataaaatcaagtgccaaagcttcagccccagataactatgattcctcctagtgcacaaccaccacgcactcaaacaccacctctgggacagacacctcagcttggtctcaaaactaatccaccacttatccaggaaaagcctgccaagaccagcaaaaagccaccaccgtcaaaggcagaactccttcaactaactaaaactgttg

SEQ ID NO: 711679 - DNA, 883 bp, Homo sapiens
cgcggtggctcacgcctgcaatcccagcactttgggaggccgacgtgggcagatgcttaagctcaggagttcgagatcagcctgggcaacatgacaaaacctcgtctctacaaaaattactaaaattaggtaggtgtggtggcacgtgcctgtagtcctagctatttgggcacactgaggtgggaggatgggttgagcccaagaggtggaggtttcagtgagctgagattgtgccactgcagctctgcactccagtctgggcccgatgtcgcctcaaaaaaacagaaacaaaacaagaacaaaacaaaacaaaacaaaggaaactgaagcccagaggttaaatggcttgctcatgaccatagccatacgaatttcttatatcaaataaggaaaagcaagcgagcaacaacagaagacaaatctccattatcctctggccagcatgcttgttagaacaataaaaacttggccaggcacggtggcataacgccatggtaatcacagcacttagggaggccaaggtgggcaggatccacgaggtcaggagatcgagaaccaatcctggcgaaccacggtggaaaacacgagaatcaacatcaaaaaaataccacgaacattagcccggggagtgcgcgggagggcagccatgaagcccagagtcacaggacacggctgaagaggcaggagaactggacggaaaccgtggggcaggcgggagcaatcggcacagtatgaggccagaaaatgggacgacattgaaaatcaagacatggagcaaacgcacacgaggaatccaaggcaaggaccggaaacacaaggacaaatcaaggccctgggaaccacgcaccgaagacacaaaggaaacaacgcaagacagagaaaa

SEQ ID NO: 711680 - DNA, 459 bp, Homo sapiens
ctgtggaaggctggaatgtacaaatgagatagagttatagcttaagaccaggtgggtaagggagtcagaagtatgcgatgtaattaaagaaattatcgcccaacctctacaaataaagataggggaactctgaaagagaaagttcttttgatttccatttgactgttttatatgagcctacgcctaatgttccgctgtgcacatgtttacctgatacagaagtgctgcgtgttgtacatacttggaacaacaaactagaaatactgtacttgtgtaccaacattgactactagtagagaagggtgtgtgtgacaagccagttctacaaggataacctaggtgtgagaataaaagcttttcttattgacttaaatttgaataacagcgttgtgtaaagccaattgccgaaatttttgcacctaaccaggtttttggagattacaatgtttaataaataaa

SEQ ID NO: 711681 - DNA, 130 bp, Homo sapiens
tgggagatagcaatcatgtggagactatttggcgttggagcccaggtcttcctggactaccctaggaacttgtacctcgcgagttctttcaagtactctctctctgaaatttcgatacactgtctacaga

SEQ ID NO: 711682 - DNA, 255 bp, Homo sapiens
gtcatgtgcggaattgtcatctcgtctagtgcttcgtgcaggaatccatttctgagcgtatgccctggggttatccccagataactatgattcctcctagtgcacaaccaccacgcactcaaacaccacctctgggacagacacctcagcttggtctcaaaactaatccaccacttatccaggaaaagcctgccaagaccagcaaaaagccaccaccgtcaaaggcagaactccttcaactaactaaaactgttg

SEQ ID NO: 711683 - DNA, 216 bp, Homo sapiens
tcgagctcggtcccttcgacggtgtttgtctgatgcgctgctcattgtagctcttggccaggacacaaccaccacgcactcaaacaccacctctgggacagacacctcagcttggtctcaaaactaatccaccacttatccaggaaaagcctgccaagaccagcaaaaagccaccaccgtcaaaggcagaactccttcaactaactaaaactgttg

SEQ ID NO: 711684 - DNA, 1698 bp, Homo sapiens
cggacgcgtgggctttttttattttttttcactaattacatttttattttgtggttctctaatttaaaattaccttttcatcttggctgtgatatttccttcaggctaacactatagaagattggtagattagtcacccgtaaaaaatatcaagaaggacctcgtcggatcaattgagcggcacttcgcaacggtgaacatcctgagctacacatcaagcgccataaagagaccgaaagagcaatacctcctagaagggcagttaaccagcgaatagacagataaagacaagggagaaagagacgaatgccatacacgagaaaataaaagaagacacaaaccgagcacaacgagcacaacaacgctacaaggagagcaaagggagaacaccacgcagaaaagacacacacggagcaacaacacacgcaacaaaaaccacaaagagagaaaaaaaagaaaatagaaaaaaaaagacactaataagaaaaagagaaaacatgaggcagaaagaaaacacaagcaagaacagaaagagaacaaaacaacaaaaacagaaaaaagccagaaagagaggactcactgagaagcagaaacaaaacaagaggaaaacactaaggaactaccacaaaacaacgaaaacaaaacaaaccaaaacaaagaacagagaaggacacagacgaaaaaataaaaggagaacataaagacgccagaaggcgacaagaccagagaagtacaaagaaaccaaaacaacagacgagacaaccaccaaccacagagaaaacaaagacaaccacaagaggggcgaaccgccacgagagacaacaccacgagaccaacgaacaaacagaaaaacaacacataaaagcagacaaggcaagcagagtaaacacaaaacacaaacagaaaaagagcacacgtaggaaaatagacaccagaaaaacgggacaaataaagaaagaacaaccaaccagcaaagcaaaagacagcaacgacagaccgacaaaccacaaccccaagaaacaaacaagaaagcacagggagcaagaaagcagataacgagagcaacacaacgagaagcgaaggaggctacgacgggagacaccaaaccgaccagacaaggcacccacacgccggaagcaagaggcgccggagagcaggacggagagcacgcagcaacacagagggcagagataggaggcgcaagaccagcgccgaagagggagcgacgacaggagcgccgacgaagcaacggcaagagcgcatagcatggatggccagggagagacagcagggagagacagacgcaaagacgcgaggtacgcgagagccggcgagcagcgcacgaagacagacggaggggcgcaggagcgagcgagacaaggaagagaaggggcggacaacagcgcagagaaggcgcagagccgagaagaaagcaaaactggatgatgaacgaggatgagagaggatacaagggcgaggaaagagagaagagaagagaggggagacggtgagagcaggtacaacgaacaagcaatgaaatggagaggggagagggacagcaacggaggtgcgcgaagtgacgagggagacaaggaggaagatgaacgtcgggcatgcacgacagtgaacaagggcggacgactcgatggggcgctaatcgcggaccgagtgagtgcgtgtgtactttcgggagcgacc

SEQ ID NO: 711685 - DNA, 219 bp, Homo sapiens
ctggctattttgattttagtagatacaggtttcactgtattggcagtggtctcgaactcctggcatacaggtcgaactctctgactcaggtgatccacctgctcagactcccaaagtgctggaattacaggcatgagccactgtgctcggctgagattgcattgttgttgagggtgcattgttgttgaggctggattgttgttgaggctggattgttgt

SEQ ID NO: 711686 - DNA, 144 bp, Homo sapiens
ttaaggctgaacacgaggtggtgaggttgatcggggttcatcgaattacagaacaggctcctctacagggatatgaaggcacccgatctgagcattagcacccgtctgcaaaaggggatcctctaatatctcgaccatgtcaga

SEQ ID NO: 711687 - DNA, 867 bp, Homo sapiens
tgtgagtagcaggatgactataggcagcccttaccttggtaatctgtgggacataaccccaggtcaacataccctcttgtttcagcataaaagtatgggactagagagtactaagccaaaaggcagtggttataaaattctgcctgttaggaactggatcagctgtgttcagttatgacaccatgggtgtccagtagaaatatactgtgagccacatgtgtaattttaaatttggtgtagccatattttaaaaagtacaatgaaacagacgaaaataattttatttaactcactgtatgtaaaactttatcaatttaacatggtaatcaaaattagaaagatactgatatatttatagttcagataataagtcttcagaattccaggtgtattgtctactgtagcacatgtgattctgactatcaccatttcaagtattctatagctacagatggctagtgattctcattgacagcatagttctaaaaatgaacatttatggtacatatgcttggagtcgggtacacttctatagattgccgtagccactatattccgggtttccacattcttctcttcaaaacttaagttaaccgtgggattatccagatctgtattagtggcaaattcaacagggctaataagtccaatattggacgatggcaacgttacattattgcctctgggggcggaagcacgggcagggggggataaccttatgtatttggaacatgtcacggcgagggcacccctaacatggagggccacatggggcatccgcagggatctcaacaaaaaaggggtgcacacccgatcggcggttctcctatttctcttgcccttctctatttatcttcacactcctct

SEQ ID NO: 711688 - DNA, 347 bp, Homo sapiens
aagcagttaatacagactcatgtgggtggggagggaagtcaactctagctcactcagtcaggaaaaagtgtgagctccccaagtgactaagtttcaatgctcataaaccctgagcctagtcctaaaaatgagaaagatccccgagacttctctgattcccaggttgcgactaggctgagggaataggaccaatggaaccagaatcctacttccatgagccatgcctggagtcaggattgtctccagggtctattccctgaaatcggttcctccagctaccaggacaaaccccctgtcagcgtctgggcctttgcaggccatagccttcatgagaacatggctgtagg

SEQ ID NO: 711689 - DNA, 456 bp, Homo sapiens
  misc_feature (105)..(105): n is a, c, g, or t
  misc_feature (108)..(108): n is a, c, g, or t
  misc_feature (345)..(345): n is a, c, g, or t
  misc_feature (354)..(354): n is a, c, g, or t
  misc_feature (386)..(386): n is a, c, g, or t
  misc_feature (398)..(398): n is a, c, g, or t
  misc_feature (441)..(441): n is a, c, g, or t
tgatggagaccgggtttcgctgtgttggccgggctggtctccactcctaaccgccgagtgatccgccagcctcggctcccgaggtgccgggattgcagacggagntangttcactcggtgctcaatggtgcccaggctggagtgcagtggcgtgatctcggctcgctacaacctccacctcccagccgcctgccttggcctcccaaagtgccaagattgcagcctctgccaagccgccaccccgtctgggaagtgaggagtgtctctgccgggccgcccatcgtctgggaggtgaggagcccctctgcctggctgcccagtctggaaagtgaggagcgtctcttncccggccgncatctcatctaggaagtgaggagcgcctcttnccggccaacatnccattttaggaagtgaggagcgcttttttcccggccaacattnccgttttaggaagtt

SEQ ID NO: 711690 - DNA, 590 bp, Homo sapiens
gtctgcttgactatagttggacagaaggcgccacaccagtacctagggccttatcctccccaagccagtgcagccccagtgattctagatctggacatgaccttgaagcaggtctgcatataatggaaagcgatgcccttcttcttacaatatactggataatagcaagatcatcagtgaggagtgtcggaaagagctcacagcgctccttcaccattataacccaattgagatcgacccacaccggaccgtcaaggagaagctacctcatatggtggaatggtgcaccaaagcacataatctcctatgtcagcagaagatccagaatgtgcagatagcccaggtgattagagagtccatgtgcaaggctcagggagggatataagaccttcttcaatacactctaccataacaagattcccctttccatcttttctgcgggcatggatgatatcctggcagaaattatccgacagatgaaagtgtaccaccccaacatccacatcgtgtctaactacatggctttaatgaagatggtacctccagggatctaaggccagctgatcacacatacataaatagtcgagcag

SEQ ID NO: 711691 - DNA, 936 bp, Homo sapiens
gctggatgatattattttctcttctaaagaaatttatggatattttatatcctaaaaactaagttgtaaagtcagtcaccactagcagtttaagtgtgcatgcgagtgcacacactatacacacacacacacacacacacacacacataagggaaggaagaaaagtgcacagcgaatatatgcatagtgctacgagcagatcttttctttaagtggtcaggaggccatagtgtatatgtgtaactccttttttccatcaccattaagtgtccctctgtcatcttccagcaccttgcgtggtggggggttctacaaacgtgatgtggtcttcgtgaaccttcacttctgaagggtctgagtcctaaaaggttcgtgcttaactgggtagctgaacgtctttcattaagaagactaaagagacgtggaacttctgagagggagcaccagataatactctagtcccagagatactttttttatttaacccttcagggtatcaccatcacgttatttatattttatacacacttttgggccctaccggaagaatgaacccttttttgtattgcccggtgtcacagagaatggaaaccggcaggtggtgtgacccacccgactctcccgcaacgggcaaccctgacttggtctcctgggaaaaagcaccccctaagaaacggacgacttgtaattcacagacgcccaacggtgtgtacaggcagccgcacaacgttggagggcatatcaactatcgggaggggacaacgagaagccaaacacggcctgggttggtcaacacaccaactcagggacggaccacgtagaaaaggcccagctgatataataggggagaaaaaagactgcaagcatgcgaaagagcaacgctgccacaaatgtgcgcggcagcggaaacacaacttgggggaaggtcaactaaat

SEQ ID NO: 711692 - DNA, 1414 bp, Homo sapiens
  misc_feature (541)..(541): n is a, c, g, or t
gttgttgtgtttgtttggtatgtcattttgtttgtttgtgttgttcatcgttgtttgactgttgatttgtcgtctctgtgcgtctgattgatgtctgtcttgtcgtgtttgttgtgtctgtgttgtgtctgtgtttgtctttttctttgttattttttgttattgttgatgacgaagagaagggcgggcgcgcgaaggacgggatgaagaccagaaggacatgtacggcgttgattgctgccaatctctcttgaggattatggagacggtgggagccaatggtacgtgctgccagatatgggtgttcccattcgaggggtgctttatgcgccctattggccgctgcgggtgcccccccgtcggggcgcgcctcaactgctgtgggcacttctctagggggttcctctctttcgggtgatccggcctgcttcggcttctctctgaccgaggcggttagcgacacctcgatcccagggggcctgcccccccccacggggcaccggggcacactcactcaggagtgggccctctttttgtgaanacttgctagtggggacgcgctttctttgccgtcgaccagccggttttgctgtgctccgggtcccctgggacactaataggcgaccagcgggggagtccccgccacgggaccgaccgccctgggtggtggaggccgtttcgggggagtgtggtccccgcctttccccacggggttgttccctcgagagactgcctttgctcgcggtttttttcggacacatacacttcctgggggacacaggcccccgcgactcgcgggggggacacattgatcccggtgcactcctccgcctcctcggagccctaagatccacttggtctttgggggggattccagactcttgtgtagatgtgggcccctcaagcctgcgagagagaaggttccgcttctcgacgtttaatatttttagagtagaggagtgataactcgtgctttagaggacttatgtttgcgtcccctctcccgcgtgcaccccccgcggttgttcggggccacaccacgcggaatccacccaccactgacacctcgaagggtggtgtgttgttgaacacacgagccactactgcgcggcgtgacacacaaggtgtggggataccatcggggtgttggttggcacctgcgctctagcacatgagaaactgttggctgtgaggggggttcgcgtaagtccatgcttatatgagagtttaggggggccacaatttggcaacgaacctttgggccttttgggtgtttgtatataagttgttgtatgtaagccacaggatatccgtgtgtctcccccgtgttggagggggagctttagaacctttaaggtgagtttttataagggggaataattttgtcccaaataagcgcttgccctattaaata

SEQ ID NO: 711693 - DNA, 239 bp, Homo sapiens
gggtctcgagactactgggtttattagatataggaattaagtcatcgcaagagagagcgtaggaggacttccctcttcctatttgaataccctttatttcgctctcttacctgactgccctggccaggacttccagtactatgttgaataggagtggtgggagacagcgatctggtctggtgtcagttttcaaagggaatgtttccagctgtgggttatttcagcagttctatggttgt

SEQ ID NO: 711694 - DNA, 203 bp, Homo sapiens
acagggtaaaaatcctattgtgcttttgtgactttcaaacggtaaagttcccattttagagatgggtttgaatctaacttagggaaaacctggcctagccggaaattgcaaggctaagcttccagtaaaaaaatcattaggcatcatgagatctacaatctggaatcagacagtttgcttgactgctgagatagggtctatgg

SEQ ID NO: 711695 - DNA, 453 bp, Homo sapiens
tctttcagatgggtttcagcccagcagaagcattatctttgccagttggagtgctggagactttggatcggttggtgccactgaatggctagaggtattctttatcatcccttcccatattggacacgagcttgtgggcttaggctgttggtccagaagtgatgtttttataggtttgattttaccacttttgcctttgcgtttaagtctcagtagagtccagaattgaaaatgaatccctaatgctactgtatgtgataaataaacagatttatacttattagtgttttcccttctcttctagggatacctttcggtccctgcctcagcctcctgagtagctgggattacaggcacccacaaccacacccggccaatttttgtatttttactagagacagggtttcgccatgttggccaggctagtctcctgaccctcaagtgattcacccg

SEQ ID NO: 711696 - DNA, 1428 bp, Homo sapiens
ggcgggaccctgtgacttgtgcatctgatgaggttgcaggctgtcttgcgcatctcggtgatgagaggtgttccttgccatcgatgctgcggaggacgtgatgctgagcaccaagtcggtaagaatcaagcatgaccggtgctaggagaagcatggacggatcaactggtgtagtcagtcatacttacgaatgttgcactcgggggtgccagtcgctgggatgcctggatgactcggctcgcaaatagaatgtgtgaattagcatgccgtcgcacaggaatggttggcctgtatggatgcactgtgcattgaatattgactactgtaataaccaactggagtgaagcaactctggatctttaacaaacaatttcactggaattaatggtcatgaagagcttcctagctcccctaggtagcatggaatcttagtcgtgtccacgggcattggagacggtacgcgtctatggggcaacggaatgcttagtagcagggtaacattctcttgggtgccaacaagttaacctttaactacagcgaaatgtgggacttaatcaagggaaactcctgcgtgcgtaggaactagtacttcactctttggccaatagcgtcgcgtaaaaagggatccgtcggacaacgatgagtttggccccacctgagatagagggggctccttgaaaggatttacgggccaggcatttccacgagagaagacataaggttctctccggcttgggggacaggatttcctatgtacgtctaagagaaggccgcctccgatattcactagaagggaactgcgcctttcagcggtcccaaggtggcttggcatagtggtggaggtcgtctagggacaacgccaagggtcagatacctcccaagagtggcaagcgccttaaagagaacggacgtccttcatggcgatcactcttcgcggacatcttttgcatgcgacacaggtgcatggcggatggttaggccaaaggcgcttcaggaaaatcacttccccccggaccgccactttttgatcgtccaagaatgcgcatgagggatcacgtcgcatcacccgaaatggtcttcgtgtaatcggagcttgcagtttacaaccgatgggtttttctaggtgcggccaacccagtttgtgggtcaagtatggcactgaggagatcagtaccgccttgtgtctttgcgccaaaaatacggttaggaaggtcgtgcgccaataagagcagcgcgcaagttggaatttctgacgggccaggaacccttaaacttatgacctgactttgcgtctgttggcaaacgtgcctcacaccacttccggctcggactaggatctattgaagatggaacgtttgtcagacaccctttgaatctggtggccccgctgtggattggagccacaaagactttactttgacagcaatg

SEQ ID NO: 711697 - DNA, 674 bp, Homo sapiens
agcgggtgcggtgtaggatgcttcacgaggtataatcctattcttattagcactaaacttgctaggctaattatcatgtttatcttctgtccagaccaggacaccgtctaggtccgtagaatatctttacatggaagcaagatacatctattactactttaccgactttaccccctttctttaattctgtataattctttgtactatatatcgattgtgtaaatgcttctagatgtcttcatcatgaaaatatcaactataatactttcatttagatttcacatttcatacctctgcgtataaaatgaaactttttaaattcaagtgaaatgcgatgactcttccctcgagatggaatacgttgataggtcaagcaaggtcctgttataggaattcactctagtcctagggatttatgcactaaagaaactactcttaaggatattctttggacaaacaagcatgaactaaaaagttgtcattgcactactgtttagaggacatacccgcacatatcccgtgttaatacctctacctcgataccataaattgttattgttgtattgtacattttggttcacacgtattgggcgcttatctagctttcttgccaaatgtgcacccagtgttgcgggcattgtttattctaactcaaacaactaaatctgtatgcc

SEQ ID NO: 711698 - DNA, 380 bp, Homo sapiens
cgggtctatcaccatgcttccgaatctgctcctcagcagcccctccttgcccgcagctggtgtaccggcacagcagtttgatgtcatggtgatgcccaactctctatggcaacatctgtcaacaatgtctgcgcgggactggtcgggggcccaggccttgtggctggggccaactatggccatgtgtacgcggtgtttgaaacagtgagtgccggtgcaactgcgcggcttgccgccttttctactgttcacagacttagtagaggcacactcataccatcaggttagcccggtcaacatgcatgatacagaagttactcggataataccagggttgtactagcgccaccatcaggacaatcccagaacatattaaccat

SEQ ID NO: 711699 - DNA, 162 bp, Homo sapiens
tgtcgatcgagctcggtaccgctccccgacggggtgggactggaaggaagaagagaagactcctgtactgtttgacttgtttgttttgtttcatttgttttgtttttttgagacagagtctcactccgtcgcccaggctggagtgcagtggcaccatctcgg

SEQ ID NO: 711700 - DNA, 1210 bp, Homo sapiens
ggacatgcttgggagaatcaaaaaggtcttcatctggattataagatagatcagcaagcccagctccagagtttacatattgaatggtgggtcagaaatgcagatgttcaagtgttcgaggaaacccacctgcgtacaagaggtgtaccagccccagcaataaccaggggaaggggaggagttacagccggccagttggagttgtagtacacgagggacgccaactcccagaggagtcctgtccacccgagggccagtgagtcggggaagaggacttctcactcccagagcaagaggagtccccccaactgggtacagacctccaccgccacccccgacacaagagacttatggagaatatgactatgatgatggatatggcactgcttatgatgaacagagttatgattcctatgataacagctatagcaccccagcccaaagtggtgctgattactatgattacggacatggactcagtgaggagacttatgattcctacgggcaagaagagtggactaactcaagacacaaggcaccttcagcgaggacagcaaagggcgtctacagagaccagccatatggcagatactgattgtactgtctgatgttgtgaaatagccaatctccaccagtcctgtatactgttcaaagaaatgtcagccatcttggaatgtcacaggaactggttgaacacctgaagcaaacaaaggaactttccttctatttatgcactgcttaagaaccgtcaactcaccaacgtgcctagtcagcaaatgaatccacttgggaacttgaaaaacatcttaattaatttttgtttgcataattttgtgttctgtgacatgtttttattatatggtatgcttttaatttggagaacctacttttttaaaaaacggaaagaaaatctatcttattttgttgactcccaataacaaaaagagaatgatttgtatagtagttaataaaggctgcctattgaaatctcttctactttaaacctagaaaaacaaagtcttgttatttcagcacagctctaaattgtatacacttgaaaaccatgtacagctgcaactcactgcaagaagtcaagattctacacatattccacatttgaaaatgatttatccatctcagttatggactaataaatatgaaagtattatgcaaaaagtattctgtcacataaaaggttaattataacagg

SEQ ID NO: 711701 - DNA, 457 bp, Homo sapiens
gtcaatctgttatttggatccacaagtatacatcttatttaaggtacttatcttagaataatgactatgatgatggatatggcactgcttatgatgaacagagttatgattcctatgataacagctatagcaccccagcccaaagtggtgctgattactatgattacggacatggactcagtgaggagacttatgattcctacgggcaagaagagtggactaactcaagacacaaggcaccttcagcgaggacagcaaagggcgtctacagagaccagccatatggcagatactgattgtactgtctgatgttgtgaaatagccaatctccaccagtcctgtatactgttcaaagtaatttttttctatgaacaatccctttttaaataaatcacgaatgcgagccagtatgggtattatggttaatataaactggatcgaattaccattgctagag

SEQ ID NO: 711702 - DNA, 493 bp, Homo sapiens
  misc_feature (454)..(455): n is a, c, g, or t
  misc_feature (473)..(473): n is a, c, g, or t
tttccgactgtctctaggtgatatgcggccgtacactggcatgacgcatctaacacggaatatgataccgggtcgatttgtcataagcggttaatgttgtggccgcgaaaaataacagcacgaatatgggcataaccagcctgaatcggtaccattaaatgtaaacgcgaataaaataaaactcttataagatggcatgctgtgtgttaaaattggccgaaaagtcaactcctaacaagcccacgaatcggaatccacggaacttgttattcctattgtcccacaaaaattccagattaaggggcttgacctacaacaagctctcactacattccccgattatagcgcatcgttactgcctgactggctaacctgtaccttcatcaaaagtggtcatcacgtacccggggtttaccctcgggtgggtggtgggggcgggggcggaggggaaagnnggcccggggtttcccccncaaagggtgtggtggggtgc

SEQ ID NO: 711703 - DNA, 844 bp, Homo sapiens
  misc_feature (124)..(124): n is a, c, g, or t
  misc_feature (228)..(228): n is a, c, g, or t
  misc_feature (257)..(257): n is a, c, g, or t
  misc_feature (262)..(262): n is a, c, g, or t
  misc_feature (312)..(312): n is a, c, g, or t
  misc_feature (375)..(375): n is a, c, g, or t
  misc_feature (404)..(404): n is a, c, g, or t
  misc_feature (414)..(414): n is a, c, g, or t
  misc_feature (453)..(453): n is a, c, g, or t
  misc_feature (530)..(530): n is a, c, g, or t
  misc_feature (735)..(735): n is a, c, g, or t
  misc_feature (746)..(747): n is a, c, g, or t
  misc_feature (764)..(764): n is a, c, g, or t
  misc_feature (767)..(767): n is a, c, g, or t
  misc_feature (774)..(774): n is a, c, g, or t
  misc_feature (777)..(777): n is a, c, g, or t
  misc_feature (783)..(783): n is a, c, g, or t
  misc_feature (786)..(786): n is a, c, g, or t
ggtgacggctgcgtgcggcgggaatcatggctgctcgcagagctctgcacttcgtattcaaagtgggaaaccgcttccagacggcgcgtttctatcgggacgtcctggggatgaaggttctgcnggcatgaggaatttgaagaaggctgcaaagctgcctgtaatgggccttatgatgggaaatggagtaaaacaatggtgggatttgggcctgaggatgatcatttntgtcgcagaactgacttacaattatggcngtcgngagactacaagcttggcaatgactttatgggaatcacgctcgcttctagncaggctgtcagcaacgccaggaagctggagtggccatctgacggaagttgcagaaggtgtttnttgaaaccgaggccccgggaggatataangttctatttngcagaatcgcagtctggcctcagtcagatcctgtattanaagtaactctagcagtgtctgatcttcagaagtccttgaactactggtgtaatctactgggaatgaaaatttatganaaagatgaagaaaagcaaagggctttgctgggctatgctgataaccagtgtaagctggagccacagggcgtcacagggtggggtggaccactgcacgcagcttttggaagaattgccttctcttgcccccagaaagagttgccagacttagaagacttgatgaaaagggagaaccagaagattctgactcccctggtgagcctgnacaccccaggnnaagcaacagtacaggtngtnattctgnccnaccctnacngacatgaaatttgctttgtcggggatgaagcatttcgagaactttctaagatggatcc

SEQ ID NO: 711704 - DNA, 1021 bp, Homo sapiens
aaggccttcataaatagttgtaaacagggaaagaattcatttaacaatgcttgtcataaaagggtcacactaaacattgtacaacttattttaaaaatggtataaaattaaatgtaccattatatactcaccatagatttaaatgctgtttaaagagtccaaatggtatcgagctgcttgagtggcacgttaaactacgcaaaaccaaatcttgtttaaaaactggttttaaaataactactggattttctgaaaaagatgtgatcagttttcatcttgttgagcgttttttcactagtgcaactttggattttttatgagaattttggtaccttaatgaacacctcgctccatgctggaagcactaagcacaaagcttttaaagactttctggcttgactaattgaggtcgcactcgccaaggctgaggatgtgtaacccttaaacggtcttcattttcaaaggaaatgtcagccatcttggaatgtcacaggaactggttgaacacctgaagcaaacaaaggaactttccttctatttatgcactgcttaagaaccgtcaactcaccaacgtgcctagtcagcaaatgaatccacttgggaacttgaaaaacatcttaattaatttttgtttgcataattttgtgttctgtgacatgtttttattatatggtatgcttttaatttggagaacctacttttttaaaaaacggaaagaaaatctatcttattttgttgactcccaataacaaaaagagaatgatttgtatagtagttaataaaggctgcctattgaaatctcttctactttaaacctagaaaaacaaagtcttgttatttcagcacagctctaaattgtatacacttgaaaaccatgtacagctgcaactcactgcaagaagtcaagattctacacatattccacatttgaaaatgatttatccatctcagttatggactaataaatatgaaagtattatgcaaaaagtattctgtcacataaaaggttaattataacagg

SEQ ID NO: 711705 - DNA, 472 bp, Homo sapiens
  misc_feature (433)..(434): n is a, c, g, or t
  misc_feature (452)..(452): n is a, c, g, or t
cgagttgagtatgagcgacgccgaacgtgtgatggggcactgttatttgccatgggcgacgctgtcagataaatactattggttaaaaacataggcttcaggctggagctgctgctggaacctatgaaggaggaagtaggcagtgaacgcgttgctggagcaattgctgataaaccagcttacgtctacgcgcatgaagggcaggctacctgtacacgttgtgctgaaccaggtgcataatttggccagcctaatactggaaattaatgataaacatgcggttgagcggcttacattattatgcatagcgcgccccgattatagcgcatcgttactgcctgactggctaacctgtaccttcatcaaaagtggtcatcacgtacccggggtttaccctcgggtgggtggtgggggcgggggcggaggggaaagnnggcccggggtttcccccncaaagggtgtggtggggtgc

SEQ ID NO: 711706 - DNA, 387 bp, Homo sapiens
  misc_feature (189)..(189): n is a, c, g, or t
  misc_feature (275)..(275): n is a, c, g, or t
  misc_feature (279)..(279): n is a, c, g, or t
  misc_feature (349)..(349): n is a, c, g, or t
  misc_feature (371)..(371): n is a, c, g, or t
gagatcaagtatcactcgttacccaggctggaatgtagaggcgagatctcggctcactgaaacctgtgcctccccggttcaagcgattctcctgccacagcctcctgagtggctgggattacaggcatgcgccactatgcccagctaatttttctatttttggtggagacatgatttcaccatgttggnccagggctggtctcgaactcctgactcaaatgatccccctgcctcggcctcccaaggtgctggggacttacagggcgtgacaactngtgncctggacctttacaggcagtattttttaaaaaatcaaaattaaatggcaaaaatccatggatgagggccngggttgggtgggcttcatggcntgtgaatttccaggca

SEQ ID NO: 711707 - DNA, 958 bp, Homo sapiens
  misc_feature (916)..(916): n is a, c, g, or t
  misc_feature (949)..(949): n is a, c, g, or t
ggacatgcttgggagaatcaaaaaggtcttcatctggattataagatagatcagcaagcccagctccagagtttacatattgaatggtgggtcagaaatgcagatgttcaagtgttcgaggaaacccacctgcgtacaagaggtgtaccagccccagcaataaccaggggaaggggaggagttacagccggccagttggagttgtagtacacgagggacgccaactcccagaggagtcctgtccacccgagggccagtgagtcggggaagaggacttctcactcccagagcaagaggagtccccccaactgggtacagacctccaccgccacccccgacacaagagacttatggagaatatgactatgatgatggatatggcactgcttatgatgaacagagttatgattcctatgataacagctatagcaccccagcccaaataatttttttctatgaacaatccctttttaaataaatcaaaatgcttaaaatctgaatggatggaacttaaaactactttgttgaaacatcaacctgggcagaaaaaaaaaaaaaaaagacatgtaaaattttgttatttccagtctgtatatgaaaaaataggtcatcaaaaggaaaaaaaataactttgattaactagtgttaaacaaaaaataggtttactaaatatgttaatctattcttttaacataagcctcacctttcattttaaaggtttccatagaatttagttattttatctttcagccatatgctagtttttttttctcttgccaacatgcgtaaaaagggaagccaattacaagtgcaaataatgtggtattcttttgtaactcaagtcttgaaatgttctgtagtgttaagcaaagtctcctcttgcttgatactaaataaacttttgaaagaattttgngtgtgtgagctaacaatttcatgggtttttttntattaaaaa

SEQ ID NO: 711708 - DNA, 550 bp, Homo sapiens
  misc_feature (511)..(512): n is a, c, g, or t
  misc_feature (530)..(530): n is a, c, g, or t
gcagctctagtggcaccctaattatataattaacaactgtacagcacttgtcacatactgggattttgaatagcgctggatggtatcacatatagggataccttatgctaaggtaactgccccgaggacgagtgtagggagcgtaccaatttaatagcgcgtatgcagggcagaacagtgataaaagacagtgacttaaccctgcgtttactaacagaattttgaacaagttgtgaaaaataaaccgggggggggcgggggaaggccggtgtacgggggctgcaggcgccgtaggacagacgggccagtttagcaaaaagtaaggactagaggatggcaacaagggatgcacgtgcgaaggaaatgaagtcagcaagaagctctcactacccccgattatagcgcatcgttactgcctgactggctaacctgtaccttcatcaaaagtggtcatcacgtacccggggtttaccctcgggtgggtggtgggggcgggggcggaggggaaagnnggcccggggtttcccccncaaagggtgtggtggggtgc

SEQ ID NO: 711709 - DNA, 462 bp, Homo sapiens
  misc_feature (423)..(424): n is a, c, g, or t
  misc_feature (442)..(442): n is a, c, g, or t
agttatatagcgtacgccgtgcgtgtgggaaagtcattagatagaagtttaaaagggcaaggagccacaaaagggaactaagtgataagctaatgacaaagaagaagaccaagcacacagcaatgatacgggatgcggaaagagttgacagcagaggaagccaaaagaagccaaaagaaaccgataaaacgggcgcaaacccaaagtaaaacggcagtggaaccatatgggggcggacgcgaaaaagggtcacaataggaaggaggacaaaaggagtagggtaggggattatgcatagcgcgccccgattatagcgcatcgttactgcctgactggctaacctgtaccttcatcaaaagtggtcatcacgtacccggggtttaccctcgggtgggtggtgggggcgggggcggaggggaaagnnggcccggggtttcccccncaaagggtgtggtggggtgc

SEQ ID NO: 711710 - DNA, 370 bp, Homo sapiens
  misc_feature (15)..(15): n is a, c, g, or t
  misc_feature (125)..(125): n is a, c, g, or t
  misc_feature (143)..(143): n is a, c, g, or t
  misc_feature (155)..(155): n is a, c, g, or t
  misc_feature (157)..(157): n is a, c, g, or t
  misc_feature (194)..(194): n is a, c, g, or t
  misc_feature (196)..(196): n is a, c, g, or t
  misc_feature (201)..(202): n is a, c, g, or t
  misc_feature (234)..(234): n is a, c, g, or t
  misc_feature (239)..(239): n is a, c, g, or t
  misc_feature (249)..(249): n is a, c, g, or t
  misc_feature (276)..(276): n is a, c, g, or t
  misc_feature (290)..(290): n is a, c, g, or t
  misc_feature (305)..(305): n is a, c, g, or t
  misc_feature (309)..(309): n is a, c, g, or t
  misc_feature (370)..(370): n is a, c, g, or t
ccccctcacattgtngaaaccccctccccccagagctaatctgttcaaactcaaatacttaaaaattacagcggccaaacaaaagcatgggggaaaaaaaaacaaaaacaaaaaccagatggggngggtagcctgggccagtngtgtcacttggngngggcgactgaggtgctgaacaggagcttctgtttctntntttannttttctttcctcctttctcttcaaaaaggggntctgnagtagctggngtgtccagtttcatgggggctgcttcnatagcttggcgggnggggttttgggggcngggngcgggggcacggtctgaattatcactctccccgtcgctgtcccccggggccgggggccctn

SEQ ID NO: 711711 - DNA, 510 bp, Homo sapiens
  misc_feature (471)..(472): n is a, c, g, or t
  misc_feature (490)..(490): n is a, c, g, or t
gctctagtgaagtggcaggctatactctggcctaattgcgcccgctgcgtggggaccaatagggtacggtgatgtaggcaccacctggacgggcttggcaggttgcagaccgttaaaccggactggcccaaaaaatgtttttgcgtgagaagaatacaagggggggtggggggtgttagagcctacgccctaggtagatggcctgagaataacctgcggagaaccgaaaagggggctaagagccaaagctggccacctcctacctaccaaacaaagtgttccatacgcgtgtggaagccggtaataattggcgcggcccaatttgtgataccgtaaggtaggactacattccccgattatagcgcatcgttactgcctgactggctaacctgtaccttcatcaaaagtggtcatcacgtacccggggtttaccctcgggtgggtggtgggggcgggggcggaggggaaagnnggcccggggtttcccccncaaagggtgtggtggggtgc

SEQ ID NO: 711712 - DNA, 416 bp, Homo sapiens
  misc_feature (19)..(19): n is a, c, g, or t
  misc_feature (24)..(24): n is a, c, g, or t
  misc_feature (26)..(28): n is a, c, g, or t
  misc_feature (32)..(32): n is a, c, g, or t
  misc_feature (377)..(378): n is a, c, g, or t
  misc_feature (396)..(396): n is a, c, g, or t
aggcggtcctgactgttgngtttntnnngatngcgggcgctagatggatacatggattacattcacattcccttcccacgccaaatttcacaacgcatgggaaggcttctgcctattgtattaccaccactttaattcatggaattaaaggcaaatgctaaactggttgagtattttttccggtttgggcgtaaaccaaatttccggctactttcctcccatgacccggaggtcttcttctgatcttccatcctgaccccgattatagcgcatcgttactgcctgactggctaacctgtaccttcatcaaaagtggtcatcacgtacccggggtttaccctcgggtgggtggtgggggcgggggcggaggggaaagnnggcccggggtttcccccncaaagggtgtggtggggtgc

SEQ ID NO: 711713 - DNA, 538 bp, Homo sapiens
  misc_feature (499)..(500): n is a, c, g, or t
  misc_feature (518)..(518): n is a, c, g, or t
ctgttccatgctgtctctaggtggtggacccactgcctaatgcttaaacgtagcaaagaacaacaagaaaagcactagcaaagataaccggaatatgataggcccataaggcataaatgctagaagttaacaccaaatgcaatatgtaataagagcaaattattagaagtgaagtgtgtgccggaagtagatgtacacgggcgcctacacattgcttgtatgaaacaggatacacaaattggtgacacagaactgtgaaatagaaagcgaaaaacatgatatgcaaatgctgatacgggagcggggatattaattatattgtttaatgtgggttgtaaaataaattaggaacttatgataaacaagctctcactacatccccgattatagcgcatcgttactgcctgactggctaacctgtaccttcatcaaaagtggtcatcacgtacccggggtttaccctcgggtgggtggtgggggcgggggcggaggggaaagnnggcccggggtttcccccncaaagggtgtggtggggtgc

SEQ ID NO: 711714 - DNA, 427 bp, Homo sapiens
  misc_feature (388)..(389): n is a, c, g, or t
  misc_feature (407)..(407): n is a, c, g, or t
atatagcgtacgccgaaccggcttgtgatacgctgtaatggcgtcgtgatctgcggccacctatcggggaataccaccggcggtcacggcgacgaacattaagatactcacgaacaaaaagatgatgattataatgaacactataaacttgtaccacttaatataaggcaggtgcccggttatatttgttactttaatataatgcccgtggtttattgagggacacacttggcgcccatattaaattacattattatgcatagcgcgccccgattatagcgcatcgttactgcctgactggctaacctgtaccttcatcaaaagtggtcatcacgtacccggggtttaccctcgggtgggtggtgggggcgggggcggaggggaaagnnggcccggggtttcccccncaaagggtgtggtggggtgc

SEQ ID NO: 711715 - DNA, 339 bp, Homo sapiens
  misc_feature (120)..(120): n is a, c, g, or t
  misc_feature (124)..(124): n is a, c, g, or t
  misc_feature (130)..(130): n is a, c, g, or t
  misc_feature (143)..(143): n is a, c, g, or t
  misc_feature (162)..(162): n is a, c, g, or t
  misc_feature (300)..(301): n is a, c, g, or t
  misc_feature (319)..(319): n is a, c, g, or t
agctgagtacgggtaagggccggacgtccggccctgttgttgccgcaccgcttactcctaaggaaacgtttggtgtcccgggttatgtttcctttccgtgtccgtgccgaacgtgcgaangagntataantatcgaattcacncaccaccactgaccttcantaagcaaccaccagagcccccgattatagcgcatcgttactgcctgactggctaacctgtaccttcatcaaaagtggtcatcacgtacccggggtttaccctcgggtgggtggtgggggcgggggcggaggggaaagnnggcccggggtttcccccncaaagggtgtggtggggtgc

SEQ ID NO: 711716 - DNA, 151 bp, Homo sapiens
tcgatctctagcaggatccccctttatcccggggagggaagcagttataaatgcgagtttcgcagcatacgctcgcgaaagcgtttgagcccgagacccctacttcatgacctagctgtggccagcacccagaggggtaccgacgctcgaa

SEQ ID NO: 711717 - DNA, 125 bp, Homo sapiens
  misc_feature (9)..(10): n is a, c, g, or t
cgaggttgnnttgttaccttgccctggtcaccacctgcttgccaactcagcgattgctttttctggctgctgcattatcatagaaacggctcacaagttcatgagctagacgtaatttaacctca

SEQ ID NO: 711718 - DNA, 1075 bp, Homo sapiens
tttgttccttctactggacgaactggaagacctatgcagcatatacccacttaacttagtttcgttgttactcaatgttgtcctctgattagtcgttgtcaggtttaactgtgtatttctatttccctttgcatattttgctatttcatcctctcgtgtctgtttttggccttcgcctgtctctctatgtcggtgattgcttcaaatggggattcggttgatctgatgttttattgatggctctggcaattttcttaccagtccgccttcgtgttccgcgccaacagtcaccacttctagcgttcacccaggtagttagagtgcgctcgcctgctccagtggacacatgtgtttgcgtgctacggtaccgtaaccgtgcatacggtgagctctaatcacttgttccttaaagtagggacctgttatgtatggtctccatcgagggttcagctgtctcttactttcaatccagtgagatattgacctgcctgtgacagaatggcgggcataacacagccagacgagtagaccctatggagctattaagttttacttgatgcaaaacagtacctgacataccccaccaggtcctaaactagccaatacactgcattaacaaattgtacggtctggggcctgacctcggagcacgaaacccacacctacgagcagtagcatgctagagagcgttcatccagtcaggagcgaaatactatactcaattgatccaatgacttgaccaacaggaacaagttaccggctagggatgacagcgcaatcctattctagagtccatatctagcaatagggtttacagacctcagatgttggatcaggacatgcccgatggtagcagccgatagttaaaggttcgtgttgttcaacgacttgaagttgcgtacatgatctgagttcacaccggagtaatccaggtcggtttctatctaccttcaaattcctcactgtaagcgataagacgagagagattaggctgattgcagaggcccttatgacccgggttttatatcttacagtcttactccgtgtcaccgcctttaatccgtcgtttttccct

SEQ ID NO: 711719 - DNA, 423 bp, Homo sapiens
  misc_feature (384)..(385): n is a, c, g, or t
  misc_feature (403)..(403): n is a, c, g, or t
ccggtaacagggtgtgaggattagacttaaagtgtaagcgccctgtgcatagcacccccgctggattactggtaacctgaggataaagttaataccaaagacgagggagtaagattgtagtacgcgaagataaagtacggtactaccttttaatacttacaaccttaactaacttatactttgctaatatatattgttactgtactttgaatattataacattaattggcgggaatattatgcttagcattatgcatagcgcgccccgattatagcgcatcgttactgcctgactggctaacctgtaccttcatcaaaagtggtcatcacgtacccggggtttaccctcgggtgggtggtgggggcgggggcggaggggaaagnnggcccggggtttcccccncaaagggtgtggtggggtgc

SEQ ID NO: 711720 - DNA, 303 bp, Homo sapiens
agagagaactgaggcagaggtaattcaactgccctgggccacagagcagcacgactcaagggcctagcacctggatccagaagctagggctctcggtccagcattcatccactggtggacatcacactgggcttatctttaccagcgaaggttacgtgaaggacaaaacgcactcagccagcaacggaaactcaacagttcaaacagcactggggaacactgtcagctaacagagacgcaacgctgacccagcctcatgaattaggcacgacaaccaactgcggctgaggaacgctgtggaat

SEQ ID NO: 711721 - DNA, 218 bp, Homo sapiens
gtttacaaaaaaaagcaaaacaaaaccaacaacaaagccccttgatgtccgtcaagcaagcagcggggatgtagctctctctagccctgggcaagaataacacttcccgttaaaagccagcagccgggcgtcagtccctatcaaagccagctagatcatgcactgttgaccactgggcaatctgtgtaacagtaaaagttcacaggggcattatagag

SEQ ID NO: 711722 - DNA, 135 bp, Homo sapiens
tcacggtgattatacatctctcacactcctctgagtactactgctgtttctgagacgcgagggcagtgcaggcagccgtttcttttccttctttaagcgttcttctcctgtctctcccagcttcctagtaatctc

SEQ ID NO: 711723 - DNA, 392 bp, Homo sapiens
tgtacatataaaagtattatgaagagacattaacattgatgcaaactctagaaacagcactcacacacagacttattttctgcgcatctcttcaccctctaactcgcgatggctccacagggttgacctgttacggctgtccccagtacttcatcaccagctggactacagtgcgtcacatcatcaggaaacgtgcaccttacatccgtcagttattgaatactgtgaaaacatatccatcatctgacaaaacttgtacgctttctttcaggatctgtttggcgtgttagctgacatctctattacaccaacgaggtacgtgtgtacaggtctgaaataggacacactataaaaggcatggttctcacatcaggtgtgtgtgaagtcgctgg

SEQ ID NO: 711724 - DNA, 324 bp, Homo sapiens
  misc_feature (69)..(69): n is a, c, g, or t
taaattcgcggccgcgtcgacgatggagtcttgctctgttgcccaggctggagtacagtggtgcaattnttggctcactgcaagctctgcctcccaggttcaagcaattctctgcctcggcctcccgagtagctgggattacaggcacctaccaccacacctggctaatttttgtatttttagtagagacggggttttaccatgttggccaggctgctcttgaactcctgaccttgtgatccaactgcctcggcctcccaaagtgcttggatttcatgcgtgagccaccgtgcccagccatacataatcattctttactttgca

SEQ ID NO: 711725 - DNA, 967 bp, Homo sapiens
gctctcttccacccatgccgtcatgtctaagttcagagtctcctaaagagcccgaacagctgaggcagctcattcattgtagggttagagcgtttgaaacaagcatgagtgatggagcctcgaggagccattttgagacaatggggaacgctcactggactgtgtgtgtaattgagatgatccaagacaccaacgcgactccaggtggctatagagccgtcttgatcaccactactgctcactgtgtgacggcggtggactgccgcatatgaactgcaacggccacaacaacggtggactgcgacacgagtagtggaaaccaaaagagagctgtctccagtagaagattctcaaagaccaggtgcccacttacctgtgaaaaagatatttcgttggaggcacttaaacgacaacacctgaacgaacatcaacctaagagacttcactatagaccaagtcattggacaaacaatatgacaagtgatctgaacacccaatgactgaccagcaggcaagtgcagcacgacaacagggagacaagcacataagaacacatatagacagcaccacgacatccgatgacaacacgaaatgacactaccaacacaacccccacacagacgactggacacacacagggaccgaaaacacacagcctgacaacagaagacaacgacaaaagtacaaacaagacaacacgaagccgaaacggcactggaaacacacatgaaggacgagcaagtgcaaaaaagagagaggcacagaaaggtaagagcagccaacaacagagacgtgagtaacacaaagaaaggaagcaaagcaaagaaaaagacacagaacaagaaaggagaagcacacagaagaggcgacacaaaacaagaaagcaaaaacaaaagcaacagacaacagaaacaagaacacacaaaacgcacgaaaagaaacaacccgaccccctgaagagagacaa

SEQ ID NO: 711726 - DNA, 167 bp, Homo sapiens
ctgacaagaacaacagtaagatataggaaaagaggagaaaaaaaacatacgggcgacatatacgaaagtggccaaaggaggcaagtgggcaactgaaaacaaaacataaaggtctatgtggatgcagccaaatgtatctccatttagaaaatcatcataacaggtgg

SEQ ID NO: 711727 - DNA, 467 bp, Homo sapiens
gttcctttccttttttaactttttaagagacaaagtctaggccaggcgcggagtctcaggcctgaaatcccagcactttgggaggccgaggcgggcggatcacttgaggccaggagttcgagaccagcctgatcgacacggtgaaaccctgtctctactaaaaaaacaaaaaacaaaaaaacaaaaaacaaaaatcagccgggcatggtagcaggcgcccgtaatgccagctattaggaaggctgaggcaggaggatcacttgtatctgggaggtggaggttgcagtgaaactccgtctcaaaaaaaaaaaatttcactttttaagagcgaaactccgtctcaaaaaacaaatctgccaggcgtggtggcgcaggcctataatcccagctacttgggaggtggaggttgcagtgagcccagatcacgccactgccctccaacctcggtgacagaatgagactgtctc

SEQ ID NO: 711728 - DNA, 103 bp, Homo sapiens
  misc_feature (48)..(48): n is a, c, g, or t
  misc_feature (55)..(55): n is a, c, g, or t
ctctccttggtcagatcggcgccgcgttgcggcctcggtggctctgtngcagccngcggcgccaggactccggcacttatgagcggctcaagacccgaggagc

SEQ ID NO: 711729 - DNA, 1753 bp, Homo sapiens
taaggttggaggggggaaggcgtggagaagtgtggtaagtgggttatgtggagaacatgtgttcatatatataagataagtgcataggggtgaggtggataggaagtttttttacaataggagggtgtagtgaagtgggctcgataggcggaaactcgggggatagtgcgtggttgcagaatattacaataagaaaacgaagggtgaggtgttagaaagtatgagggtctctgtggggtgaacacaaagatagtggtgtggtgttaaagtttacacgggggagaaggtggcgtatcaataagtggtgaggttccatagagaaaaaaagtggtagagggggtgagagaggggtggttaaactatatatacaataaagatgtcgatgggggagtatatatagcaggcacgatactgaaaaagaaaaactaggtggcgaacagagggggacacgaggcgcgcgcgcatactttcgagagaagtaatagaaaagcaccagtgaagccaccataagaacagcgagcaaactatcacacaacaaagacgagaacaaagagggacagaaaagaggatggtacacagagagagagggaccaacacaggggcaaagaaagagtggagaacaaaaaaaacaaccaaataaataaaaagaggcaaaaaaaagaaagaaaaacaaagcaaagagacacaagacgtagaaataaccaacacaaaaaaagcggaaagaacaccaacaaccgaacagccaaaagaaaagaaaaatacatagagacgcacgccaaacagcagaatcacaaaaaaaagaagaaacgcccacacaactaccacatacaccacgaaacacatattgtcaaaaaaaaaccgaacacacaaaaaccaagacacaccagacaaagaaacaacgaagaaccaaatacaccacaaatagacacaaatataagacaacgaggacgacgaccgacaataagaataccacacagccagcaagaggaacggcatagacaacacaaacaagcagagctagagacacacacaaagacagacacaaactacagagaagacgtgcacaccaaccaccccgagaacaaagaagaagtcgacacgacaatactagagacaatagaacacataaggaaaaaacacagcacacaaacagagataaagaatcaatacacacaaacatcaagaaagaagacaccaagcgaagaaaagcacacacagagagaacaaaaaagccaacaagcagccacacaaaggacgaaaagcagaaaacggaaagacagacacaccacacaacaaaagaacgagacccaacggatcaagaacacagacagcgcaagacgaacacagagcgaatgacgacagaaagagaagaaacacaaaaaagagcgacagaaaggagacaatagaaaaaaccaacgacaaaacacaaacaaagcacacacaacaaaacaaaagagaagaaaacaaaaatagagagtaagaagacacaaacagacacgagcaagaaacagacggaagcatcaacagacaagaaaaagaaaacaaaaagaagaagaacagaagaccagacaacacgcaaagcaacccacagcaagaacaaaaacaaacaagacggaagtaacaccgcacagacaagaaaccagcagaggaaaggcaggcaacagaccaacgcaggaacacaccaccaaagaacagacaggaacacaacagacagagacatcaactggacgagacagaaaaaacagcgacacgc

SEQ ID NO: 711730 - DNA, 220 bp, Homo sapiens
aaaatactcaattttactataagaaatgtaaacttaggacaatagtgagctaccattttttgccatcatattagccaaatactttttaaaaatgaaatggcaagatctttgtgaaattgcactcgaatttttgttataaattaatgcacatttttggaagcagatggacctcttctggaaagcaattccaaaaattagtataaatcttttaaaagtttga

SEQ ID NO: 711731 - DNA, 205 bp, Homo sapiens
aagagtataatgaaaaagaagaatatagctgagctccttagcccagtgagcctccatgctggctgggaagccaatattccctaacgcagcctgtaacagggaggcagttgcaaactctagggactggccatgtgtcagcctttatcctacaggctagcggctcaacgaccaagcgctggctgaacgcacaagaacatgccccttc

SEQ ID NO: 711732 - DNA, 451 bp, Homo sapiens
cactaactgtttgagtctgaacatacaggccagaggtgtccacgtaggtcagcgacaggttcccatacccggtctacattatgacgcgtactgaagcatcgccgcctaagaccatatgaagacgtccagccatgacctcatgctgatccgctatgtcagagacctggcaagatcacagatgttgtagaaggtcctggggctgacccagccaggagccagtactggggaccaccggctacgcttcaagatggggcaacatcgaaccagaggagttcttgcgccccaggagtcttcagtgtgtgagccaccatctcctgtccaatgacatgtgtgctagagcttactctgagaaggtgacagagttcatgtcgtgtgctgggctctggacaggtggtaaagacacttgtggggtgagtcatccctactcccaacatctggaggggaaagggat

SEQ ID NO: 711733 - DNA, 338 bp, Homo sapiens
cgccagtttgtgtgcttttcactgagtacatcatgggttgcccttaatagctgggagatctctaaaggcttccttgtggccgactggatggagaataatgttggaggaggagaggacgaatctcggactgtaaggtaaaacccgaggagggcacaaatactctcttgatgtctcctgcctcctggtggaatgggcagtttaggctgtgtgacctctggtctctgtgtgatttctgatcttcacttgactctgggcttcattgtggtattcaaccttggcttggttcttgtactgcagtttgacctccgagctcctggtctgatccacatccgtactgg

SEQ ID NO: 711734 - DNA, 186 bp, Homo sapiens
ctaccagtcctgcatcggtcaaaagttagtaaatacgtcaggacatgtccagcctctcaggtcgagtgtagctgtgaataattaagtaagaaagtagtagcccctggactttgctatgagttctttagctaacacgaataaagcagtgacatcatgaagcacagcaaagtgcaggggaacagaatt

SEQ ID NO: 711735 - DNA, 122 bp, Homo sapiens
gtgaacgaggtatgaatgtggggacagtgtgtgatagccccctccccgtccatgtaccaccccgggggcatgcggctgttgtcggaggcgcacggagtacaggggggagcaggcggcggccg

SEQ ID NO: 711736 - DNA, 341 bp, Homo sapiens
cacgcagtatgcctatggcagccaggacgaggattgctgacaatgcggattgaagccttgccactgctcgcgcagaccattgctccagatccgcagtcagaccggcataggaagcaaacaaggcatcgcacttgctgcgctgaaacaccgccctgaacccttacctgatagcgccacgccggcggaggccattcgtggaaaccgtcgccgtgctcgtcgagcaggatgaccctggagctgccgtcatccaagcccgatcacttcaaccggaatattgccgatcggaacgtcgaacgctgactcgacactgctctggatcttcagcacaccccctgccggac

SEQ ID NO: 711737 - DNA, 494 bp, Homo sapiens
cactgaccagaccgcacgtgaatgactcgcgggtacatcccgaagtgaaggcataacatagcgatgttcactgagcccagcgagaacaaagacaccacataccagcattctgtggagaggccatacaaagacagtagttgtagcagtagaattgtaataggcgcctgaaatgcctacagagtaaatcgcgggggatccgctaccacgctcgagctggcaggccttcaaacggggccctggacgtcgttgtccaacgagttacctggactcgcctccacgtggcctggtcacctcgtcagtgcctttgtccatactggggcccacttgttgcatcagcttcttcttccttccttgcttggttgttcctggtgaatttgtgcctggtggttactgaatttgtctacattgtgattcttagtttaagtgaatctcttcttcagcagtgcatgagcttcctcacagcagggactgtgtcttattatctttgtcttccc

SEQ ID NO: 711738 - DNA, 162 bp, Homo sapiens
agaggtatcccctcacagtacaagagacgagatggcagctgacagaggaagccgctcaacataccttcacaataaatcgtggcagtatatatcttgttacagaaggcctctccgatctggcatctgtttaatttattattttatgcttctatagcagcatct

SEQ ID NO: 711739 - DNA, 168 bp, Homo sapiens
  misc_feature (23)..(23): n is a, c, g, or t
ggggtttgccccccccctttttnaatttgcccaaccccttttttagggggggggttttttttgggcccccttttttcccctttccctttttaacccggggggggggggtatttctgttttttttgggccaggggccccccttatttctttggggatttttttttttta

SEQ ID NO: 711740 - DNA, 168 bp, Homo sapiens
caataaatacagcagtgtacacataacaacatcttggtaaacaacagactgcatatatatggtggtcatccagtaagctaaggttaatttattattattccttgtttctttttttttttttttttttggaatttaatgttctcctttccccccggggaaaagggaagg

SEQ ID NO: 711741 - DNA, 436 bp, Homo sapiens
  misc_feature (257)..(257): n is a, c, g, or t
  misc_feature (260)..(260): n is a, c, g, or t
  misc_feature (397)..(398): n is a, c, g, or t
  misc_feature (416)..(416): n is a, c, g, or t
gccgtgctaatgagtgcagacagaatgcaaccggtacaatggcagagcaaatgcacagggggcactagtgcaggtgggttgtgaaaggcgggcgcaataagcagcgcgggtggaggcgtggggagttgggtcagcagtgtggtgggaaagacatatgctagtgacgataggggcaagggccatttgccgcttttgattacggtaaccgggcacagcttaatgcgccagcaagtagccagtgatctagagacgataantanaattatgcatagcgcgccccgattatagcgcatcgttactgcctgactggctaacctgtaccttcatcaaaagtggtcatcacgtacccggggtttaccctcgggtgggtggtgggggcgggggcggaggggaaagnnggcccggggtttcccccncaaagggtgtggtggggtgc

SEQ ID NO: 711742 - DNA, 142 bp, Homo sapiens
gctcttatctttctaccagtactccttggtctgtaacaggaatgccccttactcagtagcaggcggaacacggacatgggtcacgaaacccatgctatcatggggacaccgttgtatgtcgttccccccccacgatacagcg

SEQ ID NO: 711743 - DNA, 462 bp, Homo sapiens
  misc_feature (423)..(424): n is a, c, g, or t
  misc_feature (442)..(442): n is a, c, g, or t
gtacgcctcatgcatcccagaatactcaggcaaaagtgggggagaattgatggcgaaggcggttatagtgggttgtgcacccgtatgccggggctgcccacgcagaaacgggtaagttgataattgcggtgtacgcttggctacacgcggttgcttgggcttagaacgggagagtgcggagagttttagcgagccctgtgtaaggaggcgaaaagcggggggcggtgcggtatgcgatacttgggggtggtacggtttaatgcacctggctaatatggtgctgtgacattatgcatagcgcgccccgattatagcgcatcgttactgcctgactggctaacctgtaccttcatcaaaagtggtcatcacgtacccggggtttaccctcgggtgggtggtgggggcgggggcggaggggaaagnnggcccggggtttcccccncaaagggtgtggtggggtgc

SEQ ID NO: 711744 - DNA, 502 bp, Homo sapiens
  misc_feature (463)..(464): n is a, c, g, or t
  misc_feature (482)..(482): n is a, c, g, or t
tgtgaaactgatggtaattgccacgggaccggaacgtaaatagacctaaccggaccacagagacggtgctaccaggacgtattgacaaaacggctaaagcggggagcgaaggaggacctatgggaagtacgcacgggggaagtacccgggcggctgccgaacctgccgactgcgagggcggaatacaaaagtaagtaggccaacgcgccttagaaacgagaatggcctgcaactgggacgcgacgcacaatgccggacgcgagatgctagggcgagaaggaaaagcataacactttgagataagctactggccggccgaaaagacggtactaaccctacaaaccccgattatagcgcatcgttactgcctgactggctaacctgtaccttcatcaaaagtggtcatcacgtacccggggtttaccctcgggtgggtggtgggggcgggggcggaggggaaagnnggcccggggtttcccccncaaagggtgtggtggggtgc

SEQ ID NO: 711745 - DNA, 418 bp, Homo sapiens
  misc_feature (379)..(380): n is a, c, g, or t
  misc_feature (398)..(398): n is a, c, g, or t
cctgttataaagcgtacgccgatataaccaggtggagggtcaccgcgacggtagcggtgccagacgccaatagctgcggcgggtgaaactgaggacacctaaataagattgcttgtgtaggtatagaaataaggggctggtgtggaaattggggtaaataactatgggctatgcgaaagtgtggacttgttataggcgcctgccgtgtagcttagggtaggggacatttaagacatacaataagtacataatattatgccccgattatagcgcatcgttactgcctgactggctaacctgtaccttcatcaaaagtggtcatcacgtacccggggtttaccctcgggtgggtggtgggggcgggggcggaggggaaagnnggcccggggtttcccccncaaagggtgtggtggggtgc

SEQ ID NO: 711746 - DNA, 110 bp, Homo sapiens
tgttagtataattcgggagtcgtcaggaagctaggtgatagaacaacttcagattctgggatttctagtctataatgacggtttttttatggataaggagtttcaactct

SEQ ID NO: 711747 - DNA, 368 bp, Homo sapiens
  misc_feature (329)..(330): n is a, c, g, or t
  misc_feature (348)..(348): n is a, c, g, or t
ggacgctaccattgggacttggctgcatgagctcgtcatctaaaaacgattaatcgacatcctataattagatgaacacggctgcggaatgttggctcaaccgaacaatgtttgtaggagcccggtcacgctacccaaagcgttcatcacgcgtgccaagcaaaagtttagtacgacgacacaacaacttgaccaggattactatgcaccccgattatagcgcatcgttactgcctgactggctaacctgtaccttcatcaaaagtggtcatcacgtacccggggtttaccctcgggtgggtggtgggggcgggggcggaggggaaagnnggcccggggtttcccccncaaagggtgtggtggggtgc

SEQ ID NO: 711748 - DNA, 505 bp, Homo sapiens
  misc_feature (466)..(467): n is a, c, g, or t
  misc_feature (485)..(485): n is a, c, g, or t
tctatgcgagaccctgtggcgtaggggaaagagataaagctacgagatatgaattacggtgtatgatatgaaactcgtacttaacggagatgggagcctgatatggttaagcaggcaggggcgcggaataaagatactgattacttggattactaataaatttgcaggaaaaatgtatgcaggaaacgcttgaagaaggatagaaaatagggctaatggggtgaccgcatgaagttgctacaaaagagagtgttgaattggcttgaagcgggcatggaattgaaatgttaccggcaaagaactgggaaacgtggaacatataagagacggtactaaccctacaaaccccgattatagcgcatcgttactgcctgactggctaacctgtaccttcatcaaaagtggtcatcacgtacccggggtttaccctcgggtgggtggtgggggcgggggcggaggggaaagnnggcccggggtttcccccncaaagggtgtggtggggtgc

SEQ ID NO: 711749 - DNA, 512 bp, Homo sapiens
  misc_feature (473)..(474): n is a, c, g, or t
  misc_feature (492)..(492): n is a, c, g, or t
attaatgaacattatttagcccatgagaataaacggctttgcctagaatgagccactggcacaccacacatgggtgtcgccccggactaccctgaaaatagcggtgcgcggcaggcagtacttaattaccgggcgcatctttactaatttcgcctaaactagtgctgtactgcccacccaggctacgggaattgactcaccaaacaacaccatttacgttacaactacgtgcgtaatgaccatgctgaattgctataactgctagatgcaattgggttgcgcgaaactaccggaccggcatatttggaggagcaaacggtgcgcctttgacagacggtactaaccctacaaaccccgattatagcgcatcgttactgcctgactggctaacctgtaccttcatcaaaagtggtcatcacgtacccggggtttaccctcgggtgggtggtgggggcgggggcggaggggaaagnnggcccggggtttcccccncaaagggtgtggtggggtgc

SEQ ID NO: 711750 - DNA, 1491 bp, Homo sapiens
taaaagatggttttgtccgtgtggagtttgtgatggaaggagccccgttattggtggtccccggtctttgattgagtttgtgcccaggtctttatgtgtgtaggggatctaccactggggtggggtgtggcaacagatggaagagaagagtagagttttttttggtgggggggtttgattaggacttatgttgttgtgggggggctcctcactgagagttggtttttttgtgctcttcacccgtgcggttgtagggggggagcccctgctatataggaagggtgtgtgttgattgggttgttcatcatgtactccggcgaccaccagaggagatatgctcgcctcttgtcatatggagtagaggaagagaatggtctgtggttgcacagggggtgtgtattattagcgcgccgagtggtttggatttttgttgtgcagtatgagtacgtcactaatgttggtgggttgtttgtgacatgaaatgaggaagggagggtgcttataaggaggatgaggctggctcgttgtcggattcaccttctctggggtgctatgatgagaaggatatctttgttgcggggcgggaccacaagaataggacgcgcgggtattgatttgttggttgtctctccttcttggtgggtagggaggggtgcttctaaataacaacaacgtgattgtaggggtatggagaacacacacggctgttgatggtggtggcgacgtccctcgcatttgacctctgtgaggaggagacatctgtccttttggacacgagtcgttcgacatcaacacacgtttaatggtcggctcttctgtgggcggggggtgttgttgcacagggtgtgtgggcgtcacctcactctgtctctcggctctcacaatatctctcgcgaggagaggggggtctctgtgcgggggtatagtctcccctgcacacacgagcggagagagtgggccacaatatactctcttttgcacacacccaacacggggtgggtcggcacacacagcagagtacactctctccacactccgccctcgagagtagtgttgcgtctcttgttctcctctcacacatctcactctggagacgcgctgtgttgggggcgctctgtatctccacagacgtggttgtttgtgatatatgtgtttgatgatgtctctgtgtgtgtgtgggcgtgagatagacagaggagacgaacagatggtatctacccacacagagcacacactacacagctgtgtgtgtgtgcgggaagacaccctgataattttgtgtgtgttagacacaacacatagtctccacatcttttctcagcacacctgggctcttctccccctttcacacacgtggtcgcacacaacgtttgtatatccgacacacatatgtggagacgttctgtgggaaattgtgttcgtggtatatgttcgtgcgtgtaatataaatggagaatgttgtgttggggaagatgtaaagaatataaataa

SEQ ID NO: 711751 - DNA, 510 bp, Homo sapiens
  misc_feature (471)..(472): n is a, c, g, or t
  misc_feature (490)..(490): n is a, c, g, or t
cacggtgtagaggtcgggggggtatagttatatagaataggatatttagtgggatattcaacgaagaggtgaatgtgcttgtgcggtaggatgagaaaagagataataatcgggttgtgtaagattttgttaacgcagatgatgtttcgaggcctggttgcgtgcggtcttacggtctgcctatgagtaattagaatagtgatttagccagcctatttaattttagtatgatctgtaggaaagtctatgtggtgtttagcctatgtagggtgaatagtagtatgtatatgtactttggcggtagatgggtattacgcttggtggtaaagagacggtactaaccctacaaaccccgattatagcgcatcgttactgcctgactggctaacctgtaccttcatcaaaagtggtcatcacgtacccggggtttaccctcgggtgggtggtgggggcgggggcggaggggaaagnnggcccggggtttcccccncaaagggtgtggtggggtgc

SEQ ID NO: 711752 - DNA, 270 bp, Homo sapiens
ccacctcggtctcctgagtagctgggactacagacattccgccaccatgcctagctaacaaagggtattttaaggcagtgggttcccttctggctcagggtgtgtctagaaatgttgtccaggaggtagggcctgaagtgggggcctcaagactctgcctgttgccctgtgcactatggctgagctggtatccaagctgccagacaaaggcctctctactttcctctcctctcctcaaaaggaaagtagagagtctccgtcgaactgggt

SEQ ID NO: 711753 - DNA, 207 bp, Homo sapiens
ccgaaatttcacttatgacctaatctcataggtcacacaccatccatctccaccacattctattctccaagagcaagttaaagagtccagcccacactcaaggggagggcaatgaatcattgcctttagaagggaggagtgacaaagaatgctacgacatattctaaaaccaccacaaagagtgccagaagtccataatgatgtgac

SEQ ID NO: 711754 - DNA, 360 bp, Homo sapiens
  misc_feature (173)..(173): n is a, c, g, or t
  misc_feature (181)..(181): n is a, c, g, or t
  misc_feature (183)..(183): n is a, c, g, or t
  misc_feature (189)..(189): n is a, c, g, or t
  misc_feature (321)..(322): n is a, c, g, or t
  misc_feature (340)..(340): n is a, c, g, or t
ggccgctcgctcgtggccggttgaggtacagaaggacgcttgatctgaatgtacagttccttcactcagtaagcgtgactgacctaaggataaacgcgtggctgagactagtacctgccgatggttgccagccaccagagcccaccagatgccaccagagcaccaccagagcncaccagancnccagancccaccagagcccccgattatagcgcatcgttactgcctgactggctaacctgtaccttcatcaaaagtggtcatcacgtacccggggtttaccctcgggtgggtggtgggggcgggggcggaggggaaagnnggcccggggtttcccccncaaagggtgtggtggggtgc

SEQ ID NO: 711755 - DNA, 384 bp, Homo sapiens
  misc_feature (30)..(30): n is a, c, g, or t
  misc_feature (36)..(36): n is a, c, g, or t
gttccccttggttgctaaactctgcacccnattccnacccttcgaaacccacacgtccccacccactgtaactcacatcccccttcccttccttatttgggaaaatatcccacaaatagcccaatcaggtcaacttagaatgtgcagtctgacccgcctaccccccgcccatgggagattgacacagatgtaggggccacattaggaataaccctttctctcctttgttcagtgtgctcttgtgatcgtgaatgacacgagcagcacccttctgcagaagtaaattgccttgctgggaaaacttttgcccgagtgctggtttcactttgcgaaccgagcatttatctccaacatagacattgacttaggcaaggatttcatgac

SEQ ID NO: 711756 - DNA, 260 bp, Homo sapiens
  misc_feature (26)..(26): n is a, c, g, or t
  misc_feature (66)..(66): n is a, c, g, or t
  misc_feature (68)..(68): n is a, c, g, or t
  misc_feature (106)..(106): n is a, c, g, or t
  misc_feature (151)..(151): n is a, c, g, or t
  misc_feature (155)..(155): n is a, c, g, or t
cacatattcatgatgaaagttttcanttaaaaaatacataaggccgggcacggtggctcacaccantnatcccagagctttgggaggctgaggtgggaggttcgtntgcgctcaggagtacgtgaccaggctgggcaacatggcggaactntgtntcttccaggaatacaaaaagttggctgggcgtggtggctcatgccggtggccccagctgctggggaggctgaggtgggaggttcccttgggcctgggaggcaaag

SEQ ID NO: 711757 - DNA, 406 bp, Homo sapiens
  misc_feature (367)..(368): n is a, c, g, or t
  misc_feature (386)..(386): n is a, c, g, or t
gtgcatctgcgaggtgaccgacagaagaggtgcagtggtgtgatggggctgcccggacggtgcacgtgtggtgtactttttatatgatagtgtgtttcgaatgcgtaaagttggtacaagatggactattaggagctgggtgggtagcgataaatagagtaattgaagttgcgattgctttgaccgtgaccgcagtgatagatacatgtgatataatgaatatatcctgcaattatgcatagcgcgccccgattatagcgcatcgttactgcctgactggctaacctgtaccttcatcaaaagtggtcatcacgtacccggggtttaccctcgggtgggtggtgggggcgggggcggaggggaaagnnggcccggggtttcccccncaaagggtgtggtggggtgc

SEQ ID NO: 711758 - DNA, 111 bp, Homo sapiens
aacgatggtcctcagctcgagaccaccaggccttcttcactaagacttgtattcaacttagtttaatgtagattgccattagctttttcgtaaaataaaagcacagaacag

SEQ ID NO: 711759 - DNA, 790 bp, Homo sapiens
  misc_feature (107)..(107): n is a, c, g, or t
  misc_feature (193)..(193): n is a, c, g, or t
cgggcagccagcgccagtcggagccagcgcgagccgccgccgccatcactgccgctgccaagtcctccacccgctgcccccgccatgtctgctaccgctgccacggncccccctgctgccccggctggggagggtggtccccgcatgacaccccacctccaaaccatcaccagataacaggagactagcagcnagacccaggacccagagtggcatgaggtggctggacactcatgagggtgaacgtggaccaaggtcctggagcgagaccagaagctgtcgagagctggacgaccgtgcagaatgcactccaggcgggggccatcccagattttgaaacaagcgcagccaagcgtcaagcagcaaatactggtggaaacaaccgtcgaaggatgatgactcatcttgggagtgattttgcagccatcatcctacatcactcatcataggctgagctagcggatgagaactggccggggacccatttcccctggaccacggtttcccacaactggattctagcgatttctggacaaggtcagtgtaccgtcgtagcttatatgagacgtcattcagcgccaaaaacgcgatatagctggctaagtggccacatctgcattcatctagagcccaaaccaacctattggcctgcttgcgtttacgccctgcaatttaggacctagctatcttggcagaacatagctatacccatttagggcacctatggcacggctggctgtattccactccagggacccctttaggccctcaaaagccccagtccggagaa

SEQ ID NO: 711760 - DNA, 209 bp, Homo sapiens
acctttaggatcttctccggacctctgatgtacagacagaaacttcacattggggctaggaaggggccccttaacattggaagcactggcgggcaacactgctcggactctgaaaggttgtaataattttggaatattaagaaggaagggtttcttttctctttctggaacatttataatttagatattaagctcctgaagggatcaat

SEQ ID NO: 711761 - DNA, 116 bp, Homo sapiens
acaaccactttgtgcatgcatctcaggcacacacattctttccctggacgcctatcctgatccccatcaccgtacttttcgtttcgtctttccaatcttttcttgcttcattttct

SEQ ID NO: 711762 - DNA, 137 bp, Homo sapiens
atgtttaaatcagtaaaagtttcagagtggtagttatattttcctgttcatcatcttccacgaactgcaataccagtaaccttggtatatatttttttgatactgtacacatggatgtcttgtttctatgtgcaaaa

SEQ ID NO: 711763 - DNA, 1202 bp, Homo sapiens
  misc_feature (107)..(107): n is a, c, g, or t
  misc_feature (187)..(187): n is a, c, g, or t
cgggcagccagcgccagtcggagccagcgcgagccgccgccgccatcactgccgctgccaagtcctccacccgctgcccccgccatgtctgctaccgctgccacggnccctcacgtgactgacacaccggtctggggacgggctggtgccacgctgtgactacgcgtcgaggctgtcagaaaggaancaaggagagcagtagggaagcgccacggacgcatggtaggatgagtgtggtggaacatgtgatgcatggagttgcaagcgatggaatctaagggatcacatgagaagcctgagaatccggtaagaactgttggagaagccttgagaacgtacacagcagggaagaatgtcgatttcacaaatggccgagaggagttgctgcgctctagattcatggaacatgatagcagtcatgggaatggggatcctaagggcagccgatgaactttacctggatgggacatatacacctctaataaatgagatgaatagaattgagatcaaaatggggtgaaaagctagaaggtgtgtcgacaggaacagaatccatattccttcgaagctcgatattccatgtcagctgaaccttttttatccgtagttgaagacgagccatttatatgaaaatcacacacatgtaggagtacacgagttctattagttgtggccggtaagaaatcgtttaatggaagggaaaaccgtcgggatgcgggcattgcattctagtagtagaaactttggaaccgagatcgagtgaattcgaagatgggcactagacgttgaatccaggaacaagcgtagtctcactataataatttgcggagggtataaaagaaacgcgagttgtagcacgattcattgagacagtatcaaaggcataggcagaattttgaatggggagggaaatatgaaaacctgcgcacggccaggattacacataagcatgcaagcacaaatggaggttgatagggccgaatagccgcacacttggacaacaggggcagcggagaagttggaggtataccatttaggcggagccttcgttagaatgacatctgtacccctatcgaattccatagtcacatgtaggaagatacaggtaggccacgaaacacacacacagaggttcgaaacgcaaattattagtcaggggtatagtaccatcactttgggcaaccacgaaaacaagacgaacg

SEQ ID NO: 711764 - DNA, 143 bp, Homo sapiens
accttcacaaacgacgactggggttctaccctgacgtttgccttcctacctgtccctacgacaccactgtgctgtcggctatgtccacctcacgccatcacaaacctcatacgacgcacggttatgccacgtacgtgtccttg

SEQ ID NO: 711765 - DNA, 240 bp, Homo sapiens
gtagaaattgaaacctagcgcaatagatatagtaccgcaaggagaagatgagaaattatatccacgcataatatagcacggactatcccctataccttctgcataatgaattatctagagataactttgcacggagagccacagctaagaccccgagaccagacgagctacctcagcacagctaagagagcacaccgtctatgtagcagcatagtggggagatttataggtagagcgaca

SEQ ID NO: 711766 - DNA, 888 bp, Homo sapiens
gtagcggcattgtcccagatatacgtccgtctggtacaagagtcggggtatctcgacgagtcttcttctctactgtgttgctgatctaacgtgagccgcttatcagtggagcagtgactcgtgcttctgcagcaaatcggaatatgacatgcacacgaaaggttcaggaggtgactgacgcaagtgcgaaggcatcacccatcttaatagtgatccacatccgtgaagtctccccatcgaccgtcacggagcgcgggaagtccatctccctggggctcgtcgctttgggaatggtcgagcagcgctcctgcatcgctgacaggggacccaaacctaggggccttccatcagatattgaacactggcaggcaggctgacaaagaaacatagtgttgacattacattagactctcagttgcatctgcatgttgctgcagcgggcttagccctatctgacattacaccagttctcataatcatctcataggcagtttgataataccagcacagcatcgtctccaagcaacggcgcagggccggatgcaggcacctgcccgagctggtgaagtcggtcctagtacgggtgcagaccttggtccttggcatgccctcgtgcggcgtcgcagctggagcgccagggaattggcagatggccgggccgagtcccctgtgttcatggatcattcgctggacgtaaacctacttgctaccctgatggacctctggatgtgcttgacaccagacttcttactcccacgtatcgggacagcgtcggcaagatcagtcatctttcccaaggaaccaaccaggtatccagggcctgtagcagtaatgcggaccccgtgaagcgccccagaacgcaaggctgtcgctggaccgggcgaaaca

SEQ ID NO: 711767 - DNA, 924 bp, Homo sapiens
gaggcacccagcagcaacagccggctaggccaccgtactacggactccggagcagcagacatggcatccacgatcatggccgccgcctcccgcgccgttgtcgccaagacgccgttcctcagcggccagggccgcgccgccagcgccagccccctgcgcgacatcgccgccgcggccaacggcagaatcaccatggtacgtacgtgccatgaactaaccaccacggaaggaactcgtccgcaatgctatgtacgcgtgctaagagctaacgattgtctgatgcatgtgtgcgcgcgctcgcagggcaacgacttgtggtacggcccggaccgcgtcaagtacctgggccccttctccgcgcagacgccgtcctacctgaacggcgagttccccggcgactacggctgggacaccgccgggctttctgccgacccggaggcgttcgctaggaacagggcgctggaggtgatccacgggcggtgggcgatgctcggcgctcttggctgcgtcttccccgaggtgctccagaagtgggtgggcgtcgagttcacggacgcccgtctggttcaaggccggctcgcagatcttctccgagggcggctcgattaccttggaaatcccaacctcgtccacgcgccgagcatccttgccgtgctgggcttccaggtccttctcatggggtcttgggtagaagggttccgcatcaatggtctcgacggtgtcgggcgagggcaacgacttctacccccggggccagtacttccgaccggtcggccttgccgacgaccctgtcaccttcgctgagctccaggtgacgggacatcaagaatggccgtctcgccatgttcacctatggaagggatccttcgtccagctactgtcaacggtagggtccattgcagaactgttcgacacatcgagacc

SEQ ID NO: 711768 - DNA, 146 bp, Homo sapiens
atagtcagctcggtaccaattgggtagggctggaccgaaatgctggtgctttcattggcggcacgtttgccagccaccaccgagactttctgccacagctcttccgtgatgaacgggatgatggggtgcgccacgcgcagcaccac

SEQ ID NO: 711769 - DNA, 144 bp, Homo sapiens
agtactgaaagttgtcggcagatcaaatctcgtatgggcgcaaccctgttcctctgcagctggctataggcgcagaagacaaattcaccggcgttatcgacctggtgaaaatgaaggcgatcaactggaacgaagaagacgcag

SEQ ID NO: 711770 - DNA, 350 bp, Homo sapiens
  misc_feature (52)..(52): n is a, c, g, or t
  misc_feature (86)..(86): n is a, c, g, or t
  misc_feature (114)..(114): n is a, c, g, or t
aatcgagctcggcccgctctcgtgagactgtccatgacaagcttactgccgnccatcgtgatcaacctcgaacaagattgagctcnaaaccccatcgagcaagagcgggtccgncgtttcggcaagggtcgttaatgtgctcgtcagcgcagagaccgtaatccaggattcccccccatgctcacgtgccaatgtcgatgctaaaagccgaacaccgcgtaccgggtcaacagccataagtgcactgaaccaggcgttcggcgcattgcgtgtctctctgccgtcggtatggttcctcactgctcgcacgagcggctgtaacttgatcaagccatcaagcgctgcggtgg

SEQ ID NO: 711771 - DNA, 978 bp, Homo sapiens
  misc_feature (902)..(902): n is a, c, g, or t
  misc_feature (978)..(978): n is a, c, g, or t
ggagagagagaactagtctcgagttttgtttattttttttttgggctctaaggggggtagagggggtgctatggggtacactcggggcccaatatcacaaagaatttctaaggggagaatgaagattgctagggaccgatggtggacttgtgaaatctgtgtgggtttggctaccacatagatattgcatgatgcttttgacctgtatgtataccctcgtggtccgtggtaacccggtgagacaacgtggtgtctggtgttgtaaatcgtgctcgcggagaaattcggctctcgtggtattgtatacagcgcctacattggttgggtggaacagcgtctcatgagattgtggcaagagatggtgttctagtgtgagactggtgtactggtctatataatccgcgagaagtgggggggtgtcttacaaacctcgtggacgagctattcctgactacagactttgtgtccaatgcgatacaagtcgaaatatctaccgcgaagcgctcacgcgcgagcgtgtactcataggcgaaaaacataatagcgtgggggcggcaaggtgtatgaagatcaaggcgcaagtgtcgaggaccaaaaacctaggtggctgctccgccccggaggaggaagcggaagggtgcccaaaccaccgggccaagtgtggcgacggccagagcaggcccccgggggaaacgtgggctgcgcaacgaatctggagactattgtcggcgatttggtgtgcaaactagaggtgtgtacggcgagcacaccataagggtcagcccctacgtgtcgttttggcatagcgccgaattagtggcgtcaaataacagtaggaggactcgttgcgtcttatagtgggcagatctagagtggcggcagagcgtcgcgagttaagcaanagtgggcatatagcctcattgttaacacctagggagaatagaggcgcatttgtcgaagaagagaaagaaccaatan

SEQ ID NO: 711772 - DNA, 547 bp, Homo sapiens
  misc_feature (522)..(522): n is a, c, g, or t
catagctgcaaccaaaggcgggcccatatgttcccgagggcaaaaacctttcccaggaaaggatttccaaggttggccccctttattaagttaattggcaaagggacaaaattttgggctgaacccttgtccaattcttacccggaaaccttttgcctcagcagaaaacggtataaatagcctgaaaatgtcttattacaaaatatcccaatgtatcagcgagaggttaggcatgtttaatggagttgtcggtaaacatggaaaaccacccgttcgcattgatcaccgcctgtaattccaacactttgttaggacgaactcacctgagatctcctaggtttggcacattcaagacccacccgggtgacatggtgaagcctcgtctctacaaatgagtatgtaaacattaaggaggagtggtggtgccctcatgtagtcacagctacttggaaggatgaggtgggaggatcgcattagaacatgtatgtggcggttgccatgacccaatattttgcctctgcnctcctttaagacagcaagactccgt

SEQ ID NO: 711773 - DNA, 506 bp, Homo sapiens
  misc_feature (291)..(291): n is a, c, g, or t
  misc_feature (497)..(497): n is a, c, g, or t
tgcctagatcctagccctaagggattgcataatcacaggtgtatcaattaggacccacactcttttgagatagggcagccaacccacagtggccctgagctctatgtagcagaggggggcgttaaacttttgatgttcttcttacctcatgagcacagaagttcatgaccacacctggtttatgtggtgctgggcattcaagtcaaggccctacgcatgctgggcaaacactttgccaactgaggtacatctgcagtccctttttgctttttatttgaagacaagtaattngcccagactggccttaaacctgccttagctttccaagtagctgggattattcggcctataacacaaggctatttgttttttgctttaaattttttttttaacttcttcagatggatgtctccctttcatcacctacaatgtttgcttcaaagctcttaaagtgtggatgctagagaatgatatctatttaagagaatcatgacatncaaatttga

SEQ ID NO: 711774 - DNA, 661 bp, Homo sapiens
  misc_feature (200)..(200): n is a, c, g, or t
cttgacgtccgggctgtgggcccgctttctgccgagatgccgaaggtcaagtcgggggccatcggcgcgccggggcggtggagcagcgccgggagctgaagagcgctggaggactcatgttcaacacggggattgtgcagacattttgaaaaatcctctcattataacagcattatcggataaggctgccttaagaccanatgatgtaggtgctggaagtttggaccgtgggaacgtggcaacattgactgtgtaaaggttggtagaaaagggcaaaaaggggtgtcgctggtgaaacttgacccaagggctagtaagctgaacttcacaaaagagttcaggcacgcctgtggccagcaaacttcaagtactggtgggtggatgtgctgacaacaagatttggccattcttgtgatacctggtgtgggcaaattggccttatcagatctctccgccttgtgtcttcaagcttgtgtgctacattcgacctttttccaggtgtgctatacttactgtctcacagagacttggcctccgatgtgttgcaaaactctggagatacgttaatactgggagactctcaatttaatacacagctgtgggcaccgtgtggacccattcttagttgaaaggtggggaaacggaaaataactttccaaga

SEQ ID NO: 711775 - DNA, 1065 bp, Homo sapiens
atggctgcggcgggtttaattcggagagggctggacctcctgtgacttccgagttgcgatgctgtacttctctttgtttgggcggcttcggctctgctgagatgtgggcgctggtcagtgatggccattcgggctcagcactgtaatgcagcccagactcagactggggaagcaaacagggtgctggacagtgccaggagatgcctgtctggacacgtgatcctgatgatgtgggagttgctgcagagggagaaggacggcagtgtcgtggcctggagctcattgcctcagagatactatgtggggagcagagtgtgttgtggatgaaattgagctgctgtgccagctgcctgtggccttgtgaagcctttgacctggatcctgcacagtgggtggagtcaatgtccagccctactccgtggtgtccccagccaacctggcctgtctacacagcccttctgcgacctcacgaccgtgatcatgggtgctggacctgtcccgatgggggccatctcaacccacggcatacatgtctgacgtcaagcggatatcagccacgtccatcttcttcgagtctatgccctataagctcaaccggctttagctgtgtgttgtgtctgtccagcccaaaaactgggctcatatgagctaacaaaccagctaggaaaactgaaactgctcggcagttttccaggccaaggctcatcattggctggtgaccagctgctatgctcgcgtcttgaactacgccccggcgttgagaagaaggtgtgtgactgaagtacaaatgcaaacctgcatgcagacattgggccaaaaatcaagtgggcctggtggcttgccaagttagattcccttcggcctttcaggacacagaggaacatacgtcccgacaactaatcaacatgaatcttcgaggtggcaggcaggggccatcaacctaacggaagaggggttaaggctgggaccaaagaagggccgagaacacaaaaaaatagagagcatatcaattgctagccaacatagagggagccaaaaaagacaaggagatgagcataaagagaa

SEQ ID NO: 711776 - DNA, 271 bp, Homo sapiens
tgatgactgggaccgcatttgtggactcagcgtctaacatgttttaattaacaaggctgggcatggtagctcacacctataatcccagcacttttgagaggccaaggtgggcggatcacttgaggtcaggagttccagaccaacctggccaacaggatgaaatcatgcctctataaaaaatacaaaaattagctgggcgtagtgacaggctcctgtaatcccagctacttgggaggctgaggaaggagaatcgcttgagtccacaattttg

SEQ ID NO: 711777 - DNA, 389 bp, Homo sapiens
atcggccatgctcgccggtacccccgagggcgctcaccagtgtccccaacatcgcgtcgccgtgatgctttccagacttgttaggaggggggctgaaggctcttctgcgaagtaaataagggcgccgcacacgcgggcgtttgcacatgcgggctgggtgtcgccccatacagaagtggactggcggtccgctggcatggaggaggaggaggtggtgactggcctcgacgcctctggcacggaccagtggggcctcggggatgcagtcgagaggccgactttggctcagaggaaacggatttctctagacattgaaagcggtcccaggagctggacaggccactttggaaatgaatgaactccaacctagaaggactctccttcttgcg

SEQ ID NO: 711778 - DNA, 883 bp, Homo sapiens
cagaagatcttccgagtgggattgagaggtgctcgctgtgcatgggaggtgtttatatggggtgagtcatcgacacgagtggcgtgtctccgtgtgccgctctttctgggacgttggtttccaggtggccctgtggccacattactgttgcgcggggtaaaaacttcgggccggtgggataatctcgagccagggggaggcgccctctagaaagtgccggggagggcacctccaccggggcctgccgggaaggttctttcgtggttcgtggcccatctcgttgtcggcgaaagaaaccccctttatgttgtgggagaaaaaagttcttaacaccaatctgggcaagacgggtaacctattaactggggcctctctaagacgtgggtttgtgccccctccacggtgcgcgaaaaaggaatgtagtactataaccaggggtgtgcacgggtgtggaagacaaggcaccgctttgtggacatgagccctcacccgcacacgactgcagtgtaggtcgatgccccttttcatgagcaccccatgaaggagtctgttctttccaaaagaccctgggggttagcatttcccccgcagagatagaggaactggagaaaaacccaactgggcggggctattctcttgcgcgcgagtcccacaatgctctccgcccgctacaagccgctttatgacccttctcggagctcttacggcctcctgccccctgggtagccgctcccctctttgcaccacacttcaggggggcgactacatacattgcgggaaaacataaagtgcggggacatgtctttgcaaaaacagcgggggtcccgggaaacccccttcataaacttctccgaaaaagaaaaaaaacaattcgtccaacaag

SEQ ID NO: 711779 - DNA, 229 bp, Homo sapiens
ggtaagatgttttcatcatccagagcggctgcggggaaattaacgaggacctgatggaactcctcatcatgaccaatacctgcaagattgtgttatcatccagagttactgccgtgatcccgtgtttcccatacgctcgacaagataaaaaggacatgagtcgtgccccaatttctgcaaaacttgtggccaatatgctgtcggtggctggggcggatcacatcatcac

SEQ ID NO: 711780 - DNA, 252 bp, Homo sapiens
acatgggcccaataccttgaagtgcgcaattccatccgctacaacggactgatatcaccgcaagactgtgggctgtggagccggcagccgacggcaacggtgtctgtgtgtgtgtcattaagcggagatccggccagcggaagcctgacaactcctatgtgcggaccaccatcaacaagaatgctcgcgccacgctcagcagcatcagacacatgctcctgcaagaacaagtaccgccaccgacctgcgcat

SEQ ID NO: 711781 - DNA, 183 bp, Homo sapiens
agtggatctagaggatcccggcagagcatccttacatcatatttcttcgattttttagatcgtttttggtttaaaatctcttcttcctcaggagtcagctgggctcccttctggcggcccaggggcagcgctatagtgggggactcgataccacgtgtgcggtaccggtgtgctggtcgactg

SEQ ID NO: 711782 - DNA, 151 bp, Homo sapiens
cacgatgcttaatggtcgagtcgagacggcatggtaacgcggagaacccgtctctactaaaggtgcaaagattaggcagccgtggtggtgcgcacctgtggtcccagctactcgggaggctgaggcgggagaatcgcttgaacccatggag

SEQ ID NO: 711783 - DNA, 145 bp, Homo sapiens
  misc_feature (42)..(42): n is a, c, g, or t
ataaccaattaataatgattactgataagtgtatactaaggnttatatcggaattataggggtttcacataattttggaacatgtaccaataacacatttataatgaacagattaatgctttaataaagttctgttgtactatta

SEQ ID NO: 711784 - DNA, 467 bp, Homo sapiens
  misc_feature (428)..(429): n is a, c, g, or t
  misc_feature (447)..(447): n is a, c, g, or t
actactaaaacctaataaccgccacggccctaaggggtggcctaataggctgtttgctagatattgagtgaggtggatagctacccgggtaagggccgtcgcccttgtgttgctacatattataaatacttggaacaactttcaaactacacaacggtaaacagagcggtatgactgatgcgtatttaatgtaggactaaaaactgacttaatactatttcgcatttacctacttatactgtgatttcacggtgtaaacacttacaaaatagaccaacaccgcggaagacggtactaaccctacaaaccccgattatagcgcatcgttactgcctgactggctaacctgtaccttcatcaaaagtggtcatcacgtacccggggtttaccctcgggtgggtggtgggggcgggggcggaggggaaagnnggcccggggtttcccccncaaagggtgtggtggggtgc

SEQ ID NO: 711785 - DNA, 396 bp, Homo sapiens
  misc_feature (357)..(358): n is a, c, g, or t
  misc_feature (376)..(376): n is a, c, g, or t
atttttatatagcgtacgccggtagcggtggtctgactacccagcgatgaatccgtgttgctggtggcggtaatagtactgctagggcggatgataatttggattgagataattacaaaaataatgcgtgatattaatggctggtgacgcgagccgagcggtacaaattgaatgttggaaggaaaaaaacagctacggatgcgttataacggacttacattattatgcatagcgcgccccgattatagcgcatcgttactgcctgactggctaacctgtaccttcatcaaaagtggtcatcacgtacccggggtttaccctcgggtgggtggtgggggcgggggcggaggggaaagnnggcccggggtttcccccncaaagggtgtggtggggtgc

SEQ ID NO: 711786 - DNA, 177 bp, Homo sapiens
gagaacgagtatctgtgcctgctcgtgaggatgtgctctaggagtaatctgtctactccacctgagggataaagggcagctacttactctcctgctacgcttactgttaaagaggaagagtttacactagtcaatctctaacatttgagggagatgatttgcggttgatacaataat

SEQ ID NO: 711787 - DNA, 103 bp, Homo sapiens
catgatcttcaagtactggctccggtctctgacctggggtccctgtcttctcccaatgctccctgattatgctctccagcctccggtactcggtctccaggct

SEQ ID NO: 711788 - DNA, 474 bp, Homo sapiens
  misc_feature (435)..(436): n is a, c, g, or t
  misc_feature (454)..(454): n is a, c, g, or t
gtctctagtggagagccgttttattgggagccaaaactaataccacggataaccatgaacccaagcagagtagtacatagaggagaaaattgaaacagaagaagagaaccccggggtgaaaaaagatgaaaatagaaggcggggaccggggtaagggagaacacaagggggaccgggagagacaacagaaactgaagaagggttttaaactgcgatagggcatatgcccaattgtagaagcaccaagggcagtacggaggacatacccatagaaattgatacaggggaggcggagaaacaagctctcactacatccccgattatagcgcatcgttactgcctgactggctaacctgtaccttcatcaaaagtggtcatcacgtacccggggtttaccctcgggtgggtggtgggggcgggggcggaggggaaagnnggcccggggtttcccccncaaagggtgtggtggggtgc

SEQ ID NO: 711789 - DNA, 360 bp, Homo sapiens
  misc_feature (322)..(322): n is a, c, g, or t
cacgaggaggaacagggggtcccacggggaatcggccacgccgggcgtggcgtgcctggacggctccagcggcagcgtcaccgtctcgtcgttgcgccgctcgcccagcatcacggccggatcgaacgaataggcgatatggtcgatgtcggccagcgtgatgccggcctccttcaggcagtagtcgatcgcatggtagggcagctcccaggccgtgaacggcaccggccgcttgccgtgcttgatatgcgtgaaccgttcgtcctcggccgcggcgatgacctcgccgtcgcgcaccaggcaggcggaggtgtcgtgatangcggcgttgattccaagcgtgtacatggcggctcctca

SEQ ID NO: 711790 - DNA, 379 bp, Homo sapiens
  misc_feature (194)..(194): n is a, c, g, or t
  misc_feature (197)..(197): n is a, c, g, or t
  misc_feature (211)..(211): n is a, c, g, or t
  misc_feature (233)..(233): n is a, c, g, or t
  misc_feature (252)..(252): n is a, c, g, or t
  misc_feature (285)..(285): n is a, c, g, or t
  misc_feature (315)..(315): n is a, c, g, or t
  misc_feature (354)..(355): n is a, c, g, or t
tccctcctgattttaaaatgtttcaagggcaatgccccctcccctcctttaccgaggacagcctgcctttgccacagcaaggctgtcggggtcaagctggaaaggccaacagccttccagtggcttctcccaccactcttgggggcccaaatatatttaatggttaagggacttgtcccaagtttgacagccanagngttaaaggggccancggccctcccaggcgattttgngtttactttaggactgggnccgagggtggtttacctgccccgttgactcagnatagtttaaaaatttgccccctgcacaggnatttttgaaagcaaaataaggtttttttttttccccttnnttgtaataaatgataaaattccga

SEQ ID NO: 711791 - DNA, 399 bp, Homo sapiens
  misc_feature (360)..(361): n is a, c, g, or t
  misc_feature (379)..(379): n is a, c, g, or t
acgcacaaccgcaggtaactagccaaccccggcaatattaccgaggagattagcggcgcacaagattggtgaaccaattgaagtaatagacatgcagaaagcaaagtgttggatgggacagccaagccatagaatgtgagcatttgagaaataggcgcctaaacaaacaattaaaagaataaaaaatataggttaacataatgacaaaagaaatgaaggcaacgattatgcatagcgcgccccgattatagcgcatcgttactgcctgactggctaacctgtaccttcatcaaaagtggtcatcacgtacccggggtttaccctcgggtgggtggtgggggcgggggcggaggggaaagnnggcccggggtttcccccncaaagggtgtggtggggtgc

SEQ ID NO: 711792 - DNA, 416 bp, Homo sapiens
  misc_feature (377)..(378): n is a, c, g, or t
  misc_feature (396)..(396): n is a, c, g, or t
cgtaccgtactccctacacaagtacggttaaagttggacccctgtatgccgacctacgcgtacctgtagccagtgaaacgtgcctgcgctttgcttgtagttaactactagggaacggtaccgatgagaataactaaacaggactgcaggaaacgtcatggagatggccaaatattttgaaatgcccgcttaaactattattgcccgctgacgcggcctgtgattgccgccaccgacaacaagctctcactacattccccgattatagcgcatcgttactgcctgactggctaacctgtaccttcatcaaaagtggtcatcacgtacccggggtttaccctcgggtgggtggtgggggcgggggcggaggggaaagnnggcccggggtttcccccncaaagggtgtggtggggtgc

SEQ ID NO: 711793 - DNA, 145 bp, Homo sapiens
gcacactttgagtctctgtatgaagctgaaggtcttcattccagaaatggttctccctttctcagaactcttctgaagagagactttagatgaaagcaaatgattcagctcccttttacccccattaaattcactttcagttcca

SEQ ID NO: 711794 - DNA, 277 bp, Homo sapiens
  misc_feature (42)..(42): n is a, c, g, or t
  misc_feature (44)..(44): n is a, c, g, or t
  misc_feature (238)..(239): n is a, c, g, or t
  misc_feature (257)..(257): n is a, c, g, or t
gtgataagagtttgtgtcacggagtatgaccgccagcactanantaagagtacaggggaccacggtaacacagctaagcgtaccagcacgcaaaaggccacaccccaccagagcttaccccgattatagcgcatcgttactgcctgactggctaacctgtaccttcatcaaaagtggtcatcacgtacccggggtttaccctcgggtgggtggtgggggcgggggcggaggggaaagnnggcccggggtttcccccncaaagggtgtggtggggtgc

SEQ ID NO: 711795 - DNA, 191 bp, Homo sapiens
  misc_feature (45)..(45): n is a, c, g, or t
ttttttttgggggaaaaacccccccttggggggggcccccaaaantgtcctttttaaccccaggggggggccgggggggggttttccccccttttttcccccccctttggggggccggggggggggggtccccctgggttcaaggtttcaccccccccgggccccccgggggggcccccttttttttttta

SEQ ID NO: 711796 - DNA, 406 bp, Homo sapiens
  misc_feature (367)..(368): n is a, c, g, or t
  misc_feature (386)..(386): n is a, c, g, or t
agcacgagaacgtgagtatgaggatattgctcacgggtgataccgaggagaccaccccaatgattaaaggcagattatgaagacaggaacgaaaaatcaaggaatacttaaagaggagaggggaataagtaggaaagggtgagctaagtgaataatttaaggacgaattaagaaataagaagagaagccataggcagtaatgcgttgcgcaaggccttaatatatggcgccgaggattttatagtaccccgattatagcgcatcgttactgcctgactggctaacctgtaccttcatcaaaagtggtcatcacgtacccggggtttaccctcgggtgggtggtgggggcgggggcggaggggaaagnnggcccggggtttcccccncaaagggtgtggtggggtgc

SEQ ID NO: 711797 - DNA, 314 bp, Homo sapiens
  misc_feature (275)..(276): n is a, c, g, or t
  misc_feature (294)..(294): n is a, c, g, or t
atccatttccgagcgatgtgtagtgatatggggaagacaacttggtaaggaaaacactgaaacacatgcggacaaagcaaagtggccaaccccctatataaactaatcgcggcagggttaagagttgaaaaaaagaacaagctctcactacattccccgattatagcgcatcgttactgcctgactggctaacctgtaccttcatcaaaagtggtcatcacgtacccggggtttaccctcgggtgggtggtgggggcgggggcggaggggaaagnnggcccggggtttcccccncaaagggtgtggtggggtgc

SEQ ID NO: 711798 - DNA, 377 bp, Homo sapiens
  misc_feature (338)..(339): n is a, c, g, or t
  misc_feature (357)..(357): n is a, c, g, or t
ctcctgtcgccagtgccacgcgcccgcgccgggggcagggggcgtaactaatatcggtccagaggtagagacaagctgcgcgaagggtgcgtataaggtaagccaaaagaaacagggagatttgggaggtaagtgggaacaagctgcccgcgtaaagaaatagaaacgtggtatgtctgtgtgtggaatttcgcaagaaaacattatgcatagcgcgccccgattatagcgcatcgttactgcctgactggctaacctgtaccttcatcaaaagtggtcatcacgtacccggggtttaccctcgggtgggtggtgggggcgggggcggaggggaaagnnggcccggggtttcccccncaaagggtgtggtggggtgc

SEQ ID NO: 711799 - DNA, 392 bp, Homo sapiens
  misc_feature (353)..(354): n is a, c, g, or t
  misc_feature (372)..(372): n is a, c, g, or t
ctcttataagcgtacgccgcagcgcgtgacctcccggccgacgtgcgggggggcggcagactgagtgtgtacagggccacccggcacgagtgaggtaggtgggacgaggggatgagatgggtggagaaggcataaaaattagagctaatgcgggcggagaaatggtaggaacccatgtaccggggtggaggaaaagagagctgaatacgagggagccattatgcatagcgcgccccgattatagcgcatcgttactgcctgactggctaacctgtaccttcatcaaaagtggtcatcacgtacccggggtttaccctcgggtgggtggtgggggcgggggcggaggggaaagnnggcccggggtttcccccncaaagggtgtggtggggtgc

SEQ ID NO: 711800 - DNA, 451 bp, Homo sapiens
atctgcaatatgtttgcttatactgttgcaagcatttctaaaactaactctcttcaacattgaaagtaaattgtttgctgtctattatttttcgcatgctcatctatgcgtatattggcattcaatgaaaaaataactaggttgtatttttgccaagaaatgatagtttctttttatttctaaacaggcatgtttcatgtttttcaacaaactcaaacctggcttatgttctacagaaatgagctttctggttgtatttcttcctttattaaatggttgttttttgttttattaatggcttgtaaaaacagatgtttttaaatacagatgttccaaactaagaaaaaatacaaattcagaaaaatgataatggtcaacatttgttttctgtacttattccaatattttttgtttagtctgttgcctttgtcaataaaattgtcaaaaatga

SEQ ID NO: 711801 - DNA, 643 bp, Homo sapiens
acttacaaggggatactaaactctcacggccagtgctgggcttattgccttgtcagggaatttctccattcaagggttttatgtttggaggatgtgctggccctatttttttgtctgtttgttttttgagacggagtctggctctgtctcccaggctggagtgcagtggtacgatctcggctcactgcaacctccgcctcccaggttcaaacgattctcctgcctcagccgccgatagtagctgcgataacaggctgccgcgccaccacacccagctactttgcatatatatttagtagacacggggtttcaccgtgtaagccaccgatctcctgacctcgtgatcctggccacgctcggacttcccaaagtctctgaggattacaggcgtgagccaccgtgctcaggccgcatggcatctagtatatcaccgactagcatttgagatccctttcttccccgaaggcaatacagaggcctccagggcaagccgtgcgagaaccggatggcgacaggatcgtaggataatgacgccaaagaccgatagcagtactcggaatcgcgcctggagcatcagtcgcgtgaacagcacaagtgtccgacggagcggaggcaaaggatcctggaccaagccccgacgacc

SEQ ID NO: 711802 - DNA, 304 bp, Homo sapiens
ggaaatcaggcttgggtgcagtggctcacaccgtgaaatctcagcactttaggaggctgaggcgggtggatcacttgagcccaggagtttgagaccagcttgggcaatagtatagtgagacctcgtctctactaaaaacaaaacaaaacgaaaaacaacaacaacaaaattagccggacaagcgcctgtgatcccagctacttgggaggctgaggtgggaggatcgcttgagatggtcaaggctacggtgagttgtgatggcaccactgcactccagcctggatgtgagcaagaccctgtcttg

SEQ ID NO: 711803 - DNA, 299 bp, Homo sapiens
tcgcatgggtgtaacatgagaagtatgacaacagctcaagatatcagcaatgcctctgacagcaatgcttagaccctggccaaggtcatccatgacaactttggtatcgtggaaggactcatgacacagtcatgcatcacttggcacccagaagactggggatggccctccgtgaaactgtgcgtgatggcgcggggtctccaggaacaattcatccctggcctctactggcggcttgcaagggctgtgggcaaggtcatccctgaagcttgaaccgggaagctcaactggcattggcc

SEQ ID NO: 711804 - DNA, 169 bp, Homo sapiens
ggctctagagggggtagagggggtgcagtgggcgagaatccttgcatttggccgggcgtgatggccacacctgtaatccaagccctttgggaggccaagaagggaggattgcttgatgccggaagttagaagtcagccaagataacgtagggagacctcctgtctctac

SEQ ID NO: 711805 - DNA, 208 bp, Homo sapiens
gccccaaggcaaaaaggtcctcacagaggacaagggcctccagcgccaaaaccgttttaacggccaaggggttgggtttggttcaaacctgcaaaaaaagctgggcaagcaaaagtatttcctggggggtgcgggggccattggctgggagctgctcaagaactttgccatgattgggctgggctgcggggagggtggagaaatcatc

SEQ ID NO: 711806 - DNA, 137 bp, Homo sapiens
atgaagaacagccgagcggacgagggacagccagaagtagcttgtatctggaatgacaagaatgttcgaacacgagggaaacaccgaaaacacgggcaagagagttgaggaaccgttaaaggataaagaaaagccag

SEQ ID NO: 711807 - DNA, 177 bp, Homo sapiens
catgaagtatcacctggcagagatttcccgggctgtgcgtcacacaggtagacactgagatggttggatgtgcacaactctgcctgcgtgggtgtctgtctgaggctgcgccacattggggggccccacagtgccacgctgtgcccacaggccccatgttgctgccccgggggaggc

SEQ ID NO: 711808 - DNA, 168 bp, Homo sapiens
  misc_feature (168)..(168): n is a, c, g, or t
aaatcctgttacttccattggtcttcccaatttaggtctttaggtgcaagaatctgaattgattaaaactagtgtattggatccttggggttaattggtatggttctaacgtttaggtgtaaggaatttgggtaggggttatatagtttggttacggaactgggtggn

SEQ ID NO: 711809 - DNA, 1126 bp, Homo sapiens
gcttgctagcgggcgtgtgcagacgggcggcgaccgctgtcggcgctactcgtgcttgctcgtatgcgcgcgcttgctgttggggcagttccacgcgctcgtcgtgagctaccctgcgttgtgtgtgcgcagcccccactgctgtgtggctcgcccgcccgcgccagtctgccacgagcttcccgcctgtggccaggttgcgcgccgctattcgcgcgggttcggcagccgttccgacggggccctccgacctctctatgagctcctttacgggctttagtgggcctccccaggcggttttccgggtgtgcgccgcgcggctttgccgcggcctcccggcaataggatgttcccccgcttcttggagaccctgcttacgtggaagagatccctgggggaagactcccttgctttcttgtaagtgcggagttcatgaggagaacgtattgcgtacccccagaagaaggtggtcgtccccgcgcaacatgggtggcggagagaggtgcgcatccagaagggccaccccccgatggcaaggggagaccctggtattatggcccctttgggaagaggatgaaccatttcccagaagtgatccagtacctgggccgcccacgtgggacacccgtgtcccccgcggcaccttcagcttccgttccccgtatgcctcttggagattttctttgaaggaagagaccaccgccccgagggcttcccatgggtcccgcttctccgcccgaggagatcccctcgaggattccggccattactggccaaacggggtcgacctcgaaaccctgagaaggcttagactaaggaagtcccccaggtgaaacggggtcgaggtcggcccacctaaggtccaaaatcccttgagcttattggaccagaccagacctcccgccccctctaagagaacttggaggccccaagaaacctttgaatgatggaggattaacgccaagagttgctataaagccaagaagaagattgaggccagaaggttcaaccggggagagttgtccagactactatccacagggccaggcccagaaattagccggaaaccagagacccagagctttaagcagaaggaagcttagaagaaatcccaggcttagaaaga

SEQ ID NO: 711810 - DNA, 671 bp, Homo sapiens
cctcagatgagtttggccaacagcctactgggcccacttcctttaccaatcagatttaacagagctgcatttgcattcttctgcagtcggctcaccatcttccatttcagtggcagaagaattttttaagggtttcaatcacttattaatgcagagagtattgaatgtaaatcagcgctctctagtcttcattaaggcagcgacgtctgggttgtgaaaaatgatacttagagatgaggcgacatgaggcgagatattattcatcatagatggctaattggagagtaccttgctatatatacagatactttcatggacattctgtatgtatgctaaacgagtacgagtattttgcagcttaaagtctctagtatgtaagatgcataaagtcaatctaatagcgttgagttttgttatgcattatgatcgtgaagatgttataacaatttctagaagacaccttggtgtatcacagcatgcatgtcttatattttttagtattaaggcctataggactatgggtctctatgttatttggttcacttattcttttcttatgtgatacaacatatgatttaagggcatgaataagcatctttccacacaatggacatttggactgtggttatggtttctggttcgaacactgatttgtcagacggtatttttgg

SEQ ID NO: 711811 - DNA, 249 bp, Homo sapiens
gagctgctctagagggtaaactgacgccgagaaacccaactcaacaccatttcaggataaacacatttaataaacagagataaaagaaaaacttccttaacacaataaaggtcatatatgaagaacacacagctaacaaaatactcagttgcgaaagactgaaagctttttccctaagatcaaaaacaaaacaaggccagacacagtggctcacacttataatcccagcacttctggaagcaaacatag

SEQ ID NO: 711812 - DNA, 142 bp, Homo sapiens
  misc_feature (135)..(135): n is a, c, g, or t
tttttttttttaaacagggttttgctctgttgctcaggctggtgtgcagtggcatatcatggctcatggcagccttcactgcctgggctcagccatcctcctgcgtcaacaaccccacaacccccagagtagctngggacta

SEQ ID NO: 711813 - DNA, 622 bp, Homo sapiens
aaagttggcagtcaaagattccctcgaatcctcgtgctccatctgaatcgattttttgcctcccgaggctccatcaaaaaagttcagtaggtgtagactctcccctgcagcgactgagcctaggggactttgccagtgacaaagccggaagtcctgtataccagctgtatgccctttgcaaccactcaggcagcgtccactatggcccctacccagccctgtgccggtgccagactggttggcatgtttacaatgacttttgtgtttcccctgtcagtgaaaaccaggtggcatccagcgaggggtacgtgctgtttttccaactgatgcaggagcccccccggtgcctgtgacccctttaagctttggcacctgtgaagcccttttaacacccttaagccccaggctccccgttttcctcaaagacgtttatttttgtgtctttttaatcggggaggggggagggggtggttgtagctcccttattttttttattaaaaaaaacccttccccctggagggtcccttgtttcccagccccatgtacaaagctccccaagcccctgcccatgtacagcccccagaccctttgcaatatccctttttgtgaattaattttttta

SEQ ID NO: 711814 - DNA, 80 bp, Homo sapiens
ttcaagcttctaacgatgtacggggacatgtctgcaatgaagagatttattaaattgtaaacattaaagtggtcaaaaaa

SEQ ID NO: 711815 - DNA, 467 bp, Homo sapiens
ccgttgcatccaatagtgagatggtgcatgaaaccttgtaatccaaatattttggtgtgaaaaaagggataaagagactttgcctacacggaaaattgggataaagtgaatactaatataaaaggaagaggaaaagataaaggcatgaaatatattataactgaaaaggaggggctgcaaggcgcggctgtagtggtataaatggagaaaactactaagcacaatatacgcttgccaccgacttatataattattgactgattaaatattgttatttgccggaccttgccacattttgtacctattacccttgccgcctgattggccaatacacggctactacggccgcttacataaacaaacactactagacgagaggggaaagaaaatatatgcaataccgcctacccggcaatggcgatggccacttcttcacaattgaaaataccacggccattggatatact

SEQ ID NO: 711816 - DNA, 394 bp, Homo sapiens
  misc_feature (355)..(356): n is a, c, g, or t
  misc_feature (374)..(374): n is a, c, g, or t
tgacgcttggcactccatgatacatgttgcacgtgcacgcccccttgacacggagtttaatgtatgcgcgttgggtcacgttttgggcgccgacaagaatgccgccatacactgcgtgaggaggcggagctatcagaaagaacacaataagtacacacatgcctgtatacatgatatgaaaggtaaagtggatgattacagcccagcgagtagaagaagattatgcatagcgcgccccgattatagcgcatcgttactgcctgactggctaacctgtaccttcatcaaaagtggtcatcacgtacccggggtttaccctcgggtgggtggtgggggcgggggcggaggggaaagnnggcccggggtttcccccncaaagggtgtggtggggtgc

SEQ ID NO: 711817 - DNA, 381 bp, Homo sapiens
gtagagagatcgcccacgccccgacgaggactagatctctgaatgtatacagtgttaaaaaccatctgccttcctgtgaaccggggcagatacaagatggaccacaacttgcagactaactttttcaatttccaatgtacctgctttaacacacaggggagttagtttcaacagtgctattttcaatgcattcattatttcaaaacttactggaatatttgacgattacttgctgcaagctggactcatgtgaaaataaaccttgacttcacagagaagtctacattgataaatatatatccgttgaattaataacagtgtaagcctcacatatgtatacaaaaagtaaaatgacaaggacgagaggagtttttcatggaa

SEQ ID NO: 711818 - DNA, 121 bp, Homo sapiens
  misc_feature (1)..(1): n is a, c, g, or t
nagaccacattagaaaggcaacatccagctctgagcggatttaggggcggaatggggctggaatcttcctggcagacagagccaaccaatcgaggccctggaagaagggatggtaccagga

SEQ ID NO: 711819 - DNA, 383 bp, Homo sapiens
  misc_feature (344)..(345): n is a, c, g, or t
  misc_feature (363)..(363): n is a, c, g, or t
gagtcgtccgtgctgtctctaggtggatacagatacagatgagggtaaataaattatataagaaagataaatgcgacaaagtgcaacgtgactgggaaatgcaacattatttgttggtgccacgctgtgaaacaaataaaaaacggaacaggaggaggtgaaaaataataggccgcataaggaaatagagcatgttgccggtacaacaagctctcactacattccccgattatagcgcatcgttactgcctgactggctaacctgtaccttcatcaaaagtggtcatcacgtacccggggtttaccctcgggtgggtggtgggggcgggggcggaggggaaagnnggcccggggtttcccccncaaagggtgtggtggggtgc

SEQ ID NO: 711820 - DNA, 110 bp, Homo sapiens
cagggatcacagaagtagagttgaggtgtctggtcacagtcgcgcttccgcacttgaggcagatgggacatggtctgctctgcgtagtcgtatgcagaagccgctgcccc

SEQ ID NO: 711821 - DNA, 360 bp, Homo sapiens
  misc_feature (321)..(322): n is a, c, g, or t
  misc_feature (340)..(340): n is a, c, g, or t
aaagcgtacgccgacgtacaacatagctatgcgtgatattatacaaccagtgttgcgatatgattatatatgttagtaaggcgcacatgtatagctggaatatatttaattatttgtgaagatggagaaattaaaaaggtaccgatgaataacatgcggggtgggtgactagaagatattatgatattatgcatagcgcgccccgattatagcgcatcgttactgcctgactggctaacctgtaccttcatcaaaagtggtcatcacgtacccggggtttaccctcgggtgggtggtgggggcgggggcggaggggaaagnnggcccggggtttcccccncaaagggtgtggtggggtgc

SEQ ID NO: 711822 - DNA, 349 bp, Homo sapiens
  misc_feature (310)..(311): n is a, c, g, or t
  misc_feature (329)..(329): n is a, c, g, or t
acaatgcgatggcattacacgctcgtacgatttgtgacccgcaagtggtagacagtgcgacgcacgtctaacggtttggctaattatctgcttatattagttatataaatttcagcgcgaaccagacgtggcggtacgccagcgtggggttagctaaaaaccacttggtgctgcacctgtttatacaaaccccgattatagcgcatcgttactgcctgactggctaacctgtaccttcatcaaaagtggtcatcacgtacccggggtttaccctcgggtgggtggtgggggcgggggcggaggggaaagnnggcccggggtttcccccncaaagggtgtggtggggtgc

SEQ ID NO: 711823 - DNA, 358 bp, Homo sapiens
  misc_feature (319)..(320): n is a, c, g, or t
  misc_feature (338)..(338): n is a, c, g, or t
gtcccacatctataataagctacaataagccagctatcataccaaatcccccataagctaaacctatattaactgggcaagaaatagcaaggaatgaagactgcggccagagccccaagcattaactagagaagactaacctagaggaaaaatgataaatttaactccagtagagatagaactcttgcccaccagatgccccgattatagcgcatcgttactgcctgactggctaacctgtaccttcatcaaaagtggtcatcacgtacccggggtttaccctcgggtgggtggtgggggcgggggcggaggggaaagnnggcccggggtttcccccncaaagggtgtggtggggtgc

SEQ ID NO: 711824 - DNA, 399 bp, Homo sapiens
  misc_feature (360)..(361): n is a, c, g, or t
  misc_feature (379)..(379): n is a, c, g, or t
aaagcgtacgccgccgatatacagttatagatgtgagacccggcgcgggtaataacggggtggatggagtgcggcccgggtaagccaactgatgcagaaaacggcatttgggactggaccccgaggtttgggtggaaactaaaggcctgcagggtggaaagcctatggtgatgcaacgcggtgtgcagcaagtataagggggggggaataggggtgttaaagcgattatgcatagcgcgccccgattatagcgcatcgttactgcctgactggctaacctgtaccttcatcaaaagtggtcatcacgtacccggggtttaccctcgggtgggtggtgggggcgggggcggaggggaaagnnggcccggggtttcccccncaaagggtgtggtggggtgc

SEQ ID NO: 711825 - DNA, 351 bp, Homo sapiens
tggatctccagttttccaatacattatgctaagtgaaagaagccaaactcagaaggccacatactaagtgagtctcttcatatgatattctagaaatatccaaaaacctgtatggaaacagatcagtggtggccaggggctgggggtgaggggattaggttttgacttcgaagggacacaagggaactttgggagtagtgggaaacttatgtatcttgattatgatggtggttacgtgactgtgggtgtttctagctgcacagaactgcaaaaatttgatttatccataaaattggatacattttactgtatgcaaattttacttcaataaatctaaaaaatataaaacac

SEQ ID NO: 711826 - DNA, 362 bp, Homo sapiens
  misc_feature (323)..(324): n is a, c, g, or t
  misc_feature (342)..(342): n is a, c, g, or t
aggctatcctgttgggatgcttggctgcatgagatgcaagggatgacggataataaaatgaaagctgtgcaaaatggcacatgattgagaacaccagtgagaaggcgtaatgaattaaaaagaacttgggaggagaattgaacacagctagaagttgtgaaaagaaagtctgcatgatgctagacggtactaaccctacaaaccccgattatagcgcatcgttactgcctgactggctaacctgtaccttcatcaaaagtggtcatcacgtacccggggtttaccctcgggtgggtggtgggggcgggggcggaggggaaagnnggcccggggtttcccccncaaagggtgtggtggggtgc

SEQ ID NO: 711827 - DNA, 424 bp, Homo sapiens
tgtgttgcaacaagagtgaaacgctcgtctcgtaaaataaaaaaaaagtccgggcttgactggctcacacctgtaatcccagcactttgggaggccaagacgggtggatcacgaggtcaggagttcaagaccagcctggcctagatggtgaagccctgtctctactaaaactacaaatattggctgggcactggtggcatgcacctgtaatctcagctactcagaagtctgatgcaggagaattgctaaaacccaggagggagaggttgcagtgagccgagattgcaccactgcactctagcctgggcgacagagcaagactccgtctcgaaagaaagaaagaaagacaggaaattccccaggaaagtacctcggctgatttcataaacaggtaccgaagaaagcagaggcatgtggcggactt

SEQ ID NO: 711828 - DNA, 1582 bp, Homo sapiens
gggcccgggggccctggatggccctgggatggggaaccgcggatggcttccgcggaggtttcggcagtggcatcctggggcctggggtcgctggcctgtggacgtgggccgtgggcctgaggcctgcggagctacgcggagtgcaatggcctgaggataaggagtggatgcccagtacaccaagttgggccgcattggatcaaggcaccatgaagcatcacagtccactggacaggcagatctcatcgtcatatcatcccgtgccatatataaggcaatccagcagcatccattgcatttacttccatgggagagccatcatctcaaagtgattgcagagttatacgcacagcattcattgcccagattgcagcacagccagcaccccgtagcacgtgcccaagctgcacccagtgcttccaaagtgccatacttcgtctagcataatcagagagagcactcacgaatgggcacaacgatcagagaatcttggggtgcgttacaagttgcatcccgacatggaacgggtagtgcacaagcacagacagatctcactgatgaggggcacaatacaatatcctggtgaccaaagacgtccttcacaatcagtacacacccggatgactggccatgcacgggcttaaccatggagggggaaaccacaagaacttcaggcgcaaaatggacacacagcaaacaaacttggtgcacccttattggaccaaacgggtagcaccatggggcaccagacatagacagacggctactttggttagccatatggagattaacaggcacgctacaaataacacacgttggcgacaacccacacaagggggggagccacataggagcacgactacaggtacattaacacgggtgaacctatggttgggccgccctcacacagacaacggcagtgggccgtaccaattggacaatgacgccgttgaggagctatttcagcacttggaaacttggcgtaagacaacgcattacaaagaaccaccagggggggcgcttaggcacgactaagggaccaaaacacacacttggtgagtggaccacacctcttaacagacaccacaagtgagggcaccacaacacttaaatggaaattgcgaccaagttataccttcaaaagagaaagccgttaacacaggagttaaacgcttgaagacacccccgccaggacccaatcaatgggacaacaggaaagaacctaggtttttccaccgcaactcgttctctcccgcattaatcccacgggcaaggatctccgccgagagacccacacagtactgacgaaaacgaacccaaaacaacactaggaaagggtcaccccagagcagcagacggggaaacacaccaggcgcacccccgaagatgcgaggcggaacaacaacgaaacggagggttctaactaaccaaagacaaacgacaacgacggcgacatcaacgggctacaacaacaagacacaacaaaggacgggcacgcatccacaagaaaccaacaagaggacacaggcagaaaacgatcccaaacgatatagacaacagggcgactcaagcaacggacgaa

SEQ ID NO: 711829 - DNA, 356 bp, Homo sapiens
  misc_feature (317)..(318): n is a, c, g, or t
  misc_feature (336)..(336): n is a, c, g, or t
atagttgaccagtaataagctggtgagggaccaagcattggataggtaaggaaattgaatacacaaagggggaggactagcaggtgggaaatgcggcagtattaatgcggggctagtgggggtactgactgacaactggtgcgagccggcgctaataaatcagaaaatgggagaaatgtgaaatgacaaaatgggaccccgattatagcgcatcgttactgcctgactggctaacctgtaccttcatcaaaagtggtcatcacgtacccggggtttaccctcgggtgggtggtgggggcgggggcggaggggaaagnnggcccggggtttcccccncaaagggtgtggtggggtgc

SEQ ID NO: 711830 - DNA, 144 bp, Homo sapiens
tgggtcgctagggagaatagtagtgaggatgtacgtccgtggcgcgcatatgataatgactgcgccgatgaagctggtaggggtctggattagaatggctgtgactacgagggctatgggggtgattgagggaagcgtcgcgca

SEQ ID NO: 711831 - DNA, 369 bp, Homo sapiens
  misc_feature (330)..(331): n is a, c, g, or t
  misc_feature (349)..(349): n is a, c, g, or t
ctatctagttggagtcaaaggactcgagcgggttggctgccctgtcgcaaccagaaatagcggggaagagtatggcaacgcaatcgagggcagaaaccttgaaagggacggagaaaggggcgagggcggaaatagcacctgcgttcaaaggttccactacgtaaagacgaccctaaaccgtagtgactaaagcaaagatgagacccgtgccccgattatagcgcatcgttactgcctgactggctaacctgtaccttcatcaaaagtggtcatcacgtacccggggtttaccctcgggtgggtggtgggggcgggggcggaggggaaagnnggcccggggtttcccccncaaagggtgtggtggggtgc

SEQ ID NO: 711832 - DNA, 399 bp, Homo sapiens
tcggatatccccaaatacagaggtacccacgggtattcagtacatttttaatgttctctcccccacagacaactgaggttaagtggtgattggcttaagtgacagtcaccgcttcatgatgttgagagtagtgcctctcatattcaattccggggtccggtaggaagttagaagtggggatttctattgtgtgctaaccagcagtgtctgtctttaagacaggcttgagaactatgcttttatgagtcatacacgagttttattttgtggaaaggaatctgggtgttgaatggtgtgttggtgaccgttttcaactgtggtaatgaggcagtgagtggatttacagaaaagaaatccaataatttgttcttccgtgttgaagaggatactgaaactttc

SEQ ID NO: 711833 - DNA, 915 bp, Homo sapiens
taacggtctagctccccctcagtgtgctcttacagcctgtaccaagtgtggcttaatccgtcggcaccaccagatctttctccgtgagattcctcatgactaagaccgactggccatgcacagatagacggtaacccgctactcaccgatcgacaacctaccacaacgatcatcttctggtgccatggggtcccacctatgaatccgtggaggtcaccactcgggcctctgtacacgagccccgtggtgtctccttcgtgcttgctgcagcttggatgtcatacctgcgtggccttctcgctggtggctaagcgtgggcagcctggacgagggtccatgggcaactggtccatgttcacctggtgcttcgtgcttcgtccgtgacccttgatcatcctcatcgtggagctgtgcgggctccaggcccgcttaccccctgtacttggcgcaaattccccatcagccttcgccttgctatagcggtccctcttactagcctctacggacctccagtcatctaccccagcacctatgtaccagtatcctgtagccacggacacgatcgcggagaccacgccatcgccaggcaacttcttctcctgcatcgcgtgtgtggcttacgccaccgaagtggactggagccgggcccaggccggtgagatcactggctatatggacaccgtacccgggctgctgaaggtgctggagaccttcggatgcctgcatcatctatcgcggttcaatcatgtgacacccaagcttgtaccatggcaacaagacgagcccctggacgtgggttacggtgcgaaggaaatacggccatatgcgttcaatcctaaacggtcaacatcgcaaaccattgctgaaaactgaaaggaattggaccaaagttgctcacagaatcaccttcaccag

SEQ ID NO: 711834 - DNA, 543 bp, Homo sapiens
  misc_feature (465)..(465): n is a, c, g, or t
gcccttccaaagctcacaggccatgcaggtgagctttgaggacagtctccccagggcatttgggttgatgtgagcagctgagggaaaagggatgggcattgagcagcctaatcttcttgaggggaacagaagcacagatgaaatatggggtgaggagtaaggctagggagtaggcaggcccacagtatggagggcctggaatgcccctactgaagcatctggtttccaacctgagggcataggggaacctctgaagggtctgcaccttcccaagattaatcagccggacaacagtgtagagaagtaggcactactgggccttatctggatgcctgccgtggactagccactgggcttagcacacaacggccctagacagtggagagtgttgttatctctactttacgggtgagaaaactggaactcagcgtggtttaggaatttgcccaagttctcacagataanaagtggcagagctcagagctcagaggtcgacgcggccgtgaatttagtagtagtagtcgacccgtgaattccggaccg

SEQ ID NO: 711835 - DNA, 138 bp, Homo sapiens
gacagctctctctgtggggctcatttctgagggcagcttccaggaatgctcagctcccggagtcagtcactggacatcatggccgtgggcaacatgaggtactgtgtgcgtcccctgtggacacaccattgttctgtc

SEQ ID NO: 711836 - DNA, 271 bp, Homo sapiens
cacgaggaattgacaggttatcaactgacaggcatgaattggttggccaatctatatgaacagggtattaatggcattcttgctgatgaaatggcccttggcaaaacagtacagagcattgcccttctggcccatctggctgagagagagaacatttggggacctgtcgtaataatttcacctgcgtcgacacttaacaattggcaccaggagtttaccacatttgttcctaaatttaaggtgctaccatactggagaaaccctcacgata

SEQ ID NO: 711837 - DNA, 502 bp, Homo sapiens
  misc_feature (2)..(2): n is a, c, g, or t
  misc_feature (56)..(57): n is a, c, g, or t
  misc_feature (100)..(100): n is a, c, g, or t
  misc_feature (222)..(222): n is a, c, g, or t
  misc_feature (247)..(247): n is a, c, g, or t
  misc_feature (341)..(341): n is a, c, g, or t
  misc_feature (379)..(379): n is a, c, g, or t
  misc_feature (381)..(381): n is a, c, g, or t
cncccccaccacaaaggtagggttcggggagtttataaaaaactgttagtaccgcnnattgccggacgcccccccctttttctcccataaacaccggggncgcatccctccgtttatccagccggggggataattttttcccggagacattttttctttgctttaggccccattaaaacattttttaaaaaaaagggtgtcggtccgattccgggatttttnccaccccgcggcccgtgtggatccngggggcccctttttctaatagaacttccgtggacaaaacagggcagcagggaaagtttttttctgtccgtatgatagggtttggcccaaccccnaacacgaaagaccttttcctgtcccgggtaattagttngncggccggcaaaccccccctccccggggtttttgggttggccgaggaaggttgggacggaccccgttttaaaactttcccgggccccaggatggaaataaaacccccccccctgccctggga

SEQ ID NO: 711838 - DNA, 360 bp, Homo sapiens
  misc_feature (1)..(1): n is a, c, g, or t
ngaggtgccagaggatccatttctagggctacagtcgtctgcatctgcattagcttcgtccggttcacaataggcaactcaatagctgacatgagtgtatcagtcacagttagggctgtatgaattctgcccttcagatcatcagtttgagctacctagcgcttctgcatggtgtatgctgtagtactctcggtaaggacatctctcagatgctctgtgggtctctctggtccagatcgatgctcacaggtcctcaaggtgttctcaatggcactctcctccatcctatctattccagtgtccgtatattatatatagcccaacactctgcgagcatgcgtgtgccgatgtaatatctcc

SEQ ID NO: 711839 - DNA, 347 bp, Homo sapiens
caatactaaattataacttaaaatacacatacacacatttacacacactctcacacgtcacttcttacagaactgtgcttggggaaactccatttgttgaatgccactgaaggcatattttgctaaactgctgctccatgtatttttgtttggaacactctatcacattaaggcacagctgtttattgccatgagcagaaaataaagcatatgcttgtggccaccagaatgttttacggtctttcacgcttgtataaaatggacctgcagatacgtttaagtgttctcatgatgctatagttgagctgaaatgtgacatctaaccattttgcaaaagtgtgccaggt

SEQ ID NO: 711840 - DNA, 402 bp, Homo sapiens
ttattggtctgctctctaggctggcgtgcagtgtgtgtcatacctcactgtaggctgcctagtacctgcctcgtgcagtgattctcctgcttcagcctccccccgtagtctataactacaggtgtgtatacactgggcctggctaagtgttattatgttttggagagatggggtcttgctatgttgcccacgatggtcttaaactcctggtcttagagcaatcctcctgcctcagcttctcaaagcactgggattacaggggtgagccactggtcccagcccagcagtttaatttctgaattaataaactatctaccttccagctccacagggaaagccaaaattacacttgtgttcttggagacacttttaccttttaaaatccccaggtagatttggaag

SEQ ID NO: 711841 - DNA, 675 bp, Homo sapiens
tggcattattggaaccttaattttccaggtgatttctggtacataaggagtatgagagtaacccttttacaaatggaactaatttactaaaacaaggacaaaactggaacgtgggtatttggatggtgaactccacagggagttaacagcttcaaatccagccaaagaaattggtgtacaatctctttcagctatggcatctggataggtgctggaaatctttccatcagcccggataagtggcccaaacaagggctagggaggcgggcgctgagagacagaacatggaaaacaagaaaaggctatctctccacaactcttggtgaatccttggcagggggcacacacagttaaataacaaagataatacgcccctataaaaccacccccggacgaatcagagatcaacacaagggccacaggagggagccctttgcaaaaagagagcccaagggggcgaacgaaaatcacctggggggccccttagtgggcgatatacgaggacaaaacccatctaccaggcagctaacaaaccgccgccaccggggcacacgagaagcactcccacacaaagagggcgtgggcgagagtgtgggggacaggcaacaccagaaaggcgcacaaagaaacccgggaaagctgggggggcccaaaacagagccaagagaacacccg

SEQ ID NO: 711842 - DNA, 155 bp, Homo sapiens
agtggtgtgattagctcattgcagcttcgactatcctgggcccaagcaatcctcttgcttcgtcctctcaaagcgctgggattacaggcatgagccattgcccctggttcatttatggagactgtaagagcaaaagcttttctaaatacaagaag

SEQ ID NO: 711843 - DNA, 1452 bp, Homo sapiens
ggtggagtgaagtgtcacgccgtcggtcgcgattgacttctaaagagtcatgctagtgatgaacaagcccagaagagaaggaagagagaatagcaaaggagtacagggactggactctgtcctcagggacaacttaacatttcaggggaacgatggccatagaattctctcaggcggagttggaaatgcctggaaccctgtcacagagggctttagtaccaatggatgtgaatgtcggagaactacacggaacctgtgtctccctgggaattctctcttcctggactctgaatattaagctcgcatgtcggagcaaaggacgggagccgctggtctggttgacgagtgaacgttgaaaagtagcaataaacttcagatgggaggggatgtgcatcaagacggtgtgaagcagcagggagcaggctagtagcatgtgtgggaaggtcaaatggcagatagacgacaaagccagattagattgagaataagatctttgggacgtaatcctcgttttccaactctcacaatgctagtctggacacgtgggaggactgaagtttcgcgacgaatgggaaatagggggctcaatgaagactggcactgtaaatgcaaagatctgagacaaccagtgggggattagaagagcgcacataggattggcccgtccgtggatatgagcccctacgtggctggtccgacagggaccacactcgggtcgcgtatacgcaacggcttgttacgataaaacgcggccacaactctttctaggaagctaaggggaacctcgtatttcctggactcggaatttcttttccattcttgccactccactcaagcacaagaaggcgacgcataagatgtaaccacccgcgtttttaagcatcggaacccacagaggcacccttgttactggaacagtctgctgtcacattggaaatgggcaaattacgctatagagagggtcccttatgagctagcgatcattgcgttgtcccccaagcagcacagtggagcgtttacacaaccatgctactacaaggtgtaagcttcccacggcagtagccatgaaatgagaacaccgttttacccatacccttgtgtacacttcaccaggttggccgcggccaacagtggccacactataggaatcctgcgagcacagtgtgcggacaccccgtttggacatagtacctacagttgtggtaagaacatatacacatgacactggtggagggagcgctaaaaccccttttagaagaaacctgcgtagattgtttcttgcttgtgaacacaagggcattataaaaggagtagaacaaaatgtgtagaagctttttgtgacaggatacagatctaccaagaagctgtcgaatctccaagcagtgagtaacgcgtggaagtgaatttgactacatgaaattgtttggtaacaaagtattatacagtgatgag

SEQ ID NO: 711844 - DNA, 331 bp, Homo sapiens
cttattggccgggggtaggtgttccggccaagtggggttggttggctaaaaggggggaattaatttattccccaccaccagttgaggggaaattttggccaccgaaggagtttgcccaaaaaccaggggcagaaaatggtaaagggggttaagccttcggaaaaaagtagggggccagggcttttccaaaaaaagggaaattaaaggtaccgattgtagaactgtaagtagggaagggttgggaagcgaaaatttctggggtgaacctttaaaggcctcctttgaatggctgaataaccaatttttaaattaaccggtttttttaaccggg

SEQ ID NO: 711845 - DNA, 1226 bp, Homo sapiens
gcgctgcgcacctacctgaggctgcgggcgctgcagacggctccacatgcccagagcactgatgctctgatgccctgtgccctgtagtgttccgcctgctccctgccctgccttgtggctctctctgcctgctgtgagtcctccgaagatgtgtgtggacaacgaaagatgacaaggactcagccaagaagaacaagggcaaggagcgccgtggactgtgatgactcaagcacggatggtggctatgagcagagcacaagatgtcagtgagaagaggtcctgccgcgaatatacactgacagactgtgtgcagggctttgacccagcagcacagcccaggagatcctgagccccgggacttcggcctaaaacgcacatcgacgacatacgtcgtaccagacccgagagtagggtcacagttctagccgtgacagtctctttcgacggggcttcatcccattccttgctggtggacttcgcggcctaatcactcttgtcttccctgggacctaccgggctatcccacgagagggcaccagagctactacacccctcctggctgacccacccttgtacccttggggactctgtgcttggctggccgtcggtcgatcaatcacttggcctgccgttctccctaacttacccagagagagcccaaagacagctccatagactcaatgggagctcatttcaagaataccctgcgttgaaccccaagataggcccctgagtgaatcccgcgacacggtgacccacaccgcccgggtgaagcgacagaccgaagcgcggtgcgccgcggacccactgcatgaaacaccaacgcgcgtcgcaccaccacctccacgcccacactacccatgcgccaccaaccgccgagcaaacgacctggcaaacgtggcacaacatacccccaacaaccgcccaccaaccaacaagccagaacccaactccccacaaccaacgctcaaccatcaccaacaccgccacacctctcacccaccccctcgcatccaaaacccacccccgcccacttacttaacccactctacacatacacacacaaacccacaccaaataaatcaacagaacacaaccaacaccccaagtcacatactttactaattcatcataaactacacctacccaatctatcagattctacagtactaagacaccactccagtccacacaaccccaacacatctcgacaaaccgacccccca

SEQ ID NO: 711846 - DNA, 617 bp, Homo sapiens
  misc_feature (169)..(169): n is a, c, g, or t
ggcgctctccacccgcccacagagaagagtcccccttcgccacgagagtccccctctaaaagagaggagaccccccccctcgggaaacaaacacccttgagagagaatctcccacgtgtgagaaagcctcttaaacccccgcacatatatggcccacacagggagcccnacatgtgcgcgcccgggaacccatattttctccccaggcccaggaatctccccagactcccgggtggatataagagccacacttctgtccagaccaacggccacttaccaagccccatatccagatgagaaaggccgcgccggttctccagacgcccagaaagaccccttggtaggtaacgaaaaggacaagagaggcgtgcctgttgtgtgtttatagaacgccagagagagagccttcttggtgggagaaaaaaggccacgccagcgttcccagcgaacccacgccccctggaaagaacgccccgccagagaagagaaccctactcacagaggagaagaacgccctgctgccatataactctttataatttgattattccctaaaggtcccaatccttttggacagctttttttggataaagacctgattataccggccgtgagga

SEQ ID NO: 711847 - DNA, 425 bp, Homo sapiens
  misc_feature (61)..(61): n is a, c, g, or t
  misc_feature (64)..(64): n is a, c, g, or t
  misc_feature (66)..(66): n is a, c, g, or t
  misc_feature (90)..(90): n is a, c, g, or t
tgagacagagtctcactctgtcacccaggctggactggagtgcagtggtgcaatctcgttnatngnagcctcctcctcccaagttaaagnggttcttgtgcctcagcctcctgagtagctgagattacaagtatttgccaccatgcctggctaatttttgcatttttagtagagacgaggtttcaccacattgcccgggctgatctcaaactcctgacctcaagtgatccaccctcctcggcctcccagagtgctgggattacaggcatgagccactgcgcccagccccatcagatgattttctaaaattagagtttctttcttcagattccccacagggtcccacacaccctgtgtacaattggcactcctgtccccaactatgggttatgcaatgagggtgtagggcttgcagtagagtttct

SEQ ID NO: 711848 - DNA, 250 bp, Homo sapiens
gtcgagaggagtcccacgattgacacgttcagaatgcagtgttgaagaattatgctgtgcatcaagtagttacactgaatccacactttacctacatgtctatgcatctaggcaaatttagttggctgtataaagatttgagtagcccatttatgacaaaatatgaaggcgaaatttaaggacaactgagtcacgcacaactcaacatggagcctaactgattatcagctcagatcccgcatatcttgag

SEQ ID NO: 711849 - DNA, 931 bp, Homo sapiens
gtaaaactaggaccaaggacgtccatcttaataagcagtataacttaggcaagcatttacccaaataaggtataggcgatagccttggtggcaccttggcgcgaggagatatagataccggataagttgggtgatgataacagtgctacagacaaagactgtacctattaagcgagagggaccataacggcgcaatatacgcgttcattggcagtaaatggagagtttaggctgaagacatttacagtttgggcaggggagagcccgactatgtttacaagatccctggaggaaccagacgaggctacctgagggaacgggtaaaaagagcattagcccgtcttatcgttgcacagaaataggtcggggaaccagatgtctagtatggctaggaggcgcgaccaaagccggaacacggaggccctaggggtgcataggcatggtgtctgtgcgcaagggattacgaaatctggaggtttcactctctttgagaatttgggcgcaccaaggaaagccccttgcttaaaaatgtgccccgctggtgttaacaatttgtcacagggggtttgtgtcccaagaaggatgggatagcaaggtactttcggcgaggaatgtagtgaagaacaaactctgtgttacgcaagaggaggtaacacaggaacggttaacgagcccattatgtaggggcttaagaaagcaagacaatcgaatttaaagaaagagctgtgtcaggggatcaaatatggcgcacataaggtaagagataattcgcagaatattttgaggttgaagttggtcaacagcgccagatgtgaccgaagtttattagaccctagtaagaaagaacttggtgtgagggaatagttaggggggaaaacgattgtcctccaggataaagttgcgtagattaaacccgtggactgtcgttaag

SEQ ID NO: 711850 - DNA, 271 bp, Homo sapiens
  misc_feature (1)..(1): n is a, c, g, or t
ncccattaactccacccggctatttaatgtatctttagtaaacaggaatcgccatgtagtgcagctggatctcgaactcctgtgcctcaggtgatcacgtctgcctcagcctcccaaaagtgcatgggattatagcgcgtgagccacgctgctgcccgtggtcaaattgccctggttcttctaacggacagcagccattgcgtatttatggggccacccctaattcacgtatgatctttcatctttgcatatgattcaacagaaatactcc

SEQ ID NO: 711851 - DNA, 369 bp, Homo sapiens
  misc_feature (330)..(331): n is a, c, g, or t
  misc_feature (349)..(349): n is a, c, g, or t
gagaggctgctacgagactgtacactgctgattgcattggtattgtggataacgtggaatagcgctgcgtaaatgacagcaccagtatccggcccaaaaacagtgtagtataaatgagacacctgctgcccctgcctgataaaattgcactacgatgtgtttgtataatcatccgtagcttacgtcttacgttgcccaccagagcttatccccgattatagcgcatcgttactgcctgactggctaacctgtaccttcatcaaaagtggtcatcacgtacccggggtttaccctcgggtgggtggtgggggcgggggcggaggggaaagnnggcccggggtttcccccncaaagggtgtggtggggtgc

SEQ ID NO: 711852 - DNA, 141 bp, Homo sapiens
cgatacgactttctttctttctttctttctttctttctttctttctttccttctttctttctcttccttccttccttcctttctttttctttttctttctttctttttctttctttctttttctttctttctctctttctt

SEQ ID NO: 711853 - DNA, 370 bp, Homo sapiens
  misc_feature (331)..(332): n is a, c, g, or t
  misc_feature (350)..(350): n is a, c, g, or t
ctgttatataggtacgccgagacgaatagccggggagagaagccgaaaaagaaaatattgaaggccggctagtgactggggcgagtggtgagtgcggagataaagggaggtgtggtatttgcgtgcccgtgccgtggagaaaccccccccctgaatacataaactaaactagacaatagaaaaaggaaaaaaacaattatgcatagcgcgccccgattatagcgcatcgttactgcctgactggctaacctgtaccttcatcaaaagtggtcatcacgtacccggggtttaccctcgggtgggtggtgggggcgggggcggaggggaaagnnggcccggggtttcccccncaaagggtgtggtggggtgc

SEQ ID NO: 711854 - DNA, 349 bp, Homo sapiens
  misc_feature (310)..(311): n is a, c, g, or t
  misc_feature (329)..(329): n is a, c, g, or t
actgtctctagtggcgagaccggtgaaatacatgatttggccgcaagtaacgacattaaaactacatgcattttatgttttgctttagcccggttgtacaaccaaggaccagtacaatgaagcaaaacttacaatagcggatgtatgcagacactataaaaacataattcaacaagctctcactacattccccgattatagcgcatcgttactgcctgactggctaacctgtaccttcatcaaaagtggtcatcacgtacccggggtttaccctcgggtgggtggtgggggcgggggcggaggggaaagnnggcccggggtttcccccncaaagggtgtggtggggtgc

SEQ ID NO: 711855 - DNA, 1556 bp, Homo sapiens
  misc_feature (1359)..(1359): n is a, c, g, or t
cctccagatttttttctttatcatgcatccatccatatttctttctcattcattcctcttccatcttcctccatccatcttcatacattcagtgctcactctattcaatatctcaattagagattgagaagcgagagatacaagagacagcaaatgaagaggcagacacaccatacccataacatgattcacatataacaaaacaacaataagaacataagcacaactcataccaactacaatgatacacccaaaacaaaaaaaggcaaaaagcaacacacaacaccaagacaaaacagaaatagcaagaaacacatgataatatcaatgacacacaacaagtacacacactaaccaatacgaaacagcacaaatacatacagacacagcgaaaaaataacacacacagaaaaaaacaaacaacatacaacaaaaacacaacagtaagaaaaccatatcacacaacagacaagaaagagttgcacacacgccagagaagcacaacaacagcaaaagaacagaagacacaaatcaacaaaacacacaaacacaaaaacacaatggcaagagaaaccgaccagaacagatcgccgacagaacgaaatcagacacaccgacagacataagaacacccaacacgaaaaggagacacacaacggagagcgagatgaatactaaaagaagaagaaaaatcaaaggaaacaaagaccagaaaagacaacgagaagcttcacgaggacacgacacagcagagggagcgcggagacagaaggagaacataacacaaacagcagcaaacgcgcaagcagcgaaacgagggcaacgagctctaccaccaagcaagggacggcaacgaacgacagcaaacagacacgcaactgagaagcacggaaaacaggattactacatcacgacataccacaggaaagtacgaaaaaaatcgagaaccaacagaatagacacacaccagaggagaataccgagacgacagcacacgcaacaagacatccaaacagaagctactagaaagagagagacgacaccacgcctatcgataacagcgaagaagaccaacgcatgagcaccacgcacagaacaacgaaagccacacaagcgaagatactcaagacaaaagcacaaccagcaaggagcagcgaaggatagacacgaacgggaaccacacgacctcaactagaaaggaaaagcaaagacggacgagcatgcaggagagaagaaagcagatgcgctagcacaagctcagaactatacataagcagactgcgagcgaacagctacaatcagacactcaaagagcaacaggaagagaggagacagatgacgagagagtacggggatgcngcgacgaggcaagcagaaacgagccgagacaacgaggctagcgagcatcggacataacagcgcaagcctcagaaccacgacaatcccagacaggagagagaagcatggcagcacaacgcgtagacaacgccactagcactcaggagacagaagcgagagacgtgaagcaggtagcacaaggagacgaagcagcaaac

SEQ ID NO: 711856 - DNA, 201 bp, Homo sapiens
  misc_feature (25)..(25): n is a, c, g, or t
  misc_feature (41)..(41): n is a, c, g, or t
  misc_feature (162)..(163): n is a, c, g, or t
  misc_feature (181)..(181): n is a, c, g, or t
tagtgcatatctagtgtggcaatgntgaaggtccaccaganccccgattatagcgcatcgttactgcctgactggctaacctgtaccttcatcaaaagtggtcatcacgtacccggggtttaccctcgggtgggtggtgggggcgggggcggaggggaaagnnggcccggggtttcccccncaaagggtgtggtggggtgc

SEQ ID NO: 711857 - DNA, 364 bp, Homo sapiens
  misc_feature (1)..(1): n is a, c, g, or t
  misc_feature (325)..(326): n is a, c, g, or t
  misc_feature (344)..(344): n is a, c, g, or t
nctaaataacccgcccttaccctttacgcaataaattattatggtttgacgcctgttggggtacgccatgtcaaacattacgatgctgcaagattttgccatggagctgctgatgcactatttagttggctaagttatgtaccatactaaattaaagcgggaaactgaccagcaattaagaaaataacaagctctcactacattccccgattatagcgcatcgttactgcctgactggctaacctgtaccttcatcaaaagtggtcatcacgtacccggggtttaccctcgggtgggtggtgggggcgggggcggaggggaaagnnggcccggggtttcccccncaaagggtgtggtggggtgc

SEQ ID NO: 711858 - DNA, 813 bp, Homo sapiens
atcagctgttccagtccctataagcttcgagctgtccaagacatgaggcctttttcgaatggagttattgggcaacctcattccccaatagccctgatctcacctggttctcatcgctgtggggcagaactacatgagaggaacgcaaagggcttcagacctgtcaatggcctctcatcctctggtccttctgccttgcaatcttcagtatcctgggggcagtgaggatgtggggcattatggggactgtgctacttaccgggggcctaaagcaaaccgtgtgcttcgaatcaatcttcatcgatagattccacagtcaaattctggtcctggagtctttgcttctcatgcgaaggtcatagaactcggagacatcagccttacatcatcctgctgataagacggcacacatctagtctatcatttcatctggtaccgacctacatgcgacagtgctctgtgtacacaagctttggatacaagaacaaagtgcctgcaggaggctggttcgtcaccatgaactttggtgttcatgccatcatgtacaacctactacacttactgaagagctgcacaacagtgaaggccccccaagatgcatgcccatgctcatcaccagtcgctgcagatcttgcagatgtttgtaggagcaaacgtcagtgatcctcactgtacatctggaggcaggatcacggatgccacaccacgatggaacacttattctggtccttcatcttgtatatgacctatttcatcctctttgaccacttcttctgccagacctacatcaggccccaaggtcaaagcaaaaca

SEQ ID NO: 711859 - DNA, 334 bp, Homo sapiens
  misc_feature (295)..(296): n is a, c, g, or t
  misc_feature (314)..(314): n is a, c, g, or t
attccagctgtctctagtggggggggtataggtgaataggaagcgagcaaaatgaacaacctagcacatgtagcggaaaagggcaagttaaaaggcaaataaagttgtggaaacgcatggactggctgcgggcgggggtaatttgaacgcatattaacaagctctcactacattccccgattatagcgcatcgttactgcctgactggctaacctgtaccttcatcaaaagtggtcatcacgtacccggggtttaccctcgggtgggtggtgggggcgggggcggaggggaaagnnggcccggggtttcccccncaaagggtgtggtggggtgc

SEQ ID NO: 711860 - DNA, 341 bp, Homo sapiens
  misc_feature (302)..(303): n is a, c, g, or t
  misc_feature (321)..(321): n is a, c, g, or t
gttacaccgacgtaaacatgcataatagcctagcggccctaacattgggcatgccgatgcgggagccatgctatgatgactaaccaaaacaagccataccagcaagcgaggccatggccctaacaaaatgacgcccgcgcgaaccggtgtatctgccacagtcggcattatgcatagcgcgccccgattatagcgcatcgttactgcctgactggctaacctgtaccttcatcaaaagtggtcatcacgtacccggggtttaccctcgggtgggtggtgggggcgggggcggaggggaaagnnggcccggggtttcccccncaaagggtgtggtggggtgc

SEQ ID NO: 711861 - DNA, 143 bp, Homo sapiens
acggccgtgtattactgtgcgagagaatccaccccatattattactatggttcggggagttattataaccaacctttttttacggttccgaccttatactactactactacatggacgtctggggcaaagggaccacggtcac

SEQ ID NO: 711862 - DNA, 340 bp, Homo sapiens
  misc_feature (301)..(302): n is a, c, g, or t
  misc_feature (320)..(320): n is a, c, g, or t
tctgttatatagcgtacgccgcatgcaagagacaaacacgaaaaaagccagcacccacaacgctaacggtctaaataaggaaccacctactaaaagccttagtagacccacaagggaaaaaagtatatatagtggccaaaaaattagtcacattggggcgctacaattatgcatagcgcgccccgattatagcgcatcgttactgcctgactggctaacctgtaccttcatcaaaagtggtcatcacgtacccggggtttaccctcgggtgggtggtgggggcgggggcggaggggaaagnnggcccggggtttcccccncaaagggtgtggtggggtgc

SEQ ID NO: 711863 - DNA, 345 bp, Homo sapiens
  misc_feature (306)..(307): n is a, c, g, or t
  misc_feature (325)..(325): n is a, c, g, or t
ccgttgcatccaatagtgagatggtgcatgaaaccttgtaatccaaatattttggtgtgaaaaaagggataaagagactttgcctacacggaaaattgggataaagtgaatactaatataaaaggaagaggaaaagagatgagctgctgtgggtgggcgtgcctattaatgctgctaatgtgcggccccgattatagcgcatcgttactgcctgactggctaacctgtaccttcatcaaaagtggtcatcacgtacccggggtttaccctcgggtgggtggtgggggcgggggcggaggggaaagnnggcccggggtttcccccncaaagggtgtggtggggtgc

SEQ ID NO: 711864 - DNA, 346 bp, Homo sapiens
  misc_feature (58)..(58): n is a, c, g, or t
  misc_feature (307)..(308): n is a, c, g, or t
  misc_feature (326)..(326): n is a, c, g, or t
gttattcgctgcggtgactaggcgtaatgttgcatgggctcggtagtagagtatggancgattggaggtaacgttggtccggtggcaagtttagcccgaggtgctctggattagaatagcgcattgagatggtggagcccaaagtcgttatcgacaaccgatgccgtgatttccaccagatgcttaccccgattatagcgcatcgttactgcctgactggctaacctgtaccttcatcaaaagtggtcatcacgtacccggggtttaccctcgggtgggtggtgggggcgggggcggaggggaaagnnggcccggggtttcccccncaaagggtgtggtggggtgc

SEQ ID NO: 711865 - DNA, 428 bp, Homo sapiens
tgagatgtagtttcactctcgtcacccagcctggagtgcattagccaatctcggctcactgcaacctatgcctcccaggtccaagcgattctcccgcctcagtgtcccgagtagctagaattacaggcccgtgccaccatgactggctagtgtgtgtgtgtgtgtgtgtgtgtgtgtgtgtgtgtattttttttagtagagacggggttttgccatgttggcaaggctagtctcaaacccccgacctcaagcgatccacccacctcagcctcccaaagcgctgggaccacaggtgtgagccaccacgcccagtccaatacatcctttaaaaacagacgcaaaaaaagccttaacaaaacagtcgcaaatcaaacccagcaacacacagaaggactacacgcccatgatcaaagtttatgtattctggc

SEQ ID NO: 711866 - DNA, 542 bp, Homo sapiens
aaaatataaacccaagtggagagagtactaaaagacacaagatttttttttagagaatttatcaatctaatatgagcaattaattatttatgatggttcctatgtttcacagagaagttgaagaaataagattagaaccatcttatgggctctgggtaaggctctgcaatctttcaccatttttttttttttattataccaagtagcatgacagatgtttgcaatttgacttgaacattttcattgtctttgctttttttgtttctttctttttaaaaatccatggttttttaatttccttttcaatatttgtatccttttatggaatataagagaccacttatacgcacaagagttatctcttgtgggtctcactattattatcatcaaaatgcctgaaattacctgtgagggaacattataaagtaaatgataaagaaataatttaatgttacacattaggtaacctctaggaatatatgctggaaccataggaagacattgggcaggaagaacaataaaaatatttggattggaagtaa

SEQ ID NO: 711867 - DNA, 166 bp, Homo sapiens
tcttagaggatcccccagtctacacttgctgcagctcattggggtcaagaagaagcatttcgcattctagtggaccatctgtgtgatatggagatggtcaacaaagtgggccaaacagcctttgatgtagcagatgaagaccttttaggatatttagaagagttgc

SEQ ID NO: 711868 - DNA, 326 bp, Homo sapiens
tttggggccctagggggggcaaagttgcagaaaactcccccccccaaattttcaggggtcccgggttcacccccccccccattttattggggggtttaggggttcccaaaacccacccagcatgttatacccctttggggcttgggccccccagcggatttttttctcgggtttttaaaggcccctttcccctttgtgggcccgggcctttaaagggattttttttgtaagggggttaccccaatttttcccattttggggggcttgggttttttgggggggacccccctgatttttaagggggcccggccttccccttcccccca

SEQ ID NO: 711869 - DNA, 183 bp, Homo sapiens
  misc_feature (26)..(26): n is a, c, g, or t
  misc_feature (70)..(70): n is a, c, g, or t
  misc_feature (72)..(72): n is a, c, g, or t
  misc_feature (129)..(129): n is a, c, g, or t
  misc_feature (150)..(150): n is a, c, g, or t
agtgatgagatgcctgctgacttgcnttcattagctgctgattttattgaaagtaaggatgtttacaaancnatgctgaggcaaaggatgtcttgctgggcatgtttttgatatgaatatgcaagaagncatcctgattactctgtcgtnctgctgagacttgcagacatatgaacactctag

SEQ ID NO: 711870 - DNA, 171 bp, Homo sapiens
  misc_feature (1)..(1): n is a, c, g, or t
ngtacatactgacacacacttcattggttagaagagaataattttaaaaatcaaataaaattgaggctggcatagcgaagtacagattacctacaggttaaatagctaccagaaacacagaagaggtggttactaaaaactgagattgcttcagaggccaagcttgtctgc

SEQ ID NO: 711871 - DNA, 892 bp, Homo sapiens
catctatttacctagacacttatgcaggagtacatgctaggtggctttattcagattcgggtacatggaatcacatcatgactttgagtctgatggctgtgtagataaagatttacgcaagtgcctctgctgtgccgctggaaaatattaaaactcatcttcgggtgaaagcttcccagatgatgataattaatagcacttctgccttatttcctggagtaactcttcacgatcgagtcacatatgatacgctataaacacgtccacaaaattttctgggtttaccttggcacctattcttcacatatactatattcacctgtctgcctggaacatagcctcggtttacctctattctcttcgtatatgtaaaactattcatatctgaatctctatcccaatattatatatgatggaaaagccagaattgtctggcagaatttaattcttccttggatctctagcttctgtctccaatatcaggttccttcatcaaattctactactgtagctctgtgattataatctccatttctcgtccaatctatggtcacatatagacaagtacttggtcacaattagctcaaagaatcccccatttctttaagggtgctcagctcaaatcagcctccactcctggacgacggtacggcgcaccacggcacgcatcactgaactaggcttcgtgaccgaataatcccctggtgctccactcataacgagcgtgagcctcccggggaaaactcaagacacagcaccaagccgagacaccaaacgaaaagggaacccacccgcggacgccccgcaccgcaagaacggccaacgcaccgctagccactgctaaaaaacggaagacagacgcacaagacccccccagggtcaccaaacaccg

SEQ ID NO: 711872 - DNA, 424 bp, Homo sapiens
tggacgcatcacatctaaaaagtcaacaaatagctaaactctgagaaacttcagatatccactaatttgcaacgttcgtcacgcaactggaggagcagactgatggaattatccactgaagttcagtctttgtacagagagataaaggatgctaaagagcaggtaagccctttggaaacaacattggagaagttccagcaagcaaaaagaagaattcaatcacccaaaaaacaatacaagcaacaaaatcagcacaggataaactgacatgatattaaagagccggttcacaaatcttcctggctatatgcaaagacattgagaattcatattccagatgggcaaagcacgactataagaagcaccaaagaaactgaacttcaataaagtaatcagctcacctaagtgaatgcgtcgtcgcaag

SEQ ID NO: 711873 - DNA, 135 bp, Homo sapiens
cccccccaaaaaggggggaaaggggggggggggggcccccccccttttttccgataagggtttggcccccccccccttttccctttttttgggggggttttttttagaaaaaccaaaaagtttttccccccccca

SEQ ID NO: 711874 - DNA, 1060 bp, Homo sapiens
tgggcaggctccgccctcctcccctactccaggcccactgcagcctcagtcccatggagccggcagatctcccaacatcaatggtccgatacctgcgtgattgagcctgagcgatcgctcgcacgaggtgtactaggcgatgcagttgcatggtgcaagagcgaaggacatccacggccaacgatggatgcaaggtgctgagcccgtgagcacgtcgaggtctactgagagtgaccgcatgtgcctagttctcactataggcgcagacactgctctcgaaggaggctgctaccggtatccacagtgcgtgcagtcatcgctccgtgcagaaggcgcacgaagacgctcctgcaggctccggaggaggcatcgcagaggctgcagaagccagtgaagagaacatgcagaaggcactaaggcttcctgggccccatcacccccagctggaaagttcatagcaatacaagtcgtcccgaaaacgacgcaagttgaggccatgagcagattccccttactatcagaatgctcaagccccctaagctggaagttacgagacacagtcacctggcgcaagaaacaccgagtgaggccataggcaactcccctacgatcaaatgtcgtcaagcgcctgaggttgccgccgagaagcccacaagatctgagtgaaatgcgcaaaagtcacctgcccaggtaaagctttgactagacaagagaaaagaagtcaccaagaagagttcctaatcccaggaaaacacgaggggacagacaacgaaaggcgtgaggcggagccatcaagcagacacccaaggaagcttgccaagcactagagagaggcccaggggaacaaaaagcccacagagcagacgcaagccgccaaacacaccaaaccacgcaaggacaacggaacagacagaaaaaagggccgtacgcacacaatgacaaacacagatgcaacgacgagaaaccaccagccaaaccgacagaggaacaagagaagaaagcggaacactaagctagagggtgggagaaagacggaagggacgaaaaagcaacaagaagg

SEQ ID NO: 711875 - DNA, 318 bp, Homo sapiens
ttgcgagatccctatattttacttttcttatagagttttttttccattcttggctagattcgtttttttttaacaaaaccccaggggttattcatcttttagttcttccaaaattgaaaacatcaagtcttactgctaaggggaaaaaacaaacaaacataaaatccgagacccctccccattttttttaaagtcacagagcatggaaggaactgcagtgggacaggtgggtgcagagaaccaaaaggggaggatggcaatataaactccccaaatgcttgaaaagctgttcaacagaaactgtgataaatacaggac

SEQ ID NO: 711876 - DNA, 480 bp, Homo sapiens
tgttcggaggatcccctccataatgtgtgccaggctggagtgattgcgtgatctggcttacgctaccttgcctcctggattcaagcaattcttcttcctcagcctcccgagtagctcggactacaggcatgcaccaccatgcctggcaaattattgtatttttagtagagacagggttttatgttggtcaggctagtcttgaactcctgacctcaggtgatctgcccacctcggcctctgaaatggctcagtgcaagtcttactatttcttaaataataagacttaaaagtcaaaattacttttggatctgtgtgctgcagaatgaatgttgtgttagcaggtgtgaaaacattaatctgtttgtacagctccatcagagttcttgagtgaccacgtgcgttgtcaatgagcagtaatcttttgaaaggaatcatttttttttttggagcaggtctcaacggggggcacactttagggag

SEQ ID NO: 711877 - DNA, 130 bp, Homo sapiens
gcacacccgcttcccggagaggtccgcgggcttgcggatgtcggagtcgcgggcggcgaggatgcgctgtttggcggagaagtactcggccgagaagttcaccagcttgaggcgttcgcaggtgatgctc

SEQ ID NO: 711878 - DNA, 693 bp, Homo sapiens
  misc_feature (88)..(88): n is a, c, g, or t
cacaccaccccgcggtagagaatccaattcccaagccggaaaaagttcccctataaggtaaagacctttggggtttcccatcccctgnaccagtagagagccggttccaccaaaatatggaaaagagttaggttttcacctagttgtaaagataagtggtttccagaactcgcctttttttgcccccggcatgcctactttcggcctagaggcagtaattctctctccatattgacttttgatttgtgctgagggtcagcattaggctcattcttcctgaaacagtggaagcaatgccagctgtgtggcttctgccctgggcatggccccgtctcctggatcggaaagtgaggctatgagcccccctgcctgtgggcagcaggcctaaaggacggtcccaatcccggttcagagtacaggccatttgcacaatcccagtggtacttgtatcatataccttggggtggcagggttataattagtcacagcttaagggacattaccagggttccttaggacttgaaacatgtgcattgtaggagtttctacatagggtagcatcttagcaacatccatatttcctgccttagacagtttaaagggtgattaaataatctggcttcccacaaaacgctcggaacccatgcctccctgtgaaagctatgtaccgtctctctgtttaataaaactaac

SEQ ID NO: 711879 - DNA, 287 bp, Homo sapiens
cccaagttgttcaccgacagacagcttacaggtctctcccgtcatacggtagaatcgctcttctttcttcctcacagaagactcctacagaggcctcagcactgactcctggtaagagaaggcctgaaagggaatcacacacaggaaagtattagcctactctgttaaaaaaagagcaatgctgtttagttttttgctgaaaggccatattaccttctcactgtgtttctcctgcagctcctcccttgcctgcttttgtctttgttttgcctcctcatcttgtcgac

SEQ ID NO: 711880 - DNA, 313 bp, Homo sapiens
  misc_feature (274)..(275): n is a, c, g, or t
  misc_feature (293)..(293): n is a, c, g, or t
gtggcgagaaaaatgataatgtggtgaatgggcgactataaataacgacttagaggggacggcatggcaataacactacctgaagggccacgtattgcaatgctagcggctattacgaacagatagtagataagtaaagtttacagttttgacccccgattatagcgcatcgttactgcctgactggctaacctgtaccttcatcaaaagtggtcatcacgtacccggggtttaccctcgggtgggtggtgggggcgggggcggaggggaaagnnggcccggggtttcccccncaaagggtgtggtggggtgc

SEQ ID NO: 711881 - DNA, 266 bp, Homo sapiens
  misc_feature (227)..(228): n is a, c, g, or t
  misc_feature (246)..(246): n is a, c, g, or t
ctacaccaaaaaaacaaactgtctgctgcgaagtctctgcgggggggccgatatggcggcgattaaacgataaaatagtccccatacgtctatgcaccggtcggggccccgattatagcgcatcgttactgcctgactggctaacctgtaccttcatcaaaagtggtcatcacgtacccggggtttaccctcgggtgggtggtgggggcgggggcggaggggaaagnnggcccggggtttcccccncaaagggtgtggtggggtgc

SEQ ID NO: 711882 - DNA, 163 bp, Homo sapiens
  misc_feature (146)..(146): n is a, c, g, or t
tttagcggtgcctttccatagaatcactaactccttgaggtagtctttctcatgtaacttctcctatagtagtgatcaacttattgcttacataagaacaggctagaatttcggaagtctgtgctacgctaaacgtattgtggctnccacataacttacaaag

SEQ ID NO: 711883 - DNA, 275 bp, Homo sapiens
  misc_feature (236)..(237): n is a, c, g, or t
  misc_feature (255)..(255): n is a, c, g, or t
acgtattgacacaccagcccacccccctgatgagagcatgtattgccaaagaccgcccaataatagtagaagccgtaaaatctaatcggctcggcctaatatgggatgacggggaccccgattatagcgcatcgttactgcctgactggctaacctgtaccttcatcaaaagtggtcatcacgtacccggggtttaccctcgggtgggtggtgggggcgggggcggaggggaaagnnggcccggggtttcccccncaaagggtgtggtggggtgc

SEQ ID NO: 711884 - DNA, 305 bp, Homo sapiens
  misc_feature (266)..(267): n is a, c, g, or t
  misc_feature (285)..(285): n is a, c, g, or t
gcggaggtgttgagttgtatagagttgtagagttgtttagtgttgtgagagttgtatagagttgttatagagttgtttagagttgtttagattgtgttaaggggtatgtagttgcagtaaatatataaatctataccaccagagcccccgattatagcgcatcgttactgcctgactggctaacctgtaccttcatcaaaagtggtcatcacgtacccggggtttaccctcgggtgggtggtgggggcgggggcggaggggaaagnnggcccggggtttcccccncaaagggtgtggtggggtgc

SEQ ID NO: 711885 - DNA, 308 bp, Homo sapiens
  misc_feature (129)..(129): n is a, c, g, or t
  misc_feature (132)..(132): n is a, c, g, or t
  misc_feature (269)..(270): n is a, c, g, or t
  misc_feature (288)..(288): n is a, c, g, or t
cagggggtgcgaggcgaggcctgtgagcttatatgcgacctgagatgactagaggggattatactaccgtgacagaaagctagtatagatacagcatagaagattagacccaatgaattagcatataantanaattatgcatagcgcgccccgattatagcgcatcgttactgcctgactggctaacctgtaccttcatcaaaagtggtcatcacgtacccggggtttaccctcgggtgggtggtgggggcgggggcggaggggaaagnnggcccggggtttcccccncaaagggtgtggtggggtgc

SEQ ID NO: 711886 - DNA, 328 bp, Homo sapiens
  misc_feature (19)..(19): n is a, c, g, or t
  misc_feature (24)..(24): n is a, c, g, or t
  misc_feature (26)..(28): n is a, c, g, or t
  misc_feature (32)..(32): n is a, c, g, or t
  misc_feature (289)..(290): n is a, c, g, or t
  misc_feature (308)..(308): n is a, c, g, or t
aggcggtcctgactgttgngtttntnnngatngcgggcgctagatggatacatggattacattcacattcccttcccacgccaaatttcacaacgcatgggaaggcttctgcctattgtattaccaccactttaattcatggaattaaaggcaaatgctaaactggttccccgattatagcgcatcgttactgcctgactggctaacctgtaccttcatcaaaagtggtcatcacgtacccggggtttaccctcgggtgggtggtgggggcgggggcggaggggaaagnnggcccggggtttcccccncaaagggtgtggtggggtgc

SEQ ID NO: 711887 - DNA, 271 bp, Homo sapiens
  misc_feature (232)..(233): n is a, c, g, or t
  misc_feature (251)..(251): n is a, c, g, or t
gtatccagttgtgtagttacctacgggccctgtgtcgccctgagcatttgcagggtctataaaattgctatccgcattttgcgcatttgaagacggtactaaccctacaaaccccgattatagcgcatcgttactgcctgactggctaacctgtaccttcatcaaaagtggtcatcacgtacccggggtttaccctcgggtgggtggtgggggcgggggcggaggggaaagnnggcccggggtttcccccncaaagggtgtggtggggtgc

SEQ ID NO: 711888 - DNA, 288 bp, Homo sapiens
  misc_feature (249)..(250): n is a, c, g, or t
  misc_feature (268)..(268): n is a, c, g, or t
ggtaccgatatgtgtgctccaggcgattaacgcgcaaaatcttttcggcggtcaaaattggacgacgctgtaaaagggcaatactagacacctctccagaagatttcagaacgtcttccctggcgctgccccgattatagcgcatcgttactgcctgactggctaacctgtaccttcatcaaaagtggtcatcacgtacccggggtttaccctcgggtgggtggtgggggcgggggcggaggggaaagnnggcccggggtttcccccncaaagggtgtggtggggtgc

SEQ ID NO: 711889 - DNA, 283 bp, Homo sapiens
  misc_feature (244)..(245): n is a, c, g, or t
  misc_feature (263)..(263): n is a, c, g, or t
agatgctatcctattgggagacgacaaaaatggactgaaaaaaatgacacgctttaaaaaaagcttggggagagggggacctacaggagaaaggggtaacaggtgataagaacaagctctcacccccgattatagcgcatcgttactgcctgactggctaacctgtaccttcatcaaaagtggtcatcacgtacccggggtttaccctcgggtgggtggtgggggcgggggcggaggggaaagnnggcccggggtttcccccncaaagggtgtggtggggtgc

SEQ ID NO: 711890 - DNA, 313 bp, Homo sapiens
  misc_feature (274)..(275): n is a, c, g, or t
  misc_feature (293)..(293): n is a, c, g, or t
ggttattacgagttttatagagttgtatacgagttgtttagagttttggcttgtactaaacaccgacacaggggagagggtacgtgaaagaaaaacaaaagctaacgcgttggatctgagtacgcgcgaaacaagcgccggcgccaccagagcccccgattatagcgcatcgttactgcctgactggctaacctgtaccttcatcaaaagtggtcatcacgtacccggggtttaccctcgggtgggtggtgggggcgggggcggaggggaaagnnggcccggggtttcccccncaaagggtgtggtggggtgc

SEQ ID NO: 711891 - DNA, 388 bp, Homo sapiens
cgcgagcgcaggagctgcttatacacgagactcgtgagtcacacgcgcagagacatatggactgtgggcgctcctgcttgacaccattctgccagaagacgcagtgtcaagaggggcctcgcggtggagacacaagatctgatgcctagatgagctctgacaaccgaagtgccaagcggacaattatggggacctgtcctttgttgacattcctatataacagtgctctttgcatactctgtgatgaccaagtgcaaggggaactgttcacctcccatggctctcaaggacttacaacgcttcaggaacagaccatataagacttgactggctccagaacgcaacttgtggaacggcagaacctcttggctgcagaggccgcctggtt

SEQ ID NO: 711892 - DNA, 300 bp, Homo sapiens
tagcaccacacccagcctgaaatgtatctttgactgcagaatcattgttttggtagctgatgagaatccctattctttagggctttaaaaacaaaacagtaatgttatttttgacttgaagacaaactacttttctagctttcaccttagtaccctgagtgatttcattcacgtgtatgcctcacactctccaagtatttttagggtagtgacccctgttccccatttcccgaaatcctctcagtcttggaggtagctttgtttgcctgtggctgtggagaaggcttccagcatcttgag

SEQ ID NO: 711893 - DNA, 101 bp, Homo sapiens
cgggatgttcgcagtccactgatttccagcacattcttgtctagttcctcctgttctagttcttctacttccgccatgagctcatcctccacaacctctgt

SEQ ID NO: 711894 - DNA, 643 bp, Homo sapiens
atattctctccagccaagtaactattacccgggttaaaaacagcccaatttcataaatttttttaaaacattaagatgggggaaaagcctccaaaaaaggggggggaagaggcgcctcttcccggttataaaaaaaattttttccccaaaaaaccccgtggaaaaaccccgaaaattttcccccgcgggttatttacacacccccccttctcccccccaaagagttcagagaatattttcgggggtgttggaaaaaacgccccccccaatggggggaaaaaaaggggcgggttcccccctttaaaaaaaaaaaggggggtccccccaccccttttatcttttaggttgaccaaaaccccaagttctccagtttgggaaatttttccaaaaaccgccccctttcaaaaaaacccctccaaaccaagagcaaaggagggttcgccttttcccttaaaggggggagggggcggttaagaggccaaaaaagccctattcgggcccaaaaaaattcctgtcctaaagttaattaaatcccactcagcagcttcagtaaaacagattatgtaaagtctctgtaacagaactgtactaagtgaataacagtctggccgatagataactgagctgaaagcagactccacag

SEQ ID NO: 711895 - DNA, 104 bp, Homo sapiens
ccattaagaagaaggacgagttggagcgtgtgcccaagtccaaccgttgattttcccagttgttgcccaataaacctgtttgccctttggggcagtccccgcca

SEQ ID NO: 711896 - DNA, 856 bp, Homo sapiens
gggtgctgctggagtcgccgcggccgccgtgtgatcgtgtccatcagccagagcctaggggctagggccaattgagacgttcttgcctccctctttcttcctccggttttgtctcttccctctcgtttaagtttgcctgggagcttgaataggagaacggcacggggtcgccccaaaccctttctgtcgtctgccccatcacaagtgcccactaccgccatgggcctcaatatctcctcccttcttctcccgactatttggcaagaaggcaagatgcgcatttggatggtttggattggatgctgctgtgcaaagacaaccattctgtataaaacctgaaggtagggggaggatagtcaccaccattcctaccgatgtgttgtaatgtgaaaccgcgtagaattatacgaacgttttgtttcagcagtatggaattgttggtggccaggatagaattaggcctctctgaaagcatttacttccagaatacccaggctccttattgggtggtagatagcaaccgatcgtgacaggaattccaggaagtagcagatgagctgcagaaaaatgcttctgcctagatgacattggagagattgcacgcgctgctacttttggcaaaccaacaggatttgcccatgctatggccttcagtgaaatgccagataaactagggttcagtctctttcgtaacagaacctggttgttccagccccttttgcaccccaggaactggtctgtttaaaggactgacgtgctgcactagaggcttcaacagtgaaagaattggggtctcacccaggcgcgtttggtaacatggccgcgttgtcacaccacacttcgttgcttgttcacg

SEQ ID NO: 711897 - DNA, 145 bp, Homo sapiens
agtcggctcgagttacggtcaccgtagggggtcttcagcttgtatctcctgacaaagttatttctagttaatacattatgcagaaggtataggggttagtccttgctatattatgctatggttcccaacggatgaccggcgactt

SEQ ID NO: 711898 - DNA, 568 bp, Homo sapiens
gaggatccgcctcaagtgatcctcaatgcggttggcctcgatgaagtcgttgtatttgtcatcagtgaaaagaggctcgggcagctttcggaagaaggacttgagcaggctgctgatcacattgaggtcttgccagcgctcatcctgcaggttgatgtcaccaggcccgcggttgagctgctcctgtaggctggacaccactgcattgttgccgggcactcggtaaatgcctgtggactccagccctcgtgcctccacaatgcgacagcatgcagccacgattaaggggacgcgctggttctccgtggctggctggcactcctccagcctgaccccaaacgccctcggagcggccttcttatttttcttgatgatgttgatgccccagggggtttagggggctgcagcactgtcatccttgctccctgcgggcaggtcctgagtcctgaggccacgtgccgcactctgcttgaggaactcagacttgaggccccccagtacctcatggccttggcatcctaatcactagatggctggcaacggtcctagagctagtcccccttgtgat

SEQ ID NO: 711899 - DNA, 885 bp, Homo sapiens
ggccgggtgcttgtctccctctgctccttctccaactcgcgctcaggtttgccaccggctcccgtcggcggcgcaagcgagagtcggtggccaagatgatcttccgggcggccgtaacgctgatgacaggccgctcctgttagggataggccaccgtgttcgcacggggcaacagcgtcagaagcattcgattccgagcgtagctgtctggaggagagacactagactgcatttcctcgcgagtgacgctggaacgacgatcctgtctttgcccggggaaggtatcctccgatgacgagctgtccgacagtacccggatgaagttgtcggagtccccatcggaggcagcgctaaaggactgggagaaggcaccggagcaggcggacctcaccggcggggccctggaccgcagcgagcttgagcgcgagcgcaccatgatgctggccttggagcgaggctggcggaagcagaaggagggcgccgcagccccgcagcccaaggtgcgagctccgacaggagagtggtgagcaccgcgggggcgcgacggggccagcgtatcgcggtgccggtgcgcaagctctatcgcccggagagaacgcggccgtctgggcttgggcatggtgggacggtcagcaagcggacctaccgaaagcgcatcgacaggttcgtcaagcgccagatcgaggacatggacgatcacaggccattcttcaccctagctggcttaccttacgtgcactcgctcatcacccatcctaggccgtgtgcatctatggggcatcgcgcccagtggagctcctcgcagacatgagaccggtggactcgggtgctgggggaacccggggggtcacacgagaaacgtgcaagtacgtgcaagcaggagag

SEQ ID NO: 711900 - DNA, 210 bp, Homo sapiens
ccatgctcacttgtcttcaatcctcggcctcatctatccttctgtcttgacttcccaaacccttgcgattacatgttatagccactgtaccggcataccatttcttgatcgattaattttagatattatctgttggtttcctatcatgtttcatgaggattttgctctcacttgttccatgcatatgtccatggtgtttgtggtaactag

SEQ ID NO: 711901 - DNA, 254 bp, Homo sapiens
tgtactgtggtgtaccagtccccttctacctcttgatgtggcctcctctttggcttctggagtaggatatctttttgaagctttctggtccatttgcttgaagattgctaagatgtagttgtaaactttgttgtttttaggagagaagttgagctccagtccttctattccgccatcttaataaaaaattcccactagcagttttgaattaattaaaagtattacctagcaggtagtggtccatttggattgaa

SEQ ID NO: 711902 - DNA, 314 bp, Homo sapiens
gacatgctgctgaatcaaaattaaggatgcttggaggccgggcgtgatgctcacgcctgtaatcccagcacgctaggagagagggcggaagaattgcttaagcctaggagtttgaaaccagcctgggcagtatagcaagccctgtctatacttaaaaaaaaaatacagccaggcatcgtggcacatgcctgtagtcccaactactctggaggctgaggcaggaggaccactcgagcccagaagctcaaggctgcagtgagccatgatcacacgactgcactccagattgggcaactgagtgggagacctgtctc

SEQ ID NO: 711903 - DNA, 450 bp, Homo sapiens
  misc_feature (8)..(8): n is a, c, g, or t
  misc_feature (17)..(17): n is a, c, g, or t
  misc_feature (37)..(37): n is a, c, g, or t
ccaaacantgaaatcantgtttttgaaataagccaanaacagtttaattgcctactgtccatttaatccacatgttttgtagaataaaattcctaaatgctgcaagtgacaaaactcccaccctcagactggccttacataaaaaagggaacttggcccgtgtgttggctcacacctgtaatccccagcatgttgggaggtcgaggcgggaggatctcttgaagcccgggagtctgagactagcctaggcaacatagcaagacctcatctttaaaaaaaatttaaaacaaatagctggacacagtggcgcacacctgtggtcccagctactcgggaggctggggcaggaggattgcttgagcccgggagtttgaggctgcgggtgagccacgattgcaccactgcactccggcctgggtgacagaacgagaccctgtctcaaaaaaaaaa

SEQ ID NO: 711904 - DNA, 372 bp, Homo sapiens
gtgtacccgacgctatgtgaacgtaagactgatggttattgatgagacagagatctcggtctgtattccaggctggagtgcagtggtgcgatcttggctcattgcaatctctgcctcgtgggttcaagcaattctctgcttcagcctcccaagtagctgggattacaggtgcctgccaccacaactggctaatattttgtatttatagtcgagacgggtatcaccatttaggccaggctggtcttgaactcctgaactcatgatccacccacctcggctatccgaagtgctgggataacaggtgtgagccaatgcaccttgcctaaaactgatgtatatctcttatttattaacatataacttgggacttct

SEQ ID NO: 711905 - DNA, 307 bp, Homo sapiens
aggccatttatccagggctttatcacacagcccagagagccagcaagggctgcagtttttagacgtgacagagcagggggtcagaaatgcctctccaacaccatgaggaggggtgaggggcgggggcgaccctgcagtcagcgtgaccaagattcgctcagcctgagcctccgcagcaaccgagggactggaggggaagtgaggggcttaagagagacacagtgggggacaaacaggagcctgtgtcctgcaacaatctggtctgtgagggcccggtccacccctccgtcctgggagtggtggctgc

SEQ ID NO: 711906 - DNA, 1289 bp, Homo sapiens
  misc_feature (1282)..(1282): n is a, c, g, or t
ggtgttgtccctgttaagctgctctttcaaccttcaaagcacgtgcagatgttgggtgctgggagcatctgcctccagacatcctacacagtgcatgagtgtgcagcgggcaggtgtggggagccctgaccctggagggtcccctgcgtgggccaaacgggcaatggagatgggcatacagcatcaaccaaagaattcctgcgcgggaggtgagcagatagacagccacctgagggtatgataagatgaacctgtttgtgggcatgtggacagttagaccggcagcagatgggtgagtcatgaaggatcaaagatccatgctgtagacaacaccaacatcaggaatgatcctaggactagcagagagaccagaccagtcatcacatagcaaagacaacgcgacaagtccgaaaggataagaagcgacccagtctgaaacgagggcgtcacccagagaggccaacaacaccatagacgaagacacacataagggaaatagagcggaccaacaggtacacacagatagcacatagtcacccagacaacaacaccacaaagacagtcagatagcccacgatgcattctgaggacccagttgcatgaaaatgcacactaccacagacgagagatagggacagcccggtggtaacaaagaaagaaacaactgtggcgacagtggcaccagacaaatcgtgatgagtgcacgatcaactcgcatggacagtaggaccccacatatatgtatatataaaaaagaacgtggcatgtacgaaaacgaacagggcaagaaccgaccataggcttcttaccagaggatcgtggatcagagcggacaagcgattcacacatcaatgtccgatacggagacagagcatagatcaggacagcacaacgacagagcagtgcgacatccagcggagacagacatgcacagaccaaccccaacgagggaacacccagaacaaggagagcataggccactcatcaacaacaaaacaatcaaacagacaccaccaagcaaggtgaacacgaccgcgagatacagaggagaaaaacaatcacaaacaaggacacaggggacagaccgatcatgatgacgcgcttacgaacagcaacacaacagagacactgaagagcataggacagcacggatgagcacatgacagatgactccaagacgattcacgagaagcacgtatgatagacagacatggactcacgcgacaacatcatatcggagtgactatcagacacgcaacaacgagtagtagagacgggaaancgtcaga

SEQ ID NO: 711907 - DNA, 665 bp, Homo sapiens
gacgatcatcggtcatagctgttctagtgtaccatagtatacgaaatgcagggtaaccaggctggtgtctgtatcgtctctccccacctccccatccagctctcaacttggtgtgcaggccaggacctgctctccctcctaactcccagcctgtgctgccccttctgggaccctaattttctggactttgagaaatgtgctgcccctgtggatgcctccaagagcccattagagggatcgggtggcgctgacctctctgtcttctttggatcatcgccttgtcagattgtcctccctcttgattctgaaaagatggtcctgctgccccatgaagaagcacagtaagatagatttctcatgcagccagtgaggggactcctctcttcacccatttccactttgtcctatgttaccctctgtcctgccttctgtagagatggattctcactctgtcacccaggctggagtgcaggtgtcgcgaccttggctcgattgcaagctcaacctccagggttacaaagcaattctccccacctcaggctccaaagtagctgggattacaggcatgcgaaacatgccaggtaatttttgtatttaggagagatggtttccgctagagagatgggtgttgcagctgtccgaatcctgactctgtgtcggccctc

SEQ ID NO: 711908 - DNA, 171 bp, Homo sapiens
tttaacatcacatctccgggtcgctttccgggcgtgattctcttctggtccgacgctccccgcccagcctggtcatagaaaatattaattttttggagacagggtttcattataccacccaggctgaagtgcagtggtgccaccacggttcactgcagcctcgacctccca

SEQ ID NO: 711909 - DNA, 205 bp, Homo sapiens
cgacacaggtgtgcactatgaacctgcttccctcttatgctgtttaaggtccccgggtctcccaatccagtgtgtaagcaggagccccatttgtcctaactcatgggactatcacgaggaacatatctgatcattcacaatgagcccataattggggtatgggtgagtcaaagatatctagtgattcctgagagtctctgtgcag

SEQ ID NO: 711910 - DNA, 304 bp, Homo sapiens
ggcacgaggcgaggatggccgtcatggggccccgaaccctcgttctgctactctcgggggctctggccctgacccagacctgggcggtctctcactccatgaggaatttattaacatccgtgtaccggcccggccgcggggagccctgcttcatcggagcgtgctacgtggacgacgcgcacgtcgtgcggctcgacagagacgccgcgagccagaggatggagaccgggacgccgcggatagagcaggagggtccggagtattgagacggcgagacacggaaagtgaaggcccagtcacagac

SEQ ID NO: 711911 - DNA, 248 bp, Homo sapiens
cttccccacagtaggtcacgtctatcccttcttacgtgggattgtttgggcatccgggtgcacaatctgtctagaggcatgtgtccagaatggccaagcttggtttaatgctcttatgttgccattttgaaattctttttctttttttcttttctctttttttttttttttgagacagagtccccttctctttccccaggctggcagtgcatttggtgtgaccaccagctcactgtggggacaagggg

SEQ ID NO: 711912 - DNA, 195 bp, Homo sapiens
gtcaggtgactctaaggatcccccgggagccttaccttacatttgtacttctgcctacattctgtaggcccagacactcacaggtcttactaaaaatacaaaataagccgggcgtggggcgcacgcctataatcccagctacttgggaggctgaggcagcagaattgcttgaacccaggaggtgaaggttgcagt

SEQ ID NO: 711913 - DNA, 236 bp, Homo sapiens
  misc_feature (197)..(198): n is a, c, g, or t
  misc_feature (216)..(216): n is a, c, g, or t
atttgttatacgcacgttgtgacataacagtccagaagtgacattaactcgagcaaactatgcggaccaccagatgccccgattatagcgcatcgttactgcctgactggctaacctgtaccttcatcaaaagtggtcatcacgtacccggggtttaccctcgggtgggtggtgggggcgggggcggaggggaaagnnggcccggggtttcccccncaaagggtgtggtggggtgc

SEQ ID NO: 711914 - DNA, 248 bp, Homo sapiens
  misc_feature (209)..(210): n is a, c, g, or t
  misc_feature (228)..(228): n is a, c, g, or t
tatgtagtagcttaggctagtgtggcaatgttgatgcagaggcggtgctgtagttattgacgcggaatgtcatcagagcccaccagagccccgattatagcgcatcgttactgcctgactggctaacctgtaccttcatcaaaagtggtcatcacgtacccggggtttaccctcgggtgggtggtgggggcgggggcggaggggaaagnnggcccggggtttcccccncaaagggtgtggtggggtgc

SEQ ID NO: 711915 - DNA, 906 bp, Homo sapiens
gctgcatttgtggacacctgcagtggtggacaagatggactgtgtctcagggctctcggtgtcctgaggtcctggaactaggacagggacgtctggatcagctacagagtcggtgacctgtgacactctgttgaatcgtgcaatctgttcactgtcatgaaccatggggctaccagcaatcgagtgagtgggtcagtgggatgacattctctcgctaagaccctccatacaagatgtgagcactcctgactcactcccaaacctgtggggcccaagccactgtccagatcagcaactgtggagagtcctgtccttggcctccgcgtcgggatattcaagggatagaacctccactcctccctgaatcttgtatccttgcattttcaccatgcttttcctacaccctggcctatagttcccatgaatattacatggcttaagcttagtccccctcgaatcctctcctagttctccatgaaggaacagaactttggcataccataatttgtgtccctaagggcatatgggatggctgaccacacttgggtatattccctaagccaatcactccagggtggggcacggaaggggcggacgtcttgaccgtcagcctgttcattcactgaagtggcctcagtgaatttggagctttaggagtcaacgtccatcatttcaccgcaagtgtcaaggccatttccccctgtagcattggcgaagtcgacgaagggccgtctctccctggtcatccacagaagggtttcctggcaactgtgtcgcagtccattgcacttccctggaaggttggggcaaaacgtggtttaacgagctgcctcttttcactcattcactgttaggggtgcataagaaaaaaccgaaatcgtaagaacctaacttcccgtgaaatcc

SEQ ID NO: 711916 - DNA, 271 bp, Homo sapiens
  misc_feature (232)..(233): n is a, c, g, or t
  misc_feature (251)..(251): n is a, c, g, or t
cgcagcgagccagaagttgcgatgccgatagtggcggcgatactgatttgttataggcgtccgctgttgccactgcccgaccgtataaatacgcaccagcccaccagagcgccccgattatagcgcatcgttactgcctgactggctaacctgtaccttcatcaaaagtggtcatcacgtacccggggtttaccctcgggtgggtggtgggggcgggggcggaggggaaagnnggcccggggtttcccccncaaagggtgtggtggggtgc

SEQ ID NO: 711917 - DNA, 375 bp, Homo sapiens
gtcgattctatgaggataccctgtacacactcgaggactaaagacgatccttacgtatctgtatagtgagtagtggatgtttacacacagagacagcttccggtttattccacaatgaggtgagacatctaccagcgctttgagacaaactctatcttttcctatgaactctatctctaaagcacgtcacggggaaaaaaagggtttagagagaaataacttctccgggcaaaaactgaggttagcgggcctatcagctgtttcttctcactccaccactgctgctgactggaggagcagcctggaaagcagccgccctcccgcaaacaggtaaaccacattacctattcctgtggcggaggcaaatggatggtc

SEQ ID NO: 711918 - DNA, 249 bp, Homo sapiens
  misc_feature (210)..(211): n is a, c, g, or t
  misc_feature (229)..(229): n is a, c, g, or t
ttcgataggtcgacttcgttcctcgactcctcctcaagaatttgacgtttcttccctgctaattccctggttgggcataaacccaattcccccgattatagcgcatcgttactgcctgactggctaacctgtaccttcatcaaaagtggtcatcacgtacccggggtttaccctcgggtgggtggtgggggcgggggcggaggggaaagnnggcccggggtttcccccncaaagggtgtggtggggtgc

SEQ ID NO: 711919 - DNA, 105 bp, Homo sapiens
gtgcttagaggatcctttcggattgtgcatctggcaggcccatttttactgcctccatctagttggaaagtcctaaagtactagagggagacacaaacccggaag

SEQ ID NO: 711920 - DNA, 259 bp, Homo sapiens
  misc_feature (72)..(72): n is a, c, g, or t
  misc_feature (80)..(80): n is a, c, g, or t
  misc_feature (82)..(82): n is a, c, g, or t
  misc_feature (88)..(88): n is a, c, g, or t
  misc_feature (220)..(221): n is a, c, g, or t
  misc_feature (239)..(239): n is a, c, g, or t
aggagagtctagaacgctacgggaagtgtgctctactgacctgttgcgtaactttattggaccaccagagcncaccagancnccagancccaccagagcccccgattatagcgcatcgttactgcctgactggctaacctgtaccttcatcaaaagtggtcatcacgtacccggggtttaccctcgggtgggtggtgggggcgggggcggaggggaaagnnggcccggggtttcccccncaaagggtgtggtggggtgc

SEQ ID NO: 711921 - DNA, 129 bp, Homo sapiens
tctagaggatcccggctgcgggcatgtcccaacggcgcgcgggtgccctgtagagccgagcccatgctcggtgctgttcgcgcagaagcagccgagcgtagggctcgtgtctaacagtgggtgcctggt

SEQ ID NO: 711922 - DNA, 255 bp, Homo sapiens
  misc_feature (42)..(42): n is a, c, g, or t
  misc_feature (44)..(44): n is a, c, g, or t
  misc_feature (216)..(217): n is a, c, g, or t
  misc_feature (235)..(235): n is a, c, g, or t
gtgataagagtttgtgtcacggagtatgaccgccagcactanantaagagtacaggggaccacggccaccccgcacgcaaaaggcccaccagagcccccgattatagcgcatcgttactgcctgactggctaacctgtaccttcatcaaaagtggtcatcacgtacccggggtttaccctcgggtgggtggtgggggcgggggcggaggggaaagnnggcccggggtttcccccncaaagggtgtggtggggtgc

SEQ ID NO: 711923 - DNA, 1026 bp, Homo sapiens
gctgcggagagtgccgcggctcctccgtagacccagcggagcaccttcgtgtttgagtaacctggctggaggtggtggagcgtgtgctcaccgttcctgcccgccaaggcgttgctgcgggtggcctgcgtgtgccgcttatggagggatgtgtgtgcgcagagtattgcggacccatctggagctgtaacctggatctcctgcaggcctggcgtgaggcctggcacaccatggaggggcattgcttggttcgcgtggtacgcagcggagcttgagaatgtacgcatcttacccaaataccagttcgttccaccatggctgcattcagcaacactttccattcagctctggcacagcagtagtcgtgggcccatcacagccagcagccaagggacaccagcacactccagtcatagggcacaacgagccacttttggcccttatgcatgcaacagcctcattccgccacaaaacgaaattgccaaatggtccttatgaggcaattttgttggaccgccagagcgcaattcgtaggtgcactcgcacaatgtgggatccagggtccggcaaatgtccgaagcccttccacgcgaaccactacggacacacgttcgcgacggaacgttggtaggggctaccagttgccgttgtcgtactcacgtatccgccttcgatacactcttgaccacggtgacagtaccagcgcacatcacacaagccaccttatatccagtagttagacgtacaaggggacgtcccaaacagaacgtttgttaaaagacatgtacgtagaagatgagaccaagttcaaaacattatcaaggtttggacaagagcgttacagggtacagtatgatgaagagaagttcaacatcaccctgtaggcaaacttatcgaggatggttgagggtagcatttggagacatatgtggggataaaagtagaattcggctctagtatagcggtttggcggaagagcacatagtatcagaataaatcatttggaaaagcaaaagataaggacag

SEQ ID NO: 711924 - DNA, 229 bp, Homo sapiens
  misc_feature (190)..(191): n is a, c, g, or t
  misc_feature (209)..(209): n is a, c, g, or t
gctgtatctggagaataatatgtttaggtgccatgttatctaatttagtttaagtaggtgaaggtcgggccccgattatagcgcatcgttactgcctgactggctaacctgtaccttcatcaaaagtggtcatcacgtacccggggtttaccctcgggtgggtggtgggggcgggggcggaggggaaagnnggcccggggtttcccccncaaagggtgtggtggggtgc

SEQ ID NO: 711925 - DNA, 125 bp, Homo sapiens
ccccggggttttttttaaaaaaaaaaattttttaccgggggttccctttttgaaaaaccgggggtttggctttaaccccccccctttagaaaaattggcccaaaaaggttggcttccggggccca

SEQ ID NO: 711926 - DNA, 249 bp, Homo sapiens
  misc_feature (210)..(211): n is a, c, g, or t
  misc_feature (229)..(229): n is a, c, g, or t
taagtctagagtaaagggcgccacctactaataggcttggttattacgtacaaaagcttaatttgtaatcaaaattggccaccagatgcccccgattatagcgcatcgttactgcctgactggctaacctgtaccttcatcaaaagtggtcatcacgtacccggggtttaccctcgggtgggtggtgggggcgggggcggaggggaaagnnggcccggggtttcccccncaaagggtgtggtggggtgc

SEQ ID NO: 711927 - DNA, 290 bp, Homo sapiens
  misc_feature (19)..(19): n is a, c, g, or t
  misc_feature (24)..(24): n is a, c, g, or t
  misc_feature (26)..(28): n is a, c, g, or t
  misc_feature (32)..(32): n is a, c, g, or t
  misc_feature (251)..(252): n is a, c, g, or t
  misc_feature (270)..(270): n is a, c, g, or t
aggcggtcctgactgttgngtttntnnngatngcgggcgctagatggatacatggattacattcacattcccttcccacgccaaatttcacaacgcatgggaaggcttctgcctattgtattaccaccacccccgattatagcgcatcgttactgcctgactggctaacctgtaccttcatcaaaagtggtcatcacgtacccggggtttaccctcgggtgggtggtgggggcgggggcggaggggaaagnnggcccggggtttcccccncaaagggtgtggtggggtgc

SEQ ID NO: 711928 - DNA, 213 bp, Homo sapiens
  misc_feature (174)..(175): n is a, c, g, or t
  misc_feature (193)..(193): n is a, c, g, or t
gtatgatgatgcaggccatgggtaggttgaccaccagagcccacgagatgccgccccgattatagcgcatcgttactgcctgactggctaacctgtaccttcatcaaaagtggtcatcacgtacccggggtttaccctcgggtgggtggtgggggcgggggcggaggggaaagnnggcccggggtttcccccncaaagggtgtggtggggtgc

SEQ ID NO: 711929 - DNA, 214 bp, Homo sapiens
  misc_feature (165)..(165): n is a, c, g, or t
tgttaggggcatcaggtaggtggcagtttggcagccaatgtttaagcgggccagggagtggcatctccacacacagtcacattctccaagtggtggggcagcaattcaaacacagcaacgtatctatcaagtggttgtggcaggcattcacccacagtcaccatntgcatccagtatcagaggttgggagccagtcaaccatcatccaccacat

SEQ ID NO: 711930 - DNA, 94 bp, Homo sapiens
  misc_feature (1)..(1): n is a, c, g, or t
  misc_feature (19)..(19): n is a, c, g, or t
  misc_feature (28)..(28): n is a, c, g, or t
  misc_feature (55)..(55): n is a, c, g, or t
  misc_feature (94)..(94): n is a, c, g, or t
nacttgggatttttttttnaaagacacntttttccatgttcatggcgcacgcacntacccagtcgtttgtattccctttctttcaatccaatan

SEQ ID NO: 711931 - DNA, 178 bp, Homo sapiens
gtggcgacacgtacatggtaggaagttgaagtagattgaataccgagctggtattactccggtctgaactcagactcacggtacgtactttaatcgttgaacaaacgaaactttaatagcgggtgtaccatcgggatgtcctgatccaacatcgaggtcgtgaacggtatagcccgtg

SEQ ID NO: 711932 - DNA, 224 bp, Homo sapiens
tatacagaagatacataataaaataactactaagaaattactagatacactatatattagatcacaagtgtataaattaacttacatatacatgtaaaatctgagccttatcctctattacatcttatgaaccctacagtactgtactacttatttctaaaatagagtaactcatctacaatatctcatatcattatagtcactaaatgaatgtctgctggata

SEQ ID NO: 711933 - DNA, 659 bp, Homo sapiens
  misc_feature (9)..(9): n is a, c, g, or t
  misc_feature (64)..(64): n is a, c, g, or t
  misc_feature (75)..(75): n is a, c, g, or t
  misc_feature (83)..(83): n is a, c, g, or t
  misc_feature (95)..(95): n is a, c, g, or t
  misc_feature (99)..(99): n is a, c, g, or t
  misc_feature (137)..(137): n is a, c, g, or t
  misc_feature (160)..(160): n is a, c, g, or t
  misc_feature (163)..(163): n is a, c, g, or t
  misc_feature (167)..(168): n is a, c, g, or t
  misc_feature (173)..(173): n is a, c, g, or t
  misc_feature (183)..(183): n is a, c, g, or t
  misc_feature (185)..(185): n is a, c, g, or t
  misc_feature (191)..(192): n is a, c, g, or t
  misc_feature (198)..(198): n is a, c, g, or t
  misc_feature (200)..(200): n is a, c, g, or t
  misc_feature (202)..(202): n is a, c, g, or t
  misc_feature (221)..(221): n is a, c, g, or t
  misc_feature (230)..(230): n is a, c, g, or t
  misc_feature (258)..(258): n is a, c, g, or t
  misc_feature (311)..(312): n is a, c, g, or t
  misc_feature (342)..(342): n is a, c, g, or t
  misc_feature (351)..(351): n is a, c, g, or t
  misc_feature (357)..(357): n is a, c, g, or t
  misc_feature (413)..(414): n is a, c, g, or t
  misc_feature (426)..(426): n is a, c, g, or t
  misc_feature (437)..(438): n is a, c, g, or t
  misc_feature (454)..(454): n is a, c, g, or t
  misc_feature (466)..(466): n is a, c, g, or t
  misc_feature (483)..(484): n is a, c, g, or t
  misc_feature (545)..(545): n is a, c, g, or t
  misc_feature (548)..(548): n is a, c, g, or t
  misc_feature (555)..(555): n is a, c, g, or t
  misc_feature (561)..(561): n is a, c, g, or t
  misc_feature (573)..(573): n is a, c, g, or t
  misc_feature (576)..(576): n is a, c, g, or t
  misc_feature (584)..(584): n is a, c, g, or t
  misc_feature (611)..(611): n is a, c, g, or t
gctgcaatnagacagagaaaggcgaagaaaaaaaagtggaataaggtaggggaaggaagaaganataaataatgnaggagggnggaaagggaggngggnggggggggggaaagaaggggggggggagccagagggcnccgggggtttagacactccaggnttnggcnncggangcaaccagcntntgaatnnagcggngngnaggggcactggggcgcccngggcctccnactcccccccgtcgtcttcgtacatctngccctcttcctcggccgtcgcgtcctggtactgctggtactcggacaccaggnngttcatgttgctctcggcctcggtgaactncatctcgtncatgcnctcgcccgtttaccagtgcaggaaggccttgcgccgcgaacatggccgtgaaccgnngggagagggggntgaagaggggnnggatggccgtgctgtncccgatgaaggnggaggacatcttgaggnngcggggcgggaccgtcaaaaacggcgcgagcttcacgttgttggggatccactccacgaantanactgccngttctngctctggatggncancatctccncgtccacctccttcatggacatgcggncccggaacacggtggccaccgtcagtaacggccgtcgcgcgggtcgca

SEQ ID NO: 711934 - DNA, 1419 bp, Homo sapiens
  misc_feature (774)..(774): n is a, c, g, or t
  misc_feature (1137)..(1137): n is a, c, g, or t
  misc_feature (1386)..(1386): n is a, c, g, or t
agttgcttgtttagttggcccccgcccggcattggtgagagggatattgtctctgcactccttggggggaaggtgtttccgtttgaggagaggttatattttggtcgccccccgcccccctccctcccccccggtggggggtgagatggccgctgttcgctgtgaccacccagcaacgggggagagtctgctcttttgcttcgctactagctataatgtgaggaagtctgctcctgttgcgggcgccaccgaccacacgagtggtttgttggtgaccgccgctaaggaggactccacatgcgccggtatacaccatcgggctccccgctccggatggtttcccacctttgtggaagaggggaacatatgtttgggcgaccacagaaggtggggcgttcttctaaaaaatgggtgagcaccgtggcccccaccttggggaaatagaaaaaagggtgtgagattgtcacccctcggaggggaccctcctttagattgccccactgggagaaagttttctcggctttcttttataggggcccttcaccaagcggggagaggagagcgtctgaaagagagagattttggcctgtgacacatttttctcgggccttggggttcttctgtggcgccacagtggcgcgcccaccgctccccctttgaagagagagagagacatagacgccacaacaatagtgtgtgtgcgacacacccgcggttgtgagactttctccttggtgcgcccccagcagagagagtgtgagattttgagagagngggccgcgcgactggcgtcacccacactttgagagaaaaggttgtgagagtctctctgtgtgggtgggccgacttttggagagaagtgtcgctctcttcgtctcactgcagagaggctctgtctctgtgtgttgggggagacacacgcacaccccctctttatgagagagagtggctcactgtcacacacctacactcgcagagacccctcatttttcccccgccacttcggctccacaaggttggggacaccctataaagtgttctcccgccgctcttctgtgggccccccacgcggaggcgccacacgcgagctctctcacttctctcgccacacactgtgctctcacgggcactaacacncctctccgcgagaccgcgctctcgcgcaccctcggccccacgtgttctccacgccccacaccctctgggtccgcgcgccacaacttctccgcgaggggtggctgcctccccttcctgccctctcacattctcgtcgccctcgatggttccctcgtcacttcacctccgggtgcgtgtgtttgtatgtctgtgtatgtataggggaaagaagggatccctaactgttcccttatctgttttctacccccncctttgtttaataaaggctgaagcctttttgta

SEQ ID NO: 711935 - DNA, 721 bp, Homo sapiens
ggagacggagtcttgttttgtcgcccaggcgggagtgctgtggcgcgatctccactcactgcaagctccgccttccgggttcacgccattctcctgcctcagcctcccgagtagctgggactacaggcgcccgccactgcgcccggctaattttttgtatttttagtagagacggggtttcaccggggtctcgatcccctgacctcgtgatccgcccgcctcggcctcccaaagtgctaggattacaggcgtgagccaccgcgcccggcccctgatggtattttatagagagcccattagctgtaaagaagtgcctttccttccagatggcagcatgagcatgaaggactaagaaagcatacttggagtcagtgccaatgttagttacttttcccttgcttaatttgagtgctcttgtaagagctatcagttcaattagttgagtgcttgtgcctggagagatgggtgcagtttcaataacatcattcagagggcctacgacatatcctggctaacggactccttgctccacacaggcgtgggccgaatttctggaaccccggggatccactaggtttagagcggcccgcaccgggggggagctccaagttgtggtcctttaaggggggttaattcgagctggcggaaaaaggggaaaagctggtcctgggggaaatggtatccctcacaattcacacacaaaccagccggacctaaaggg

SEQ ID NO: 711936 - DNA, 419 bp, Homo sapiens
  misc_feature (18)..(18): n is a, c, g, or t
  misc_feature (63)..(66): n is a, c, g, or t
  misc_feature (83)..(83): n is a, c, g, or t
  misc_feature (88)..(88): n is a, c, g, or t
  misc_feature (91)..(91): n is a, c, g, or t
  misc_feature (94)..(94): n is a, c, g, or t
  misc_feature (103)..(103): n is a, c, g, or t
  misc_feature (119)..(119): n is a, c, g, or t
  misc_feature (130)..(130): n is a, c, g, or t
  misc_feature (132)..(132): n is a, c, g, or t
  misc_feature (134)..(134): n is a, c, g, or t
  misc_feature (136)..(136): n is a, c, g, or t
  misc_feature (138)..(138): n is a, c, g, or t
  misc_feature (142)..(142): n is a, c, g, or t
  misc_feature (144)..(144): n is a, c, g, or t
  misc_feature (148)..(148): n is a, c, g, or t
  misc_feature (153)..(153): n is a, c, g, or t
  misc_feature (155)..(155): n is a, c, g, or t
  misc_feature (160)..(160): n is a, c, g, or t
  misc_feature (163)..(163): n is a, c, g, or t
  misc_feature (166)..(166): n is a, c, g, or t
  misc_feature (170)..(170): n is a, c, g, or t
  misc_feature (176)..(176): n is a, c, g, or t
  misc_feature (182)..(182): n is a, c, g, or t
  misc_feature (189)..(189): n is a, c, g, or t
  misc_feature (194)..(195): n is a, c, g, or t
  misc_feature (197)..(197): n is a, c, g, or t
  misc_feature (204)..(205): n is a, c, g, or t
  misc_feature (209)..(209): n is a, c, g, or t
  misc_feature (216)..(217): n is a, c, g, or t
  misc_feature (221)..(221): n is a, c, g, or t
  misc_feature (230)..(230): n is a, c, g, or t
  misc_feature (233)..(235): n is a, c, g, or t
  misc_feature (239)..(239): n is a, c, g, or t
  misc_feature (241)..(241): n is a, c, g, or t
  misc_feature (245)..(245): n is a, c, g, or t
  misc_feature (252)..(252): n is a, c, g, or t
  misc_feature (254)..(255): n is a, c, g, or t
  misc_feature (262)..(262): n is a, c, g, or t
  misc_feature (265)..(265): n is a, c, g, or t
  misc_feature (273)..(273): n is a, c, g, or t
  misc_feature (294)..(294): n is a, c, g, or t
  misc_feature (300)..(302): n is a, c, g, or t
  misc_feature (386)..(386): n is a, c, g, or t
aatgagaaggtggatctntggtgcattggagtgctttgctatgagctgctggtggggaacccnnnntttgagagtgcaccacncaacnagnccnatccccccncccccaaggtggaccnaaagtcccccncntntntncccncnggancccangnccccntcnccnaacngcccangcatanccccccngaacnncnccccctnncccnggtcccnncccncccctgggnccnnncccncncccngagggcncnnccccccnccnccccccancctcccccccgatggcccctnccattnnnccgggtgcgtgtgtttgtatgtctgtgtatgtataggggaaagaagggatccctaactgttcccttatctgttttctacccccncctttgtttaataaaggctgaagcctttttgta

SEQ ID NO: 711937 - DNA, 335 bp, Homo sapiens
cttgaacctgggaggcagaggttgcggtaagcctagatagtaccactgcactccagcctgggggacagatagcaaaactctgtctcagaaaaaaaaaaaaaaacaacaattttttttttttaattaaaaattactttattactaaaaaatgcaattgatcatctgatcgtacccttcggcaatttataatgttttggctgtgggaaggtctggccttgatgtccatgtctgctgaccgatgagggtaagtagttgctgaaggctagagtggctgtggcaattccttaaaataataactattaatacaatgtagttttctgctattgatcgatcct

SEQ ID NO: 711938 - DNA, 135 bp, Homo sapiens
  misc_feature (2)..(2): n is a, c, g, or t
  misc_feature (12)..(12): n is a, c, g, or t
  misc_feature (109)..(109): n is a, c, g, or t
  misc_feature (126)..(126): n is a, c, g, or t
cnctgtggagtnaagtaaaccggtatggccagaacggcgacttcacgcgcgctctcaagaccgtcaataagatactacagatcaacaaagatgacgtaactgccctgcnttgtaaagtggtatgcnttatccaga

SEQ ID NO: 711939 - DNA, 461 bp, Homo sapiens
  misc_feature (16)..(16): n is a, c, g, or t
  misc_feature (49)..(49): n is a, c, g, or t
  misc_feature (451)..(451): n is a, c, g, or t
gggccccgcctcctanaaacctagtgggatccccccgggcttgccaggnaattccgggcaccgaagaaatccttgaaatattaaacaaatggttttttgacccccttcaaaaggggcccatagtaccataaacagatatataatacatttgtggcattaaagtttccctaggggtggctgggtagcgtggctcatgcttataattccagcactttgggaggccaaggcgggtggaccacttgaggtcaggagctcaaaaccagcctggccaatatggtgaaaccctgtcttttactaaaaacacaaaaattagctgggtgtggtggtgcatacctgtattcctagctacttgggaggctgaggcacgagaattgcttgaacctgggaggtggaggttgcagtgagctgagattgcaccactacactccagcctaggcaacagagggagccncctgtctaaa

SEQ ID NO: 711940 - DNA, 191 bp, Homo sapiens
caccctagcatcattctactatcaccattactaactaagctggctctttaacctctccaccctcatcacaacacaatgaacacctctgattactcctgccatcatgacccttgtccataatatgatttatctccacactagcagagaccaacctaacccccttcgaccttgctgaagggagggcccgaact

SEQ ID NO: 711941 - DNA, 276 bp, Homo sapiens
  misc_feature (101)..(101): n is a, c, g, or t
tgtggtcgtctctagaggtatcccccctgatctcgtgatccacccacctcggcctcccatggtgctgggattactaggcattagccaccgcgtccgggctnaattagctctttctttatggaacattggattccccggcataggctacatcgtagaacttcaatcacattggaattgagggagtttcgagacgttccttggcgcaaaaaggtggccctgcagtgaaacaggcggttaggcatttgtaagagttcccagcttggctacatcatggca

SEQ ID NO: 711942 - DNA, 133 bp, Homo sapiens
cggaagataccctgagggtagggactgtgtgtagtctcccttgagttcccagaactggaacacagtaggagcttaattgaagttgccagatgaatgactgacacgtctttctttggtagagattctcagtacc

SEQ ID NO: 711943 - DNA, 238 bp, Homo sapiens
ggggggccccccccccccgggggggggtttttttccccccaaaaaaaaaaatttttgttttcggggccgggcccaatttgttcaaaaaagggggggccccccattttttcccaaaaaaaaaggttttttcccgcccccgggggccccccggtttgggtttttttttgggaaaggggtttttcccccccaaatgggggttttaatttttttaaaaccccttttaaaaaggggcccccca

SEQ ID NO: 711944 - DNA, 106 bp, Homo sapiens
gtgtcgaggggtcgcattttcgcgcgcccagcattcacggtgtggctccggcggccgcggcgtatccgtgtactccgtcccgctttgtgtcctcgtcctcctcggg

SEQ ID NO: 711945 - DNA, 399 bp, Homo sapiens
  misc_feature (230)..(231): n is a, c, g, or t
  misc_feature (249)..(249): n is a, c, g, or t
  misc_feature (288)..(288): n is a, c, g, or t
  misc_feature (306)..(306): n is a, c, g, or t
  misc_feature (375)..(375): n is a, c, g, or t
  misc_feature (386)..(386): n is a, c, g, or t
cacgaaagttatatggaacctcaccactctttgggcaccattttgtgctggaaaacccagggaccatcaaagtggccgaccctgtgtacctgctccgccagtaatgggaaccgcctgtcctggaatattagaccgccttttaaaaatgttcccaaaaatgacaacacttgaccgcatggtgtttcagaactgagacctctacattttcttccaaatttgtgattttcacnnttttcgtcttttggactnctggtgtctcaatgcttcaatgtcccagtgcaaaaagtnaagaaatatagtctcaanaacttagtagggacttcagtcaagtcacttaaatggacaagacaggattctggaaaactccccggtttnaactggatttngggaatagtttct

SEQ ID NO: 711946 - DNA, 519 bp, Homo sapiens
  misc_feature (61)..(61): n is a, c, g, or t
  misc_feature (168)..(168): n is a, c, g, or t
  misc_feature (201)..(201): n is a, c, g, or t
aggcaagaggcagggacgaattgtttaccccatgataatgtaggatatcataaattcttcntcaaaggttttagcctgtaatttgttaagtacattgagttctgagatcctccccaaagaaccaatgaacaagtatgttcagctcacctgttctttgttattcatttnaacttttaatttcctcattctttatgtctccangcccctagtttcagtaaacaatcccctcctagcctctgtcacctgctctgacctgagtcacctttagtcacctggtccgtaaccatctttcctgtctaaacttctcaccccaccactctggcttaaacccctgctctctttaaaatagccagtcagaattagcttagaccgcacaaaaaaaccctagcccatagaaaaaaaacacagcagtagggggtacctgcatcagggataagaacccattcccctcccttgttccggtgtgctctcgccattgcaccatccatgagacgcactccttgtatagaagtaaaattg

SEQ ID NO: 711947 - DNA, 254 bp, Homo sapiens
  misc_feature (141)..(141): n is a, c, g, or t
cggctgttctagaggatcccttttgagatggaatctaggctctgtcgccagcctgaagtgcagtcgtgtgtttcatgcgcgtcgtgtgaagagaccaccaaagaggctttgtgtgagcaacatggctgtttatttcacctngggtgcatggcgtggctgagtcctgaaagagagagtcagcaaatgggagtttgtcatcatgtagacctgtgtcttatgagacaatgctaaagttgagtcccatcaggcgtgaa

SEQ ID NO: 711948 - DNA, 170 bp, Homo sapiens
ttagaggatcccccgcatcggcgtaggtcagcacctggtcgtcatggtcgaacttgacgtgggtgccgctgtagctgaggtcggtcaggtagaagtggccgctgtgcgattcgacgcgggcatgcgagcgcgacacgcgcgaatcgctgacacagaacgaggcttgcggg

SEQ ID NO: 711949 - DNA, 104 bp, Homo sapiens
taaatctatatgagacaagcatatgctactggaaggggtgccgatgaatagcgcggtgccgatgactagcagagtgccgaagaatagaagacggggctcctact

SEQ ID NO: 711950 - DNA, 403 bp, Homo sapiens
tctacagatccattctgcacccacagcgtggattggactggaagagtgggagggcaggtggagaaggcattgtgctgcagtggggagcagcctgggccagccagtccctgtgcctgacagtgtatgcatgatgatggtcacttctgggcgcaggatgacaggtactggttgtcttcaccatggcgataatgaggaggcaccggtcagcaggaaggtgggccagaacgagggagaagaggagggcctggggcccgtagaggcgctggaataggacgctggtctcgtcccccccgaggtgcggagaagcagtagaagacctgctgctcttggaatttggctctgaccttctccacgtcggcccgggccgtttggtaattgtccacgctgcctgggatgtaggagc

SEQ ID NO: 711951 - DNA, 310 bp, Homo sapiens
aattgtggtatatttcatttaaaatcgatcaaagacagcaacatacattaatcagaggaaagcatcaattaaatgcagaaacaagatttaaacaaagattcatattaaaacaatgataagtaatacttagaaactgcatcctagagacacatcattcgcatttttagaaaaacagaaacatattagtgtgaaaagatgttaaaaaatgaatattaaaccgtcgagcacaacacactacgccgataacaatacaccacaagcgccgtaatcctgccgacactgacacactacaggcgtcgtggcgatccga

SEQ ID NO: 711952 - DNA, 563 bp, Homo sapiens
acctatgttcagaagttcaagcgtgagttaagcaccaagtgggtgttgaatacagtgagtactggggcccatgtactgctggggaagatcctacagaaccacatgctggacctccgcatcgccaactccaagctcttctggagggcgctggccatgttgcagaggttctctggacagtccaaggctcgctgcattgagagcctccttcaagcaatccactttcctcaaccactgtcggatgatgtccgcgccgctcccatctcctgccacgtccaggttgcccacgagaaggaaaaggtgatccccacagccttgctgagcctcctactccggtgctccatctctgaggctaaggcacgcctgtctgcagcttcttcagtctccgtccacttccaaggggacatgtgccagcagtacacgctgtgggaagaactcagtttcgggtgggtggggcctaactgcccagaattggggaagagccctgttctcaaccggattatttccatttttactggtgtcttctgaactcagaaataaaactaaatgtcttgttttggaacata

SEQ ID NO: 711953 - DNA, 545 bp, Homo sapiens
  misc_feature (198)..(198): n is a, c, g, or t
  misc_feature (372)..(372): n is a, c, g, or t
  misc_feature (407)..(407): n is a, c, g, or t
  misc_feature (461)..(461): n is a, c, g, or t
gattcgaagcggacggtggtgtgtcgagtgtagagtgtgtaagcagatttgctggtcatggagacgctctcagtctgagaatatgacattcgtaagccatgggagtccagtattgggggggcaatggtgcagcgacgcctgccgggggcttaaaccgcgcccaaattggccccaagccccgccaaattttttgggggnaaaaaaaaggccaggacccggtttgggaaaggggggcgatcacctctagatgcctactcgattcaaggacaacacaccatttctccgctcgatctggccaagctgaaccaggtggcaagacaacagtctcactttgccatgaatgcaccggggccgcgcgcaaccccccccggngggcaaatttttccgccccgggaaattgactccangctctccagaggtgaaaggctattgggcaagtttggatgcatctcactcaaaanccaaaccgcgagttgggaaaaccgttcaagacgcaattttccaaataacttaattggctgcataatcgggcgccaaggcgccaa

SEQ ID NO: 711954 - DNA, 259 bp, Homo sapiens
  misc_feature (138)..(138): n is a, c, g, or t
  misc_feature (156)..(156): n is a, c, g, or t
  misc_feature (173)..(174): n is a, c, g, or t
  misc_feature (217)..(217): n is a, c, g, or t
  misc_feature (225)..(225): n is a, c, g, or t
  misc_feature (257)..(257): n is a, c, g, or t
gaacgggtgatgggtgggaatggtttaatctcttcaagtcgagccagtggttataaagccagacattattacccactcattaactccctgttagggcttggccctgtgggcagagctccccgtgccagcccaatccanaagtatgacgagtggtgntgacttccatgtacacnnagttgggtcacctcccctagaccctggacaatcccctttctcnccatctgngtgagaagggagttcagtgtggctggggtacncg

SEQ ID NO: 711955 - DNA, 538 bp, Homo sapiens
tgagtggagtttcgctcgttttgcaggctggagtgcagtggcgtggtctcgactcaccgcggcctccacctcccgggtttaggtggttctcctgcctcagcctcctgagtgtctgggactgcaggcatgagccaccatgccagctaattttggttttatttttttggtacagacggggtttctccgtgttggtcaggctgatctcgagctcctgacctcgagcgatacgcccgcctccgcctccctgggtgctgggattgcaggcgtgagccaccgcgcccccggtccaatttagtaaccagaaaggaatagatctgcctggcgtggtgcctcccccctgtgatcccaggactttggaaggccgagtgtggcagatcgcttgagcctaggagttccagaccgcctgggcaacatggtgaaacccggtctctgttttgagacggagtttcacccttgttgtccaggctggagtgcaatggtgtgatctttgcccaccgcaacctcgggctccccgattaagggattctcctgcctgggc

SEQ ID NO: 711956 - DNA, 190 bp, Homo sapiens
cacacagtactaggagacaagcacaggatgtagaggtctattcggcataatcttctccctcataatacatcttcaccatcaacagagagagcagcatacttagcttgccagaactagaactataaaaaactggatttaacctacaagttaactataggctcaggatgcagatactggagtacttagatcc

SEQ ID NO: 711957 - DNA, 967 bp, Homo sapiens
gcagctccagagcatgggatgcgggataaatgaccgggtgttgggctcctcgttccatgccgagccggtccccacaagttgagagagtgtctccccctcatcattttcctgaggaagcagacttaagtatgccctgacaggagatgaagtaaagaagattggcgatgcgagcggttcgattaaaatcgatgggaaggtccgaactgatataagccgtaccacgtggctggattcatggatgtcatcgagacattgacaagacgggagagaatttccgtcctgatctatgacaccgaagggtctgctctgctgtacatcgtattacaccgtgaggaggccaagtacgagttgtgcgaaagtgagaaagatctttgtgggcacaaagaggaatccctcatctggtgactcatgatgcccgacccatccggtacccgatccccgcttcatcaaggtgaatgataccatgtcagattgatttagagactggcaagatgttagccttgatttgcatcaagttcgagacctggtaacctgtgtatggtgactggaggtgtaagcgaggaaagaatggtgtgatcacaagtagagagaggcacctggatcttttgacgtggttcacgtgaaagatgccaatgggaaagtttgcactcgacttgccaaacatagcgttatgggaagggcaagcaagaccatgggattctcttccccgaaggaacgggtatccgctcacatggtgcagagagaggcgaaagactgcgggcaaacagagcaggcgtgaacagggtcccgggtggactggcagatccttgtccgtcattcaaaaagatggggcggttaaccgcaaaaaaaaaaggggggcgggcgaaagatccgagggcccagcaggtcaccactgggcaagggcaaaggcgtaaaacagcggggtaaacggagaacagacggtcggggaactcgggaggacacaaaa

SEQ ID NO: 711958 - DNA, 456 bp, Homo sapiens
  misc_feature (169)..(169): n is a, c, g, or t
  misc_feature (238)..(238): n is a, c, g, or t
  misc_feature (277)..(277): n is a, c, g, or t
  misc_feature (297)..(297): n is a, c, g, or t
  misc_feature (321)..(321): n is a, c, g, or t
  misc_feature (352)..(352): n is a, c, g, or t
  misc_feature (362)..(362): n is a, c, g, or t
  misc_feature (441)..(441): n is a, c, g, or t
tcgagctcgggaccccgctcttgctcccatcagactcttcccgtcctcagggctgtcctcaaatgggacttgggccttaagtgaatcaaactgtgtatctcccaaaagtcatttttttttttttagcagaaaataaagtaccttaatttatccacccacagaaagtttncagatggggtgggaaggaatggagagagaatgtgtctatgagcttccagcgctcatctctgcggctcanaagccatcaatagctcgaacagaaaacgtcctcacatcngtcacacaaacacaccccanggaaccaaaaataaaccccacacngatgaaagccagcatgtcgaaagataatttnagatctattngaagactgcagagactgtctcgctgaaattttaaaaccacaccaccagaatacccaaccccttatgattatgctcagcnctgaggggacgcagg

SEQ ID NO: 711959 - DNA, 111 bp, Homo sapiens
  misc_feature (1)..(1): n is a, c, g, or t
ntagcagcgcagcacataatgccagatccccaacctactaagcgaagccagggattgaacccgcagcctcatggttcctagtcagattcctttcccctgcaccacgacggg

SEQ ID NO: 711960 - DNA, 242 bp, Homo sapiens
tgtcgaccctagaaggatcagcctaatttcctttggacttgcgggtttgatggtaaatatggggctgtaaatggtcagtccagtgtttaaatctgacgcaggcttatgcggaggagaatgttttcatgttacttatactaacattagtcctcctatagggtgatagatgggcccaatggggtatgaggagttcagttatttttttgtggggggttcccgagcctcgattcgtatctcattgg

SEQ ID NO: 711961 - DNA, 247 bp, Homo sapiens
  misc_feature (58)..(58): n is a, c, g, or t
  misc_feature (208)..(209): n is a, c, g, or t
  misc_feature (227)..(227): n is a, c, g, or t
gttattcgctgcggtgactaggcgtaatgttgcatgggctcggtagtagagtatggancgattggaggtaacgttggtccggtggcaccccgattatagcgcatcgttactgcctgactggctaacctgtaccttcatcaaaagtggtcatcacgtacccggggtttaccctcgggtgggtggtgggggcgggggcggaggggaaagnnggcccggggtttcccccncaaagggtgtggtggggtgc

SEQ ID NO: 711962 - DNA, 138 bp, Homo sapiens
actgtgcaagtctaggagtacctgataacgctaacgctcatgcgggtctgcttggaaattgctggcggcttcaatgacgttctatcttcatacaatttccaagcagacccgcatgaacgttagcgcaatcagggactc

SEQ ID NO: 711963 - DNA, 256 bp, Homo sapiens
  misc_feature (129)..(129): n is a, c, g, or t
  misc_feature (154)..(154): n is a, c, g, or t
  misc_feature (206)..(206): n is a, c, g, or t
  misc_feature (232)..(232): n is a, c, g, or t
  misc_feature (246)..(246): n is a, c, g, or t
acccagaccaggctcgacagctgaccaaggccatgatgagaaaggccaaggccagccgcctggtcacgcagcgagatggggaggtgcagaacttagacagcttcatctccaaagaccccatccagaagnccccgcagatgaacatagagaggcncaaagaaaaaaaaggctaacgattgggatgccacaggctaacggccacacgngcccctgtgggtcccagggaggtcgnaaacaaggattttncaacttaaaa

SEQ ID NO: 711964 - DNA, 211 bp, Homo sapiens
  misc_feature (172)..(173): n is a, c, g, or t
  misc_feature (191)..(191): n is a, c, g, or t
ggtgtgattgatagaaagcaataattggaaacaacagctgaagcctacattccccgattatagcgcatcgttactgcctgactggctaacctgtaccttcatcaaaagtggtcatcacgtacccggggtttaccctcgggtgggtggtgggggcgggggcggaggggaaagnnggcccggggtttcccccncaaagggtgtggtggggtgc

SEQ ID NO: 711965 - DNA, 182 bp, Homo sapiens
gtgtatgtcattaatccctacaaatctgagttaagtaactttcccaaggtcacaggactgttaagctgtcagagccaagctttgagatgagatttcgacgatcagacggcttgctcctgtcgccacaggctggcagtgcactggcagcagatctcagactcagatgcaaccctctgccatcc

SEQ ID NO: 711966 - DNA, 837 bp, Homo sapiens
tactggtgcatctttagcactagacgattgctctgcaggaaagcacacggaccttcgaacgtacccgaaatctgacttggacgtgacgagagagacggtatgaggagcgcttcggcctttcatgacgagaacattcgctccagtcgatgtcattgatacattgaagtacctttctgacctcgagaacgagaacgccagatcgtttctgcaagaagagcgtcgagttctctaggagatttcatctacggaatgccgattgggaacgacagacatcgcggagtaatgaaagaggctatagaacagatccccatcttacatagttcaggagctctgggagagagagctgcgaggtatttaacgcttataccgcaacaagacaagaatacgatactctcatctatcgtggattctgtaattgctgtgaccaaggcttgcactggatcagtaacctgtggtactatccgacaaagtctagggcaccagaatgcagttcagtgcggcaagcttctgcaggcgtggagtctgtatatctctattgtattggccaggtacggtgtcggtttgctctctcctgcttgattggtgattgctgaggaatacgtatacttagtgagtcaccaaaagcataatcgatgatagatgctcgatacagacattgaggaagctgccttcgaagacagtggagtgactccattccatcaagtcgagggatcgtgacccctagggtgaaacctgatggggtctgtgttactaacatttattccgtacgaccctgtaccaggagctaccagtacctgttgtaacttgggctggaaacagaagatataaaagggcaag

SEQ ID NO: 711967 - DNA, 551 bp, Homo sapiens
  misc_feature (16)..(17): n is a, c, g, or t
  misc_feature (512)..(513): n is a, c, g, or t
  misc_feature (531)..(531): n is a, c, g, or t
aagcttcctattgggnnctttggctgcaatgaggatttgtgcgaacagctaatcttttgaacctattatgcttggctgtgagtgttgggacatacggttactccaattatatcagtacgctgccgaagttgacctggtggtgtgatgatgcagcccaggggtaggttacatatgtcgtccatagggtttgctatgtcaatttagaagcacccacggtggattggtctaaccacggaatactaatgtggacgagcccggtcacgctacccaaagcgttcatcacgcgtgccaagcaaaagtttagtacgacgacacaacaacttgaccaggattactatgcagtcgcgccggttctgccaatgcgtgaaacagacggtactaaccctacaaaccccgattatagcgcatcgttactgcctgactggctaacctgtaccttcatcaaaagtggtcatcacgtacccggggtttaccctcgggtgggtggtgggggcgggggcggaggggaaagnnggcccggggtttcccccncaaagggtgtggtggggtgc

SEQ ID NO: 711968 - DNA, 953 bp, Homo sapiens
  misc_feature (54)..(54): n is a, c, g, or t
  misc_feature (82)..(82): n is a, c, g, or t
  misc_feature (94)..(94): n is a, c, g, or t
  misc_feature (96)..(96): n is a, c, g, or t
  misc_feature (110)..(110): n is a, c, g, or t
  misc_feature (116)..(116): n is a, c, g, or t
  misc_feature (118)..(118): n is a, c, g, or t
  misc_feature (121)..(121): n is a, c, g, or t
  misc_feature (126)..(126): n is a, c, g, or t
  misc_feature (145)..(145): n is a, c, g, or t
  misc_feature (147)..(147): n is a, c, g, or t
  misc_feature (153)..(153): n is a, c, g, or t
  misc_feature (158)..(158): n is a, c, g, or t
  misc_feature (164)..(164): n is a, c, g, or t
  misc_feature (214)..(214): n is a, c, g, or t
  misc_feature (216)..(216): n is a, c, g, or t
  misc_feature (220)..(220): n is a, c, g, or t
  misc_feature (241)..(241): n is a, c, g, or t
  misc_feature (255)..(255): n is a, c, g, or t
  misc_feature (280)..(280): n is a, c, g, or t
  misc_feature (292)..(292): n is a, c, g, or t
  misc_feature (299)..(299): n is a, c, g, or t
  misc_feature (303)..(303): n is a, c, g, or t
  misc_feature (363)..(363): n is a, c, g, or t
  misc_feature (376)..(376): n is a, c, g, or t
  misc_feature (378)..(379): n is a, c, g, or t
  misc_feature (385)..(385): n is a, c, g, or t
  misc_feature (390)..(390): n is a, c, g, or t
  misc_feature (397)..(397): n is a, c, g, or t
  misc_feature (407)..(407): n is a, c, g, or t
  misc_feature (422)..(422): n is a, c, g, or t
  misc_feature (426)..(426): n is a, c, g, or t
  misc_feature (443)..(444): n is a, c, g, or t
  misc_feature (447)..(447): n is a, c, g, or t
  misc_feature (450)..(451): n is a, c, g, or t
  misc_feature (457)..(458): n is a, c, g, or t
  misc_feature (463)..(463): n is a, c, g, or t
  misc_feature (467)..(467): n is a, c, g, or t
  misc_feature (469)..(469): n is a, c, g, or t
  misc_feature (472)..(478): n is a, c, g, or t
  misc_feature (484)..(484): n is a, c, g, or t
  misc_feature (487)..(488): n is a, c, g, or t
  misc_feature (490)..(491): n is a, c, g, or t
  misc_feature (504)..(504): n is a, c, g, or t
  misc_feature (540)..(540): n is a, c, g, or t
  misc_feature (562)..(562): n is a, c, g, or t
  misc_feature (566)..(566): n is a, c, g, or t
  misc_feature (924)..(924): n is a, c, g, or t
agcagaagagttttaattgcttggttagtattaatgttttttggttttcttctngggtgggaagtagtgtagctaagtatanatttcctttgantntatggctggaggtnctgtgntncgnatccntgcgtgtggggggtggaangnctgagnccatnatctgngtgttttgtctttaccatggcgcagtatccagatgtttagaaatgtgggntnattngcagtggtgttctttttttcntttgggtgttttgngtcacttggattttttgccttgctnttcttcttaatncgttgtnacantgcactaaaatagcttgaaataatagttgtcgagtttttgtcctcgtgcgcagttttgcnatttctgtgtgtncnncgagtngcccngttgtgntctctatctnaagttcttatcgagntaantcttatctctagggagnnttnacnntgtttnntcacnatgntntannnnnnngggttnttnnannggacacgggaggnggagataaaaatacttaatccaatccctttttagtnattgattgaacatcttccaaantttngaagacgagaaaattgaaaactctttggccattggagaggtatagacgttaactgcaggtgtctgcctgttccttgacctcaactcagaagtaaaattaagagttaagagtaattaattctaccatttaagccagaaattgaaatctctaatactatttcctaggataaaattgtgaaaccaaatagtgtgtatcagcaattctgaatttgaaattccatatattgatttttccataaaatattttctgcactcagagatatatcaaatagatctgctaatgtaggaaaaaacaaagatacaaatttgcttatataggattcacaatagggtaagaattactagcagcatctttttgntttgattaggcttttcctttccttttaaa

SEQ ID NO: 711969 - DNA, 517 bp, Homo sapiens
  misc_feature (16)..(17): n is a, c, g, or t
  misc_feature (478)..(479): n is a, c, g, or t
  misc_feature (497)..(497): n is a, c, g, or t
aagcttcctattgggnnctttggctgcaatgaggatttgtgcgaacagctaatcttttgaacctattatgcttggctgtgagtgttgggacatacggttactccaattatatcagtacgctgccgaagttgacctggtggtgtgatgatgcagcccaggggtaggttacatatgtcgtccatagggtttgctatgtcaatttagaagcacccacggtggattggtctaaccacggaatactaatgtggacgagccggcgcttcgtgatcggccgatgggggctcgtcatctagacggtctaaccttcttgtggcttgcaagatttcacaccaggttaaagataccgaccagatgccgccccgattatagcgcatcgttactgcctgactggctaacctgtaccttcatcaaaagtggtcatcacgtacccggggtttaccctcgggtgggtggtgggggcgggggcggaggggaaagnnggcccggggtttcccccncaaagggtgtggtggggtgc

SEQ ID NO: 711970 - DNA, 574 bp, Homo sapiens
cgtctgcccaggagggcgcttggatttccttctccgcggcgcgtatctaacccttcctgcatgtatttcactgcaggctgaagaaagctcagtctcaattgtgtttcctgcctgtcagcctcttgcctcctaaacgtgtaccatttccacttgatgtcatcacgcagaaggggtgaaagagactcggtgacagatacagaaatgaacacaagctgtgagttactggatgcctgttgagacttgccattactctgcactggaaagacacagggcggtggcgctctgagaagcagactccttccccttcacctgtggtcttgcccttcctgctcacggtccaccatggagacagcgtgtcccaggactctcgtgctggaatgtcagatctgtattcaatgactacagcccccggcgcaggcccaagtagtctggactgcaagcacacctgctgttcatgtgtgcctgacagacagatgaggaccagccagaaggatgtgcgggtgcccctggtggcgtggtgtcaccaagctgcactcccgagcattctccgtgtcgcagcgtcccggacgagccg

SEQ ID NO: 711971 - DNA, 122 bp, Homo sapiens
attaggcgcgttctgcgtgacccagtagtgaccgggatagaggtctgagcctggaaaggcagctgtgagggtatttctctacaagatgtagcttgagagcttgtacgcagaacgcgcctaat

SEQ ID NO: 711972 - DNA, 410 bp, Homo sapiens
  misc_feature (16)..(17): n is a, c, g, or t
  misc_feature (371)..(372): n is a, c, g, or t
  misc_feature (390)..(390): n is a, c, g, or t
aagcttcctattgggnnctttggctgcaatgaggatttgtgcgaacagctaatcttttgaacctattatgcttggctgtgagtgttgggacatacggttactccaattatatcagtacgctgccgaagttgacctggtggtgtgatgatgcagcccaggggtaggttacatatgtcgtccatagggtttgctatgtcaatttagaagcacccacggtggattggtctaaccacggaatactaatgtggacccccgattatagcgcatcgttactgcctgactggctaacctgtaccttcatcaaaagtggtcatcacgtacccggggtttaccctcgggtgggtggtgggggcgggggcggaggggaaagnnggcccggggtttcccccncaaagggtgtggtggggtgc

SEQ ID NO: 711973 - DNA, 376 bp, Homo sapiens
ctcgcttagaggatccctggagtgcggcggtgcaatctcgtgctcactgaactctgcctacccggccttagtctccccagtggctgggattacagtgctcaccaccgcgccagtaattttgtattttggcagagacaggatttcaccctgttgaccagagctggtcttgaactcctgacctcaggtgatacacccactttgggaggccaaggcgggcagatcacaaggtcaggagatcaagaccatcctggctaacacggagaaaccccatctctactaaaaaatacaaaaattagccaggcatggtgatgcacattttgtaatcctagctactcgggagactgaggcaggagaatctcttgaacctgggaggtgc

SEQ ID NO: 711974 - DNA, 450 bp, Homo sapiens
tgggtcaagagctgaagcgaccgtccacctccttcttcctcaggttgaggacttgagggtttctaaagggccctgaacaccacccaccctccccaacccaccgcttctccgtccctccgttgccttcatcgacgtccgcagaattcagattctgaaggtgggcgtggatgtcatttggccagagccgggcttttgataagctctaagctcacgggctgcctctggagggaacagctcagggggctccccacgcccaaacatttgcctctcactgtggctacttcaagaggaacgagccatgcagagggacgggtgagttccaagaagcaccagaacccctgggaactccaagcacatatctgggtgtttgggtggggttttgggggattttttgtttctgcttttgttttcagacaggatctcgctctgttgcccaggctagagtgtagc

SEQ ID NO: 711975 - DNA, 459 bp, Homo sapiens
gctaacccggcgcggggggttcccctaggggagagcccggatgggtgaaccccttccggagaggggggtttttttctccccgcgggggcccggcgcctttttttttaaaatttttccccccccccggggaggaaaaatcccccggggggggggaaatgcccttttaatatttttccgcggaaaaccccccgggggggggggggtttttttttttttataaagggtgccccccccaataaaaaaaaggggggggttttccctttttgggggggggtttttttttttttttttggggttgggcccccccctttttaaatttgcccccccccctttttaggggggggggtttttttgggccccctttttccccctttcccctttaaacccggggggggggggaatttcgggtttttttgggcccgggcccccccataatcctttgggggtttttttttttta

SEQ ID NO: 711976 - DNA, 397 bp, Homo sapiens
  misc_feature (358)..(359): n is a, c, g, or t
  misc_feature (377)..(377): n is a, c, g, or t
ggacgctaccattgggacttggctgcatgagctcgtcatctaaaaacgattaatcgacatcctataattagatgaacacggctgcggaatgttggctcaaccgaacaatgtttgtaggagcccggtcacgctacccaaagcgttcatcacgcgtgccaagcaaaagtttagtacgacgacacaacaacttgaccaggattactatgcagtcgcgccggttctgccaatgcgtgaaacccccgattatagcgcatcgttactgcctgactggctaacctgtaccttcatcaaaagtggtcatcacgtacccggggtttaccctcgggtgggtggtgggggcgggggcggaggggaaagnnggcccggggtttcccccncaaagggtgtggtggggtgc

SEQ ID NO: 711977 - DNA, 247 bp, Homo sapiens
aaattttgaaattgaaaagggggaggttttggggcccaaaacccttttggggggaaaactttgtttttgttttgccccggaaaaaacaataggccgggggtttgtttttgggagggtaacaaagaaagctttttttttttttttttttaaaaggggcccattttcccccccgggaaaaaaatttctttggagggtggtttggcccccagggggtggtttttttaataaaatttttcccctaaggcca

SEQ ID NO: 711978 - DNA, 392 bp, Homo sapiens
ggtttataaaataatgggggtaacccttgttgctttcctgaacccagcctgtttcccgtggttggttagaatatattttgttttgatgtttaaattggcatgtttagatgtcaggtttagtcttctgaagatgaagttcaccccttttgtatcaaccagcccaaccagggtctgtccctttccacgcataaagtttagtgagatgttatatgtaagatcgatttcgctagttctcccctgtagagttataaatggaaagattcccctatctgattaatagtttcttcatcctccgcatataatttgtggctcccgaatattgtaatttgttgccccctatgtacccaaccccctgaaaatatgtttaataaatattgtccttattggaagta

SEQ ID NO: 711979 - DNA, 378 bp, Homo sapiens
agcccggtaatcgcataaaacttaaaactttacagtcagaggttcatttcctcttcttaacaccaaaaaaaaaaaaaaaaaaaaaaaaaaaaaaaaaaaaaaaaaaaaaaaaaaaaaaaaaaaaaaaaaaaaaaaaaaaaaaaaaaaaaaaaaaaaaaaaaaaaaaaaaaaaaaaaaaaaaaaaaaaaaaaaaaaaaataaaaaaaaaaaaacaatatagcccctttggcccaactcaatttaaaattaaaaaaattttttaaatgggcccaaattaaggctcaattggaaaaattcccctaaaaggggtctaattataaaaaaatggcccgtgtttaaaaaactttgaaatggaaacccttgtgttacctctctttg

SEQ ID NO: 711980 - DNA, 477 bp, Homo sapiens
ctcttttgcccagactggagtgcagtggcgccatctcggctcactgcaacctacacgtgcctggatcaagcgattttcctgcctcaagcctactgagtaggtgggattacaggtgcacaccaacacacctggctaactatttgtatttttagaagagactgggtttcaccatgttgggcaggctggtctcgaactcctgacctcgtgatcctactgcctacagtctcccaaagtgctgggattacaggcgtgagccaccgtgcccggctgctcattgataaatgatggaaacttctaacaaacttgccttttggttagtaaatgctagcttttaacatgccacctttaagctgttctgtgcttagatatcgaaatcaaaatgatctttcgggttgattgtctatcaagctctcttggtagtaagataattaaggtatagatatctggggggatctatctatttgcaagaaataatac

SEQ ID NO: 711981 - DNA, 892 bp, Homo sapiens
gggtggacgaagctctctctagaaagacatcctgagaggacttggcagactccaggttcttcagttttggaactcaaactggctctccttgcacctcagcctgcagatggcctattgtgggaccttgtgatcatgaagtcagggaccctgaatggagggatcggccagagctgaggcagaagaacataaattgtgaagatttcatggatatttatcacttcccaaaattaatacttttataatttcttatgcctgtctttactgcaatctctgaacataaattgtgaagatttcatggacatttatcacgtccccaattaacactcttatagtttcttatgcctatctttactttaatctcttaatcctgttatcttcataagctcagaatgtaattcacctcaggactactattgcacaaatggattgtaaaacatgtgtgtttgaacaatatgaacatcagtatacctggaacaaagaacagaatatcagtgattttcagggaacaatggaagataactataaggtctgactgcctgcggggtcgggcagaatagagccatatttttcttcttgcagaaagcctatagaaggatgtgcaagtaggagaaatattgctgaattcttttcccagcatggaagaaccctggggccaggaatgcattcctgggggtaggtctatagatggcctctctgggagtgtcgtcttatgcggttgagataaggactgaaatacgccctggtgtcctgcagtaccctcaggcttactaggattggggaaaattccagccggtaaattctagtcagagtgggttctctgtactcaaaccctgttcctgtgacgcatgtttcatcaagacaatgtgtgcccagcaggacacatagacctcac

SEQ ID NO: 711982 - DNA, 186 bp, Homo sapiens
cccggatctacggaacatatacgtttcatctccttacggagaaagcagctgcagaggttctgtatttcctgaattaccttaaaacccagtaagagtaagacctgttgttttggaaggtctgctccaccatctaagagcactgtatatatattttggatggtagttgtgggggaacccttcataaag

SEQ ID NO: 711983 - DNA, 920 bp, Homo sapiens
gagacgcgtgggtgtaactgaaaaatcggaatatctacccagctatctataagggttgcgttgacagcattatagcttctggccaaactagagagaagcaagaaacgtgcaatgttcccttcggtcttcgatggggcacatcgtctgagatgctgacatttacatgctgcgtcttcggcactgcatgaagtagaaaacactcccatgtgtagcatcaccagagcagccctgaggcgaagtactcgcacaagtggcggacagcgggacagtcaccaaacaccacgagactgatgacatgggaaagggtgttttccaagaatgaacatcacattttcagtctgtctctaagatgcttactactgaccaagtggtttacgtgccaactatgttaccaaagtaaccaaagagtcattcctggtattggattatgacacttctgaagctagaagggacctcagaccacctgctccaatccctgctgcctaaggtcttgggggctgagggctggaaacccaggagctgcatctcccaggctcttggcctcataatcgccttctgtgagactgagggcaattaagatatgaatgacatgaactcgcttctctccatatcaacataaaccagagagcatacatctgtgggatagtcaatacataaacatcctaatcttgatatgggcctatgagatgataacttcagtgtccctatgaaggtagaagggggtcgcaccgggttagcaggaaggctcgaatccggacttcgtgacgagcgctcggctcccaggagtcccttgacggcacagcaatcggaagagatgttcccccggagatcgcgggtgtgctaacacccccgggggtgatatccgctggccaaaaacgggtagccgtaccaccgggggtggggccgctgcagaagccgcg

SEQ ID NO: 711984 - DNA, 922 bp, Homo sapiens
  misc_feature (221)..(221): n is a, c, g, or t
  misc_feature (224)..(224): n is a, c, g, or t
tatttgggggcttttgcttaagttggagcccaaagggcctctcggctcccgggttccccggccccccgaacctgaggaggtctctccaaggccgtttgttacacaagtgccgaagctaggtttgctataacatttaaagagaaaacagcgtcagaggccaaaacgttgtgctggtagctccccgggaaatttgcagaatctattcacgcaacaccaatcgngtnagtgttatgagaactattagcactatcggaacaccctaagggaggtccactgaagctaataatctaatcctaaccttctccgaaggacaggggccccgcttccacaaagccttcctgtcctgtgtaccccaaaagcaccttttccagcaaatgtggacactcacgaacaatttccagaaaagcacaaggccaaaaaccgcccccactttacaagggctcacagagccaagaagtgaccagtagaagtggagcgcatccaataggtctcaactcccattatttatcgcagcggacaacaaggacagagatatgaggggaggataaaaatatacaacgatgcaaacagcggcaccattattaggcgcacccaaaaaaaccctctttgggcacatggcgacaccaagagaaccccaagaggggccctcactctataatgttgagagcggaaagaaaccaaactttagagagccctctgatcagctcgtgcggctctctctcaccaaaaaaaaacacatgtgtctgagagagcatcaagtaagcgccacccagaggcagagctatatagcaaaacgcgaccgcaaataaatgaaaagagagagttatccaacgagataaagaaaaaggctacccttcatcaggaagctatcctcaaagagagtaagacaagcgttgggcgacacacaaccaaaataggtggg

SEQ ID NO: 711985 - DNA, 153 bp, Homo sapiens
gccagtatcactcatcgttaccaaatatggacaacagtagtagactggatacacccggacttaacgtatagtaattgacatactgtggactacgacactctacttttccatgagaaactacaatgcaggcacttaccaaaatgacatcgcttt

SEQ ID NO: 711986 - DNA, 1168 bp, Homo sapiens
  misc_feature (410)..(410): n is a, c, g, or t
ccacgagagtggcaggcagcttcactgccctgtcactgtgcgagaagtgacctggtcctgaaagctgtgtcagaggctgtggctgcgggagtaacctgccctggtgagatgcagccaccaccgtcacaacacgaccatgaattcccactgcatctagcttgaacttgtccctagcctcggagtactactggcagactgacatgaagttccccgtgagtcatggactcgccctctttgagacgggggccttgggtgcttggcgcggtgcgcgcagatcattggaatttagttatctcaaatgatgagtcgtgtcaggaccgctccaggcgttcggaggaagactcgtcgaggatttcgcttgcgttctcgtctgtccgtccgttcctccccacacttctccctggcatccntatgcgacgggcgccctcatgtcctatgccgtgtcttacctttgtcactctggtcttgtgcggtccgtgcctccccggtgcgagagccgaactgctctctggtcagcagagtgcatgccccggcgcctcatcctatgccctgtgggtggcgatgtgttgccgtgcatggaggttgccgcaacccgcatggctctgtgaggagggctgtgccaattgccctgttgtggcctgggcacgaagcgagaaggggccctcgtggatgagtcccgcagcgtttgggagggtcctggtggtccttcggtgcatttcttgctcgctgaggtaccattgggcgactatctcaacccttggtgctcgggctggcaccgcgcgaaacttggcgccgttccctataaggctcttagggggacgtcctggggcgattttagttggcgcggctggtcccatttggcgccccacacgatttggaattttgtcgttccccttgcccaacaaaagggcccttgacccgtaatcttccgcgcaggactcccggtcctgtttggtggccccacatccgacatgttgagctgtgtgccttgaggaagccctgttggcccttggcggcgcagtcgggcgctccctggggccctcttgcatgttagggggacttgcgttcccccggacgaagcggtggccccccttcggacggaagagttgaggccaagggtcttttgtaggcgccccccctgttgtgttgtgcccccgttcctccgcta

SEQ ID NO: 711987 - DNA, 947 bp, Homo sapiens
ttgccccccttccccgtaatgtgcggggcgtctatttctcgcgcccatgccccttggggatattgggaacccaagaagcccctcgttaagttctgcggacttggattggacccagggaaatggggagaccgtggaaaatgtggggaacacccccagtgtgggtgtctgtcctggtgttccccccccccggatgggaaagttattgggacttgttatccaaggtcaattgcatggaaaatgcgtcacccaaggagatagtatgcctttgttcaagccccggattcaccgaggacgtcccatccctcttcgagaaccccgctccgggaatttgggaaaggcgtcgacccctgaagacttactgaatagttcacttactccgccacgaaatgagaaccccaaggatttgacctattcccccctgaggttttcaccccgagagacccacgcggtaatttataagggagttccccgatacccacggaaagtggacccgaccgagttttccacggaggttccccgcaagattgtgttttgtaaaatgggttcctacccactgagttaatgtggagggaaatttcactaaccactgggaaccaccccccacccttggcccaaggaatgcccccttatcccacggaatatggagaccacaccctccaccacccatcccttactattcacgcacccactgctccaccctcctcaagcttcactcccccttactccacggacactcatccacgtaccaccactgaagcccagataccacgagattaaccgacgtacatgattatgatatgagggtggatgatttccttcgtcgcacacccagctgttgtcacgtggcccgcgagaagtagacccccctgaaagagacccgggaaacgagagcgagacccccctagagattaccgacgagaccgagagcgagatagaggacgtgatta

SEQ ID NO: 711988 - DNA, 350 bp, Homo sapiens
  misc_feature (105)..(105): n is a, c, g, or t
gttgtgcacttctgatcgtaggcttcagacttgctgcatttgctgtcggaagttaatgggcatggttcttggacctgaactgcagctcctggacaagtacgcggnctgtggcagccctggaggaggtgctgcaggcggagcaggagttcttggccaatgccaaggagagcccccaggaggaggagatcgatcccttcgatgtggattcagggagagagtttggaaaccccaacaggcctgtggccagcacccggctgccctcagacactgatgacagtgatgcgtctgaggacccaggtcctggcgccgagcgcggaggagccaagcagcagctgctgtgaagaggagca

SEQ ID NO: 711989 - DNA, 1644 bp, Homo sapiens
  misc_feature (1005)..(1005): n is a, c, g, or t
  misc_feature (1093)..(1093): n is a, c, g, or t
gtgaagtggtgtgtttggttatgtgttcgtctttgtgctgtgtgggttgtattgtgtttgtgttttatgtatgtgtttgtagtgtgtggtgttgttaggctcgtagtggtcttgtgcgttggttgatgtggttgttcgtttggtgacggtgtgggctgtgaggtgatagtgagtatgtggggtgggttgttggttagggagttgggagtggtcgtggggcgtgggtgggtggagagtgcctattatcgactattagcgcgtcacgtgagtggtttcccctccttttaatccactccgctctgtgggtgtctcaagaacacacctaccccgattttttgggcgcacccacctatttaggacccttctcgcaaggggggccccccacaacacggtggtggaccacacaaaaagcccaccgccgttttgttgtaaaacccgcctgcctccccccggtaccttaattatcccgggtctccttataagagggttataccggaagaccctctctgggggattgtcacgagaaaattctctcgggccaaccgaggggccgttttcttttgccacgagagaatatttgttaagagaccatttaattgttgtttcctcagcaccccaaatttcatagagaaccgctggtcggcaccacaaatctctcctcacgagagagaaatggggtcggcaccaccagtacctcttctcgaaaaagggggacccgcccccccacccgttatttcctcttgaaaaagggtgtccccccccgaggggggaatcccctctcccgcgaaggggaaacttttccacaatgcacccacgctcacagatgggtgatggaggatcctccacccgccctctgtctctgtgagaaaggaggagaaaaaatatagaggagggggctcctcccgcgcggttagacacacacaattgggtggggggttatacaccacgcagaaaaggagaaacttgtgggctatcacacgcctcttcgcgagcacttatattttngtgtatagtcccacatggtatcacacgcagacccacatgtagatctctaaaggggggtgttataacacccactcgggggctttttccnctcgtgaccacacaatagtgagaggtgtctctgtggtgatatgctctcacactctgtccgcccactatcacacacgctgtggtgtgatacccacgcgagagaatatggggtgtctttctcttgtgtgtgagaatatcccagaatatttctcttgggtgtgagaaaataacacacacccgccaagggtgtccggataggaggacccccggtggttttgcgtttgtgtccacggattctccaaagcgcccacgagaaagatatgaatattaatacccttgaaaggaaatatgaccattggagcctttgtgttccacaattccagcggcgtttgattccacgccagccccccaccacgtttaaaccccaggataatccacgggaatttttggatgggatattatagtcttcttgaaaaagggactgttccacccaggcgtgatgaataagatctaagagttacccggctaccagaaagaagatgcccgatgcaccccttaagacctacttgtgataattaaatgaacgcccattaaagacctattgaatttggg

SEQ ID NO: 711990 - DNA, 534 bp, Homo sapiens
gaaggctatgagtaaaggccgggcagaagctgcggcgggagccgccgggatcctcctgaggtacctgtcaggagcagcaaccggccctacagctcccaggatgtgttcgggaacctacagcgggaacacgtgacatgggctacacggcggtgcgctggtgaagacagctggagcagctggcgcaaccaaggcaagatcaaccgagaagatgtacggcaagcagaagatctatttgtgcggatcaggaccagtttgacactggtgtagtgatgcgtgaccttcaagtcctagatggcaaaatcggtggaccctcactgctaaggtgcagagcttgcagcaggagctgccgctaccactggaggctgagctcaagggaattatctagtgccctgaccacaccgagagcatgcacgcaacgaaactccaggagttaaaggaaggaagtgcgcatggcgtacaggaggagcagactcgacacgaacacttaacaagcagccttaccaaatcactgatgaaatcccagcaaagaggcaa

SEQ ID NO: 711991 - DNA, 128 bp, Homo sapiens
atgcaggcgtacgcaatctatattcgacaccatgctggtgtgcacctccacggctttcctgctgctgtccaccgtcatgtacaacgtgtaccgcgagctcacccgatggcggcgtgcagaagctggag

SEQ ID NO: 711992 - DNA, 206 bp, Homo sapiens
attagctcttagtcagattacacatgcagcatccccgttccagtcagttcaccctctcaatcaccacgatcaaaagggacagcatcaagcacgcagcaatccagctcacaccgttagcctagccacaccccacgggacacagcagtgatttacctttagcatacacgagtttactagctatactcaccccagggctctgtgctcct

SEQ ID NO: 711993 - DNA, 434 bp, Homo sapiens
tgctaaccaccattaggcttccttccccaagggttaaatggaaacctgccttttgaaagacttgctccattcctgagatcaccagctgtctgatgctgccccttccttttgcaggttcgacacaaccgaccagcattccttcctgataagagacccctgaccatggagtggctctgactagcctatggaggctgcacacagacagtcttcgcatccttggcttcaccctctgacatatagggcctactgtaatccatttaaaggttaagtctccaccccagcgtgaacatggatgcatgctgcacacaattagccaattatgcatgtctatgcttcctctttgtgaatattcatagctcctcctataacctgttgaatatgtacatttggccacgctgttcagcataaatccatgttcacgaagggggatggac

SEQ ID NO: 711994 - DNA, 130 bp, Homo sapiens
  misc_feature (90)..(90): n is a, c, g, or t
  misc_feature (124)..(124): n is a, c, g, or t
gtcctcgatcccgtcgaatgcagaggcctctgttcgcgtcagcgtaccagtgcggctgaaccggtaaggcgtacggaaatttcctgctanagtacgaatccgatccggtgacgacgtggctttngcccct

SEQ ID NO: 711995 - DNA, 295 bp, Homo sapiens
cctacgcattcgctcgctcccagctcacactgcaccgatcaacaccagcgtcgtctccgacttcttcttcctcctcctctagcgctactcggttcttgattcctctcatccgtcgctcgttcgctggtcggtggtctcatccatcgtccggtcacgggagaagagcagccggcgtctcttttcgtgctttccagcgacccctccgagcccgacttccatggccatcgcctcccgcatcacgaagcgcgcgctctccaccttcgccgccgcagccaagctcccggaggcggccgtc

SEQ ID NO: 711996 - DNA, 422 bp, Homo sapiens
  misc_feature (124)..(124): n is a, c, g, or t
gggtgtgttggcacacgcctgtagtcccagctactcaggaggctgaggcacgataattgcttgaacctgggaggcagaagttgcagtgagctgagactgtgccactgcacctccagcctgggcnacagagtgagactccctctccaaaaaaaaaaaaaaaagaaaaaaagggaactccaaactaattggttgttataaaattgttaaatggggttgcgcatgatagctcatgcttgtaatcccagcactgtgggaggcttaggcaggaggaggatagcctgagtccaggagttctggaccagcctggacaatacagtgagatcccatctctacaaaaaattaaaatttaaaaaattagctgggtgtggtggcttgtgtacctgtagtcctagctactcaggaggctaaagcagaaggattgc

SEQ ID NO: 711997 - DNA, 146 bp, Homo sapiens
  misc_feature (1)..(1): n is a, c, g, or t
  misc_feature (79)..(79): n is a, c, g, or t
  misc_feature (100)..(100): n is a, c, g, or t
natctagaggtccctcataggtcgcaggactcctaagtctgtgtctgggccacccttaaccttggcaaaaataagcttnctaaattaattgaatcctgtntctgatatttggggtcacaatgggttgctaccctgcgaacctatga

SEQ ID NO: 711998 - DNA, 445 bp, Homo sapiens
agggtaaacgaccggcgctgaattcgagaccatggggcaactggacgctgagggagaacaccctgcatacacgttctgggcaggctgctgcccgcgacattgtgcagatagtaccctaccgccggttccagaatgcccctcgggaggcattggcacagaccgtgctcgcagaagtgcccacacaactggtctcatacttcagggcccaaggttgggccccgctcaagccacttccaccctcagccaaggatcctgcacaggccccccaggcctaggttcccttggaggctgtggcaagtcctcaatcctgtgtcccagaggtccctctgggccacaacccaacccttctcactctcctcagtgctagcactttgtattttttgatacttttatacttgtttctgcttttgctgctcttgatcccacgctccgcaaactgggtacc

SEQ ID NO: 711999 - DNA, 371 bp, Homo sapiens
gaggataatattttcataattttttatttgaaattttgctgattctttaaatgtcttgtttcccagatttcaggaaactttttttcttttaagctatccacagcttacagcaatttgataaaatatacttttgtgaacaaaaattgagacatttacattttctccctatgtggtcgctccagacttgggaaactattcatgaatatttatattgtatggtaatatagttattgcacaagttcaataaaaatctgctctttgtataacagaatacatttgaaaacattggttatattaccaagactttgactagaatgtcgtatttgaggatataaacccataggtaataaacccacaggtactacaaaaaa

SEQ ID NO: 712000 - DNA, 694 bp, Homo sapiens
  misc_feature (195)..(195): n is a, c, g, or t
  misc_feature (284)..(284): n is a, c, g, or t
tgtcactcaaaggacttttggtgggtcacccctcaagtctttaattcgaacaaaaattggttggaaaacccctggggtggcaatttttttaataatggctcaaccaaaaaagccaaggttaatgcagcttgacaaaagttacagttatgtggtgtccatgtaagccccctaatagctactgtgtaataagtcccnctcaatgtatgtagccagaattaaatatttctaccccagacgtagatgtagcattttgtgaataattgatatccatatcactgtcatcnacaaagagagtgtattggtttatgacaaaagagagtgtattgcaaataaagtcagatgcaagatccattttttaaatttccgttgtgtcactttttgtaataacagatggccatatgatgcgttttcggccccatgtatctcagtcccgcatgcagatgggctaagtaaataggaattggtttatcgcgtgagacaattagacgctttggaagatggcataccctgtctcacctgaacttaagcgtctgtctgtaatccaaagtgctcctttatcctctctgtatccaggttacctaacagagaagccgccagttctcatgggtggcactcagtctctgttctctccagctgacttaagtttttttttgaaccagttattttttccgagtgctaatagaataaaggcagt

SEQ ID NO: 712001 - DNA, 1547 bp, Homo sapiens
agcattcttttctgggggggcgcaaaagcagtagtgtatacgcctatgtggaggcgacagacacataacaagcagcggtgctgtgtcacgcacagcaaccagcgttgggagggcctactaataaataaacagcaccgggtttttataaagagcagccccttttggtggtgtgcgccgaaagagggcgcccgtgtctgcgccacaatagcgagccgcagcgccgccgggtggggttgtgcccactacaacaccccggcgactgttttagctccaacggcccgacaacgcggttctcccggcggcgccctcgttttatttggcggccggagaaagtgggtaaaagcctgttggtgggttgggaggaaaaaatatttgcgccccacaagcggtgtggaaattcgctttgtaaagaaagcgtgttttggcaaaggagggagctcccccctcctccgtttggaaaaaaggggacccaacccccgcccccccggggtgaaaagaagaaaaaggggggtgttctaccccggggaaatgtaggaacagccctagtatatggcccccccccagggccttgaaagcccgggaaaaaggaaggggaggaagaaaaaaaaagggcccggcggttggcacccccctgggcgtctcctggaagcgaaaggaaagaaattgtgaattgaaaaaatgcttgagagcacttcggcctccctctgtggcctttcttttgagggcccccccaacagggcccccacaacagggagcccccgcccctgtcatggggttcaaaacccacgtggccccccacaaagaagggtaaccccctgtgtgggtgtttttgtgaaatgagatatttttatatagcgcggcccagcgtatgacttccccccacatgaagcggagaacccacactccctgtctcgggggcgcacactggcccaaatatatttttctttgggagacacaccctcttggaataaaaggagctcgcggcctcggttgtccctctgtggggtaaatctctcacagagagtatttgtcgcgctctgtcccctcgaagaagaaactctcacctcctacagagcctctgcacttgaggctccgcacatattgtcatatcaccttggaatatgtgttccaccgcgaacttggagacacacagctcgagaggaaaagagataggcccttttccgccacactggtgcatatcctctttttggagaacccaccaaatatgcacgctccacattttctgggaatttctgggtttttccgaaggccacggaagcttgccttttcccctgaagtcacagaattggcaaggtggaactaacgaagtcaaacaacatggcggaaactggatcctggcagcgaggagaccccagacgctggttcgagaagtacattttcctgggagggggccttcccagccaagtgggccaagaccttccaatccagggcacgaatcttcaagatgaacctctcttgccatcacctagactgcctgcacctgcccttcagggagatgggggtccttaaagggaactgaaccttga

SEQ ID NO: 712002 - DNA, 760 bp, Homo sapiens
gtatcaacgcagagtggccattacggccgggatgctataccaaaaacctatactgatttcgcggtcaccctgaacgttgtatattgctgtatcctatcaggtgtcgataataagtctcccgatattgtcacttactactccggaaaaaaagatccattatggcatacataggtagtggtctgagctatgatagtcaattggcttccatagggtgtatcgtgtgagcactacccgatatattatacagtaggaatagacgtagacacgcgagcatattgcacctccgctaccataatcatcgcttatgcccaccggagtcaaagtatttagctgaatcgccacactccacgagaagcaatatgaaatgactctgctgcagtgactctgagccctagtgattcatctttcttttcaccgtaggtggcctgacttggcattgtattagcaaactcatcactagacatcgtactacacgacacgtactacgttgtagctcacttccactatgtcctatcaataggagctgtattgccatcataggaggcttcaattcactgatttcccctattctcaggctacacctagaacaaaactagccaaaatccattcactatcatattcatcggagtaaatcttactttcttcccacaaaactttctcggctattcggaatgcccgacgttatcgggactaccccgatgtattaaccaaatgaaaatcctataacgggggggccatcattttctctaacaggggataa

SEQ ID NO: 712003 - DNA, 119 bp, Homo sapiens
cctcctgggttcaagcaattctcgttcctcaggcttccaagtggctgggactacaggcgcatatcaccaagcccagcttctttgtgtattcatagtagagacgggctttgaccatgtca

SEQ ID NO: 712004 - DNA, 849 bp, Homo sapiens
  misc_feature (22)..(22): n is a, c, g, or t
  misc_feature (64)..(64): n is a, c, g, or t
  misc_feature (97)..(97): n is a, c, g, or t
  misc_feature (106)..(106): n is a, c, g, or t
  misc_feature (112)..(112): n is a, c, g, or t
  misc_feature (161)..(161): n is a, c, g, or t
  misc_feature (165)..(165): n is a, c, g, or t
  misc_feature (169)..(169): n is a, c, g, or t
  misc_feature (189)..(189): n is a, c, g, or t
  misc_feature (192)..(192): n is a, c, g, or t
  misc_feature (194)..(194): n is a, c, g, or t
  misc_feature (202)..(202): n is a, c, g, or t
  misc_feature (207)..(208): n is a, c, g, or t
  misc_feature (210)..(210): n is a, c, g, or t
  misc_feature (214)..(214): n is a, c, g, or t
  misc_feature (231)..(231): n is a, c, g, or t
  misc_feature (289)..(290): n is a, c, g, or t
  misc_feature (436)..(436): n is a, c, g, or t
  misc_feature (473)..(473): n is a, c, g, or t
  misc_feature (480)..(480): n is a, c, g, or t
  misc_feature (490)..(490): n is a, c, g, or t
  misc_feature (599)..(599): n is a, c, g, or t
  misc_feature (623)..(623): n is a, c, g, or t
  misc_feature (663)..(663): n is a, c, g, or t
  misc_feature (766)..(766): n is a, c, g, or t
ccagtacttaggagactgctgnaaccgcatgagcaggaggagctgggggaatatcaacgcccgngattccttctgttgaccccactgatgtgtgctnttcgagcgngccagngtgcagctgtgagctattctcctgggccgtggggctgcctgggtggggntctntganctgagtggcagggatgcggntcngnttgctgangaggnngncctncctgagaagcccgcatngtcagggagagccatggagagacaaggagcccggaaaaccggtctcctactccctccnnccagtactgcgagaactgtgacacccacttccaagattccaaccaccgcacatccactgctcacctgctgtcactgtcgcagggtcctcagcctcccaaccttccacttggggtgcccatctccagcccgggcttcaaactgctgntgagggggggctgggagccaggaatggggctgggacnccggggngagggccgtnctaatcccatccccactgtcctcaagagagaccaggaaggactaggctacagatcagcaccccagccccgagtgacacatttcccagcttgggatacccgagctgtggntgggagggagagaccccgtcgggnggccacactgagctggagggaggagagaaggagggagganaaagacagggcttgggagtgggatctaaggacttacatgaacctcgagttctgactttggtaaagtctgaccctagtctgctgctgaagtctgaacttgggcntctgacctgggccctttgacttccccttcctagggatctgctcagatgcagatcctgaagtttttggtcaagtaggctctgtc

SEQ ID NO: 712005 - DNA, 146 bp, Homo sapiens
cattcgctccctcagtctgcggcgtgtggctcggcgcggttccgccctcatcacggtcacaccgctggtccgtgttccgctccggctccagctctggtctgcttctcctccctctactctttccactcgccacgcgtggacctcgg

SEQ ID NO: 712006 - DNA, 405 bp, Homo sapiens
  misc_feature (278)..(278): n is a, c, g, or t
catgcccgtggctgcagagatagaaaaacctctggcccatttggataaaacttgtacaaacctccagctcactcagataaggaacaagaacgacctagcacagaaatgcctttgtttggccagccacggtggatcatgcctgtaattccaacaatgtcggaggcagctgtgggcggatcatctgaggtcgggagtttgagaccagcatgaccaagatggacaaaccctgtctttactaaaaatacaaaactagccaggcatggtgctgcatgcctatnatcccagctacttgggaggctgaggcaggagaatcgctagaacccaggaggtggaggttgctgtgagccgagatcgcaccattgcactccaggctgggcaacaagagcaaaactgcaaaaaaaaaaa

SEQ ID NO: 712007 - DNA, 999 bp, Homo sapiens
gcctctagaagtgctcatagggcaccatgtgagtacatattacatataatcacccatggctccactctgtttatagtgtaggatgacttcactatgatgctcttacgggaaatctcacgagtgcagtcaacatcgtaactcagtatgagcgtgcatactgtgtactaactagcctggatgaatagatagtatctaatgatacctagatagcactagtctgtagtggcagagtcttgtcctttcgacacactagagcacacactgttggttgatcttcatcgctatggtcttcttgttgcaaaatcatgtgagccatgactacttgtgtatacaccaggtagctggaatagaggcctgcatcgtgttgcattcatcccacgaatcccagagggcactgtttccgcgagacgatattcctaagtcggtactagtgataaacctgtattgctataaattgtcatgacaagcgctctcaatatggccacatgtaggttggctctagagagagaagttacatgcaattgcataaagttgtactaagggaatataagttgatagtcgtcttatcttcggagtacttaccatttggagaaacccaaataatttcttgcacccaggaaacgggagtgattaacgctattatgtctcatactgaggtgggcagattcttgcttacaaagtttgtgaatagccatgattagtagcctttaggcagcatatatcaagatactgtcttagaatgtacgtttgaaggcaaggagagggtacgtgttctgacggtacgagattaatgtgacgaatctgtagagggtcgaaagaatgggtcttatgggaataaatctctggctctgataaggaccacgaagttgcttgatgggtgtggaaactggttttggtcctggttacttggggaactgaatgttggggcctttaaaggatggtgtatgaaatttggacttttgattgggggtggtaagattgggaatctgggggaaggag

SEQ ID NO: 712008 - DNA, 2061 bp, Homo sapiens
ccacgcgtccgcccacctttccccaggatatggttatgttcaaccaccgtcttcccccggtcaccagcttcacccggccggcggggtcggccgccccgtccgcccagcaaggcggtgtgatccgtccatctacctccagcaagccaccaggcacgctgagccacgcgcgcacctccgccgagccccgggacgatgacgttacaaggaaggagcgcgggcggcactgcatcaggccgacggtccatgtcacccgtgcgccagcagtgaccacatcccaggagggggataccagtagccaagaacattatgaagggatataaggcaagtcaaagagacacgcgaaaggacaacaacacggccgggacatcccaggaagagaacggcagggcaagaatcaccaaacaccagcacaatcacgaatacaacacacaacaccacagcacaacgtaattcaggagcgagcagagcgctagggcacaccagacactgcggacacaggccttcggaaccagcaacgcacgacgctccagtaccccaagagggcaccacataacgcagggaagaggccagcacgtagcaacaacagagcagagcagggacacagatcacaccacgagacacggtacccacattcgaccaacgaggaaaacccatacgaaagcgaattatacttacccaccaaccaccacgacgagttggtcccgcacaggcaagaacgcgagaaaccaagagacacccgcaaggccacagcgacaaacaacaggacggaaaccggtgcatgaaaacctcaccgaagacacaagaccacacagtctgcagcccagatgaggcacccagcgcgacacgaggaaacccccggaaccgcaagatgtggtagcgcaaaaacactgcagacaagaagacacgaagcacaaataagcacaaggggagcacccaaccctacaacagattggtcgcccgcaagagagaagaagagggacacaaaaacacgagggggcccaagaagaaggacccacgcgacacaaacgatcacagcgacggagaaaaagcacacaaagaagagcccacaaacacaagacaaagagaacaaagaccagaaaacggaaggcgaaatacattagacgacaaacaaagcccagtatacagtaaatgcgggcaacgagaacagaagatgggaacgagaacaaaggtgtgccgcaacagacacaaaacaataacagccgcacaaaacagagtacgagaaaagacacgccggtaccaacaaacgtacacaaggcatgaaataccaaccggtgggcaacgaacggccacagtgaagagcttacacccagcagacagcagccccaccaccaaagctaacaccgagggcacgggcgaagaaacaaacgtggacacgatccagacacactactacgtcccgagacgccgacacagacgccacacacacgcaaggatggacagcacacaggcagtagtatagaacactcagggaataaaacaaacaacaagataacaaaagacgaaacgcacatgaaccacaacgatcgagacggaacaacagcatacgcgaggaagacgagcagacagaagagtgaacgaaggacagagatgagcacatgcaacgctggagcgcacgcgaagcagagacacgagcgacacgacgaagacgagtcttggcagagacacgcagcagcagggagacagaaaccagcagaggacaagacacagacgagcacagggcgaaggaacagcgagcgcgaaacaaagagaccaggagacgcaacggcagcgacgaacacgcagacgagcagaagatgcacgaacaccacgcacacgaggcagcaacaacaagacgacaacgagaagaaagcagacagcacaccgaagcggcaccagccagaaaccacgcagcagctagcaacgcgcgacaaaggcacgacgacaccgagagagagcacagcagagagcaagcaatgacacacacgaagagcacacacaccgacgcacggactacgaaccgcgcaacaagacacgcaagcgacactagcaaagaacaaacat

SEQ ID NO: 712009 - DNA, 218 bp, Homo sapiens
  misc_feature (175)..(175): n is a, c, g, or t
  misc_feature (198)..(198): n is a, c, g, or t
cggaccgagtgtggctagcagagcctctgagtggaggcggccccccagaacagagtgctccctctgcctggggaggtgcaaatgggctggtaaacaacctgactgctgttatttacaaccccccagcctagtgggcctgagtggtgtcatgtctaatgtgagtgctgagtgctcncctcttccccatgcccagccctncttccccatgcccagtgtgt

SEQ ID NO: 712010 - DNA, 257 bp, Homo sapiens
aggggcagagctctgctccaaaattcctcccttcatgggtccaaacatttgaagactgattgttgtaattcccaattatcattgtatgcttccatcacctcctaaaattgcttccatcattaccaaatccattatatgccatccccactgccaccatatccaccaccaccacggctgccaccaatatgccaccatgaccactgaagtttcctccacgaccgaagttgtcattcccaccgaaaccaccacgacgacga

SEQ ID NO: 712011 - DNA, 434 bp, Homo sapiens
cccccccccctttttgggccccctttttttcttgggggtttggggggttccggggcccctttttttttttccaggggttttggggcccgggggggcttttttttttggggggccttcgggggcccccctccggggggccttttttcccccccccctcccccggttttttggtgggggccccggggccctttttttccctttttccgggcccccttttgggggggtttttttttttaccccaaaattcccctccccgggttgttttgtttccccccccaggcccccggggggcccctccattttttcccaacccccgccggggttggccctttttcgggcccttttttggtgggggggttttgcccgggggtttcctttttccccccccttttgggggctttttttggggggaaaaaattccccttttttttgga

SEQ ID NO: 712012 - DNA, 220 bp, Homo sapiens
actaggagaagacaaggagctattgctgatgtctaggaagaagctttggcaagcggcctggcttgcttggtatttgggctctgcagcttctctgtcctcattctgtgcagtgacatgaggcatgtcactcacatagtctttgtttccaaagcattggtggtaggtgcatgacttactgtctgtctttgttcatttctcctgtcaaaaagtagttttttta

SEQ ID NO: 712013 - DNA, 224 bp, Homo sapiens
ccacttcagattgtgcaggcatccaattcatgcgcaatagtcggcgcttatttggcctggatggttcgagggatactcatcctgagtcagtgaatgccatcgtgcttccattggtgggtcatttttgctgtcaccaggaacgttgccgcgaccgaacatccttaacatagacattcttggatcatcgaagcccacattgtccccaggaagagcttcactcaaag

SEQ ID NO: 712014 - DNA, 175 bp, Homo sapiens
gatttgccaatctcccaatcagtattacagaaatcggtgagagaggtcttgattcacgttatggtagtggtgatctggttgggaagtcgacattatcactcattattcctcacagatttgtattctccagagtatccaggtccttctcatagatttaaaaagactgtacaggtgg

SEQ ID NO: 712015 - DNA, 646 bp, Homo sapiens
gcggcgatcattagttacaaaggggccagcaaattgccttcttgatgatttttccgacaggtaccagaggcaaaaagctacgcatcccctaaggcctttgccactatctgttgccgacctgccagcgtctgacgataatcgccgcgctctcccacactcacgcaaggaaacgccgtgaaaaagcttctactgttgaccccattactcgcgctgctgttgcaaggttgcggcgtcaccatgacgcaatacgagccgaacttcgacaacgtccaggtcctcaagcgcgcagcgccgctgcaacccgtcagcaatgcccaggtgacggccgcaccgggcgaaggctcgttgtccgtacgtgccaacccgatccgctcgcccagtggcagcatcccggcgcatatccaggctgcgatcacccaggaactgcaactcgcaggcctgctgaacccgcaagcggaacgtcatctgcaagtgctggtggtgaagaattcgctgtcggcaggcatgggctccggcaacggcacgctggccgcgcggtttaccctgctcaagggcaatgacgtggtgtacgacgcgaccaaggacgtgactcacacctggtccagttcgttcttcgggttcattgcgatccgaacgccgccacgcc

SEQ ID NO: 712016 - DNA, 844 bp, Homo sapiens
gttcccaatagccaactgcgacacattcgcctagagaacaacgagaataaaccagtgaccaactctaggcgaatgtgtcgcagttggtattggaacaggagaataaccagtgaccaactctagggacactcaggaagtgcctctggaaaaggctaagcaggtgttgaaaattatagccagctacaagcacaccacttccatttttgatgacttctcacactatgagaaagccaagaggaagacagacaagtgttacacacggaacgtcaaggtcgtgggaaataacaaggcagttctacacagactgcagcaacggttgcatctgcatatcctaagaggaaaaaatgaccttcaagagaattaggacttttttcttaatttcactgacttcagagacgattgcaagacttgcggtttaagtattgcaatttcacaaaagacatatggacttaactggaaatgaccacacacccgaccacgacaacataaacaaaaaatccctctaggagttaggtgcaaaatgtccctttatattgcttgatcggattcagaagcatactgctatgttgtggcctttgactatggtgtcggcatataagtccgaagttgcctacagcgtttctctaatttttaaaaccctttgccttctcccatttgaaattcgccttgggaacacttgactgggaaaggttggtgttccccccaaacgggagtgattatccttcccacctggagaacagtgttacgaattggtgacggagaaacactggcccacgcggacttaggagggccagacttcgcgcgtttcaacaggatgagcacgaaggtcgttggtcttcattac

SEQ ID NO: 712017 - DNA, 128 bp, Homo sapiens
  misc_feature (24)..(24): n is a, c, g, or t
  misc_feature (34)..(34): n is a, c, g, or t
  misc_feature (95)..(95): n is a, c, g, or t
ccagtcaggacttagaccacctgncggcctcctnaccctataaacccaccactcccctccttctttcccaaaccacttggggtgttctaagcccncactgccccaagcccaaaatatcaactaagatc

SEQ ID NO: 712018 - DNA, 133 bp, Homo sapiens
gctcccatagcagtcagttattttaatagcagtacttttagagccctgtccattttttatgtgtgcgaaaattatataatttctaagctgaattggctgctatagttttacatatctgatgggagaagactgg

SEQ ID NO: 712019 - DNA, 212 bp, Homo sapiens
cccccccaaaaaaaaaaaaaaagatggccccccccccccaggccatggcccgggccccctgtggtgggtggtgctttggggtctccggtagcccccccccccccgccccccccccccccgcccgggggggcgggattttgggttgcccttcccggtttttaacccggtttgccggaccccctttttttttaagattttttttagaaagggga

SEQ ID NO: 712020 - DNA, 331 bp, Homo sapiens
tagggtcttagggaggtgtattagtcagttcttgcactgctataaagaaatacctgaaactagataatttataatgaaaagaggcttaattgattcagttccacaggctgtacagaaagcatgcctggggaggcctcaggaaacttacaaatggtggaaggtgaaggggagcaggcatgtcttatgtggctggagcaggaggaagacagcaaagagggaggtgctacacacttttaaaaaaacagatctcataagaactcactcactatcaaagagaatagcaagggggaaatctgccccccatgatccaatcaactccctactccctaag

SEQ ID NO: 712021 - DNA, 384 bp, Homo sapiens
  misc_feature (296)..(296): n is a, c, g, or t
  misc_feature (346)..(346): n is a, c, g, or t
  misc_feature (363)..(363): n is a, c, g, or t
ccaagaggtcctggcaggtcctacctcatgattttcatttattaatttaaaacaaaataacaggaatcacttgtttctagagaggaggggtggaatacctgactagtagagggtcaggtgacaatggcgaaggtagaaactgactaagtttggaccatgtggcaaggagtatcgttccagttgggtggggtcaccttgcagagtttttaaaaaacattccttgggtttgttgggtgggtgggtgggtaggttaggaaagagatgcggtgtggctcaggctagtctcgaaatccggngctcaagcggtccttcccagaggtgtgggattacaggcatgagccaccgnacccagaatcacctggncgatttggaaactacccttcc

SEQ ID NO: 712022 - DNA, 507 bp, Homo sapiens
atagaataaacatataaatggaactgaacatacatccaaatcttcacactgctatttgctctcatacccggcaccacacttgagttttgtgaggccagttggatgacttaagtttgtaagccttattattagttttatattacatatcaaaacacatagaaatgtccctatccttttagctttttatttagtctacagcccttaagtcattctgcctaaaaatcatcaagctcctcttcttattaggtccaatatcccatataaaataaaattgccttgattgtagtgcatgctcaatacaaacttatttttctggaagtatcacttcctgtgagagcaggctgttataaagtgaagttgctttgaataatagaatgccgaatttccccttccaattctccaacatgttctccaaatatatgtaagtatcagagacttatatatatcttttgtgttcctagtttgtcttcccaggaaattacctttccacacagtctgagagtctgg

SEQ ID NO: 712023 - DNA, 893 bp, Homo sapiens
  misc_feature (33)..(33): n is a, c, g, or t
  misc_feature (72)..(73): n is a, c, g, or t
  misc_feature (78)..(78): n is a, c, g, or t
  misc_feature (87)..(88): n is a, c, g, or t
  misc_feature (116)..(116): n is a, c, g, or t
  misc_feature (132)..(133): n is a, c, g, or t
  misc_feature (146)..(146): n is a, c, g, or t
  misc_feature (149)..(149): n is a, c, g, or t
  misc_feature (170)..(170): n is a, c, g, or t
  misc_feature (183)..(183): n is a, c, g, or t
  misc_feature (191)..(191): n is a, c, g, or t
  misc_feature (195)..(196): n is a, c, g, or t
  misc_feature (200)..(200): n is a, c, g, or t
  misc_feature (212)..(212): n is a, c, g, or t
  misc_feature (217)..(217): n is a, c, g, or t
  misc_feature (223)..(223): n is a, c, g, or t
  misc_feature (229)..(229): n is a, c, g, or t
  misc_feature (239)..(239): n is a, c, g, or t
  misc_feature (245)..(245): n is a, c, g, or t
  misc_feature (248)..(248): n is a, c, g, or t
  misc_feature (268)..(268): n is a, c, g, or t
  misc_feature (277)..(277): n is a, c, g, or t
  misc_feature (288)..(288): n is a, c, g, or t
  misc_feature (295)..(295): n is a, c, g, or t
  misc_feature (326)..(326): n is a, c, g, or t
  misc_feature (331)..(331): n is a, c, g, or t
  misc_feature (335)..(335): n is a, c, g, or t
  misc_feature (342)..(342): n is a, c, g, or t
  misc_feature (345)..(345): n is a, c, g, or t
  misc_feature (368)..(368): n is a, c, g, or t
  misc_feature (374)..(374): n is a, c, g, or t
  misc_feature (388)..(388): n is a, c, g, or t
  misc_feature (391)..(391): n is a, c, g, or t
  misc_feature (443)..(443): n is a, c, g, or t
  misc_feature (452)..(452): n is a, c, g, or t
  misc_feature (552)..(552): n is a, c, g, or t
  misc_feature (781)..(781): n is a, c, g, or t
  misc_feature (890)..(890): n is a, c, g, or t
tgtacaaaatgaagctcacactatcccaaaggngagtagggactgaggccggggatccattactggcctttnngggtnttctgaggnnagggggaaccaaccctcccactccaganttgtggccacaggggnnggaaggaaagggnacncacctgggtttggtcacaganctcagagcctggnattagggnaggnnaganaggtggatgggngaggngggggntcaganctcccctgcncagggngcncagggggtgctccaccggtnccacttgtnatgtgcttggnccagacntagactcgggctggtgcaaagggaagggagnaaagnaggngggaggnganactgatgtgtggtgggggagggngggggncctgggcctgtggnggngggtggctggggaggtgggctagctgcctagtggcagctagcagcgagtttnataaatgcnactgcgggcaatgtagcgcacccatttgatgacatcatggtcgctgtagttcagcttcggttcaaacaccttcaagtagcgcaccttgagggcagagggngcgaatgggacctcaaagttcatggaaatggggggtcgagccatttcttcttgtcgttggtaggcagaagctcaatctctgcgctgatctgcgattccttcatgcctgccatgcgcttgatcttccacacgatggcattctcgctggccttgtacttggccttccccttcatgcagatcacctgcaccccgcttgtgttcagtggggttgggatctcacctcgatcttntgagccagcagtgagggtttaaagttggacttgatgaccaccttgacctccagtttggtgcgtccacttctcgcactagcgggatcaccgggagggaaaggatgatgtnctt

SEQ ID NO: 712024 - DNA, 444 bp, Homo sapiens
ggagaagggggataaagattgaaataatgatatataaagtgggggccaagacacggaacagaccgggtgatactggggggagagagggagtaaggaaataaacggtcaaaaaacgacacccgcgtgggtaataaaacaggatttttttattttggcggggactttggtgttaaagagttgggcaagggtggggaggcaggaaaaatgcccagtgagtgaaaattgaagtcggtaggggggtgaaatagtgggaagtgatgggggcggtggacaggtgggccaagactatgacggacatgcaaatgcccccatggctgctgaacacaccccatgacaataggtgttggaggaagctaaaaagagggcacaaacagtggaaagggaacagaaaatggccggcctgggcgatgacgactttacagccttaacgctaggggcgaaagg

SEQ ID NO: 712025 - DNA, 188 bp, Homo sapiens
gtgcccgccacacacctggctcatttctgtactttttatagtcgagacggggtactcaccatgttggccagtgctggtctcaaactcttgagctcaagtgatccaaccgcctcagcttcccaggatgacccgggcaggacgaattgcttgacacccgagacggtggcggttgcagtgagcttgactta

SEQ ID NO: 712026 - DNA, 159 bp, Homo sapiens
  misc_feature (31)..(31): n is a, c, g, or t
  misc_feature (41)..(42): n is a, c, g, or t
  misc_feature (52)..(52): n is a, c, g, or t
aggcagctcttacctgtgatgatggcaaatnccggcgggtnntgaagccatnacagcaagatgttgacatgtcgcgtcttcctgagcacctgcatctcattcttgaaagcctgggcctgctcagctgtgggctggacacacttgagcaccttcacgcat

SEQ ID NO: 712027 - DNA, 257 bp, Homo sapiens
ccaggtcagagataaatgtatcttcagtctatccccgaacgatgagacaccatgaagccccaaacatttggcctgagacagctagcacgcctgaagagactcggtcacggagccaatctggtagactttgagcaggaggcagtagcaggacttctcgttcacggccttggtgatcctctttgggttggtcactgtgagatcataccccactacctagattcctgcactggctgtgaacttctgacaagctccccagt

SEQ ID NO: 712028 - DNA, 144 bp, Homo sapiens
  misc_feature (2)..(2): n is a, c, g, or t
gnatgaggaattgaattgactagtagatgtagcgtatgtgatttcttactttggaagagaggccctttgttataataaaaaaaaatcgagggagagaaaacaaataaaaacaacaacaataaaccaaactcctacttccaattt

SEQ ID NO: 712029 - DNA, 364 bp, Homo sapiens
cctattgtttatgtgaaaatgcagattcactgagccagactaaggcatcagtgactgttcctctacctgcctctcacatggagattgtgtgttcagtgaaaggctgatcaaagacccaaaggaatgcaacagtttatctcttatctacctatgacctgcgagctgcccaccacccccagttgttgcgcctttccagacagaaccagtgtacatcttacacgtattaattgatgtcctgtgtctccctaatatgtatcaaagcaagctgtgcctcgaccaccttgggcacatatcctcaggacatcatcctgaggctgtgtcactggcatgtccttaaccttggcaaaataaactttctaaattg

SEQ ID NO: 712030 - DNA, 227 bp, Homo sapiens
gagcggtctatcgggatgcttgggccatgctgcataaaatccactgcatttaatcgggatgcattgggccacgctccatggaatcaactgcattcaatcaagctggatggaatccactgcatttaatcgggatgcattttaccacgctgcaaggaatatactgcattcaatcacgctgcatggaattcactgcattcaattgggatccattgcaccacgatgcatgg

SEQ ID NO: 712031 - DNA, 575 bp, Homo sapiens
  misc_feature (6)..(6): n is a, c, g, or t
  misc_feature (213)..(214): n is a, c, g, or t
  misc_feature (216)..(216): n is a, c, g, or t
  misc_feature (248)..(250): n is a, c, g, or t
  misc_feature (272)..(272): n is a, c, g, or t
  misc_feature (314)..(314): n is a, c, g, or t
tcatanaataaagcaatgacatctgtggcaggcagcttctgacatcggaacccaatgagccatctgcaaggaacccccttggagaatccctttcctttgtgtgtgggctggatctagtgacttgcttctcataaatagaatatggcaaaaaatgatgggttgttacttctgagattaggttataagaggcgaatttctgttttgctgtaattnngnctctctaacctcttgctttcctgtgctcatgnnnccagctgctgtgttgtgagccnccttatggaaaacccatgtggcagagaaccgagggtggtggntggccaacagcaagccaggagctgaggcccacagtccaacaactggtgaggaaccacatgctgccagcagccatgtgagggaacttagaagcaaatccttccccagttgagccttcagatgacaccagagccttggctgaccccttacttttacccttgtaagagactttgagccagaagacttggctaaaccacacctggattcctgacccacagaaacttgaaataataaatgtgttgttttaagtcaaaaaaaaaaaa

SEQ ID NO: 712032 - DNA, 504 bp, Homo sapiens
  misc_feature (89)..(89): n is a, c, g, or t
  misc_feature (201)..(201): n is a, c, g, or t
  misc_feature (243)..(243): n is a, c, g, or t
ggataagaggaggcaagactttgtcccccactccgcaagataccctctctgttccggagcggtgggtccctcccctgttaggaccttgnctccctcaggactggacctggatcctgggcctgcagtcagattgccagtttcacttagaggtggaaatgtcaacccactggttggaatgggaagctgctgtgttgtgagccnccttatggaaaacccatgtggcagagaaccgagggtggtggntggccaacagcaagccaggagctgaggcccacagtccaacaactggtgaggaaccacatgctgccagcagccatgtgagggaacttagaagcaaatccttccccagttgagccttcagatgacaccagagccttggctgaccccttacttttacccttgtaagagactttgagccagaagacttggctaaaccacacctggattcctgacccacagaaacttgaaataataaatgtgttgttttaagtcaaaaaaaaaaaa

SEQ ID NO: 712033 - DNA, 230 bp, Homo sapiens
ggccacgcatgtaatcccagcactttggaggctgaggcccgcagatcacctgagctttaacagctgcaggcgcacttccctatcaggcccagaggaggctggtagtgtgactcagcatacaccacgcagctcgcgttcagcactcctgccgagggggcttcctgcaggggttccagcaggggcccactgtgtccctaccaccccaccccccctagccttgtcccagctgg

SEQ ID NO: 712034 - DNA, 320 bp, Homo sapiens
ctatcagtatatctatcacattatcctttttttttctccacaactttcacagactattcttagacatgcctcaactttctgacttgccgcaaacaccttttttttttttggaaatggattccccctctgtcgcccaggtggaattgcgttgttgccttctaggatcgctgcaactctgcctccggggttcaggccatttctcctttcctcagccttcctgagtataggtggggctacaggcacccgcaaccctttttttttttctccacaagttttcacaagattaagtgtgatagggatcgcgagcctcgaatttcgta

SEQ ID NO: 712035 - DNA, 548 bp, Homo sapiens
aaatgagatttggggtgggggaccacagtcaaaaccccattccaatccatgtttaaatgttgtccattatatcctacctactccccctattatatcctcctacaggactccctacaatctggagagaaatccaaagtaggaaatgtaggagtgaaaatgaaagacaacagcctaataaaatgcctacaatgagaaaataactcctcagagggattttggagtagtaaattattattgttattatttgattccaggacctcacttcaccccatgctggagtgcagtggcattaacttggctcactgcagcctccacctcctgggctcaagtatcctctgcctcagactcctgtgtagctaggactacaagtgtgcctacactccctcataaagaaagctggctacttggtgattgcacaggaccattgatctggatactggctattacatgtgtttagtttgtaaaaattaatcaaactgtatatttaagataattgctgttttctctgtgtattttgcagtacttcaataaggttaaaaaaacaagaa

SEQ ID NO: 712036 - DNA, 1491 bp, Homo sapiens
ggtcggccggcccggctcgcctgccccgagtcattacccagtccccggacccgccgatatgcctctactgcctgctccgcgcccttacccgagggctggattatggtgctgttgtcgctccatgaaacggtgtgacacctgatgctgactcgctggactcggtggactggtgccctgctgcaaggcttgcattgcacctgctggcggtgctgggactctaccaggcttgcgtgcggctgagaggagcggacttggctgcccccaggaacaacgggtggactggaaggttaaggagcctcaggtaccagaaaggagcaccgacgtctatccatgtagcagctttgcaatgacagacgaaattacatattccacacctcctgcatcggaggtccccagacgacacagatatcttctgcaatccttgtgacattgacacattgggtgtcaccatcacccggttgggcttgtgcccattgcccctacgtatggggcctttggcatgatttgaccacggttcggtactcccgattaaccaacttgcttcccggcctggggttgggacaacttcgtgaacgacacgaagcccaccggtgctcttgggcggcccactatgatcccagtgccattatagcccccttggatgggcacaccaggagggatcactgtgcatatagatcccactagaatttttgggtaccaacgatggggacaacacgttggacaacgcggtgcccctgggggatcacacccaaaagtaccccttttgaaaggaacttcaataccaggcacagattggaacatcccacaacggggcacgggcataccacacacatcccattgactttggctgacactatgcagaccgcgagtggcccacacaggggactggcacgtaaccagcttgcggcctcgacttgggccagtgtgcagcgattcgacggttacagcacatgcgacaatcagacatctagcgttcgcgatatctcacagtattacccatggcgcaacttccccacagcacaaatattcggacagacagtaccaagaggagcggccacacagaatcgcgccccataaccgtagcgcgagccggcattagggcgacaacctaaagggcgtaaccctcagggagagcagagttaccacattagaacaccagggcacgacatgtaaccacaccagccaaactggggcgattgatgatttcccagccacgctccagagtcgcacagccccctcacattcggtggccagccacctacacctgtgggacagccggggaagacgctaaaaggcagtggaacaagattcctaaatgtgataggacaacaccgacaaacgcatgcaagacacacctccatatgtagagacatcaccgactgggacacacgggatagggatatatggaaccacaggtggtgacaggtttcacccacgcacacagccatcattcctgtcgatcgcaccgatagacgacgtagagctgatgga

SEQ ID NO: 712037 - DNA, 491 bp, Homo sapiens
gatcacgtgcattgtggcagcctccggtcttttcttgttcatgattttcagaaccgtcaggataaccaagatgccacaggtggcatatctcttggagtgtctaatgaatattatcccctgggttatcttctaagaagacaggctgaggaggaagagtgtagcctcacagaagaacaactggatgggttaaggcctggtggaaaatttcctcgcataccatttgtcttagaaagctaaccttttagaaaattaaaattattttttcacaaaggaacgcgtatacactgttgatgggagtgtaaattagttcaaccattatggaagacagtgtggcaactccttgaagacctagagacaaaataccatttgacctagcaatccattattgggtaatttaacccaaagcaatgtgaatcattctattataaagacacatgcatgcgtatgtgcgttgcagcacaattcacaaaggcacgtggaagggtaccgag

SEQ ID NO: 712038 - DNA, 665 bp, Homo sapiens
agccctggtcagcaggaccggcagacattctgagagaaccgtgagcgccggcaagggcatgcgccacctccaactggaagaagacgcccctcagcagcaggcgggacccttgcgtttgtcagcccaagcctggcggtgcacaatgagctccatcggacgtggactcgccagcgagagtacctcctgtgacatgatcccaccccgcgtccatcccctcagttcagccacgtggaaatatgtgcgatgccaggcccccgtggaaagacgggctccctctctcctcccacctggccccctggtctagaaggacccactgcaccagcctccgctggcctccgggaagacaccgttgcccgcacccatagagcaagcaccggccatgctgcagaggcaagacctcaattcttggctgcaaagtttcatcagaggctagtgcgggctggtgccgcctcgataggcagaccgaggatcatcgctgggggacctttcccgtgggctttcttcctttctctctttgcctttagtttgccgagaccagcagaaacagtggaccttgggggctggttctgctccgtggccccttgtccagcccctgccggcacacggggcggtcaacctggaccactgtgatgcgcatgggcaggcagcgcccggggcttctgaac

SEQ ID NO: 712039 - DNA, 403 bp, Homo sapiens
  misc_feature (225)..(225): n is a, c, g, or t
  misc_feature (274)..(274): n is a, c, g, or t
ttacagggtaatggtttgctagtttaaaactgtaaccaaacgaactggtcagcccacatatatctaaaacacttaaaatgttaggaagtttgggaatgttataacctaaacgtttttgctggtaaccttttgttatttatacatatttgtgtatttaacatacatacttcaggaaatatatgccttttcttaaccttaaccatgcattcaacaccacggcctatntataccactgaatattctggaccctgttatttgcggcacactcacctgntgtgtttcagcgcaaccccactacccgttagtctttcccttcgccctacacacggtagaaaccatgtgtacgttatgttcgtctataaaagaaaaaatcctaatatttaataattttttccgaaaaaaa

SEQ ID NO: 712040 - DNA, 679 bp, Homo sapiens
tccaccatcctgtctggggggtccctgggctcttttggcccgtatgccgaaaacgccagacgttggcccgggccatacggaaactaccaaaggctttagaaattcttctcttcctcagtgatgactcgagctttctccttcttatagacgtcccggacgggcatgaccggcccggtcagcttgggtggccagtttcagtccttcagcagaatctgtctcccttctggggggccgagggctcccggggggaaagaggatagatgttgggagcggtacctcctttcagccgcttgcactttgcccttgcagggacctccgtggacttgtcccggccttccttcggactccacagaaattgccgatggctccgggccacctttcttgtgacatgccgggccacccttgagctccctccaggctgaagccgcggccggggcgcaccatctcggtggtggtcaccgaaaccggtggggcaagcgcacagagtgggccggaatgggaacccgacgcgagggcgccggggcaatgcggcgcgccttggtttgccgggcctttacgtccgtggggatcttacgggccggttggtttgacccatcgttgggccacgcgccgttgcccagttcctgttgaaagtggggcttcaagaccttgccatttccggttgggcgccagtggctgc

SEQ ID NO: 712041 - DNA, 423 bp, Homo sapiens
atggagaccaggctgagatggaacaggctgaggcagaagaatcgcttgaacctgggaggtggagattgcagtgagctgagatcacgccattacactctagcctgggatcactgccattacactctagcgtgggcgacaaaagcaaaactccatctcaaaaaaaaaaaaaaggtcggacatgggggcccatgtcttgtaatcccagcacttgggtaggctgaggtgggcggatcgcctgaggtcaggagttcgagaccagccgggccatcatggtgaaatcccatctccaccaaaaatgcgaaaattagctcggcatggtggggggtgcctgtagtcccagctacttgggaggctgaggcaggagaattgcttgacccggggagacagaggttgcggggagccaagatcacactagggtactct

SEQ ID NO: 712042 - DNA, 964 bp, Homo sapiens
gctctttcccatctggcaagagggcgggtgaaaaagttgagaagccagatactaccgagaagaaacccgaagccaggaaggtagatgctggtggctagggtgaaaatagggtaccatctgatagctaaaaagcccatagcaaggcgtgaagccccaattgcaagcccgtaacccctggtgcattgtcagagcaggtaattggccaggtcattccacgatctgccgatgtattccataaaggccttgtacaagaggaaagttctcaagccggtggaattctccaaggttgcctcaagcatccaagacggcagagaggttctccgctaacttgtttactatacaacagattggtgggttgacacagtaacgggggaatacgccggggtggtgaagagtttggcaatatggctagatattatcccataactgtaagatggtgtctcgaaaatgctgtggagctgggagatatagaagccgttcgtgtcagggaacagtgagagaaactgctgatggaatgaaattaagtcccctgggaatcaatttcgtgatcaattgcgcttctatggatgggaaatggggcagggatgggtggaattggttgaacgcgaggtgggctaggtgtgcttacttacttcggtgaactggaccctctggttcccttcagataggaggtggcgtcataacgagggaacgcgacctagacacttggtcaattgcctggttcaatgctaaaaatccggatattaagaccgtaaggaattctcatggaacatgttccagtgaaggcttggtacagcaagaaagaacgtggcgggagcgcagaaccccaggacagggaacacttccgcccgggcaggctttggaaatttcggccggccaaattgtcaccaagcggggcccccattttcgcacatcacaggtccccgtcgggcccgcgcggtggcgcgcccgtttctcccgggta

SEQ ID NO: 712043 - DNA, 739 bp, Homo sapiens
cagtgtggggtggcggtgttgtgtgtgggggttgggtgtggtttgtcgcggctgtccgtcgtatcgactccctggtgccgctaatgatgggtagcgtccccgcgacgttagagaaggtcgccgtggcggcagcccggtgtctctcgagttgtgggggtgtccgagggatgatctgcgaggaggttatagagagtgatgtgcgctcgggtgttttgattcggtggggggctgcgagggtgggtgtggggtcgtggcggagcagcgacagtgtacttgttaggtgcagtctctgttgtggcgagcgcgtggtggatgaggtaggagcctgccttgcttggatggctttctcgccgcgtcttcgcgagggcacgcgtggcgacgatttcttctgtggccgtggcgggaggctcgaggcgtcgtagccgcgccaccgtgttgttgcactggcgccggtcgttcgttgcgcgctctcctttcggtctcgggcacctgaggcaggggtcgccacattgttgcagttttctgtttttgccgtggcccgctcttgtggggatgagcgatgatgtctgctgtcaatggtaccagatttgttgggtgcgagccgcgtcgctgcgtcggcctctgtagccgcgctagtggggcggcacgtatcgagcggcggggagttggcgggacggggggggggggagttttccccttaatccctttttttgtaaaaaaaaggaaaacctttttggga

SEQ ID NO: 712044 - DNA, 418 bp, Homo sapiens
ccactgctgcagacacctgccttaacacacacacctctaggactccacagttgtgcggggaggggcgggggggggctgcctgtccctgtctggcttctccctgaagaagagagagatacgtgtggaattggggcgggggaatgagcatgaactgtccttccattggggatgagtggtgcgattagagtgagagagggaataaggagcctttcttatggaagaagtgggggaggggagacggggttctgttcagcagagtctagtagtttctctgtaaggcaaaataatctaaaaagactaacctgcccacccactccttatattgctgtgagattgcccctatcttgtgctcttctgtctgcagtgtgcacggccttgttctaacccggaataaaggtgattgattgtattgcaaaaa

SEQ ID NO: 712045 - DNA, 191 bp, Homo sapiens
ctctgtcttctgaggtactatttttagacagcgtggctcttgtacccaggcttgagtgcaagccacgatctcacctcaccagaacctccgtctcccgagttcaagcgatactcctgcctcggcttcccgagtagctgggctaaccggtatgaaccacatcatcccggataacatagtataatattaataaa

SEQ ID NO: 712046 - DNA, 244 bp, Homo sapiens
cgactctagaggatctggatgacgtcctcatgctccatggtgtgggtcacgcccacccgctgcagactgtacttggtgctgttgccccaaacgcatggcgtactattaactgcctggcgagtgatcggtgaatgcggtgggagtacttggccctgacctgcatctacaccaagaagagaggagagacgccatacttcacatatgccatcattctccggataggggcctctgtgcatcacgtgtt

SEQ ID NO: 712047 - DNA, 253 bp, Homo sapiens
gaagagatcgagcttcatcgagaatgatgcttgcataatgtcgagccaacgacataaactaagggcgctacttgggaggcaacccaatcctgctactatcacttcctcttgttatttcattttattttcttactgttctctcagttttacactcatcattcatgctttatgtttatcatagctaggaaatttagtcatattctaacttatttttgctccttgtcccccagcaccatgccaccttcacatctca

SEQ ID NO: 712048 - DNA, 136 bp, Homo sapiens
gtcacactactgtcaacactggacatgtggaccgaactactatgagacaccctgttcacaactgtttaatgaggaggttttccaacattagtgaatgcatttgatccttcagtcaaccaatggatgtctgaagggt

SEQ ID NO: 712049 - DNA, 310 bp, Homo sapiens
ttttcttttttatttgggggggggggttttttttttgggggaccccctttttggttggctccttttaaaaaggggggggggattttttaggggggggttgtttttttttttaggggccggtttggcccttggatttttgttttaaatggggttttgggttttttaaagccaaaaggggggggggggaaattggttttttgcccctttttttttcgggggggccattttggggggtagaaatggggtaaaggttttttttttttgtttttttttggggtttttttttttaattttttttttgggtttccca

SEQ ID NO: 712050 - DNA, 1581 bp, Homo sapiens
tcagtttccttaaagggacccccatctccctgaagggcaggtgcatggcagctaggtgaggggaagagatgtcactgtgaagatctggcccgtgatggaaggcttggcccacatgtgcgtggaaggcccccttcccgaggaaaagatactctcgaaaccaggcgttcggggctctccttcgcgtggccaggactccagttttccgccagtggtgtagtgactgcgatagtccacctgtggccaacctctgtggaccttcagcgggaaagggcaaggctctcgctgggcctctcggaaggacccaagactctccaagacaatgggaggcgtgcatatgtgggtgggtctccaaaaagggatggaccactgtggcagaaggggcattctcatctcctctcgagctgtgggtcccagagtctcggcggcgaaaacaatatcccagagtgtgcagtggaagaatgtgccgaggcctctaggaagaggctcgtgagaggggagttctctctcccgagggggaaagcggaaataacctccgtggagtctcaccaccgaggggaaccacaggcgcggtcccttatattcaaagaggtggccctccgcgaggaaaattagtgggacgaggtgcccaacgagaagagaggtggtgtctcccctcatctggggcagtatcacgtgtggcgccttataaaattcccattccccaacgagcaaaaggggataccctcttcgtgggggccatggtgtagaacgcgcgacaggggggggtcccgttgggcgccccttggggggcctccagcgcatcggcccagggccggccttgtgcgctcaacacatttctccaactcacatttcttccttccctccaggggaccccagtgggggggcaattggcctggcccatttatattgatacacataccgttatcccgggctttcaagcgccgtggggggggcattccctggggcgtacccattcattctcacccgtgggtggcacacccgcattttaccttcattttacacccgggtgggggtgggtgaggcgcccctattcatacacacgggggagggggggggtcccatcctgtggggcacaacacctttattagtataaacgggcatctccaacaaacgtttggggggccgcagactctcataccctcaacagacacaaagggtatcgtcaccacggtattacccgccccccccaaaagaggaaaacaggtccccggtagcagaaccgtcggggggcgcgcgggggcgaacaacacgtcgccgcgggggctgacggcgggcaccccccacgcgggggggtgtgcagggatcgttggcgcgggaaaaagacggggcccgtgtcgtcgggaacacaacacaggggcgtcctagcaaacccctgttggtttatagacaggccgccaaccacgggggtgcgctgaacacactcgtgtgtgtcgttctaccgaccaagttgtctactcgttcgtcgcccgcaaaaaaaaactgcctgattccaaggtagagcacctcgacgacgcacaaaaattggcgtagaccaccccatggagcgtcaaaacgacgact

SEQ ID NO: 712051 - DNA, 150 bp, Homo sapiens
acggcacggaagtcataggtgaggcagcagctctacacttacctacagaaaaagacactcaaccattaccctcagcctaggggaccccaacatccaggccctaccaagaccccaaacctagcccagaccagccctgaaacatgcaagtac

SEQ ID NO: 712052 - DNA, 898 bp, Homo sapiens
tgccctcgggctggcaagaaggccactccaggcctccacagtgatgtactaatgagtggccctgctgcctgctggcctggcctgccaggcctccccatgccaccacaaaggcccttttaagtggccaccacctgccctcatggaaatgagctgagcctgcttcagactgctggggcaaggctgggccgcggtgtctcccttccccatccgccttctctctctgctctgcattcaacaggcgcggggtgacacaatatagactaggcctagcgaatcagatacagcgcacatctgctaacctgcatgtaagaagatagacagccaaggcctctaccagctaccgcgacagtaacagcaacaacagaaacaacgcgacaaccggcggcacaacaccagcgaagcagaagacacaatcgtacacagagaacatgacacagaccaccgaaaacagcgaaacccacgagtcgacaacctcacaaacaacccaccgcaccgacgaacataagcaccacgagagcaaagcaacaggaaaaaacagaaagaggaatagcgcgcacgaccgaagacacaacacacagtaatctcgcgaacgagctagccccacaggaaaagaacgcacgaaaacacgtaagcagcagacacaacgtagcagcccactcgacagagccatataaaaaaagcacaacatccaaaaagcagcaagcacacaaacgatccaaccagcctagcacaagactcaacctacactaaactcacaaccgaagtacacaaagtccatagacacagggaaccagcacacatcaccacgacagtacaagcgacaacaagcacaaccagacacgagcagaacgcaacaagagaagagcagccatagctgcgacgagactacttacacacg

SEQ ID NO: 712053 - DNA, 112 bp, Homo sapiens
caccgtatcctcttcttcaacacacccaaaaagatgacagactacgccaagaagcgagggtgggtccttgggccgcaacaactactacagttattgctacagcgctggggta

SEQ ID NO: 712054 - DNA, 645 bp, Homo sapiens
gactgcttgagcctctgagcctcagttaactcagaggaggttggcataacacagagggcagtaaggacagggacaatgggaaaaaaaaaataaagtgaagaccatcttggttccattatgaggagtagagtgcctggatcaaggaggtgatgatggttccatgtgtcctgggtaggtcagagagcaggacctgagagcattagaactggtggcagcctttcaggccatcttatctgattcctttcttttatatatagggaaactgaggctcagagaagggaaggaaaggctactccccccagaacagagttcagctcttaatagcacttttttttttttttttggaaatacttcttgctctgtggccctggttggattgcggggcttcagctcatgggtctcacggcagcctttaacctccggggcctcgggtgaccctccgtgcatcagcctccgtgagtagttgagcctacagttgcttgccaccatgacgggctaattttaaattttttggtaaagggggggcggggggggcggtctccctatgttgcccaggctgtctcaactcctaggctctaggatcctacggctcagtttcccaagtgccgggattacgggctcaagctgccgtgcccatcctgttgc

SEQ ID NO: 712055 - DNA, 102 bp, Homo sapiens
gcggccgcctactactactactactgctcgaattcaagcttctaacgatgtacggggacatgtgactgtattacctattcaaaataaacaataaatgggccc

SEQ ID NO: 712056 - DNA, 132 bp, Homo sapiens
ttacatatacgactcgagctagtacccaggcatgcagcttgggcatgcagcttgggtaatttctgaactgagtccaagtttttaccagtgcttttagagtcattttttttaagtcctttatctccaagcttg

SEQ ID NO: 712057 - DNA, 209 bp, Homo sapiens
tcgctatcctcggcacctcgctatacatcggcacttcgctattcatcggcaccgggggttggtgtaaaataggcgctaggtcgaagtagagcgttaaggagggtgatggtggctatgatggtgcggatgagtggcgaggtgccgatcaatagcgaggtgccgatgaatagcgaggtgctgatgaatagcgaggtgccgataaatagcga

SEQ ID NO: 712058 - DNA, 113 bp, Homo sapiens
gccgcacagacgatagcccgacagccccggctagtcggggctgtcgggctagtcggggctgtcgggctagtcgggggctgtcgggctagtcggggcggtcgggctagtcgggg

SEQ ID NO: 712059 - DNA, 910 bp, Homo sapiens
atagctactctcataaccctcaacagccactccctcttagccaatatgtgcctatgccatactagtctttgccgcctgcgacgcaggcggtgggcctagccctactagtctcaatctccaacacatatggctagatagtacataacctaaacctactccaatgctaaaactaatcgtcccaaacaatttatatgactaccactgacatgactttccaaaaaacacataatggaatcaacaaaccacccacaagctaaattattagcatcatccctctactatttttgacaccaaaatcaacaacaagctatttagctgtttccccaacctttttccctccgaccccttaacaaccccccctcctaattataaagtaacctgactccgtaccccctcacaaatcatggcaagcacaaccgcaaagtaaatccagagaaccacactatcaggaaaaaaaaattcttaccgtcttctatagtaaatctcccttaccaaatcttccttaattatacaccatttcacaggccacaggaacataaactccatattagagatatcttacttacgacaacaacacattattccaaacccttgggtatcatcacccgaggaggcaccagcagaaacgctagaacggcagggacatcactttctattctaaaccctagtaacgtccccttcccctaatcatcggataatttaaactcaaaacctaaggttccataacatctactattcatctcactgcaagactataaattctgagcaattaatatactagtaccaaagttaaagaagatcctttaaggccacttaggcttgagctgtaggcccatgggtacagacgcggcacaaaaaggaggatacgctataacggaaatccttgtcacaggaaccggcgcaaacagtg

SEQ ID NO: 712060 - DNA, 115 bp, Homo sapiens
caggctgagagtgaccacgacgatgacgaccatctgattaaacagacacaacgacaaacgacacacaaacgacgacgtacacccacaccactgaccacaccaacaggaggaccct

SEQ ID NO: 712061 - DNA, 280 bp, Homo sapiens
catctctttctgtacagtcatataaatcagaaacccagaagtcttggacactgctgtccctctgcccttgtgtacaatacagtgttagattttcctgaatatctcttgaattcattggcttccttccaccatcactgccatcaccctattcgaagctactatcctatcctgacaggacttttgtttcccacctggtccatccatattccagaatccagaagccagagtcctgttgaaaatctgatttcatcttcccctcagcctgcaatcaagcctggaa

SEQ ID NO: 712062 - DNA, 599 bp, Homo sapiens
tacaattgcactgctgttcctgccacaggacggactgtcggccggtatttcggagattctttgacattggggggaactttattcttcctgggcacactttctctctagaagggacccttttgagatccttcacaggcagggcatgtgaagcatgctttcctgctatgaaaatgagcctcaaaaaggggccctcaggtttttttattattattattggcttttcagggagaacccagcagttgacatccaaatttagccaaagcccttccctcccataataggtggggcttccccagtttgttaactggggtgatctgtaaacttcgggtggtatttctaaatttatttccagaaacctgggtgggaacctaaggggaaggtctcctttagttttgatataaggttttttaaagggaattattttgaaggtcccaaattggtcaagatattaaaaggggggatttttctttccccaaatccaaggaccaatgctgttgtaaacaaggggtaaagggcctaaaatggtatgaaaacccttttaccccttttaacctaaaggtttaacaaatttaatttttttttttaataaatttccttta

SEQ ID NO: 712063 - DNA, 805 bp, Homo sapiens
  misc_feature (12)..(12): n is a, c, g, or t
  misc_feature (21)..(22): n is a, c, g, or t
  misc_feature (33)..(33): n is a, c, g, or t
aaaagggaaggnaaagaaatnnagagaaaaatnattatttgagtcaaggaaatatgccgtatgactttgagatcaacaaagacaactgcacaagaggaattttgacactgggcctacagatatacaatgagcttacaatcagaacttgatgagatcaataaagaactcttccgtttggataaagaattggatgactatagagaagaaagtgaagagtacatggctgctgctgatgaatacaatcgaatgaagcaagtgaagggatctgcatattacaaaagtaagaggaaagattgcaagcagttaaacagctaattgtcacacatcaggaacatggttggagactatgatagacagaaaacatagaaggctgatgccaagttgagtgagaaaataaggatctcacatctctgcaatcttctcagaaggtaaatgactttggaccataaccgcggaagccaaacctctgagagcatcacattcttggctgttttaatatcatcagtattgaaacattctataaattcctttgggaaatcaactgggatgaacacttcaattaaggattttatgcattaaatattgattttggaattaagatatacattctgtttgaggttttcaagtcctaaaggaaggaagtggtgtgaactatccctatacaccccgtacgatagtctttatacctacgtttgtttggattcattaggtgatttcaatgatagtcgaatagaccttgtaaatagcagggaattataatgtgatattcaagagtaagtgattgtttatagaaatatgattagaa

SEQ ID NO: 712064 - DNA, 774 bp, Homo sapiens
gtgcatgcctgtaattctagctactcaggaggctgaggcagaagaatcgcttgaacctaagagagaaatgtagtgagccaagatcactccactgcactccagcctggacgacagagtgagactctgtctcaaaaaaaaaaaaaaaaaaaaaaaaaaaaaaatagggctgtttatggcggatgggggggaaaaaaaggctttggattgtgggcagtgaaaaagtgggtaagattctttttaggaagaagcgaaagttttccagttattctatttaaaatttataagggtgcccattttcctttagaattccagtacccggaagaaattattattggctaggggagcctaattaggaacaggttatttccaaagaattaacattatagtggggaattatttaagaactaatttatttatataggtggccagcaaggttgggaaaaacaatctaaagtggtctttcaagaaggaaaattgggctccacataatttgtttggtaccattttcccttacaaagggaagtttggtgacagctcctacagaaagaagaaattaggggcgtgattcttttaaccatttggagtgtgaaacacgatagttggattttatcggtcgaaaaaaaaacgcgtggcggggctgggcctgggggctttaatggcctaataatcttaacatttgtgggacgccatggttaggaggatcgtttgagcctaggagtagaggtaatcgtgggtacccaagtgtgagacccttttctacaaaaaaaaaaaagg

SEQ ID NO: 712065 - DNA, 317 bp, Homo sapiens
ttggctggcccatggctggaatgagtttgctgctgacaacagcgaacctgtgtggaagaaacacctggatcagtttaagaaccccctgatcctgctgctgctgggctctgccctggcgagtgtactcaccaaggagtatgaggacgccagcagcatcgccacagcagtgcttgtcgtggtcactgtcgccttcatccaggagtacaggtcggagaaatctctggaagagctgaccaagctggttcctccagaatgtaactgcctaagagaaggaaactccagcacctgctgctcgagaactgttcgagatcctctag

SEQ ID NO: 712066 - DNA, 529 bp, Homo sapiens
aaagagttcctgactggcaattggttgagagagttaaactttacctgaaaagatgaagtcagcttaagttaaagtaagggaggcttggcttaagtcatgtagatgaagcctccaggtagcaggcttcagagagaacagatgatgaatttttctttttaggccttaaaaggtgtcagactctccagaaaagacctaataagagaaggagattctctacagaatgcagtttcccccacaagagacagctttgtagggccatttcaaaatacgtcaaataaatatattggggggtaaatttcctttggggcctgctgtcatgtgatgctataccagagtcaggttgggatttggtattttattgccacaaagggtctgtttggttagtcttaagatctctgttttaatgttaatgctggtcagttgtatttaaattccaaagggaagagggtaatatgaggcaccctgtaatctgaccataatatgaagcaccctgtctttccatcatgggctagttttttaggtgccttgg

SEQ ID NO: 712067 - DNA, 241 bp, Homo sapiens
gtttttttttttgtcttcctttttttaagcctaatcatcgcttacttctttatcacgttccttctccacaaaggagtaatgggatatccaataaactgagaatgtttctacacaatctccttcattctggtgcagtagtccttgagagaacccatctcatcaccagaggcagatgtttagtacctaaacagctctaaagcttctcccgattttgagagtctgcgtatactccaagcttatg

SEQ ID NO: 712068 - DNA, 949 bp, Homo sapiens
cgtggtggctcacacctgtaatcccagcaccttggaagaccaaggtgggatgattgcctgagcaaaacggcgaaaccccatttctactaaaatacaaaaaattagctgggcatagcggcacatgcctgtagtcccagccacttgggagtctgagagaggagaatcgcttgaacctaggaggcagaggttgcagtgagccaagatcgcgccactgcactgcagtctgggcaacagaatgagactccgcctcaagaaaaaaaaaaaaattaccaaaggtataccgagaggaagcgggaagcagccccctcctaagacaatctatcatggccggatgaggaacgataagctcaccgcctgtaaaccccaagcaactcaaaggagatctgaagacgacgggaacaatgaggccacaggagtccaagacaaagccgggaccagacaggggtgaaacccccaatcgcaaccacaacaactattcaaaattcggggccagatgcaggtggaccaacacacggtaaaaacacaagcaaaatacagaggacacgaacgcacgggaccaccgggaaatggggagtaagaagaacaaacgagaacaaatggggaaaacccgatcacaaataatttagcacgggaatgggacacatggctgtgatcgagtaccggaagcgaggcagacaactgctgacccaggagcaggaggttcgcacacagaaacgggacattgcatccaccgggaacaaacgaagcggtccagacaaaacaacaccaccagaaaaaacaggcgagagaaagtgaaaccaagccgaacgaagggaacatcacacaaggcggcaggacaagacaaccaccacagcgaaggacacacgacgcaaaaaaaccatgccggcagagaacagggcgcaccagactccagcaagcagtgcaagcagcgcagagacgagacaacgac

SEQ ID NO: 712069 - DNA, 215 bp, Homo sapiens
tatgataatcactagagatactcatcagtagctgtagcaataggtgacatacagcagaatccaaggattagtgacagacaatgtacatgtcctaaggaatgatagatagatagtacccatccttacaaaagtcattgtctcatagaaactgttaagtgttcaaaaaggtatctcaatatttcacattaagtacagaagcgggcaatccggattac

SEQ ID NO: 712070 - DNA, 102 bp, Homo sapiens
ggagatctctggatccatgaccatccttttccttttgaataatcaactaagatgtatatgtaagaaaggaaaaggatgtgatgaaaatagagaaatgagagg

SEQ ID NO: 712071 - DNA, 159 bp, Homo sapiens
aaagaagacaaaaaattgaagagaaagatcccacacaaaggaggcaaaaagttagcacaaggaagaattggaggaggacttaagagaaagtaatccacccaaaattgagagcagaaagaactctagacatgttcagcgttgtcattccttgatgacaga

SEQ ID NO: 712072 - DNA, 185 bp, Homo sapiens
cttccctcttcacactgctttagcggtgatgactacaacttatggagagtgtttgatgtccagataatgcccgaagacttagacatgcggcttcaccgaattggacatctacagcaagttccgtcccagccgtgccatgcgctgccttagagtcaggttatgccgctcaattggctgcagatatc

SEQ ID NO: 712073 - DNA, 324 bp, Homo sapiens
tgaatgcctgggaaccaaaaaagctttaaggaatgctttctcggccggacacagtggctcacacctgtaatcccagcactttgggaggtcaaggcgggaggatcacttgtgctcaggagtttgaaccagccggggcaacatggggaagcctcatctttaaaaaatacaaaattggtgaggagtggctcactatgcctgtggtcatagctacttgggaggctgaggtcagaggatcacttgagcccaggaggtcaaggctacagtgagccatgatcacaccactgcagtccagcctgggctacagagcgataccctgtctgtctc

SEQ ID NO: 712074 - DNA, 324 bp, Homo sapiens
tatctctatctcagttcttgcgtagctggtactatagttgcaccactatgtgcacctaattcttaaatttttcatagacagagggtcttgctatgtggcccaggctggtcttgaactccagcctcaagcaatcctcccaccttggcctcccaaagtactaggattacaggcgcaagccactgccccttagtccatttcagtggttttttcttttttttttggaacacggagtctaagtctgtctctcaagcctagagtgcagtggcatgatctgggctcactgaagcctccccgtcaaggttcaaacgcagtgggtcaccgagc

SEQ ID NO: 712075 - DNA, 769 bp, Homo sapiens
  misc_feature (572)..(572): n is a, c, g, or t
agtgtcgtgaaatgtaatgaacctttactaccttttaggggtgccatggatactcgccagagatttccttcagccacgccaagtcttaaaaagaaaggctttttctaatccgtttggtttaagacactaaaagaagtttccattagtaaaggtgtgtaatgtatggagccggctgattttttttcctccagtgaggcattaagcacacatttattcccatagaaactatgcccttgacatatggaaatgattcttttctgaaagtattcatgatctcactatgatgtattaggttaggtcaccaaggttttatctgaggtgatttaaataacttcctgattggagtgtgtaagctgagcgatttctaataaaattttagttggccccctttagtagtcatagtgaagccggtctagaaaataagcctttggcagggaaaaagggccatgttgatttatttcagtatttaacccccttaatctggatccccttgtctggcttttgtaaattcatcccgggccagactaagtatgttgggtaatagggaccccttttttttttttttaaggctnaaaggggaaaaaataatccccccttaagctaattaatattggtcctttaatttaaaggatgggaatttttcctgtttaaaaattattccagccctctttaaacccctttaacagccccccgtcataaaaatgtgttcttttccaatatttgcttggcccccccccttgaaataaataaaactttgttttttaggaga

SEQ ID NO: 712076 - DNA, 149 bp, Homo sapiens
cttcatccagaaactgcgggagggtgggtacagctatgtaggacctagtggaagggttacatgataggacactatactacgccctgacagcgaatcctagtgtcagcgagacacgcaggaccgaggagggaggcccatgcgaagaagcc

SEQ ID NO: 712077 - DNA, 847 bp, Homo sapiens
tgaaattttccaggacatggttcatatccggacgaagcctgggcctgtgaccgcagtacgacatcctgtttgacaacttgagcagtcgcagagcacctttatctctatcgcccagctgaagggcctgtcacgtcagaagtgaccctgaagaagtcaagcgagatgctgcacatcatcgtgctggaggacaagtggaatctcacggagccgcttcctgagctggggtgcatgaggcgcaatgctctccatcggcatcgccctcatcagctaggcatccaaggtgcttgatacttgttgacgagcccacctcgggcatggactgccatctccaggagggccatctgggatcttcttcagctggcatgaaaagttgaacgcaaccaatcgtgcttgacacacccacttcattggactgatggcttgacctgcgtgggatgaccgcatcgccatcattggcacacaagggggggaggcttggcataggtggctgacgaggtcaccttcgctggtaccctcaaggcaagacaacatactggtgacctgggtatcacaatggacctgcttggtttacacggacgccggacactgcaaaccccgtgaaaaggaaccattcgtcccccacgcattggataccccacccaaacaccagggttggcgccaaaaggccacaccggcagtggaagaacgcaaaggcgactgagaggccacggaagcagggaccgtatgacaacacctccccagaacagcaagacggcacgatgcttggcacaggccagcttacggaacagactggaccacacaccacggaacgacgctgggacaaggccaacgctgaggaggaataaaa

SEQ ID NO: 712078 - DNA, 169 bp, Homo sapiens
ctgcacagctgcaggcagttcttacagcccagagtgagcctgaatccttttgatgcgcgaatcagccagtcaatcttattctttggtttcgttttctttctttcgtttcgttttctttctttctttctttctctttctttctttcttccttccttctttctctttcttt

SEQ ID NO: 712079 - DNA, 339 bp, Homo sapiens
taaaatgtcaagagagtgaaggtcttgatcctctctgaatagcattggtcactttgccagtaaatacagcatgctaagttaatgtgctttaaaatataagcgttttccgtcagactcttcaagttcttcttgaaccctgggggcacagatccatatataacctccctttacagtatggcggggtgtgaataaactacaacacatatgcatgcataagctgtgaatcctgcactactttttttttctttttccccccaaagaatatctctggggaaaagttttaagtacgtaactaaactttattgggctgctaattggcgcatggaaccggatagctgg

SEQ ID NO: 712080 - DNA, 302 bp, Homo sapiens
  misc_feature (134)..(134): n is a, c, g, or t
gaagggggttaggcagaggaggcctcatgtgggtgtgactgtgggtcgatgccagagtgagactagtctcatagattggacgctcagagagatcaagcgtatcatgatcaaatttcagagtattgtgaatatgntcatatcagatcggatagcatggagctcttgcaatcatctttcttctttctcctcccatttcttttcttttcttccatatgatcagaacatcgattcggaagcgtcccttgagtcaattaatgtctttcattcagatgctcggtacgactatcatacaatcggaattg

SEQ ID NO: 712081 - DNA, 234 bp, Homo sapiens
agggggggaactctcaagtcacagattttctttttttgttagtgggagagaaacatatccccttaggggttggactatgatcgggtccctataaccagctaaataaacttcccaagtaaaatactcgggtgggagggatatccccctaaccctcacttccatattccatacttccagataattcttggagtttcaccaggttgccagattttttcttttccctagaatttctcc

SEQ ID NO: 712082 - DNA, 667 bp, Homo sapiens
cgctccgggagctgccgacggacggagcgcccccgcccggggcggcgctactcgcccgtaaggcgccattggccttctccaagagacacaaggcactgaagctgcgcttcccggccgaggacgagttccccgagctgattcgcccaaacaaccacagtggcccaggtggctgacccccgagcgtgtacgcggagcgtgcgcgcccagagcacgccgagcggactacacgctggacgacgtcatccagacaggcgtggacaacccgggccaaccgtacatcagtgaccgtgggctgcgtggccggtgccgacgaggagatccctacgacagtggttcaacggactctcttcgacacccactcgatcgagggaccggcaacggcggcgtaccaagacccagcgcactgagccagcaagacacgaccctcgacacccgaagaacctgcagggcggcgacagaccctggaaccgaactacgtgctgatctcgcgaggtgcgcacgggcccgacagcatcccgtgggcttcgtgacatccacgccgggactgcaagcccgacggggagccgccgagccccatcgagaaagcctcgcgggaggaaggccctgctcacgacatgagaccggggacgctgagcggggaccgaatactacagcgctcagggagcaa

SEQ ID NO: 712083 - DNA, 259 bp, Homo sapiens
aaaatccactggcttccaaagaaacgatagaacagagagaagcaagcaggcgaatcgtacgtgaggcgtgcgccgccacatatgcactgtacattccccaagcactgccttcttatattacttctttctagcgtgcttaacttggtaagatgcaaagaggttggatcaagttgaaatgactgtgctgcccctttcacatcacagaactactgacaacgaaggccgcgcctgcctttcccatctcgtctcttctcttgta

SEQ ID NO: 712084 - DNA, 244 bp, Homo sapiens
tgggaagatcgcttgaactcaggagtctgagaccacccaggggatacatggccacaccctagtattctacaaagaaatacgaaaaatcagccaggcgtaggtggcaggtgctgatgaatcccagctgactgtaggtatgctggaggcaggcagaattcgcttgatacccatggcagcagaggttgcacgtagagcttgatatcatagccattgcactccagcctgggcaacagggtgagactcc

SEQ ID NO: 712085 - DNA, 188 bp, Homo sapiens
gctgtatagactcctcataactgaacactctgtcactatctcccttagcagcgccaccaggacaggaaaaccgatagcaggcggggaccaggtataggagggcaggctagagcatagcttgaagatagtgcatagatgaagatggtacaggccctaggccgaaagcatgtaggctagcaaacgctggc

SEQ ID NO: 712086 - DNA, 584 bp, Homo sapiens
  misc_feature (306)..(306): n is a, c, g, or t
  misc_feature (327)..(327): n is a, c, g, or t
  misc_feature (329)..(329): n is a, c, g, or t
  misc_feature (344)..(344): n is a, c, g, or t
  misc_feature (360)..(360): n is a, c, g, or t
  misc_feature (362)..(362): n is a, c, g, or t
  misc_feature (372)..(372): n is a, c, g, or t
  misc_feature (445)..(445): n is a, c, g, or t
  misc_feature (564)..(564): n is a, c, g, or t
atcccctgtgaaagatgtggaactgagacacagagaggtgaagtgacccacctaagagttatgcggccaacccattgggcaatgttaggaccagaccacgggtccttgacagctctgtgttcaatgactaggttaaattgcttctctgtctgcactgcaatgggagaaataggactccatttggcctcttacctgctggattttcctgtctttacgatccttgaagtagcccgaggctttgctggggagaggtcttaggacccagcctagtttggtattggttgttttatctggtaaaggtgtttngtcctccatcccactcccagncngtgctggcctgtgantgccaggaaagtcaananaatctatctnaaggtcatggaccagaagaacctgtggcaccacgcacctttctgcgagttccacactgactgtatttcaccanaagaggacttttggtgaagcagaacatctgcgtacaagtaccttggagttggtgctatgtgagccgatggtggaaacaggttgcggctgaaaatgagatgtgaaagttctagaatgatnttctagtggcttgagctctg

SEQ ID NO: 712087 - DNA, 190 bp, Homo sapiens
gtaacaaggccggggttgaatgataggtacataatactattccactccacaccacgtttccaccctcaccctgccccctcatacggaggttggatgggggccgagtgaggtaacccggtggcatttaccccctgttttataaggaattttgtacagtctttgtgaaattaaataacgtgcttcaatttga

SEQ ID NO: 712088 - DNA, 181 bp, Homo sapiens
cttgctaatcctgtctggtaaggatgtgcctcttacctgcaagtatcttgttatcggcctcctggagacaatctcacgtggttagtccattcacacctacctgtggtgtctccagtgatggagcagatactcaaggaggcactgggctcagcctgggcattaaagggacagagtcagctca

SEQ ID NO: 712089 - DNA, 253 bp, Homo sapiens
  misc_feature (36)..(36): n is a, c, g, or t
  misc_feature (53)..(53): n is a, c, g, or t
  misc_feature (63)..(63): n is a, c, g, or t
  misc_feature (72)..(72): n is a, c, g, or t
  misc_feature (76)..(76): n is a, c, g, or t
  misc_feature (81)..(81): n is a, c, g, or t
  misc_feature (169)..(169): n is a, c, g, or t
  misc_feature (195)..(195): n is a, c, g, or t
cgtctaaagctcttagctactgatacgaagccaccnagaataaagactacatntcagatttcnttgcagctnaatnggggntaaccaaatagtgtgtgtgcaacttgtgagacacatccttaaatgaaagaagcacacttctctttccctttcccctcctttttagctngaatacaaaagcaatggctggaactntggcagtcatcttgcatcatggcagaacacatgacgaagcaacgaatgactaggtatc

SEQ ID NO: 712090 - DNA, 437 bp, Homo sapiens
atggtgataacaaaccattaaaccaagcacaggctcttcgtcagcacaaggaactataagatcctgtgtacctaaagctagacctgatgagacatatggatagtagggcctctccccacatcctacaactatttcagcccgctggatgtcttgcctgccttcgtcacaccaggcacacatctagcctatgcctgctaaagtgctataactagtttccccgacttaaagcctactctaccccagatagccctagccctcgctccttcatttcctgcaggtttctgcccagagctcacctatagcagaggggcctccgccatcagtctactctcaaacagcatccctcacaccctccctgcatcctctgcaacaaactctcagcttttcactaatggattctcttgtctatcattgcattgcccttctcacgctgatag

SEQ ID NO: 712091 - DNA, 384 bp, Homo sapiens
aaatcatcagccagtttagccatgcatccatgcaatgactccagcgagagtggatttagtctccacagagaatgcaacaatatggaaatccacagtggacattgacagaccaaaacaagcgactatcagctggtgagtggaaacgcagcacggaggactcgctcacatgtacatgctcagatggcagagaatgcagaagaaggtagtggtggcggaggccgtgaagaggatcccccctgcagacaccaaagctgtgaacagaaagactgcctggccagcacaccttgggacatcagcctggcccagcctgaaagcatccgcagtgacctagagagttctgatgcacagtcagacgatgtgccagacatcaccaccaggatcacc

SEQ ID NO: 712092 - DNA, 621 bp, Homo sapiens
ggaaaaaggaactggcaaatctggctcaattagaagccttgtaccagtcttcttgggcacagccagttagtgagatggtggggaggactgttctcttcatcaaatcagttttgtgcacggtcaaggcacaggcatgcaaccacagtcgcagcaatgtgcacaacacaccttaccacctcagtctcactctgcgcaccaagcttctcttcaccagcgaaagcaagcatcactgcaacatgctcagcacacacctgcagccagtcagcaggcattgggcacacgcttgggggcagcagcaggaccatgaggaacggataccctgaacaacacgtggggagatcctctcttacacaagcagctcgagcttccatcaggcaactcccacagtctccacagatcccagtcgggtcaccaactaaaagtacaatacaggccacattaacaccttctgcatatgaaatctataccctcaaatccctcatcacaacatacacgcagcaatactgaaccatctgaactacaaaactcagcagacattcatctatgtatacgttcatgaactgtgtaacgtcataaaaaagcacatagtgtgacagtgcataagtaatgtgaatccgactg

SEQ ID NO: 712093 - DNA, 239 bp, Homo sapiens
  misc_feature (26)..(26): n is a, c, g, or t
agttgttcttcaagatcactgaaccntgaacatacccatgtgatttatacaattttcccactgtccttgggcttatgccaggcaagaggtacacccctcgcaaaacatgcatgctctgggcgtgacattggcatcttgcttgagctggttttgggaaccctgcaatatttctactagctatgctcctctgcaagctggcccaagccttagcccagacaccccaggctatttccctttaa

SEQ ID NO: 712094 - DNA, 219 bp, Homo sapiens
  misc_feature (27)..(27): n is a, c, g, or t
  misc_feature (85)..(87): n is a, c, g, or t
  misc_feature (132)..(132): n is a, c, g, or t
  misc_feature (138)..(138): n is a, c, g, or t
  misc_feature (192)..(192): n is a, c, g, or t
  misc_feature (200)..(200): n is a, c, g, or t
  misc_feature (212)..(212): n is a, c, g, or t
cacaagcaaaacttttaaatatttganttgacagttacatgtttcataactttgtatgtctattggttgtgcaggtgtaattttnnncctttttgattaggggtacaaaatttagagaccagtatgattaantgaagntccttaggctccttcggcctagtctctgcatacctcaactttacggaccaatgntactctgntgttcacaattncctcatg

SEQ ID NO: 712095 - DNA, 451 bp, Homo sapiens
  misc_feature (340)..(340): n is a, c, g, or t
  misc_feature (343)..(343): n is a, c, g, or t
  misc_feature (345)..(345): n is a, c, g, or t
  misc_feature (363)..(364): n is a, c, g, or t
ttgtaagtaaggcaatgcctggtgatgggttcttggggctcctggagtttgatttaataacaaatatttattgaccacatattgtcttgtactgtgagaggccttatgggaggtcaaaaggaattttgccctaatgatcttaataatctccataggacaaaaagtgcacatgtttaaagtggaaaacaaggaaagtctggcagatgatgggtaaatttatttgctgatcaatgtgaatgaggcagactaagaggtttctaccagaaagaacttgagcttcttgattcgagttagccatcaagtaacttgaggagaccttgggcaaagctatcttactggnctncnatattggagaaaggcccnnaaaagcccctgggataaggctagttttattatttacctttcctcctttatccagggggacccccgccccccgccaatggtccttaag

SEQ ID NO: 712096 - DNA, 980 bp, Homo sapiens
ggcgtgaggctggatcatttgtggtgtgagggttcccacgcgtgggcagcaatgagctgcacctcccagaagggcagtccatcctgacggggaggagggacacttgctctgaggcttcagggcagcagggtagcagggtaggtgggttttgcaggtcggagtccagaggttgaagccattcatggtggaaggccctggctttgtcaggaggtaggagagaggtggtctgccactgggagctgacacagtggcttgaggagggggctggatgtttgcagcagttactaaggaggtgagagatggagctggtaaaggccaatccaaagagtatcaagtggtctgggggcccaggtgaggctggagccacaggtggagttttctaagatagtgctgtgcagagccggggatgcagggccacgcagggtgcagaggagcaggctgggtggtcagccctgcagtcagttaagtcaatcgaggaggaaatagtgggagagaatagaaagatcaagaccctggaggtctctctaaaattaagaggccagccaggcacagtggctcatgcctgtgaccctagcactttgggaaagctgaggcaggaggatcgttaaatccaggagtttgacatcaggcctgggcaaatagtgagaccccatctctacaacaggcaacatgaataacataccccaggtggcatgtcctgtagtcccagcttcattgggaaagctgagcgggcaggatcaatgggcctaggaaccaaagggaaagggagcaaagatagtgctaatgatacccacgggggtgcaagtgaggagccatgtggttggggtgcatttatagcccagtgccgtacgaaggagtgcttatccccggacaagggccaggttgtgtgtgtgtcaacaagtcgcacgcatagcacgggagcaatattaacggaaagagggaaataaaggatgtgtgcgcgaaaaagcacatagaagacc

SEQ ID NO: 712097 - DNA, 131 bp, Homo sapiens
acgcacgccaccacattaacgaaacgcgttcaacgctcaacacccactacctaaaaaattcccaaaccatataacttgacctgcctcacacccaatttcgacccaatctattcaccctatacgacgactaa

SEQ ID NO: 712098 - DNA, 172 bp, Homo sapiens
  misc_feature (104)..(104): n is a, c, g, or t
cgattcgagtactctaaggatccggctccactgtgtgctgcactgtagtagtcacagctactgggcaaggggtagaggtactgaggcaggaggattgctagagngcaggaagtgaggctgcagtgagcgtgattgcgccactgtgctcagcctggtgacagagccaggccct

SEQ ID NO: 712099 - DNA, 243 bp, Homo sapiens
tcagtctgaacggagcttaagggctgagactatgaggtactatgagatatagaattcagtacatctgcagaagagacgtagtttgacttccctcttcctatttgaataccctttatttctctctcttacctgactgccctggccaggacttccagtactatgttgaataggagtggtgggagacagcattcttgtcttgtgtcagttttcaaagggaatgtttccagcttttggttatttcag

SEQ ID NO: 712100 - DNA, 981 bp, Homo sapiens
  misc_feature (34)..(34): n is a, c, g, or t
  misc_feature (46)..(46): n is a, c, g, or t
  misc_feature (49)..(49): n is a, c, g, or t
  misc_feature (95)..(95): n is a, c, g, or t
  misc_feature (98)..(98): n is a, c, g, or t
  misc_feature (101)..(101): n is a, c, g, or t
  misc_feature (104)..(104): n is a, c, g, or t
  misc_feature (128)..(128): n is a, c, g, or t
  misc_feature (137)..(137): n is a, c, g, or t
  misc_feature (140)..(140): n is a, c, g, or t
  misc_feature (147)..(147): n is a, c, g, or t
  misc_feature (149)..(149): n is a, c, g, or t
  misc_feature (159)..(160): n is a, c, g, or t
  misc_feature (162)..(162): n is a, c, g, or t
  misc_feature (174)..(174): n is a, c, g, or t
  misc_feature (177)..(177): n is a, c, g, or t
  misc_feature (185)..(185): n is a, c, g, or t
  misc_feature (190)..(190): n is a, c, g, or t
  misc_feature (192)..(192): n is a, c, g, or t
  misc_feature (198)..(198): n is a, c, g, or t
  misc_feature (210)..(210): n is a, c, g, or t
  misc_feature (221)..(221): n is a, c, g, or t
  misc_feature (237)..(237): n is a, c, g, or t
  misc_feature (239)..(239): n is a, c, g, or t
  misc_feature (242)..(242): n is a, c, g, or t
  misc_feature (255)..(255): n is a, c, g, or t
  misc_feature (324)..(324): n is a, c, g, or t
  misc_feature (399)..(399): n is a, c, g, or t
  misc_feature (406)..(406): n is a, c, g, or t
  misc_feature (457)..(457): n is a, c, g, or t
  misc_feature (488)..(488): n is a, c, g, or t
  misc_feature (512)..(512): n is a, c, g, or t
  misc_feature (516)..(516): n is a, c, g, or t
  misc_feature (523)..(523): n is a, c, g, or t
  misc_feature (525)..(525): n is a, c, g, or t
  misc_feature (534)..(534): n is a, c, g, or t
  misc_feature (536)..(538): n is a, c, g, or t
  misc_feature (549)..(549): n is a, c, g, or t
  misc_feature (557)..(557): n is a, c, g, or t
  misc_feature (564)..(564): n is a, c, g, or t
  misc_feature (692)..(692): n is a, c, g, or t
  misc_feature (771)..(771): n is a, c, g, or t
  misc_feature (836)..(836): n is a, c, g, or t
  misc_feature (850)..(850): n is a, c, g, or t
  misc_feature (860)..(860): n is a, c, g, or t
  misc_feature (866)..(866): n is a, c, g, or t
  misc_feature (871)..(871): n is a, c, g, or t
  misc_feature (875)..(875): n is a, c, g, or t
  misc_feature (883)..(885): n is a, c, g, or t
  misc_feature (887)..(887): n is a, c, g, or t
  misc_feature (896)..(896): n is a, c, g, or t
  misc_feature (900)..(900): n is a, c, g, or t
  misc_feature (902)..(902): n is a, c, g, or t
  misc_feature (906)..(907): n is a, c, g, or t
  misc_feature (913)..(913): n is a, c, g, or t
  misc_feature (978)..(978): n is a, c, g, or t
ccgccccgagggttcgtggccccccgcccccccncggtccccgccnccnccgcccacgcccagcgttgtagagaagatggtgggtcggaacagcnccnccnccnccggtgtatgcggggcccctttcnttgggtacngcntccaccncnaccgccaaanncnaagtgacccccnccnccagaacnggccncnagaacnaagaaagaaacngaagcctgccnaggagagagccgggcntnccnagttacctgaccntaaagatgccgaagccgtcccgaagttcccccctgaagaaatacagcctggtgaagagttaccagcccnaggtgaatatgagaagggcgtagaccctccgacaaatgccattgccgtgtgtggaccgccccagccgtcaccgcnggccccnccgccaaccccccccccccccgtgtccccgatgcccccgaccaagcccccnacaattagtcagagaattgtaagtgcccagngcctggccgaagatgatgtggaangagnaaccaangnccacccaanannngctccgccaancccattcnacccctnccggtagttgagcagctctgggggaataagggcaaatatgcttgttatgaactacactgaaatctaccaaagttaatgtttactttgtgtagatccatttgtctattttatttatttttcccagtganaagtgtattttgatagagaacttttcattctataaatacactatgagttactaaaatatcatggattttgtttattccngaaacatagttacatagttaaactgtacatatgacatggcttatgttaaaaatacccagtgctcngttttgaaagatangcaaaaaaanaaagtntaggngaantgaagatnnncnctttttagngggncntttnntgtaanctggaatatgaagactgactgtgttgtgaaactgagcataaggtttgatgtccttcttcctttanccc

SEQ ID NO: 712101 - DNA, 183 bp, Homo sapiens
gactgtacaacgccgtcctcacggatttttaccaagccactacgctttccctgtaggtcttaggcacactggtcatgctaggtctaggatcctctacgcacaacgcctgctcgcgctcctccgtagtggttgccaagaccaagtccgcctgtctatctatcatcactcaaattagcactacgc

SEQ ID NO: 712102 - DNA, 988 bp, Homo sapiens
gatgcccttcgatcttcaaagctgcaggctgtgatcgaagtcatctgtctgtaatcgctgggtggatgcggcgggctcctgtggaatctgtgttggatccgagctagggcgctggcacatggttgcgaagactgcgcagcagactgtagccatccgagggcaggcagacaagaatcatcatcaactgaaatccgactgaaggagttttccacgggaggcccggtgtgcgagatgtggtaacgaagtacagcaacttcgtcagattacccttgtacttgaatggaaggcggatgaacaccttgacaggccatctggatgatggaccccacaggatgtccgtgagtggcaaacatgaggagttctaccgctacgtcgcgcaggctcacagacaatgcccgctacaccctgcaactataagacggacgcaccgcatcaacatccggcagatcttctacgtgcccgacatgaaaaccgtccatgttagatgtgagacgggagctgggctccagcgttgactgtacagccgcacaaggtcctcaatccaggacccaaggccacggacattcatgcaccaagtggatggcgcttcatcgaggtgtggtggacagtgaggacattccctgaactcagcgagagctgtgcggacaggcacaccttcagggaaactccgggacgtttcaacaccatgcagggtgaatcaagattctcaactgcccagcagtaaacaacgatgctgatacgtacacaaacactaccggaagactaccgcccgtacataaacaggcgaatgacagccgcaacacatgcacgcaggagcaacacagcacaccgacatccctggtacagcaccaagaacactaacaccacctatcaaaccaacctaacggtcaaatgactgtactccccttcggttcacacttcataccaccacacacacgctacgcaccgcaccctcgcacagaccctcacccctgcccacgataaaccc

SEQ ID NO: 712103 - DNA, 365 bp, Homo sapiens
tttagcaatgtgcaacccagcaggacccccaaataagtaccaatgcatctgagagactgagaaacagagatctagaccattttacaagacacggatctctacttagccccaaacagaaccatcagcacttccaaaccccatgacagtaatcctctaacaaatagcaggcctggtttcccaagccaatatcctaaatagggagcaagcagacttcagacatggtaagtctacagcccatcatagttattgtgcactctctaataccaggtctcctgatgtcctattctagccctttctacaggataagaaatagcatcagcaggactatccaacaagacatattagatttggccttcttccctgac

SEQ ID NO: 712104 - DNA, 497 bp, Homo sapiens
  misc_feature (433)..(433): n is a, c, g, or t
  misc_feature (488)..(488): n is a, c, g, or t
aagccgggagcgagcccaggcggcagtcttgattcccttttggccagcagtttttaggtctgtcagtactgcactgcaagaatggcagattttgggatctctgctggccagtttgtggcagtgggtctgggataagtcatccccagtgggagggctctggaaaggtctgggtgggataaggcttcaaggcggttaaccgggcaatgtaggggccggcggtggtctggtgggaaaacatcaaggcaggctggttggcaatggtttaggtcccagggaaggcaccactctggcacaggtggctggaggattttgggctggaaatcggcccgggatccttcgggcctgggtgggatggtctttttctggaagggaggccaggtaggaggacaggccggtaggataacaaataggcaaaaggtggaaggacaggcantctaaaggctggtggtttcaggcccctggaactcttttctggggtcttggtgggnaggtgaaag

SEQ ID NO: 712105 - DNA, 353 bp, Homo sapiens
cgtattctggtgtactcgataggtcagctaccattggtggcccattgattttgatggtaacgggagggatcgttgacctcgatctgttatgtaaatggatgcgtagggatgggtgggcgatgaggactaggatgatggcgggcaggatagttcagatggtttctatttcctgcagcgctctgagatgttagtattcagttagttctcgctcgtgcaggtggaaggaaaagggcatacaggcactggcaagcagataaggccaatgcattatgagggcgtgatcatgaacggtgataagctcttctatgataggggaggtagcgtcttgtagacctacttgcgctgcctgtgca

SEQ ID NO: 712106 - DNA, 977 bp, Homo sapiens
tcaggtgtcattagctgaatctttagcttcaccaggcatgtacttcagtgtagagttggatgctgtgccaccaatagatgcaggaagtagtataatacagttaagggatgactctgagtgatggacgacctatgcaacatcccttccgagtatggcgcaggaatcatacgggcgtaactaaagtacacgcatcaaatactcgtcagtagtacaagtaccggtctcacttgtagatgactgtgtccgatgttgtcgaaaacatgacaggatacggagctccacttgttagctctaaacctagatgggtaaacttaggatgaagctcgttcaatatgaagctctactgagagtggacaagcaattatatcgggctgcctataaatgagctaaaaaaactcaccagtgaggccagtgtacgttgatatgacattagttatcatgagaagtctggtagtatggatctccgattccgtatggggtaggcatattacctatctctcgtttctccatgaagctggtgatggaagaggacgcctgtcctagacagccctcaaatggttttccgctctatgttcaaagcctacagactcttctctattgcttggcattctttcaatcattttcaattcatcaactccccttttcaattgaactcaatttactgggggttcagaatctggatccttctatgcttgagccttaatctcctgcgttttttcattcaaaattcaggcaattggtcttaatcaagttttgagtggaaatttcttacctaaattggtgtggacatgttcatggatgagactcaatttagtgtccgtaaaacaatattaggaagcagccggactcaacacagagaggaggagagtttttagaaaaaagttgggaacaaaagtattatgtttcacacaaaggatataggagaaattgggtctagttaatgagaaataaaaggggcgagggtaaaaaattgcatt

SEQ ID NO: 712107 - DNA, 225 bp, Homo sapiens
gtaccccgtctactacgcggctcgatctaactacgcggctcaacttaaagtcactggctgcattaacccctagaaagagagtcagcctgtcctttgaagcttcgaaaccaggtattgacttctccactccagctatgaaagtcctagatggcatcttcctccaaaagaagactgttttgtctccattaaaagtctgttgttttttgtagccgcgtagtcagatcg

SEQ ID NO: 712108 - DNA, 102 bp, Homo sapiens
tagattagtcggtaccagtatactgatatattcgcatagtttctcgtgtatatgcatattgtccaatataaagagaatgatagcattgaatgactcggggat

SEQ ID NO: 712109 - DNA, 320 bp, Homo sapiens
acatcggctgaaggcaattttattcaatagttttattaattgtgtgcatgaaataaagtttgtgttaaatacttatgtgtggaattttccacttggtggtgtcatgtcagcatttaaaaagttttgaattttggagcattttggatttggggttttcagataagggatacccaacttgtactactctactttctgtctctgtagatttcccagttttagacatttcctatgactggagacctttgatgtgtggtcttttgtgactggcttctttaactttcctggtagaataaagtccatcaaagtgtttaaaaaaaaaa

SEQ ID NO: 712110 - DNA, 145 bp, Homo sapiens
actctagaggatcttggcaacaaaaaacgcacatccccatgtcacaagtgacaatgcttcgcgaacaaaccctcggatcaggctcaccagagccgaaaatccaatcaccgctataatgacgtaatcaatccagaccatgaactat

SEQ ID NO: 712111 - DNA, 734 bp, Homo sapiens
cacctggagacctttgcgagcagaaacgggagacctgtgcagatggtgagtgcagcaggctgcctatcaagaatagcctatccaacatccagtggcttcgaagagatgagttctgatggactgggctcccgcagtcatcaatgcaagagatggtcggaaaaggagaattgtcacctggagcagtcgagcaggttaaggttgaggagccttcgagaccatcagtgtgctggcagaactctgtgtctgagcggccaccctactcttacatggcctatgatacaattcggcatcaacagcactgagaggaagacgcatgactttgaaagacactctatacgtggcatagaggaccatatttggcctactttaagcacattgccaagccaggctggaagaactccatccgggcacaaactttccctgcgacgacatgtttgtccgggagacgtcttgccaattggcaaggtctccgttcttggaccatttcatccccaggtgccaaccgctacttggacattgtgaccaggtgttttaagccactggactccagggatctccacaattgccctgagcacttggaatcacacgtcagtaaacgaccgaatccatgagctccgtccggtaacatgaccatcatgaatgcgaatctccccctgggctgcacggaggaaagatgaagccactgctatcacgggtccagctcatacctggtacctatccagttcccggtgaac

SEQ ID NO: 712112 - DNA, 332 bp, Homo sapiens
cgtcgatactcagatcccacaaaacgacggcccgtgagggagcgttgaacatcgtcgagcgatgcccgtccagggagggatggccgagctcgattctccagaaggtagctggtgacacgagtgttgagcccacccaactagggtgacggaaatttctggggttccggcttacatccccaatatcgggtgcattcgtcgacaaggtcatttcgagagcttgcgcgttggccatgtacgcataaatgagaagcgccggcgaccagcgaaagaatttggacatcgtgaaatctctacagttgggattagcttatctgagtatcgacgtaccgact

SEQ ID NO: 712113 - DNA, 406 bp, Homo sapiens
tgtcacccaggctggagtgcagtggtgcaatttgagctcactgcaacttccgcctccctgattcaagtaattctcctgtctcagcctcctgagtagctgggactacaggcgcaagccaccacgcccggctaatttttgtatttttagtacagatgaggtttcaccatatgggtcaagctggtctcgaactcctgacctcaggtgatctgcccgtcttagcctcccaacgtgctgggattacaggctcaagccactgtgcctgggcagcctgctcttaaaaattaacttaatcggtactatcacttaaaaaagtaaacccttatagacatcatctaagtttaagaagttaccaccgtgtagaccttttgagtcttatatccatttgttgagcaaatgcccggtaacg

SEQ ID NO: 712114 - DNA, 111 bp, Homo sapiens
  misc_feature (30)..(30): n is a, c, g, or t
  misc_feature (71)..(71): n is a, c, g, or t
gatctataccctgccgaactgccgtgtgtntccccaacccttgacccaatgacaccaaacacagtgtgggntcggtattatatatttttttctcattaaaggtttaaaagc

SEQ ID NO: 712115 - DNA, 151 bp, Homo sapiens
tactgaacatgaccagtcccagtccctactaagagataattatacaacaaatatagtcacttatacttttatcatactggaatgaccctattgtacctggtacgatcccaacacagtgatgcagtgcttgagtgtaatttttttaaataca

SEQ ID NO: 712116 - DNA, 751 bp, Homo sapiens
  misc_feature (623)..(623): n is a, c, g, or t
accatatatcatagcctgttccctgggtgataacccccttcccacgttatttcgtacaccccccaagatatcatattctttcctaccaacacaacaccaatttgtggtcccaaccaactgcttgtgtatagtgttgctgtcttcacacatagagcagtgccctccattctagaagaataatatctttttgtagagacccctgtctcctctacatagtctcaccttttctacgatacaatactttctgtttggtgagacacacacccccccccgcgcgcccactttgtctctctctggtctgcttgaatgactaacaccgcacgacgagtgtggtgtgtataagcggtgtgcgtcgtgtctcccgcacacatacgtagttatctatatgtgtcgccgcagtgcgaagcacatagcagagtgatttatgtataagtatgttgcgcaacaacttatatacatgtggcgattttgggcgccccacgccgatagatagtgaaagcatgtgctgcgtggccctgcccaagaataggagacataggataggcgccccgctcctccgttggtaatatagcgtttcgtagtacaatatgtagtcgcgtagttagtacacacgacgatttcanacgccgggcgaagaatctccgctctcggtctattacgtgattcttttcggcgacgttgtctcgggcggagcgccacctgcagatattcaacaaactaaggagaaacaacagcccaacaatatacaaca

SEQ ID NO: 712117 - DNA, 120 bp, Homo sapiens
caaatgcagacgtcgggcttatctacggaaccccaattcgttgtcatagccgtgtcctgagtcctggactatagtagcaaaaccagtcaaaatcctaccaaattaaaaagaagtccctca

SEQ ID NO: 712118 - DNA, 733 bp, Homo sapiens
ggggcccatgtccaaagggtctctcagaagtttcggggggacgggggtgggcaccaaaataacccccaggggagcacgggcttcccgtcgggggttttccttcccctccggggcaaaagggccggggttgcccccggatggttgcccccccgctcccccgcgagccagttttttggtaagggaaaaatttatcccccttttggtaaaaagggggagagggcccccaatttcttgagtttggggaacccccccctggtataaggtttccgggcccgccccaggggggtgagggttttccaaccatccccccttggggggcttttgtgtttttaaaataaacccccccgtttgggggggggttttccaacccggggccaaaaagggtgtggggggtggccaggtcccccagtttcccccaaagggtcagggggggaaatgaaaattttccccaaacccccccccccccctttttatccggggggggaggacgggttcaaaaccgtttgtttccattggcccctttagttttgggggaaaagacggggttaataacccccgccctctgacccccccccaagggaaaggggaattttttggggccccccttgggttttttttttggggggggccggttttaggtttttgttttttaaacccggccttttttaggggacccccctgcccccaaatttgtccccgaatttttggccccccttaaaaagttttatgggga

SEQ ID NO: 712119 - DNA, 337 bp, Homo sapiens
  misc_feature (287)..(287): n is a, c, g, or t
ggacccgatactgcagttctttctggacctttacgcacccccaagcgtgcagctctgtcccagactttactgtgtgtgagagaggttctgggttggggcccacaccctctatagaagcttgtggccagggatgaaccttggccaaccgcggtgggccccaagcctggttcccaagagctttggaggcttggaatcctgggactggcccaagtggctggttccctgaggaccaactgggggccaagccttgtgcagaactgtgtctgtcagacttccccaagggtggngggtatggggaccatatattccctgtgattaataccttagagggaatatc

SEQ ID NO: 712120 - DNA, 254 bp, Homo sapiens
accgcaaatgacccccccaaatgaattcccaaataaatcctctcggcgccctcgatgctcttagtgagtgtccgcggcccggaagcggtttactttgaaaaaattagagtgtcaaagcaggcccgagcgcgctgataccgcagctaggaataatggaataggaccgcggttctatttggttggttttcggaactgaggccatgattaagagggacggccgggggaaattcgtatggcgccgtagagggtgaaat

SEQ ID NO: 712121 - DNA, 467 bp, Homo sapiens
tctagaggacctcagtgctactccacaaacagggaaaacaaaaccagtttttggtttttttttttctcatcaacgttataaggaaacaacttggaacatggaacggacagcgttggaggacctcctttacgcggggtaaagtctcagtttccaagaacctatcgatagttaagtgagaactcaaggggaggagtgagtcatagggtgggaagtcaggaagtatgatgtagatgaggatgggttaagaatttctaatccaaatgagcggcgggatcagacatgggtctttatcatgggagcatctgagtctacacaaagttcacttaaaatagtgggtcttacttgggaacatgtgcctgagtaagcctcggtgagacagtttgggtggtatttggtttctctggcatattagggttaagtatagtttaacggttgggggaggtagcactggggataccgaagctcga

SEQ ID NO: 712122 - DNA, 138 bp, Homo sapiens
ctcaacgctttatactatctttatcatacccgtgtctcccttgcgtgtattgcgtgtcacaagttcacacgtttgaggaacgaatacttcaaacatagtctgtaccaagaggcttaactcttttctttttcctctcta

SEQ ID NO: 712123 - DNA, 422 bp, Homo sapiens
attcggcacgcggagagagagagagagagagagagagagagagagagagagagagagagagagagagagagagagagagagtagagagagagtagagacagatagtgcgctcgtttgattgagttagagcgcttccttgtcctccttgtagaccatccgtctcctgatccttcccttcttccctcctcattcgtccccatttcctctatctttccttttctgtctgtctccccctttttgtgcctcttgttcttgcccttttctttcatacattatcttcttctcacactcttcgccatacctcactctacttttttttcccggtcttccctcacttccctttccatagcccctgagcttctcttcttttcttcatttctcttgctcccctttattcttcccccgtttttttttgtccttcg

SEQ ID NO: 712124 - DNA, 177 bp, Homo sapiens
aagaattcggcacgaggaaaaccaccccagagccagtgattcattgtagaagagaaaaaggaaccaatttttttgatattagcgtctggtttgtgcgacgtcattttgtgctttctgccatttgcaatcgatcagccatgaagtttctaatactcatcctcggctttgtcgcggccg

SEQ ID NO: 712125 - DNA, 391 bp, Homo sapiens
gaccccgtaaatggaccatgccctgagccttacctctcactcacactataattcctctcttgagtcatctcatctattaccttgggcttccatccataaatacctatgatcctccaattatctccaacccagacctcacctctggctttctaattcagacataaatttgctggaagtcgacatttggatgtctacacagcactccttaaacagtgtccaaaccaaaaatcttgatccctgcatacccaaaacccattcttctacccacacttccccagctcagtaaatattcactatccagccaattatttcctcctttcctccagagcccgaaagtctgggagtcatgtcgcctatgctggaggaaaggaagaaatgagatgtaggaagg

SEQ ID NO: 712126 - DNA, 164 bp, Homo sapiens
ctgccttggtctcccgaagtgctgggattacaggtataagccatagcacccagaacaattggatgacatataaaaccatcactactatcaagaaaatgaacatattcatcatctctagaagttttttcatgtcctcttttaatcttttccctcacatcttaccc

SEQ ID NO: 712127 - DNA, 118 bp, Homo sapiens
ttaaagacaggcaaccaaccataatttgctttatcccgaaagtaccatgttaacatccaaacccatactggatcttggacatggacttctgaaaaaaattggcagtgtgtgcatgtta

SEQ ID NO: 712128 - DNA, 153 bp, Homo sapiens
atctgctgacacaccatctcatctgcttacaccagcacctcatctgctgacaacaccacctcatgtgcgcaggcaggcagagcgagcgactgggagctagcagacatggggcagagcacggatccgattgagccccaccgctccatgttccca

SEQ ID NO: 712129 - DNA, 333 bp, Homo sapiens
gcatgtgtgttgcagctgaatttaacaatttctaagcctaaaacttgacatttcagatttaagtcggtaaagcactgatttaaactggattttaactggatgacacttctgatttaataagtgtactgactggataaaatgccagtgcattcaattaacaagcacgtttaacaggcatgccctatatcattagttaaaagtgacagcaattgaattcaggtaccatttcaaaatggttgctatacccactctctttatcctccacattacggtctatctagaaatggttgcttatcccttttccttgtgtacagagcctgcggaaataagctt

SEQ ID NO: 712130 - DNA, 124 bp, Homo sapiens
atgtggcgccgggtccatcatccacaagcttaacatgaacaagatattcgaaaaatgagtgaggactactcaaacccatagctgcttcacttcaacctccctcaccaggggtcagccgagcatg

SEQ ID NO: 712131 - DNA, 299 bp, Homo sapiens
gttcccccggtttttttaaattttggggaaaaaacccccccaatagggcctttaacccgggcttttggggggaaccccccccgggggtttcccccaataaaagcgggggggggtttgcccccccccccaaattttgggggggccccccttgccccccccggtttccccccggggttattttcctgggggggggggttttccccccggccccttttaaaatttttttccccgtttggggggtacccaatggggttcccttttggcccctttttttttttttaaaaaaagattttttctta

SEQ ID NO: 712132 - DNA, 199 bp, Homo sapiens
atgtaatcagctcggtaccgcggtatgtcttacgaacagctgtaatattaataattttgatttgagaagccttcgcttcgaagcgaaaagtcctaattagtagaagaaccctccataaacctggagtgactatatgtgatgcctccctcaccctaccactacattcgaacgaacccggtaagacataactcgcggggga

SEQ ID NO: 712133 - DNA, 347 bp, Homo sapiens
  misc_feature (2)..(2): n is a, c, g, or t
  misc_feature (4)..(4): n is a, c, g, or t
  misc_feature (31)..(31): n is a, c, g, or t
  misc_feature (83)..(83): n is a, c, g, or t
  misc_feature (100)..(100): n is a, c, g, or t
  misc_feature (131)..(131): n is a, c, g, or t
  misc_feature (135)..(135): n is a, c, g, or t
  misc_feature (159)..(159): n is a, c, g, or t
  misc_feature (317)..(317): n is a, c, g, or t
gntntgaatattttatttaaaaaaaaaatanaaaaagataagatagaaacaaaaatcccagccatcccgccctaaatacttgntgtgttttttggatatntgtacaaaagcgtttaatgttttaatacatntttntgagcctttttaagaattttaatntattatttacttattttaagtttgtggtattggaagatatgaaatttatttttgtaaagaaaatgttttaattgaaaaataattaaaaatttgattatacatatttactattaaatttataaataatgttaatttatttttaaataattaaaaaagtntaattgaatgttaagtgtaatgaataaaga

SEQ ID NO: 712134 - DNA, 193 bp, Homo sapiens
tgtattgagcgagatgcaccactgcattctagcctggcgaccaactgcattccagcccgggcaacagagtgagactctgtcccaaaaaaaaaaaaggttaactttcaaaagggtatcgccaataattggtaaaataaaggctttaagaacaagcacaattaactggggcaacaggaggtaaaagtttccagca

SEQ ID NO: 712135 - DNA, 261 bp, Homo sapiens
ctgaactatgtggggagaggcaaatcgcacgagtcctaggaatccctgtatgttcctgctgggtatgacatgaatgcaagctctgtccaggctatttcacagggttgtgttgggagcaagcaaccttgagggttgaggtaatctttctctctggaaaagagtaggcttgcttccacttactataaaaatagtaagataccctaagttcagtgttcctcttctataacgtaatctactttatgcacatagttcagcgtctga

SEQ ID NO: 712136 - DNA, 323 bp, Homo sapiens
  misc_feature (4)..(4): n is a, c, g, or t
  misc_feature (25)..(25): n is a, c, g, or t
  misc_feature (64)..(64): n is a, c, g, or t
  misc_feature (323)..(323): n is a, c, g, or t
caanaataaaacatgaagaatcttntcatacctatgtctacatatctgtcttctggggtttttntgtttggttggttggttggtttttcttgagacagggtttcactctgttgaccaggctggagtgcagtggcatcatcacggtttactgccaccttgatctcccaggctcatgcgatcttccttcctcagcctcccaagtagctgggacttacaggcacatgccatcatgcctggttgatctgtaatcccagcactttgggaggccgaggcaggtggatcacgaggtcaggagttggagaccagcctgaccaacatggtgn

SEQ ID NO: 712137 - DNA, 111 bp, Homo sapiens
ttagaaagccaacacagaggtccttgaactgtttactgatccccaaatctgcactacgaatgcagctagcacatgccaggcatggacactataccctgacagacatgctct

SEQ ID NO: 712138 - DNA, 457 bp, Homo sapiens
  misc_feature (338)..(338): n is a, c, g, or t
  misc_feature (388)..(388): n is a, c, g, or t
gggaattgaattggaagattactgaagcacagtagcattccctgacttcctgcaacgcggagaatagttaaaaagaagatgccactggaagtaaaatttcaactcttttgtttttgaaacagtatagcttttcataatgtcaactaagcaataacttggctttttggtgtgttggctaccctactattggccataaaataggcactctggtacttcagttgatgaatgtttttgctaaagttggactgtaccgaatttcattcttattttgtacgctaattggtgtaaaataaggaagtaattgttggaatgcatactgtattcttaggttttattangtacatttggttgcttaaacttaagaataagagtaaacaacaactgaatnataattgaactatctttctttttcgtttttttgagacaggggtctctctctgtcacccaggctggagtg

SEQ ID NO: 712139 - DNA, 379 bp, Homo sapiens
  misc_feature (38)..(38): n is a, c, g, or t
  misc_feature (59)..(59): n is a, c, g, or t
  misc_feature (125)..(125): n is a, c, g, or t
  misc_feature (134)..(134): n is a, c, g, or t
  misc_feature (142)..(142): n is a, c, g, or t
  misc_feature (164)..(164): n is a, c, g, or t
  misc_feature (169)..(169): n is a, c, g, or t
  misc_feature (178)..(178): n is a, c, g, or t
  misc_feature (183)..(183): n is a, c, g, or t
  misc_feature (195)..(195): n is a, c, g, or t
  misc_feature (251)..(251): n is a, c, g, or t
  misc_feature (283)..(283): n is a, c, g, or t
  misc_feature (293)..(293): n is a, c, g, or t
  misc_feature (321)..(321): n is a, c, g, or t
  misc_feature (323)..(323): n is a, c, g, or t
  misc_feature (367)..(367): n is a, c, g, or t
  misc_feature (374)..(374): n is a, c, g, or t
gaaagtgaagtctgcctacctatgcctcaaactctatnatgctgctctagtaggtcctntcatctgtatttgtaattaataggtcgaccacgctagtgaacatttcagcaccatagttattgaantggaatccnttaagaancaaatggctggatattcaatgncaggngaggtatantttgngacaccaatttntggaaaaaaaaacctttttaataatatcttcacattagctttacaatagtagttgnactccgcttaaaatcgtatgcagtctgggcanatcaaatatntgatgattttttttaagaagtgaaattnangccctagtcccaactcgggggagcactatgaagaaatgattcancactgcncattt

SEQ ID NO: 712140 - DNA, 846 bp, Homo sapiens
gggcggcggtggaagtggccggcgagcccggtccccgacggcaccatgcttcccttgtcactgaatgaagaccggctcagaatcatccccatgttggtggacggctgaacaaatgggtgagacgtacaatggatcacctggtgagctgcgacaactggatgaacattaacctgcgagaagtcatctgcacttgtccaagggacgagtggacaagttctggtctggatgcccgatgtgctacatccgcggacagcaccgatcaagtacctgcgtccatccccgacgagatcatcgatcatggtcaaggaggaggtggtggccaaaggcatgtggctgtggagagcctgtgagcagccatgattgtcacgagaaatgccgcgggatgggcgcggctggtcagaagctgtgttcggtggcacgcggccagcaggtgggatccccgggcactcatgctagcagggcaaggtcagaaaagaagccttggacgagtacaagtgcgggtcaaaacagtgaagacgcccatgccaagactcggcatgcgtgcgtcccccatccatgctagaggtggcgcattccgcgtcctactagtactcgccaggggattctggtcgagcacgggacgcagggatcgttgctccgagaggtggcatgccaccattcgatgtccttgatgataccactcacgctttgattaagggttgtacagcccacattttgtgtctttggactaaaatagcagcgagaaattcctcccgggtctagacaatgtccacttaggctggtgtatggggttgtagttgcaacacgggccagtcgccaaaagctgggatggattccttaaaagat

SEQ ID NO: 712141 - DNA, 317 bp, Homo sapiens
tctagaggctccccctggctgatctcaatactcacttatgtaggaattaataaatagcaggtgtaaacggacccaggcttcatgacgcaggcttttcatgtatgcaggatgactcaatgttaaagcatttaaatggaaaccaggtgagttttaaagcccgagaaaccacacataatcttgagtagagatgagttggctgtactgacgctgcacttggtaaacagatgaccagtattttactggtgggtgtgattttttaaaatagtactttatatataattaaaattaggtttaaatatccaaaatatgagacccgc

SEQ ID NO: 712142 - DNA, 141 bp, Homo sapiens
tagaaaaatcctctccttacgagtgcggcttcgaccctatgtgggccgtccgcgtccctttctccatacacttcttcttagtagctattaccttattattatttgatctaaaaattgccctacttttacccctaccatgag

SEQ ID NO: 712143 - DNA, 422 bp, Homo sapiens
gggcacactgggactgggtgtatgatcatcgtacttcttgggccgcagcggcgtatggctgtgctggagtttctgctaccatctacttaaagtccagaagcatgatggccacgatgagattattacacgtgtgcctttgaagaagatggtggagagaatacggaagttccagattctcaatgatgagctcatcaccatcctggatgcgtacctgaagtcaggcggacggggagggggcgctagtggagcatgtgcgctgcttccagccgtccatccaccagtccctcgccagcagctgagggcacgcgctgcactccgtaacacgaacatggcatgcctttctctccgaaaactatttcagagagatttgttagggactatgttgtcagtatctctgtccctgttaaaggagggatgagcat

SEQ ID NO: 712144 - DNA, 168 bp, Homo sapiens
  misc_feature (64)..(64): n is a, c, g, or t
cactatactcccttcctccgcccacacacaccccgtgaaggccacatcagtgcccagttcacanatatgtgcattgtatgtgttggccatcttcacaccgaaagccagaggccaggtagcaagtaggagtcaggagtccacccaggtatgccaggcacactcgctgag

SEQ ID NO: 712145 - DNA, 108 bp, Homo sapiens
acatcagacagtcgatgtcacggcgtacagtacacgtgtcagctatacctacaaaaggtcactaaagtggtaggatggtctgtttaaaatattcataactgtacattg

SEQ ID NO: 712146 - DNA, 954 bp, Homo sapiens
agcagcagtgaatgtcaaatcacagtcaacaatgttaagattgtcatcctactttttcaccaaaacaacatatcacacttggcaattgttttttacaaggctcaatcacaggaagtgcaaggtgtgccaatacaggtcagccaacgtaaaacgccagttcgcgtttttagtgtcatgttcagagatccatacaagttttccaactcacgggcattttggtatgatgcgctgacattcttcgtggcattcatacagaggatcatgcccttagcaagtactttcagtacacgtctttacaattcacgagattcccaaatgcctttattcccccctcaatcttgacacactgacgatgaggtctaactgtgtaacgcaaatatttatgttaactatttctataaaacttcacttgcagtgcctactgaggccctttcaagcacccgctaacattcctttccatcattcttttcacattgcacattaaaacataattgtgcaatgttccttgatgatgtaccccagaaagctgcattcaaactcaaactctgtgggaatggcagtgactcgacacaaaacttgtattccggattcagatcctcatacccctgaactggtgtgaaacaagttactctccttctacgtgaccgcgcttggccacacaagatataccacctggcatgaacactatgaccccagcattccttaacacgggtaactcccaagcagtcttttgacccgcggatcacacctacaatttcgtggcccaaccccaaacgcacgcacaacgcacagaaggggacagacagagaacacagcaagcggccagtagcacaaggtcaacgcaaacaacaaagcgaatgcacaacgtaaacggcaaacggaacaacgaaggaacaagcagagggcacacgcaccgccacagacgagacaatcacagacacgacagtcccacac

SEQ ID NO: 712147 - DNA, 761 bp, Homo sapiens
tgcattgagacttccttgatcgctaaattcatatcaacgcccaggggtgggacgaatccagatgcgttgtctgatactaagatcgccatgattgtgtagggttctgagggttgcattaccattggaatcgtatcaaacctagggatgatccagggctgatgcatcgatagttcaaagatttactgcccccgacacttgaattttacaattggatacagagtcacagtgttttaataacttccgaagggagaagcactattagaggaaaaaccaaaaagattgccattcacagaagttgggcatttgaaccacctaaaacgagaaacgacaagccccaactatgccgttgcattgcatacttctcaggggaaagctccttcgtgttaggtgaaccttaaaaggcaaccccaaaggtctcctcgaacctccaaaaacgaaccaattgttttccagggattttgcccaagtttctttttgccttcacaacgttttaatttttgacactttactgggtaacacacagaaagatttccgggttttgcacctgaaacaaaacagctaatttgggcgctaacacaggggtaacccttcggcaaaaattccctgagacctaggcctataacggccatggcacacaggggcacccacaacaggaaatgaaaaccggcttttaacacatttgactgcacaggcctcgaaattccccttttaatgtacttgaaacacgcttagaaggggacaaagcggacaaggcttcttaa

SEQ ID NO: 712148 - DNA, 491 bp, Homo sapiens
atgtagtctcgccatcaaataagacttacactcgtatgatgcttctatcagtttgcctttaacagaaacttccaaaaggtaagagtttgtgtgatgggggagagggtgaaggaggtcaggccccactccttcctgatcgttcacagctcatcggaataaggcatggctcagatcggccacagggcggtaccttgtgcccagggattttgccccaagtcctcatttaaaagcataaggccggacgcatctcaaaacagagggctgcattcgaagagacccttgctgccttagtcccgatagggtatttgaccccgatatattttagcattctaattctctccccctatctattgactttgacaattactcaggtttgagaaaaaggaaaaaaaacagccaccgtttcttcctgccagcaggggtgtgatgtaccagtttgtccatcttgagatggtgaggctgtcagtgtatggggcagcttccggcgggat

SEQ ID NO: 712149 - DNA, 186 bp, Homo sapiens
agcggggaacattcacttgatgtgtggcagtcacaggccctgttggagtccctgggcacatcaggcactcttgcttcccaggagcctgtctacatctagcactggaagactgccttccctgcacaatgcgcctgcatgcagctcagtggcccacgcagcctgcgtgctgcgcacgtgactgttcca

SEQ ID NO: 712150 - DNA, 388 bp, Homo sapiens
cagcaaagctatgtgatttagagtaattttgtaaaatttactctctatattggcttacatagtattgactaatgcatagccttttaaagagagtacaggttttttaggcctgaagcttcactctggattctgtctttgggaaaatgtgtataaggaatattgatgtttcctttaaaacattttcagtctgttgtagagtgatggctgtgtaccaaaatgtattattgctgcgggcttagcactttactaagtcctgaaaatattttttttaaaacttggttgtgcgtgatttaattctgtattaacactgtatattcagtagttatactttaatgttgcaaaatagcttataaacttgcttattaaactaacaaaaacataaaaaaaa

SEQ ID NO: 712151 - DNA, 903 bp, Homo sapiens
  misc_feature (611)..(611): n is a, c, g, or t
gcactgtctgaatcctgatgactcgtgcatctcaatgattgacccgtcgggtcctgcctgtacttgtagctcgttgagtgtcctagatctggaggatagctctcaatcccaaattggtgccacccgtagataccgtgctgcctctatggaccttacacccatgcgtgtgatgcagaaatcattggtcgatgctggtgtttaatactcgatgtagtgtccatttgcgaaccacgcacgtagataccagtaagacagtattcaggaaatcgcttgcggacgttcttttatttcatccccaaaaattgagagtagagacccggattcttatgctcagcataggtatgccaaatccgagggtgaggcatggtgtctataatgcctcggacctaccctgtgctagtccatgccttgagatatctgggaggcttgcgtccggtctccactgtggaggagtcggcgagtgcctttctggatcaccattggctgactctcctcagcgtgctgagacctgggatctcataatgctctgactctgtgacacgttggacgagtgacgcattgacagctcgggcgtctggcctggattgtttgctcgacatgcgctgagtgangaggctactgttgcactgtgggaccaggttcgggacgacatgcgtcgtccatctgattcgcggctatggctcggtgctacactattgttctctgatgtaccggattgcgaacgggcagggcttagttgcttgtcgcacttggcagccattgaaggcttatgaagtggacagcgtactcccctgagggaagcgaggtttccctctttcagggttccaggccttgtggttctgtcacggaatagttgggccttgcttggccggtttgcttggttgcgaggttgtgtattcgtcg

SEQ ID NO: 712152 - DNA, 208 bp, Homo sapiens
  misc_feature (1)..(1): n is a, c, g, or t
  misc_feature (11)..(11): n is a, c, g, or t
  misc_feature (43)..(43): n is a, c, g, or t
  misc_feature (191)..(191): n is a, c, g, or t
  misc_feature (197)..(197): n is a, c, g, or t
nattcggcacnggggggcttggggctctgtacgtgttaattcncgccactccagcagccctgagtgggaggagccattatcccccttctttctgtagatggggaaactgaggcaggcttgccaatggtgaagtggccagtcggacacagggccagattgaaacctgcagcctgggctcccggctacaacancgccancttccacaggc

SEQ ID NO: 712153 - DNA, 492 bp, Homo sapiens
  misc_feature (6)..(6): n is a, c, g, or t
ccgtgntggccatggctggtctcaaactcctgacctcaggtgatccacccacctcggctcccaaagtgctgggattacaggtgtgagccactgcacccagcccagaaatttatcttacatgcttattcgtagaacaaggaaaacaaatatggtccagccacaatatccccatcgtagtaaccaagtcaacatattagtatagtgatctagttccttcctcctgagcattttgttcatagttgagtaaacataattttcattcctccttttgtaagtttaaattactttatatttctatacaaaatagagatggggtttcaatatgttgaccaggctgggtctcgaactcctgggctcaagtgaatccttgctcctcagactccgaaagtgctgtgattacaggcgtgagccactgggtcaagccattcctcctttttaactctcttgttcaatattcagacttgggcatgatgagaccccggctccacatgt

SEQ ID NO: 712154 - DNA, 218 bp, Homo sapiens
cagtccatggactccatcatcgcggtagtgaacagagctccagcgactcacagctcaaggagaatcaggcagcaatgatgcccacgcatgggcgatggtgggctgggaagacagctcccatctcacggttgaggggcttggtccgaccctcatgctgcgcatgggaggtgtatctctgctcctctccagaaggcaccaccagaggcgcccacttctgg

SEQ ID NO: 712155 - DNA, 516 bp, Homo sapiens
ttttttttattcagggaagtgcttttatcagcttctttctaacacagaccattttcctgcagtaacatgaaaggcactgcacgcgcattttcatagcgggggatgttgagggaagtctagactcagacagtactgatatgggctgcgtgggtgaggtggtggataagcagtctgggattcctcagagaaggatgcaaaacagagggcaaaggacactgaaagcaaacttgagacaattaaaactccaagatttcatcaaggggctggccttggttttggctactccacaggtgctgggtgacgggtgcggttctccccctggaccatctctctgggcttagcagcttggagtgctgcgtggggtgttgagattcacgcagtcacatccctccttctcagaatgtgtagcacccactcaggaagccagcatgacagggccaggtgcatttgccacctgggcagaggagaccttaactgcaccttccttctttccccacttgagggatctcctcacag

SEQ ID NO: 712156 - DNA, 799 bp, Homo sapiens
  misc_feature (33)..(33): n is a, c, g, or t
  misc_feature (612)..(612): n is a, c, g, or t
  misc_feature (614)..(614): n is a, c, g, or t
  misc_feature (619)..(620): n is a, c, g, or t
  misc_feature (688)..(688): n is a, c, g, or t
agcgggttgttattctgcctgccatgggcagcngggtacagctgctcatcatactggactaatcaggtcaaggacatggggcttcattctaagtaactcagctgtcatcttcattataaaaccacacattttcctctgactctgggcaatgacctgcgtatataagctgttagtcataagggctggatggggcagcatctcaatcatatagggcacaggacagacctcagtatcaccagcaagaatccattacagttcaacatgtagtacctccagaccttttccctgtgcccctggactccaaggtctatcccaccctcagctgtccatcttctagagcaggcggtctagcctccccaaaccagaagaacttcctttttatattcaaccacctgatggatgtccctgatcagttccctcagctgcagagcacaagaaggaccttcaggatccagctttctgtgatgagactgaggccaaagaagaaggaaaaaggagatgttcaggatcacgcaatgatttgtggcaaaaccccagctattaatataacacctatacaacttctagaccagtgctttttccacttgaaaggccttgttatctgagtttgtnanggtannttctgagacagagtctcactctgtcacccaggctggagtgcagtgacgcgatcttggctcactacaanctccggccctgggttcaagcgattctcctgactcagactcgctcccgagcagctgggactacaggcacaagccaacatgccaggtaattcaggatcaagggagagacgggg

SEQ ID NO: 712157 - DNA, 1114 bp, Homo sapiens
ccctggctgggctcagtggctcacccctgtaatcccagacactttgggaggccaaggcgggtcgattacttgaggtcaggagttcacgaccagcctggccaacattgtgaaaccccatctctgccaaaaatacaaaagttagccgggcgtagtggcacatgcctgtaatcccagctacccggggaggctgaggcaggagaattgcttgaactcagaaggcggaggctgcagtgagccgagatcgtgccactgcactccagcctggtcaacagagcaagactccatctcgaaaaaaaaaaaaaaaattccccacccctaccaatggtttacttcctcttcctgctcagggaccagatgggcctcacgggttgacgatggaatagaataacttgggctatgagtcaccagcccactttgtgacccagaaagaccttacccctctcggggaatcagttactcatctgtaagatgaccaaagtggcttaaatgatctcctaaatccttcaagttctctagattgcgtaaagccaagggatactccactctctaaggtgcaatgccaaccagccctggaggctgggaatctgcacgacccatccagccaccaggggtccacgaagtgcacaaacctgctgtcaggcacccaacattggacggcacaggcccagccagacagcatcactaaagagaggccagacataatccaggcagaggatccaagcccacaccggactccataaaaggtacccgattgacataatatgccagaacacaggaaagccgcacaacggcgccacggaggcccacatcttaaccctagaagtcatgacaatacagggaaaaccaaaagaacaaaggagacagaaagagcccaacaggagaccaaggcaggaggtacaccccccgaggcgccacaaaagcaattaccaccaagtggtacgcggtggcgacagggcaacacacaacgtgacaaacgagcacccgacccccctactcacatcgacacacagccccgttgtagataaaaggccatcgattcgtagcaacgacgagaacgcgcacgatacataatgcatacgggtacgacctccttacctagcacgcaccaacgcgg

SEQ ID NO: 712158 - DNA, 3815 bp, Homo sapiens
ggctcggctcctagagctgccacggccatggccagagcccgcccgccgccgccgccgtcgccgccgccggggcttctgccgctgctccctccgctgctgctgctgccgctgctgctgctgcccgccggctgccgggcgctggaagagaccctcatggacacaaaatgggtaacatctgagttggcgtggacatctcatccagaaagtgggtgggaagaggtgagtggctacgatgaggccatgaatcccatccgcacataccaggtgtgtaatgtgcgcgagtcaagccagaacaactggcttcgcacggggttcatctggcggcgggatgtgcagcgggtctacgtggagctcaagttcactgtgcgtgactgcaacagcatccccaacatccccggctcctgcaaggagaccttcaacctcttctactacgaggctgacagcgatgtggcctcagcctcctcccccttctggatggagaacccctacgtgaaagtggacaccattgcacccgatgagagcttctcgcggctggatgccggccgtgtcaacaccaaggtgcgcagctttgggccactttccaaggctggcttctacctggccttccaggaccagggcgcctgcatgtcgctcatctccgtgcgcgccttctacaagaagtgtgcatccaccaccgcaggcttcgcactcttccccgagaccctcactggggcggagcccacctcgctggtcattgctcctggcacctgcatccctaacgccgtggaggtgtcggtgccactcaagctctactgcaacggcgatggggagtggatggtgcctgtgggtgcctgcacctgtgccaccggccatgagccagctgccaaggagtcccagtgccgcccctgtccccctgggagctacaaggcgaagcagggagaggggccctgcctcccatgtccccccaacagccgtaccacctccccagccgccagcatctgcacctgccacaataacttctaccgtgcagactcggactctgcggacagtgcctgtaccaccgtgccatctccaccccgaggtgtgatctccaatgtgaatgaaacctcactgatcctcgagtggagtgagccccgggacctgggtggccgggatgacctcctgtacaatgtcatctgcaagaagtgccatggggctggaggggcctcagcctgctcacgctgtgatgacaacgtggagtttgtgcctcggcagctgggcctgacggagcgccgggtccacatcagccatctgctggcccacacgcgctacacctttgaggtgcaggcggtcaacggtgtctcgggcaagagccctctgccgcctcgttatgcggccgtgaatatcaccacaaaccaggctgccccgtctgaagtgcccacactacgcctgcacagcagctcaggcagcagcctcaccctatcctgggcacccccagagcggcccaacggagtcatcctggactacgagatgaagtactttgagaagagcgagggcatcgcctccacagtgaccagccagatgaactccgtgcagctggacgggcttcggcctgacgcccgctatgtggtccaggtccgtgcccgcacagtagctggctatgggcagtacagccgccctgccgagtttgagaccacaagtgagagaggctctggggcccagcagctccaggagcagcttcccctcatcgtgggctccgctacagctgggcttgtcttcgtggtggctgtcgtggtcatcgctatcgtctgcctcaggaagcagcgacacggctctgattcggagtacacggagaagctgcagcagtacattgctcctggaatgaaggtttatattgacccttttacctacgaggaccctaatgaggctgttcgggagtttgccaaggagatcgacgtgtcctgcgtcaagatcgaggaggtgatcggagctggggaatttggggaagtgtgccgtggtcgactgaaacagcctggccgccgagaggtgtttgtggccatcaagacgctgaaggtgggctacaccgagaggcagcggcgggacttcctaagcgaggcctccatcatgggtcagtttgatcaccccaatataatccggctcgagggcgtggtcaccaaaagtcggccagttatgatcctcactgagttcatggaaaactgcgccctggactccttcctccggctcaacgatgggcagttcacggtcatccagctggtgggcatgttgcggggcattgctgccggcatgaagtacctgtccgagatgaactatgtgcaccgcgacctggctgctcgcaacatccttgtcaacagcaacctggtctgcaaagtctcagactttggcctctcccgcttcctggaggatgacccctccgatcctacctacaccagttccctgggcgggaagatccccatccgctggactgccccagaggccatagcctatcggaagttcacttctgctagtgatgtctggagctacggaattgtcatgtgggaggtcatgagctatggagagcgaccctactgggacatgagcaaccaggatgtcatcaatgccgtggagcaggattaccggctgccaccacccatggactgtcccacagcactgcaccagctcatgctggactgctgggtgcgggaccggaacctcaggcccaaattctcccagattgtcaataccctggacaagctcatccgcaatgctgccagcctcaaggtcattgccagcgctcagtctggcatgtcacagcccctcctggaccgcacggtcccagattacacaaccttcacgacagttggtgattggctggatgccatcaagatggggcggtacaaggagagcttcgtcagtgcggggtttgcatcttttgacctggtggcccagatgacggcagaagacctgctccgtattggggtcaccctggccggccaccagaagaagatcctgagcagtatccaggacatgcggctgcagatgaaccagacgctgcctgtgcaggtctgacaccggctcccacggggaccctgaggaccgtgcagggatgccaagcagccggctggactttcggactcttggacttttggatgcctggccttaggctgtggcccagaagctggaagtttgggaaaggcccaagctgggacttctccaggcctgtgttccctccccaggaagtgcgccccaaacctcttcatattgaagatggattaggagagggggtgatgacccctccccaagcccctcagggcccagaccttcctgctctccagcaggggatccccacaacctcacacttgtctgttcttcagtgctggaggtcctggcagggtcaggctggggtaagccggggttccacagggcccagccctggcaggggtctggccccccaggtaggcggagagcagtccctccctcaggaactggaggaggggactccaggaatggggaaatgtgacaccaccatcctgaagccagcttgcacctccagtttgcacagggatttgttctgggggctgagggccctgtccccacccccgcccttggtgctgtcataaaagggcaggcaggggcaggctgaggagttgccctttgccccccagagactgactctcagagccagagatgggatgtgtgagtgtgtgtgtgtgtgtgtgcgcgcgcgcgcgcgtgtgtgtgtgcacgcactggcctgcacagagagcatgggtgagcgtgtaaaagcttggccctgtgccctacaatggggccagctgggccgacagcagaataaaggcaataagatgaaaaaaaaaaaa

SEQ ID NO: 712159 - DNA, 483 bp, Homo sapiens
  misc_feature (67)..(67): n is a, c, g, or t
tgtgatgatgaaacctgtgagggcagtgccaagagtaatattgccaaatattatgagctcacatgancctctctctccttgtttccaggaccttgggctacaccatttctagagaaactcagaacctgcaggtgccttactttgtggataaaaactttgacaaggcctacagaggagcttctctgcatgacttggagaaaacaatagagaaggattacattgattatatccagactagttgttggaaggagaaacaacaaaagtcagagctgacaaatttggcaggattatacagagatgaacgattgaaacagaaagcagagtcgctgaaacttgaaaactgtgagaaactttccaaactcattggcctacgcagaggtggctgagaggataatggtcctacgcagggctggggttttgctacttgttcctatttatgttcctgattccattttataatacaaaactaggtaatgatgaaca

SEQ ID NO: 712160 - DNA, 2244 bp, Homo sapiens
aacgaaggaccctgtggataggccgacacttaccagagacaacgcacgggggcactggaccacagttgccgagtttgagaccacaagtgagagaggctctggggcccagcagctccaggagcagcttcccctcatcgtgggctccgctacagctgggcttgtcttcgtggtggctgtcgtggtcatcgctatcgtctgcctcaggaagcagcgacacggctctgattcggagtacacggagaagctgcagcagtacattgctcctggaatgaaggtttatattgacccttttacctacgaggaccctaatgaggctgttcgggagtttgccaaggagatcgacgtgtcctgcgtcaagatcgaggaggtgatcggagctggggaatttggggaagtgtgccgtggtcgactgaaacagcctggccgccgagaggtgtttgtggccatcaagacgctgaaggtgggctacaccgagaggcagcggcgggacttcctaagcgaggcctccatcatgggtcagtttgatcaccccaatataatccggctcgagggcgtggtcaccaaaagtcggccagttatgatcctcactgagttcatggaaaactgcgccctggactccttcctccggctcaacgatgggcagttcacggtcatccagctggtgggcatgttgcggggcattgctgccggcatgaagtacctgtccgagatgaactatgtgcaccgcgacctggctgctcgcaacatccttgtcaacagcaacctggtctgcaaagtctcagactttggcctctcccgcttcctggaggatgacccctccgatcctacctacaccagttccctgggcgggaagatccccatccgctggactgccccagaggccatagcctatcggaagttcacttctgctagtgatgtctggagctacggaattgtcatgtgggaggtcatgagctatggagagcgaccctactgggacatgagcaaccaggatgtcatcaatgccgtggagcaggattaccggctgccaccacccatggactgtcccacagcactgcaccagctcatgctggactgctgggtgcgggaccggaacctcaggcccaaattctcccagattgtcaataccctggacaagctcatccgcaatgctgccagcctcaaggtcattgccagcgctcagtctggcatgtcacagcccctcctggaccgcacggtcccagattacacaaccttcacgacagttggtgattggctggatgccatcaagatggggcggtacaaggagagcttcgtcagtgcggggtttgcatcttttgacctggtggcccagatgacggcagaagacctgctccgtattggggtcaccctggccggccaccagaagaagatcctgagcagtatccaggacatgcggctgcagatgaaccagacgctgcctgtgcaggtctgacaccggctcccacggggaccctgaggaccgtgcagggatgccaagcagccggctggactttcggactcttggacttttggatgcctggccttaggctgtggcccagaagctggaagtttgggaaaggcccaagctgggacttctccaggcctgtgttccctccccaggaagtgcgccccaaacctcttcatattgaagatggattaggagagggggtgatgacccctccccaagcccctcagggcccagaccttcctgctctccagcaggggatccccacaacctcacacttgtctgttcttcagtgctggaggtcctggcagggtcaggctggggtaagccggggttccacagggcccagccctggcaggggtctggccccccaggtaggcggagagcagtccctccctcaggaactggaggaggggactccaggaatggggaaatgtgacaccaccatcctgaagccagcttgcacctccagtttgcacagggatttgttctgggggctgagggccctgtccccacccccgcccttggtgctgtcataaaagggcaggcaggggcaggctgaggagttgccctttgccccccagagactgactctcagagccagagatgggatgtgtgagtgtgtgtgtgtgtgtgtgcgcgcgcgcgcgcgtgtgtgtgtgcacgcactggcctgcacagagagcatgggtgagcgtgtaaaagcttggccctgtgccctacaatggggccagctgggccgacagcagaataaaggcaataagatgaaaaaaaaaaaa

SEQ ID NO: 712161 - DNA, 4956 bp, Homo sapiens
  misc_feature (33)..(33): n is a, c, g, or t
agcgggttgttattctgcctgccatgggcagcngggtacagctgctcatcatactggactaatcaggtcaaggacatggggcttcattctaagtaactcagctgtcatcttcattataaaaccacacattttcctctgactctgggcaatgacctgcgtatataagctgttagtcataagggctggatggggcagcatctcaatcatatagggcacaggacagacctcagtatcaccagcaagaatccattacagttcaacatgtagtacctccagaccttttccctgtgcccctggactccaaggtctatcccaccctcagctgtccatcttctagagcaggcggtctagcctccccaaaccagaagaacttcctttttatattcaaccacctgatggatgtccctgatcagttccctcagctgcagagcacaagaaggaccttcaggatccagctttctcctcgggcacgggggaggctcggcggacctgctgattgggaaccgatatggcggcgactctgggcagcggggagcgctggacggaagcttacattgacgcagttagaagaaacaaatacccagaagacacacctcctgagagtcatgacccctgtggctgctgtaactgcatgaaggcacaaaaggaaaagaagtctgagaatgagtggactcagacccggcagggtgaggggaactccacgtacagtgaggaacagctgcttggggtacaaaggatcaagaaatgcagaaattactatgaaattctgggagtttctcgagatgctagtgacgaagagcttaagaaagcttacagaaaactcgccctgaaatttcaccctgacaagaactgtgctcctggagcaacagatgctttcaaagcaataggaaatgcatttgcagtcctgagcaatcctgataagagacttcgctatgatgaatacggagatgaacaggtgactttcactgcccctcgagccagaccttataattattacagggattttgaagctgacatcactccagaagagctgttcaacgtcttctttggaggacattttcctacaggaaatattcatatgttttcaaatgtgacagatgacacttactattaccgtcgacggcaccgacatgagaggacacagactcagaaggaggaggaagaagagaaacctcagactacatattctgcatttattcagctacttccagttcttgtgattgtgattatatctgtcattactcagctgctggctactaatcccccatatagtctgttctataaatcgaccttgggctacaccatttctagagaaactcagaacctgcaggtgccttactttgtggataaaaactttgacaaggcctacagaggagcttctctgcatgacttggagaaaacaatagagaaggattacattgattatatccagactagttgttggaaggagaaacaacaaaagtcagagctgacaaatttggcaggattatacagagatgaacgattgaaacagaaagcagagtcgctgaaacttgaaaactgtgagaaactttccaaactcattggcctacgcagaggtggctgagaggataatggtcctacgcagggctggggttttgctacttgttcctatttatgttcctgattccattttataatacaaaactaggtaatgatgaacactttactatttgctaacttcgttggttgggcagagtggcaggagcatgggcacgagagccagatgtgtcttcacaggatccttcctggggagtggctccagggaccaggagtagttcatctaagttaaattaatggcaaggcattggattccgtctccctgctccatgcctaccctgcctatgtgaatggagttcagggcatcccagagcagatccatgctttcttccttcttcccttcttcagtgaagtcttaagaaccaggcattcctaggcttagccaaagcttaatattagttatttacactgtctaccaagaattatacctctcccttcattagagtcatcatctccgccaagatttagcctttggaacatgttcctgcccagctttccattttctaggggaatatggagaaatttaaactattgtagtcaatagttttctattattccaatctctgctcagttagtagcattagcaaactgcctaatttgagattcctttatttccttaaccctctctcctttagagagtccagaaattaaaactactgagcagcatctggaggcgggggccagggcgaaggtataatgcaagaccgagcctcatctcctccacgaagcctccctactccatcatagaacccagagaatgtcccttcggtcatttcccctcagtatcatcattggtgtcatcgcacttaggctgagttcctacatcccacagaggcagatggtcagacccaggaggaggcattgccagctctccaggctgtttgctcaagcctagagatagaggagacagatcctctctccttggatatgggggtctagctttggccccagcagccactttgtttaacccagtatcctatagtttgtgatttgagatgatttttcattcattcaacatttattgagtgcctactataaaagcaggggctctcacacatattttcttacttaaacctcctcacaactctgaagtagatgtattatccctggttctatgaatgagaacattggcccagagaggatgacccaggtcttgtagtggcagagcaagacggtaggctgagtgtcaagtagaaagtggagagcatcctcatgtctcaggtgattctagccagactggcaaagcagaacctttcccgaggatgcctccgtcctccccaaccccatgacccctcatcttttctgtggcaatcttgcatctgttcaggacaacatccctgctgctctttaggaagcaggaccctgtctaacataaattctgtacacaaaataagaggtccctcacaggcaggcagccctccactggtgactaggaagaattcagtcactgcctgggctgtgtggttctgggccttcctgtggagctgagctgcctgaattatcatgactctgaacttggaaggatcattaagtgactgtagcctacactccatgcttccttcatattggaagaaaagtttctggtagagagtcggccgggtgcactggctcaagcctgtaatcccagcactttgggaggctgtggcaggtggatcacctgaggtcaggagttcaagaccagcctggccaacacagtgaaaccccatctctactaataatacaaaaattagccaggtgtggtggcacatgcctgtagtcccagctactcgggaggctgaggcatgagaatcgctgcaacttgcaaggtggaggttacagtgagctgaaatcacgccactgcactccactccatctcaaaaaaaaaaagagtctacattaaacagattccaaagtaaagtttcttcatcccaatgcatggccatgatttacacagacgtgcctagcatggctcatcaacatctgaacggttgttccctaccatgcctctgcaggcattccacagagtcaggagatgggttcacaggtaaagattgggggctttagtggcttgtaggggacaactgctcagttgcagggagagggagcatttctagaaatagccagattttgctgcccaactagatctgtcctcctggttttagggggcccttcttgatcccctctgagtgactgagggaggttacattgtaaaatatgtccatgagccaaacaggcttatggaaagttcttctacacacaaaaaaatcaaagctctcctctccccatccccaaccactgctagaaaattggccataatgaaactgacttgacaggttaaaagaccctgtcctagatgcccaggaatcaggtagtcacacattttatggacttcatggcagcgatgagtaatctgtgatgatactaaatagaagcaataataactaactccattaaatgtcacgctgattgtctgtttttatagcaccgatggtactgttttatttattgccaatagaccacaacattcacatctgtttttcctcaagggaaccgtatttgcttttggttgaaggatttatctatttgatactatccagaatattgtgaagctataatttcctgggttatattttagatgggttgtctgcatggtggtaaaataagctttttcctctcgcctacgtcctttggaagatctcctgatcatacataactaggtagggcttattcttgctgccggagcttggcacccagctctagactgtttctttgagcattactgcagattggagacgtgtgtgagaggagcagcgctcagaaatagggcttgaggctcaagcagaaactgaagctctcattcaaatgaagatgctctctctaccgcacgatcggcagtgagaaaaggaggatgaaaatccttctcatcacaaagagcttgaaggaacccacgtccccagattagcaaccctagagttcatctgctcaggccgggaaatgtgtaagcttccttgatcagctccaggcctcacagcacgggagcagtgaccagtaaggaaacgtcactgctgtgctttctgttggaaattgttcgaaaatacagtgaactggccaggcccagtagctcatgcctgtaatcccagcactttgaaaggctgaggcaggcagatcatttgaggtcaggagttccagaccagcctggccaacatggtgaaaccctgtctgtactaaaaatacaaaaattaggcgggcatggtagcacgtgtctgtaatcccagctcctcaggaggctgaggcagaagaatctcttgagcctgggaggcagaggttgcagtaagctgagatcacatcattgcactccagcctgggtgacagagcaagactctgtctcaaaaaaaaaaa

SEQ ID NO: 712162 - DNA, 3335 bp, Homo sapiens
ggctcggctcctagagctgccacggccatggccagagcccgcccgccgccgccgccgtcgccgccgccggggcttctgccgctgctccctccgctgctgctgctgccgctgctgctgctgcccgccggctgccgggcgctggaagagaccctcatggacacaaaatgggtaacatctgagttggcgtggacatctcatccagaaagtgggtgggaagaggtgagtggctacgatgaggccatgaatcccatccgcacataccaggtgtgtaatgtgcgcgagtcaagccagaacaactggcttcgcacggggttcatctggcggcgggatgtgcagcgggtctacgtggagctcaagttcactgtgcgtgactgcaacagcatccccaacatccccggctcctgcaaggagaccttcaacctcttctactacgaggctgacagcgatgtggcctcagcctcctcccccttctggatggagaacccctacgtgaaagtggacaccattgcacccgatgagagcttctcgcggctggatgccggccgtgtcaacaccaaggtgcgcagctttgggccactttccaaggctggcttctacctggccttccaggaccagggcgcctgcatgtcgctcatctccgtgcgcgccttctacaagaagtgtgcatccaccaccgcaggcttcgcactcttccccgagaccctcactggggcggagcccacctcgctggtcattgctcctggcacctgcatccctaacgccgtggaggtgtcggtgccactcaagctctactgcaacggcgatggggagtggatggtgcctgtgggtgcctgcacctgtgccaccggccatgagccagctgccaaggagtcccagtgccgcccctgtccccctgggagctacaaggcgaagcagggagaggggccctgcctcccatgtccccccaacagccgtaccacctccccagccgccagcatctgcacctgccacaataacttctaccgtgcagactcggactctgcggacagtgcctgtaccaccgtgccatctccaccccgaggtgtgatctccaatgtgaatgaaacctcactgatcctcgagtggagtgagccccgggacctgggtggccgggatgacctcctgtacaatgtcatctgcaagaagtgccatggggctggaggggcctcagcctgctcacgctgtgatgacaacgtggagtttgtgcctcggcagctgggcctgacggagcgccgggtccacatcagccatctgctggcccacacgcgctacacctttgaggtgcaggcggtcaacggtgtctcgggcaagagccctctgccgcctcgttatgcggccgtgaatatcaccacaaaccaggctgccccgtctgaagtgcccacactacgcctgcacagcagctcaggcagcagcctcaccctatcctgggcacccccagagcggcccaacggagtcatcctggactacgagatgaagtactttgagaagagcgagggcatcgcctccacagtgaccagccagatgaactccgtgcagctggacgggcttcggcctgacgcccgctatgtggtccaggtccgtgcccgcacagtagctggctatgggcagtacagccgccctgccgagtttgagaccacaagtgagagaggctctggggcccagcagctccaggagcagcttcccctcatcgtgggctccgctacagctgggcttgtcttcgtggtggctgtcgtggtcatcgctatcgtctgcctcaggaagcagcgacacggctctgattcggagtacacggagaagctgcagcagtacattgctcctggaatgaaggtttatattgacccttttacctacgaggaccctaatgaggctgttcgggagtttgccaaggagatcgacgtgtcctgcgtcaagatcgaggaggtgatcggagctggggaatttggggaagtgtgccgtggtcgactgaaacagcctggccgccgagaggtgtttgtggccatcaagacgctgaaggtgggctacaccgagaggcagcggcgggacttcctaagcgaggcctccatcatgggtcagtttgatcaccccaatataatccggctcgagggcgtggtcaccaaaagtcggccagttatgatcctcactgagttcatggaaaactgcgccctggactccttcctccggctcaacgatgggcagttcacggtcatccagctggtgggcatgttgcggggcattgctgccggcatgaagtacctgtccgagatgaactatgtgcaccgcgacctggctgctcgcaacatccttgtcaacagcaacctggtctgcaaagtctcagactttggcctctcccgcttcctggaggatgacccctccgatcctacctacaccagttccctgggcgggaagatccccatccgctggactgccccagaggccatagcctatcggaagttcacttctgctagtgatgtctggagctacggaattgtcatgtgggaggtcatgagctatggagagcgaccctactgggacatgagcaaccaggatgtcatcaatgccgtggagcaggattaccggctgccaccacccatggactgtcccacagcactgcaccagctcatgctggactgctgggtgcgggaccggaacctcaggcccaaattctcccagattgtcaataccctggacaagctcatccgcaatgctgccagcctcaaggtcattgccagcgctcagtctggcatgtcacagcccctcctggaccgcacggtcccagattacacaaccttcacgacagttggtgattggctggatgccatcaagatggggcggtacaaggagagcttcgtcagtgcggggtttgcatcttttgacctggtggcccagatgacggcagaagacctgctccgtattggggtcaccctggccggccaccagaagaagatcctgagcagtatccaggaatggggaaatgtgacaccaccatcctgaagccagcttgcacctccagtttgcacagggatttgttctgggggctgagggccctgtccccacccccgcccttggtgctgtcataaaagggcaggcaggggcaggctgaggagttgccctttgccccccagagactgactctcagagccagagatgggatgtgtgagtgtgtgtgtgtgtgtgtgcgcgcgcgcgcgcgtgtgtgtgtgcacgcactggcctgcacagagagcatgggtgagcgtgtaaaagcttggccctgtgccctacaatggggccagctgggccgacagcagaataaaggcaataagatgaaaaaaaaaaaa

SEQ ID NO: 712163 - DNA, 4540 bp, Homo sapiens
  misc_feature (33)..(33): n is a, c, g, or t
agcgggttgttattctgcctgccatgggcagcngggtacagctgctcatcatactggactaatcaggtcaaggacatggggcttcattctaagtaactcagctgtcatcttcattataaaaccacacattttcctctgactctgggcaatgacctgcgtatataagctgttagtcataagggctggatggggcagcatctcaatcatatagggcacaggacagacctcagtatcaccagcaagaatccattacagttcaacatgtagtacctccagaccttttccctgtgcccctggactccaaggtctatcccaccctcagctgtccatcttctagagcaggcggtctagcctccccaaaccagaagaacttcctttttatattcaaccacctgatggatgtccctgatcagttccctcagctgcagagcacaagaaggaccttcaggatccagctttctcctcgggcacgggggaggctcggcggacctgctgattgggaaccgatatggcggcgactctgggcagcggggagcgctggacggaagcttacattgacgcagttagaagaaacaaatacccagaagacacacctcctgagagtcatgacccctgtggctgctgtaactgcatgaaggcacaaaaggaaaagaagtctgagaatgagtggactcagacccggcagggtgaggggaactccacgtacagtgaggaacagctgcttggggtacaaaggatcaagaaatgcagaaattactatgaaattctgggagtttctcgagatgctagtgacgaagagcttaagaaagcttacagaaaactcgccctgaaatttcaccctgacaagaactgtgctcctggagcaacagatgctttcaaagcaataggaaatgcatttgcagtcctgagcaatcctgataagagacttcgctatgatgaatacggagatgaacaggtgactttcactgcccctcgagccagaccttataattattacagggattttgaagctgacatcactccagaagagctgttcaacgtcttctttggaggacattttcctacaggaaatattcatatgttttcaaatgtgacagatgacacttactattaccgtcgacggcaccgacatgagaggacacagactcagaaggaggaggaagaagagaaacctcagactacatattctgcatttattcagctacttccagttcttgtgattgtgattatatctgtcattactcagctgctggctactaatcccccatatagtctgttctataaatcgaccttgggctacaccatttctagagaaactcagaacctgcaggtgccttactttgtggataaaaactttgacaaggcctacagaggagcttctctgcatgacttggagaaaacaatagagaaggattacattgattatatccagactagttgttggaaggagaaacaacaaaagtcagagctgacaaatttggcaggattatacagagatgaacgattgaaacagaaagcagagtcgctgaaacttgaaaactgtgagaaactttccaaactcattggcctacgcagaggtggctgagaggataatggtcctacgcagggctggggttttgctacttgttcctatttatgttcctgattccattttataatacaaaactaggtaatgatgaacactttactatttgctaacttcgttggttgggcagagtggcaggagcatgggcacgagagccagatgtgtcttcacaggatccttcctggggagtggctccagggaccaggagtagttcatctaagttaaattaatggcaaggcattggattccgtctccctgctccatgcctaccctgcctatgtgaatggagttcagggcatcccagagcagatccatgctttcttccttcttcccttcttcagtgaagtcttaagaaccaggcattcctaggcttagccaaagcttaatattagttatttacactgtctaccaagaattatacctctcccttcattagagtcatcatctccgccaagatttagcctttggaacatgttcctgcccagctttccattttctaggggaatatggagaaatttaaactattgtagtcaatagttttctattattccaatctctgctcagttagtagcattagcaaactgcctaatttgagattcctttatttccttaaccctctctcctttagagagtccagaaattaaaactactgagcagcatctggaggcgggggccagggcgaaggtataatgcaagaccgagcctcatctcctccacgaagcctccctactccatcatagaacccagagaatgtcccttcggtcatttcccctcagtatcatcattggtgtcatcgcacttaggctgagttcctacatcccacagaggcagatggtcagacccaggaggaggcattgccagctctccaggctgtttgctcaagcctagagatagaggagacagatcctctctccttggatatgggggtctagctttggccccagcagccactttgtttaacccagtatcctatagtttgtgatttgagatgatttttcattcattcaacatttattgagtgcctactataaaagcaggggctctcacacatattttcttacttaaacctcctcacaactctgaagtagatgtattatccctggttctatgaatgagaacattggcccagagaggatgacccaggtcttgtagtggcagagcaagacggtaggctgagtgtcaagtagaaagtggagagcatcctcatgtctcaggtgattctagccagactggcaaagcagaacctttcccgaggatgcctccgtcctccccaaccccatgacccctcatcttttctgtggcaatcttgcatctgttcaggacaacatccctgctgctctttaggaagcaggaccctgtctaacataaattctgtacacaaaataagaggtccctcacaggcaggcagccctccactggtgactaggaagaattcagtcactgcctgggctgtgtggttctgggccttcctgtggagctgagctgcctgaattatcatgactctgaacttggaaggatcattaagtgactgtagcctacactccatgcttccttcatattggaagaaaagtttctggtagagagtcggccgggtgcactggctcaagcctgtaatcccagcactttgggaggctgtggcaggtggatcacctgaggtcaggagttcaagaccagcctggccaacacagtgaaaccccatctctactaataatacaaaaattagccaggtgtggtggcacatgcctgtagtcccagctactcgggaggctgaggcatgagaatcgctgcaacttgcaaggtggaggttacagtgagctgaaatcacgccactgcactccactccatctcaaaaaaaaaaagagtctacattaaacagattccaaagtaaagtttcttcatcccaatgcatggccatgatttacacagacgtgcctagcatggctcatcaacatctgaacggttgttccctaccatgcctctgcaggcattccacagagtcaggagatgggttcacaggtaaagattgggggctttagtggcttgtaggggacaactgctcagttgcagggagagggagcatttctagaaatagccagattttgctgcccaactagatctgtcctcctggttttagggggcccttcttgatcccctctgagtgactgagggaggttacattgtaaaatatgtccatgagccaaacaggcttatggaaagttcttctacacacaaaaaaatcaaagctctcctctccccatccccaaccactgctagaaaattggccataatgaaactgacttgacaggttaaaagaccctgtcctagatgcccaggaatcaggtagtcacacattttatggacttcatggcagcgatgagtaatctgtgatgatactaaatagaagcaataataactaactccattaaatgtcacgctgattgtctgtttttatagcaccgatggtactgttttatttattgccaatagaccacaacattcacatctgtttttcctcaagggaaccgtatttgcttttggttgaaggatttatctatttgatactatccagaatattgtgaagctataatttcctgggttatattttagatgggttgtctgcatggtggtaaaataagctttttcctctcgcctacgtcctttggaagatctcctgatcatacataactaggtagggcttattcttgctgccggagcttggcacccagctctagactgtttctttgagcattactgcagattggagacgtgtgtgagaggagcagcgctcagaaatagggcttgaggctcaagcagaaactgaagctctcattcaaatgaagatgctctctctaccgcacgatcggcagtgagaaaaggaggatgaaaatccttctcatcaaatctgtaattatgcacagtttctgttatcaataaaacaaaagaatcctgaaaaaa

SEQ ID NO: 712164 - DNA, 420 bp, Homo sapiens
gtggatactagtcactgcatcaggagaatgcagtaagagaatggtttccagttgaactgagttcggagcacagcacggcaactgaccttacttgattcgcggaataccatgtactgtgggagataacggatcggggttttctgggtcttcggtttgttttggtttggctatacttcgttttaactaaaggagaaccggtatgaggatatactcaagaataatacacattaggtgctcaagcatctccatgatgtatatggcatcatgtctttaagtatcctgtggtcgtcttataaaatcacatggccacttcctaaagcctagtgaaagattggttttccatttggggcaatggatctctcccctgactcttgctggttctacccagtctatccagatcagctggttgtatatgcctat

SEQ ID NO: 712165 - DNA, 2498 bp, Homo sapiens
ggctcggctcctagagctgccacggccatggccagagcccgcccgccgccgccgccgtcgccgccgccggggcttctgccgctgctccctccgctgctgctgctgccgctgctgctgctgcccgccggctgccgggcgctggaagagaccctcatggacacaaaatgggtaacatctgagttggcgtggacatctcatccagaaagtgggtgggaagaggtgagtggctacgatgaggccatgaatcccatccgcacataccaggtgtgtaatgtgcgcgagtcaagccagaacaactggcttcgcacggggttcatctggcggcgggatgtgcagcgggtctacgtggagctcaagttcactgtgcgtgactgcaacagcatccccaacatccccggctcctgcaaggagaccttcaacctcttctactacgaggctgacagcgatgtggcctcagcctcctcccccttctggatggagaacccctacgtgaaagtggacaccattgcacccgatgagagcttctcgcggctggatgccggccgtgtcaacaccaaggtgcgcagctttgggccactttccaaggctggcttctacctggccttccaggaccagggcgcctgcatgtcgctcatctccgtgcgcgccttctacaagaagtgtgcatccaccaccgcaggcttcgcactcttccccgagaccctcactggggcggagcccacctcgctggtcattgctcctggcacctgcatccctaacgccgtggaggtgtcggtgccactcaagctctactgcaacggcgatggggagtggatggtgcctgtgggtgcctgcacctgtgccaccggccatgagccagctgccaaggagtcccagtgccgcccctgtccccctgggagctacaaggcgaagcagggagaggggccctgcctcccatgtccccccaacagccgtaccacctccccagccgccagcatctgcacctgccacaataacttctaccgtgcagactcggactctgcggacagtgcctgtaccaccgtgccatctccaccccgaggtgtgatctccaatgtgaatgaaacctcactgatcctcgagtggagtgagccccgggacctgggtggccgggatgacctcctgtacaatgtcatctgcaagaagtgccatggggctggaggggcctcagcctgctcacgctgtgatgacaacgtggagtttgtgcctcggcagctgggcctgacggagcgccgggtccacatcagccatctgctggcccacacgcgctacacctttgaggtgcaggcggtcaacggtgtctcgggcaagagccctctgccgcctcgttatgcggccgtgaatatcaccacaaaccaggctgccccgtctgaagtgcccacactacgcctgcacagcagctcaggcagcagcctcaccctatcctgggcacccccagagcggcccaacggagtcatcctggactacgagatgaagtactttgagaagagcgagggcatcgcctccacagtgaccagccagatgaactccgtgcagctggacgggcttcggcctgacgcccgctatgtggtccaggtccgtgcccgcacagtagctggctatgggcagtacagccgccctgccgagtttgagaccacaagtgagagaggctctggggcccagcagctccaggagcagcttcccctcatcgtgggctccgctacagctgggcttgtcttcgtggtggctgtcgtggtcatcgctatcgtctgcctcaggaagcagcgacacggctctgattcggagtacacggagaagctgcagcagtacattgctcctggaatgaaggtttatattgacccttttacctacgaggaccctaatgaggctgttcgggagtttgccaaggagatcgacgtgtcctgcgtcaagatcgaggaggtgatcggagctggggaatttggggaagtgtgccgtggtcgactgaaacagcctggccgccgagaggtgtttgtggccatcaagacgctgaaggtgggctacaccgagaggcagcggcgggacttcctaagcgaggcctccatcatgggtcagtttgatcaccccaatataatccggctcgagggcgtggtcaccaaaagtcggccagttatgatcctcactgagttcatggaaaactgcgccctggactccttcctccggctcaacgatgggcagttcacggtcatccagctggtgggcatgttgcggggcattgctgccggcatgaagtacctgtccgagatgaactatgtgcaccgcgacctggctgctcgcaacatccttgtcaacagcaacctggtctgcaaagtctcagactttggcctctcccgcttcctggaggatgacccctccgatcctacctacaccagttccctggtacaggaagccggtgggagggagactgggggcggggcctatcagccaggggctcgggcctggggggcaggccggagtcacag

SEQ ID NO: 712166 - DNA, 4758 bp, Homo sapiens
  misc_feature (33)..(33): n is a, c, g, or t
agcgggttgttattctgcctgccatgggcagcngggtacagctgctcatcatactggactaatcaggtcaaggacatggggcttcattctaagtaactcagctgtcatcttcattataaaaccacacattttcctctgactctgggcaatgacctgcgtatataagctgttagtcataagggctggatggggcagcatctcaatcatatagggcacaggacagacctcagtatcaccagcaagaatccattacagttcaacatcctcgggcacgggggaggctcggcggacctgctgattgggaaccgatatggcggcgactctgggcagcggggagcgctggacggaagcttacattgacgcagttagaagaaacaaatacccagaagacacacctcctgagagtcatgacccctgtggctgctgtaactgcatgaaggcacaaaaggaaaagaagtctgagaatgagtggactcagacccggcagggtgaggggaactccacgtacagtgaggaacagctgcttggggtacaaaggatcaagaaatgcagaaattactatgaaattctgggagtttctcgagatgctagtgacgaagagcttaagaaagcttacagaaaactcgccctgaaatttcaccctgacaagaactgtgctcctggagcaacagatgctttcaaagcaataggaaatgcatttgcagtcctgagcaatcctgataagagacttcgctatgatgaatacggagatgaacaggtgactttcactgcccctcgagccagaccttataattattacagggattttgaagctgacatcactccagaagagctgttcaacgtcttctttggaggacattttcctacaggaaatattcatatgttttcaaatgtgacagatgacacttactattaccgtcgacggcaccgacatgagaggacacagactcagaaggaggaggaagaagagaaacctcagactacatattctgcatttattcagctacttccagttcttgtgattgtgattatatctgtcattactcagctgctggctactaatcccccatatagtctgttctataaatcgaccttgggctacaccatttctagagaaactcagaacctgcaggtgccttactttgtggataaaaactttgacaaggcctacagaggagcttctctgcatgacttggagaaaacaatagagaaggattacattgattatatccagactagttgttggaaggagaaacaacaaaagtcagagctgacaaatttggcaggattatacagagatgaacgattgaaacagaaagcagagtcgctgaaacttgaaaactgtgagaaactttccaaactcattggcctacgcagaggtggctgagaggataatggtcctacgcagggctggggttttgctacttgttcctatttatgttcctgattccattttataatacaaaactaggtaatgatgaacactttactatttgctaacttcgttggttgggcagagtggcaggagcatgggcacgagagccagatgtgtcttcacaggatccttcctggggagtggctccagggaccaggagtagttcatctaagttaaattaatggcaaggcattggattccgtctccctgctccatgcctaccctgcctatgtgaatggagttcagggcatcccagagcagatccatgctttcttccttcttcccttcttcagtgaagtcttaagaaccaggcattcctaggcttagccaaagcttaatattagttatttacactgtctaccaagaattatacctctcccttcattagagtcatcatctccgccaagatttagcctttggaacatgttcctgcccagctttccattttctaggggaatatggagaaatttaaactattgtagtcaatagttttctattattccaatctctgctcagttagtagcattagcaaactgcctaatttgagattcctttatttccttaaccctctctcctttagagagtccagaaattaaaactactgagcagcatctggaggcgggggccagggcgaaggtataatgcaagaccgagcctcatctcctccacgaagcctccctactccatcatagaacccagagaatgtcccttcggtcatttcccctcagtatcatcattggtgtcatcgcacttaggctgagttcctacatcccacagaggcagatggtcagacccaggaggaggcattgccagctctccaggctgtttgctcaagcctagagatagaggagacagatcctctctccttggatatgggggtctagctttggccccagcagccactttgtttaacccagtatcctatagtttgtgatttgagatgatttttcattcattcaacatttattgagtgcctactataaaagcaggggctctcacacatattttcttacttaaacctcctcacaactctgaagtagatgtattatccctggttctatgaatgagaacattggcccagagaggatgacccaggtcttgtagtggcagagcaagacggtaggctgagtgtcaagtagaaagtggagagcatcctcatgtctcaggtgattctagccagactggcaaagcagaacctttcccgaggatgcctccgtcctccccaaccccatgacccctcatcttttctgtggcaatcttgcatctgttcaggacaacatccctgctgctctttaggaagcaggaccctgtctaacataaattctgtacacaaaataagaggtccctcacaggcaggcagccctccactggtgactaggaagaattcagtcactgcctgggctgtgtggttctgggccttcctgtggagctgagctgcctgaattatcatgactctgaacttggaaggatcattaagtgactgtagcctacactccatgcttccttcatattggaagaaaagtttctggtagagagtcggccgggtgcactggctcaagcctgtaatcccagcactttgggaggctgtggcaggtggatcacctgaggtcaggagttcaagaccagcctggccaacacagtgaaaccccatctctactaataatacaaaaattagccaggtgtggtggcacatgcctgtagtcccagctactcgggaggctgaggcatgagaatcgctgcaacttgcaaggtggaggttacagtgagctgaaatcacgccactgcactccactccatctcaaaaaaaaaaagagtctacattaaacagattccaaagtaaagtttcttcatcccaatgcatggccatgatttacacagacgtgcctagcatggctcatcaacatctgaacggttgttccctaccatgcctctgcaggcattccacagagtcaggagatgggttcacaggtaaagattgggggctttagtggcttgtaggggacaactgctcagttgcagggagagggagcatttctagaaatagccagattttgctgcccaactagatctgtcctcctggttttagggggcccttcttgatcccctctgagtgactgagggaggttacattgtaaaatatgtccatgagccaaacaggcttatggaaagttcttctacacacaaaaaaatcaaagctctcctctccccatccccaaccactgctagaaaattggccataatgaaactgacttgacaggttaaaagaccctgtcctagatgcccaggaatcaggtagtcacacattttatggacttcatggcagcgatgagtaatctgtgatgatactaaatagaagcaataataactaactccattaaatgtcacgctgattgtctgtttttatagcaccgatggtactgttttatttattgccaatagaccacaacattcacatctgtttttcctcaagggaaccgtatttgcttttggttgaaggatttatctatttgatactatccagaatattgtgaagctataatttcctgggttatattttagatgggttgtctgcatggtggtaaaataagctttttcctctcgcctacgtcctttggaagatctcctgatcatacataactaggtagggcttattcttgctgccggagcttggcacccagctctagactgtttctttgagcattactgcagattggagacgtgtgtgagaggagcagcgctcagaaatagggcttgaggctcaagcagaaactgaagctctcattcaaatgaagatgctctctctaccgcacgatcggcagtgagaaaaggaggatgaaaatccttctcatcacaaagagcttgaaggaacccacgtccccagattagcaaccctagagttcatctgctcaggccgggaaatgtgtaagcttccttgatcagctccaggcctcacagcacgggagcagtgaccagtaaggaaacgtcactgctgtgctttctgttggaaattgttcgaaaatacagtgaactggccaggcccagtagctcatgcctgtaatcccagcactttgaaaggctgaggcaggcagatcatttgaggtcaggagttccagaccagcctggccaacatggtgaaaccctgtctgtactaaaaatacaaaaattaggcgggcatggtagcacgtgtctgtaatcccagctcctcaggaggctgaggcagaagaatctcttgagcctgggaggcagaggttgcagtaagctgagatcacatcattgcactccagcctgggtgacagagcaagactctgtctcaaaaaaaaaaa

SEQ ID NO: 712167 - DNA, 5071 bp, Homo sapiens
  misc_feature (33)..(33): n is a, c, g, or t
agcgggttgttattctgcctgccatgggcagcngggtacagctgctcatcatactggactaatcaggtcaaggacatggggcttcattctaagtaactcagctgtcatcttcattataaaaccacacattttcctctgactctgggcaatgacctgcgtatataagctgttagtcataagggctggatggggcagcatctcaatcatatagggcacaggacagacctcagtatcaccagcaagaatccattacagttcaacatgtagtacctccagaccttttccctgtgcccctggactccaaggtctatcccaccctcagctgtccatcttctagagcaggcggtctagcctccccaaaccagaagaacttcctttttatattcaaccacctgatggatgtccctgatcagttccctcagctgcagagcacaagaaggaccttcaggatccagctttctcctcgggcacgggggaggctcggcggacctgctgattgggaaccgatatggcggcgactctgggcagcggggagcgctggacggaagcttacattgacgcagttagaagaaacaaatacccagaagacacacctcctgagagtcatgacccctgtggctgctgtaactgcatgaaggcacaaaaggaaaagaagtctgagaatgagtggactcagacccggcagggtgaggggaactccacgtacagtgaggaacagctgcttggggtacaaaggatcaagaaatgcagaaattactatgaaattctgggagtttctcgagatgctagtgacgaagagcttaagaaagcttacagaaaactcgccctgaaatttcaccctgacaagaactgtgctcctggagcaacagatgctttcaaagcaataggaaatgcatttgcagtcctgagcaatcctgataagagacttcgctatgatgaatacggagatgaacaggtgactttcactgcccctcgagccagaccttataattattacagggattttgaagctgacatcactccagaagagctgttcaacgtcttctttggaggacattttcctacaggaaatattcatatgttttcaaatgtgacagatgacacttactattaccgtcgacggcaccgacatgagaggacacagactcagaaggaggaggaagaagagaaacctcagactacatattctgcatttattcagctacttccagttcttgtgattgtgattatatctgtcattactcagctgctggctactaatcccccatatagtctgttctataaatcgaccttgggctacaccatttctagagaaactcagaacctgcaggtgccttactttgtggataaaaactttgacaaggcctacagaggagcttctctgcatgacttggagaaaacaatagagaaggattacattgattatatccagactagttgttggaaggagaaacaacaaaggttctggcacagtccttgcttcagaacaagtgctcaacaaatgtcttttgaagagaggattctcaggagtagaaaacaatgaaaatgctgaggattgtgaataacaacagcaggagtcagagctgacaaatttggcaggattatacagagatgaacgattgaaacagaaagcagagtcgctgaaacttgaaaactgtgagaaactttccaaactcattggcctacgcagaggtggctgagaggataatggtcctacgcagggctggggttttgctacttgttcctatttatgttcctgattccattttataatacaaaactaggtaatgatgaacactttactatttgctaacttcgttggttgggcagagtggcaggagcatgggcacgagagccagatgtgtcttcacaggatccttcctggggagtggctccagggaccaggagtagttcatctaagttaaattaatggcaaggcattggattccgtctccctgctccatgcctaccctgcctatgtgaatggagttcagggcatcccagagcagatccatgctttcttccttcttcccttcttcagtgaagtcttaagaaccaggcattcctaggcttagccaaagcttaatattagttatttacactgtctaccaagaattatacctctcccttcattagagtcatcatctccgccaagatttagcctttggaacatgttcctgcccagctttccattttctaggggaatatggagaaatttaaactattgtagtcaatagttttctattattccaatctctgctcagttagtagcattagcaaactgcctaatttgagattcctttatttccttaaccctctctcctttagagagtccagaaattaaaactactgagcagcatctggaggcgggggccagggcgaaggtataatgcaagaccgagcctcatctcctccacgaagcctccctactccatcatagaacccagagaatgtcccttcggtcatttcccctcagtatcatcattggtgtcatcgcacttaggctgagttcctacatcccacagaggcagatggtcagacccaggaggaggcattgccagctctccaggctgtttgctcaagcctagagatagaggagacagatcctctctccttggatatgggggtctagctttggccccagcagccactttgtttaacccagtatcctatagtttgtgatttgagatgatttttcattcattcaacatttattgagtgcctactataaaagcaggggctctcacacatattttcttacttaaacctcctcacaactctgaagtagatgtattatccctggttctatgaatgagaacattggcccagagaggatgacccaggtcttgtagtggcagagcaagacggtaggctgagtgtcaagtagaaagtggagagcatcctcatgtctcaggtgattctagccagactggcaaagcagaacctttcccgaggatgcctccgtcctccccaaccccatgacccctcatcttttctgtggcaatcttgcatctgttcaggacaacatccctgctgctctttaggaagcaggaccctgtctaacataaattctgtacacaaaataagaggtccctcacaggcaggcagccctccactggtgactaggaagaattcagtcactgcctgggctgtgtggttctgggccttcctgtggagctgagctgcctgaattatcatgactctgaacttggaaggatcattaagtgactgtagcctacactccatgcttccttcatattggaagaaaagtttctggtagagagtcggccgggtgcactggctcaagcctgtaatcccagcactttgggaggctgtggcaggtggatcacctgaggtcaggagttcaagaccagcctggccaacacagtgaaaccccatctctactaataatacaaaaattagccaggtgtggtggcacatgcctgtagtcccagctactcgggaggctgaggcatgagaatcgctgcaacttgcaaggtggaggttacagtgagctgaaatcacgccactgcactccactccatctcaaaaaaaaaaagagtctacattaaacagattccaaagtaaagtttcttcatcccaatgcatggccatgatttacacagacgtgcctagcatggctcatcaacatctgaacggttgttccctaccatgcctctgcaggcattccacagagtcaggagatgggttcacaggtaaagattgggggctttagtggcttgtaggggacaactgctcagttgcagggagagggagcatttctagaaatagccagattttgctgcccaactagatctgtcctcctggttttagggggcccttcttgatcccctctgagtgactgagggaggttacattgtaaaatatgtccatgagccaaacaggcttatggaaagttcttctacacacaaaaaaatcaaagctctcctctccccatccccaaccactgctagaaaattggccataatgaaactgacttgacaggttaaaagaccctgtcctagatgcccaggaatcaggtagtcacacattttatggacttcatggcagcgatgagtaatctgtgatgatactaaatagaagcaataataactaactccattaaatgtcacgctgattgtctgtttttatagcaccgatggtactgttttatttattgccaatagaccacaacattcacatctgtttttcctcaagggaaccgtatttgcttttggttgaaggatttatctatttgatactatccagaatattgtgaagctataatttcctgggttatattttagatgggttgtctgcatggtggtaaaataagctttttcctctcgcctacgtcctttggaagatctcctgatcatacataactaggtagggcttattcttgctgccggagcttggcacccagctctagactgtttctttgagcattactgcagattggagacgtgtgtgagaggagcagcgctcagaaatagggcttgaggctcaagcagaaactgaagctctcattcaaatgaagatgctctctctaccgcacgatcggcagtgagaaaaggaggatgaaaatccttctcatcacaaagagcttgaaggaacccacgtccccagattagcaaccctagagttcatctgctcaggccgggaaatgtgtaagcttccttgatcagctccaggcctcacagcacgggagcagtgaccagtaaggaaacgtcactgctgtgctttctgttggaaattgttcgaaaatacagtgaactggccaggcccagtagctcatgcctgtaatcccagcactttgaaaggctgaggcaggcagatcatttgaggtcaggagttccagaccagcctggccaacatggtgaaaccctgtctgtactaaaaatacaaaaattaggcgggcatggtagcacgtgtctgtaatcccagctcctcaggaggctgaggcagaagaatctcttgagcctgggaggcagaggttgcagtaagctgagatcacatcattgcactccagcctgggtgacagagcaagactctgtctcaaaaaaaaaaa

SEQ ID NO: 712168 - DNA, 839 bp, Homo sapiens
  misc_feature (398)..(398): n is a, c, g, or t
ccctgaaagattccctactttgaccatcgcttcaaacaaatttttttttcacggaaacattgtccaccatggagtgaaaggccgtactgggctactctgacgcgccttctccgtaagttcacgcttcaaccattcgtttgagtgtccgccgcgcatgatgattgttccaggcgaccgccatcagacataggctcccctgcaggtcatagacaaggaatgagcggcgtcaataccccctacggccgccatcttgaaatccgcccccacgggtcctccggggagagaaaaaaagagtcttcaaccgccccgtgggcccaccttatgtgcgagcaatcaaatacgcccgccctccggtgtgtatatttcaccccccccacgagacccctcctatcgtctcngttgaggagatgtctcctcggcaaagggtccaccctctctcttcgacacacaaggggcggagatagatcagagcctggtcacctacacaaacagatacagagtgggggatcacaaccccccgggagccgcaactcctcgccgacgcgcgtgcagtgggtgtgtccctctcgagacaaggtagggagcgtgcgagacgactatttctcggtaacataggcacgctctccagacacgcagggtttgatggccgccgttcttaggaccgctcccagggtatggttacagagcgcccagttacgtgctaatctgggtagggcgctctggcagctagcgcactctaggcactcccacggcatacataggcgccggttctttacactgattccaagccagcgtcttgggccccacaggggagaaaaagaaacttttacacaaacaaa

SEQ ID NO: 712169 - DNA, 201 bp, Homo sapiens
gacacatcagagccctggggcctgtcactgcttgcaggctgagagtagctccctccttttctatctgagctgttcctcctccacatcacagcagcgaccacagctccagtgatcacagctccaaggagaaacaggccagcaatgatgcccacgatggggacggtgggctgggaagatgggtcccatctcagggtgaggggt

SEQ ID NO: 712170 - DNA, 1682 bp, Homo sapiens
  misc_feature (33)..(33): n is a, c, g, or t
agcgggttgttattctgcctgccatgggcagcngggtacagctgctcatcatactggactaatcaggtcaaggacatggggcttcattctaagtaactcagctgtcatcttcattataaaaccacacattttcctctgactctgggcaatgacctgcgtatataagctgttagtcataagggctggatggggcagcatctcaatcatatagggcacaggacagacctcagtatcaccagcaagaatccattacagttcaacatgtagtacctccagaccttttccctgtgcccctggactccaaggtctatcccaccctcagctgtccatcttctagagcaggcggtctagcctccccaaaccagaagaacttcctttttatattcaaccacctgatggatgtccctgatcagttccctcagctgcagagcacaagaaggaccttcaggatccagctttctcctcgggcacgggggaggctcggcggacctgctgattgggaaccgatatggcggcgactctgggcagcggggagcgctggacggaagcttacattgacgcagttagaagaaacaaatacccagaagacacacctcctgagagtcatgacccctgtggctgctgtaactgcatgaaggcacaaaaggaaaagaagtctgagaatgagtggactcagacccggcagggtgaggggaactccacgtacagtgaggaacagctgcttggggtacaaaggatcaagaaatgcagaaattactatgaaattctgggagtttctcgagatgctagtgacgaagagcttaagaaagcttacagaaaactcgccctgaaatttcaccctgacaagaactgtgctcctggagcaacagatgctttcaaagcaataggaaatgcatttgcagtcctgagcaatcctgataagagacttcgctatgatgaatacggagatgaacaggtgactttcactgcccctcgagccagaccttataattattacagggattttgaagctgacatcactccagaagagctgttcaacgtcttctttggaggacattttcctacaggaaatattcatatgttttcaaatgtgacagatgacacttactattaccgtcgacggcaccgacatgagaggacacagactcagaaggaggaggaagaagagaaacctcagactacatattctgcatttattcagctacttccagttcttgtgattgtgattatatctgtcattactcagctgctggctactaatcccccatatagtctgttctataaatcgaccttgggctacaccatttctagagaaactcagaacctgcaggtgccttactttgtggataaaaactttgacaaggcctacagaggagcttctctgcatgacttggagaaaacaatagagaaggattacattgattatatccagactagttgttggaaggagaaacaacaaaagtcagagctgacaaatttggcaggattatacagagatgaacgattgaaacagaaagcagagtcgctgaaacttgaaaactgtgagaaactttccaaactcattggcctacgcagaggtggctgagaggataatggtcctacgcagggctggggttttgctacttgttcctatttatgttcctgattccattttataatacaaaactaggtaatgatgaaca

SEQ ID NO: 712171 - DNA, 3324 bp, Homo sapiens
  misc_feature (33)..(33): n is a, c, g, or t
agcgggttgttattctgcctgccatgggcagcngggtacagctgctcatcatactggactaatcaggtcaaggacatggggcttcattctaagtaactcagctgtcatcttcattataaaaccacacattttcctctgactctgggcaatgacctgcgtatataagctgttagtcataagggctggatggggcagcatctcaatcatatagggcacaggacagacctcagtatcaccagcaagaatccattacagttcaacatgtagtacctccagaccttttccctgtgcccctggactccaaggtctatcccaccctcagctgtccatcttctagagcaggcggtctagcctccccaaaccagaagaacttcctttttatattcaaccacctgatggatgtccctgatcagttccctcagctgcagagcacaagaaggaccttcaggatccagctttctcctcgggcacgggggaggctcggcggacctgctgattgggaaccgatatggcggcgactctgggcagcggggagcgctggacggaagcttacattgacgcagttagaagaaacaaatacccagaagacacacctcctgagagtcatgacccctgtggctgctgtaactgcatgaaggcacaaaaggaaaagaagtctgagaatgagtggactcagacccggcagggtgaggggaactccacgtacagtgaggaacagctgcttggggtacaaaggatcaagaaatgcagaaattactatgaaattctgggagtttctcgagatgctagtgacgaagagcttaagaaagcttacagaaaactcgccctgaaatttcaccctgacaagaactgtgctcctggagcaacagatgctttcaaagcaataggaaatgcatttgcagtcctgagcaatcctgataagagacttcgctatgatgaatacggagatgaacaggtgactttcactgcccctcgagccagaccttataattattacagggattttgaagctgacatcactccagaagagctgttcaacgtcttctttggaggacattttcctacaggaaatattcatatgttttcaaatgtgacagatgacacttactattaccgtcgacggcaccgacatgagaggacacagactcagaaggaggaggaagaagagaaacctcagactacatattctgcatttattcagctacttccagttcttgtgattgtgattatatctgtcattactcagctgctggctactaatcccccatatagtctgttctataaatcgaccttgggctacaccatttctagagaaactcagaacctgcaggtgccttactttgtggataaaaactttgacaaggcctacagaggagcttctctgcatgacttggagaaaacaatagagaaggattacattgattatatccagactagttgttggaaggagaaacaacaaaagtcagagctgacaaatttggcaggattatacagagatgaacgattgaaacagaaagcagagtcgctgaaacttgaaaactgtgagaaactttccaaactcattggcctacgcagaggtggctgagaggataatggtcctacgcagggctggggttttgctacttgttcctatttatgttcctgattccattttataatacaaaactaggtaatgatgaacactttactatttgctaacttcgttggttgggcagagtggcaggagcatgggcacgagagccagatgtgtcttcacaggatccttcctggggagtggctccagggaccaggagtagttcatctaagttaaattaatggcaaggcattggattccgtctccctgctccatgcctaccctgcctatgtgaatggagttcagggcatcccagagcagatccatgctttcttccttcttcccttcttcagtgaagtcttaagaaccaggcattcctaggcttagccaaagcttaatattagttatttacactgtctaccaagaattatacctctcccttcattagagtcatcatctccgccaagatttagcctttggaacatgttcctgcccagctttccattttctaggggaatatggagaaatttaaactattgtagtcaatagttttctattattccaatctctgctcagttagtagcattagcaaactgcctaatttgagattcctttatttccttaaccctctctcctttagagagtccagaaattaaaactactgagcagcatctggaggcgggggccagggcgaaggtataatgcaagaccgagcctcatctcctccacgaagcctccctactccatcatagaacccagagaatgtcccttcggtcatttcccctcagtatcatcattggtgtcatcgcacttaggctgagttcctacatcccacagaggcagatggtcagacccaggaggaggcattgccagctctccaggctgtttgctcaagcctagagatagaggagacagatcctctctccttggatatgggggtctagctttggccccagcagccactttgtttaacccagtatcctatagtttgtgatttgagatgatttttcattcattcaacatttattgagtgcctactataaaagcaggggctctcacacatattttcttacttaaacctcctcacaactctgaagtagatgtattatccctggttctatgaatgagaacattggcccagagaggatgacccaggtcttgtagtggcagagcaagacggtaggctgagtgtcaagtagaaagtggagagcatcctcatgtctcaggtgattctagccagactggcaaagcagaacctttcccgaggatgcctccgtcctccccaaccccatgacccctcatcttttctgtggcaatcttgcatctgttcaggacaacatccctgctgctctttaggaagcaggaccctgtctaacataaattctgtacacaaaataagaggtccctcacaggcaggcagccctccactggtgactaggaagaattcagtcactgcctgggctgtgtggttctgggccttcctgtggagctgagctgcctgaattatcatgactctgaacttggaaggatcattaagtgactgtagcctacctggctaatttttgtattattagtagagatgggtgttcactgtggttgttcagctggtcttgggctacagacctcaggtgagtccacctgcacagccttacaaagtgctcggatacagtcttgaccacggcacccggccgctctgttacaaggtctgcagctggcacggttacacaagttcagctggggcctgtaaactc

SEQ ID NO: 712172 - DNA, 593 bp, Homo sapiens
acgcctgttatcccagcacttagggaggctgaggcgggcggcccctttctctttctctgtggatgtcccagcacccaggtgcgaggaccatcacgaaataaacgggcgcggcgcgccacgacgacccaaaagtggagagcgtgacgggcagcggagaagactgtgagcgcggcggcgtcccaaaacacatctgagcacaaacgtggaaaacccacatgactctaagaaataccacacgacaagccgggctcagaggacaatgccggcgaacccaggccaaatagaccgacaaggcaagccgaaccccagacaccagaacgactaacacagcctaacccagcagccgaaccaccgtaccaaccgaaagcgtcaccacaaagcggcgcaatgagagcgcaacaaaagccaggacatccggcacatcctcctcaaggcctgaccgcaaggagaaacccacagaatacctgcccacaccgccgtatctggacatcacgcgtatcgaataaaatgaagccaacagcctgtgtaaactacgagccaacagtaaagacacaatcaacaactagaacgaacgcccaccaaacagaaacatc

SEQ ID NO: 712173 - DNA, 1761 bp, Homo sapiens
  misc_feature (33)..(33): n is a, c, g, or t
agcgggttgttattctgcctgccatgggcagcngggtacagctgctcatcatactggactaatcaggtcaaggacatggggcttcattctaagtaactcagctgtcatcttcattataaaaccacacattttcctctgactctgggcaatgacctgcgtatataagctgttagtcataagggctggatggggcagcatctcaatcatatagggcacaggacagacctcagtatcaccagcaagaatccattacagttcaacatgtagtacctccagaccttttccctgtgcccctggactccaaggtctatcccaccctcagctgtccatcttctagagcaggcggtctagcctccccaaaccagaagaacttcctttttatattcaaccacctgatggatgtccctgatcagttccctcagctgcagagcacaagaaggaccttcaggatccagctttctcctcgggcacgggggaggctcggcggacctgctgattgggaaccgatatggcggcgactctgggcagcggggagcgctggacggaagcttacattgacgcagttagaagaaacaaatacccagaagacacacctcctgagagtcatgacccctgtggctgctgtaactgcatgaaggcacaaaaggaaaagaagtctgagaatgagtggactcagacccggcagggtgaggggaactccacgtacagtgaggaacagctgcttggggtacaaaggatcaagaaatgcagaaattactatgaaattctgggagtttctcgagatgctagtgacgaagagcttaagaaagcttacagaaaactcgccctgaaatttcaccctgacaagaactgtgctcctggagcaacagatgctttcaaagcaataggaaatgcatttgcagtcctgagcaatcctgataagagacttcgctatgatgaatacggagatgaacaggtgactttcactgcccctcgagccagaccttataattattacagggattttgaagctgacatcactccagaagagctgttcaacgtcttctttggaggacattttcctacaggaaatattcatatgttttcaaatgtgacagatgacacttactattaccgtcgacggcaccgacatgagaggacacagactcagaaggaggaggaagaagagaaacctcagactacatattctgcatttattcagctacttccagttcttgtgattgtgattatatctgtcattactcagctgctggctactaatcccccatatagtctgttctataaatcgaccttgggctacaccatttctagagaaactcagaacctgcaggtgccttactttgtggataaaaactttgacaaggcctacagaggagcttctctgcatgacttggagaaaacaatagagaaggattacattgattatatccagactagttgttggaaggagaaacaacaaaagtcagagctgacaaatttggcaggattatacagagatgaacgattgaaacagaaagcagagtcgctgaaacttgaaaactgtgagaaactttccaaactcccccccccccccccaaaaaaaaaaatatttttttttttttttttgggggggggcccccccccttttaaaacgcgcccagattggcctacgcagaggtggctgagaggataatggtcctacgcagggctggggttttgctacttgttcctatttatgttcctgattccattttataatacaaaactaggtaatgatgaaca

SEQ ID NO: 712174 - DNA, 298 bp, Homo sapiens
catcgacgaaaagggacaggtctgtctgccagtaattagggccgaaaactggaagccagcaaccacaaccgaccacgtaatccagtgcctcatagcactcgtgaatgacccccagcctgagcacccgcttcggctgacctagctgaggagtactctaaggaccgtaaaaaattctgtaagaatgctgaggagtttacaaagaaatatggggaaagcgacctgtggactaaaatctgccacgattggttccagccagtgtgaccagagaccccgtgcagtgcattcagacaccccgcaa

SEQ ID NO: 712175 - DNA, 450 bp, Homo sapiens
tgagaattctaaggcccagagacttgatgggaagcaaggtagtgaaactttaagaaagtaaggcagagaggaggagaagaaaatgaggccaggagggaacataattagagaagaataggacaaggcagaaaaatgagcctttgggacctctttataatttaagaagaaataataatgaagggaaattgaatatctaaggcttgctattacattttttgaggccaatatccgtttaagaacaaatcctcagagatgccaggaagggcctgggtttccaaatggaactactcacaaagttccttttgcagttccttcttctgttaatttgctgggaatgagaagactagggaaaaggcgatgtgtgtggtgtaccaagggtttaagtaagagtatgatgggaaggggcacctagatataatgaggctgctgttttaagctgaatagaaaaga

SEQ ID NO: 712176 - DNA, 4810 bp, Homo sapiens
  misc_feature (33)..(33): n is a, c, g, or t
agcgggttgttattctgcctgccatgggcagcngggtacagctgctcatcatactggactaatcaggtcaaggacatggggcttcattctaagtaactcagctgtcatcttcattataaaaccacacattttcctctgactctgggcaatgacctgcgtatataagctgttagtcataagggctggatggggcagcatctcaatcatatagggcacaggacagacctcagtatcaccagcaagaatccattacagttcaacatgtagtacctccagaccttttccctgtgcccctggactccaaggtctatcccaccctcagctgtccatcttctagagcaggcggtctagcctccccaaaccagaagaacttcctttttatattcaaccacctgatggatgtccctgatcagttccctcagctgcagagcacaagaaggaccttcaggatccagctttctcctcgggcacgggggaggctcggcggacctgctgattgggaaccgatatggcggcgactctgggcagcggggagcgctggacggaagcttacattgacgcagttagaagaaacaaatacccagaagacacacctcctgagagtcatgacccctgtggctgctgtaactgcatgaaggcacaaaaggaaaagaagtctgagaatgagtggactcagacccggcagggtgaggggaactccacgtacagtgaggaacagctgcttggggtacaaagcaataggaaatgcatttgcagtcctgagcaatcctgataagagacttcgctatgatgaatacggagatgaacaggtgactttcactgcccctcgagccagaccttataattattacagggattttgaagctgacatcactccagaagagctgttcaacgtcttctttggaggacattttcctacaggaaatattcatatgttttcaaatgtgacagatgacacttactattaccgtcgacggcaccgacatgagaggacacagactcagaaggaggaggaagaagagaaacctcagactacatattctgcatttattcagctacttccagttcttgtgattgtgattatatctgtcattactcagctgctggctactaatcccccatatagtctgttctataaatcgaccttgggctacaccatttctagagaaactcagaacctgcaggtgccttactttgtggataaaaactttgacaaggcctacagaggagcttctctgcatgacttggagaaaacaatagagaaggattacattgattatatccagactagttgttggaaggagaaacaacaaaagtcagagctgacaaatttggcaggattatacagagatgaacgattgaaacagaaagcagagtcgctgaaacttgaaaactgtgagaaactttccaaactcattggcctacgcagaggtggctgagaggataatggtcctacgcagggctggggttttgctacttgttcctatttatgttcctgattccattttataatacaaaactaggtaatgatgaacactttactatttgctaacttcgttggttgggcagagtggcaggagcatgggcacgagagccagatgtgtcttcacaggatccttcctggggagtggctccagggaccaggagtagttcatctaagttaaattaatggcaaggcattggattccgtctccctgctccatgcctaccctgcctatgtgaatggagttcagggcatcccagagcagatccatgctttcttccttcttcccttcttcagtgaagtcttaagaaccaggcattcctaggcttagccaaagcttaatattagttatttacactgtctaccaagaattatacctctcccttcattagagtcatcatctccgccaagatttagcctttggaacatgttcctgcccagctttccattttctaggggaatatggagaaatttaaactattgtagtcaatagttttctattattccaatctctgctcagttagtagcattagcaaactgcctaatttgagattcctttatttccttaaccctctctcctttagagagtccagaaattaaaactactgagcagcatctggaggcgggggccagggcgaaggtataatgcaagaccgagcctcatctcctccacgaagcctccctactccatcatagaacccagagaatgtcccttcggtcatttcccctcagtatcatcattggtgtcatcgcacttaggctgagttcctacatcccacagaggcagatggtcagacccaggaggaggcattgccagctctccaggctgtttgctcaagcctagagatagaggagacagatcctctctccttggatatgggggtctagctttggccccagcagccactttgtttaacccagtatcctatagtttgtgatttgagatgatttttcattcattcaacatttattgagtgcctactataaaagcaggggctctcacacatattttcttacttaaacctcctcacaactctgaagtagatgtattatccctggttctatgaatgagaacattggcccagagaggatgacccaggtcttgtagtggcagagcaagacggtaggctgagtgtcaagtagaaagtggagagcatcctcatgtctcaggtgattctagccagactggcaaagcagaacctttcccgaggatgcctccgtcctccccaaccccatgacccctcatcttttctgtggcaatcttgcatctgttcaggacaacatccctgctgctctttaggaagcaggaccctgtctaacataaattctgtacacaaaataagaggtccctcacaggcaggcagccctccactggtgactaggaagaattcagtcactgcctgggctgtgtggttctgggccttcctgtggagctgagctgcctgaattatcatgactctgaacttggaaggatcattaagtgactgtagcctacactccatgcttccttcatattggaagaaaagtttctggtagagagtcggccgggtgcactggctcaagcctgtaatcccagcactttgggaggctgtggcaggtggatcacctgaggtcaggagttcaagaccagcctggccaacacagtgaaaccccatctctactaataatacaaaaattagccaggtgtggtggcacatgcctgtagtcccagctactcgggaggctgaggcatgagaatcgctgcaacttgcaaggtggaggttacagtgagctgaaatcacgccactgcactccactccatctcaaaaaaaaaaagagtctacattaaacagattccaaagtaaagtttcttcatcccaatgcatggccatgatttacacagacgtgcctagcatggctcatcaacatctgaacggttgttccctaccatgcctctgcaggcattccacagagtcaggagatgggttcacaggtaaagattgggggctttagtggcttgtaggggacaactgctcagttgcagggagagggagcatttctagaaatagccagattttgctgcccaactagatctgtcctcctggttttagggggcccttcttgatcccctctgagtgactgagggaggttacattgtaaaatatgtccatgagccaaacaggcttatggaaagttcttctacacacaaaaaaatcaaagctctcctctccccatccccaaccactgctagaaaattggccataatgaaactgacttgacaggttaaaagaccctgtcctagatgcccaggaatcaggtagtcacacattttatggacttcatggcagcgatgagtaatctgtgatgatactaaatagaagcaataataactaactccattaaatgtcacgctgattgtctgtttttatagcaccgatggtactgttttatttattgccaatagaccacaacattcacatctgtttttcctcaagggaaccgtatttgcttttggttgaaggatttatctatttgatactatccagaatattgtgaagctataatttcctgggttatattttagatgggttgtctgcatggtggtaaaataagctttttcctctcgcctacgtcctttggaagatctcctgatcatacataactaggtagggcttattcttgctgccggagcttggcacccagctctagactgtttctttgagcattactgcagattggagacgtgtgtgagaggagcagcgctcagaaatagggcttgaggctcaagcagaaactgaagctctcattcaaatgaagatgctctctctaccgcacgatcggcagtgagaaaaggaggatgaaaatccttctcatcacaaagagcttgaaggaacccacgtccccagattagcaaccctagagttcatctgctcaggccgggaaatgtgtaagcttccttgatcagctccaggcctcacagcacgggagcagtgaccagtaaggaaacgtcactgctgtgctttctgttggaaattgttcgaaaatacagtgaactggccaggcccagtagctcatgcctgtaatcccagcactttgaaaggctgaggcaggcagatcatttgaggtcaggagttccagaccagcctggccaacatggtgaaaccctgtctgtactaaaaatacaaaaattaggcgggcatggtagcacgtgtctgtaatcccagctcctcaggaggctgaggcagaagaatctcttgagcctgggaggcagaggttgcagtaagctgagatcacatcattgcactccagcctgggtgacagagcaagactctgtctcaaaaaaaaaaa

SEQ ID NO: 712177 - DNA, 841 bp, Homo sapiens
cagacaactaaaaaaaaaaaatcagaaaaagtacttaagcaaaatgagaagcttggttggttggtttcggagatagagtctcgctctgtaacccaggctggaatgcagtagcatgatctcagctcactgaacctcctcctcccgggttcaggcgattctcctgcctcagcctcccaagtagctgggattaccaggtgcccaccaccacgcttggctaattttgtattttagtagagacagggcttcaccatgttggtcagactggtcgcaaactcctgacctcaagtgatccacccgccttggcctcccaaagtgctgggattacagggcatgagccaccacacccagccaagaagtttaacaaagaaccagaaataattaactaaacaaactctgtggatacaatgatgaacataaaaaatgcaatagagaggcaacaacagacttgatcaaacaaaagacagaattggtggactcaaagacaggtcacttgaaattatgcagtcaaagggagacacgaagacaaatgattgaccaagaaagcttatgggatttacaatgttcaccaaccaacaaagaatttttgccttataggtagtcttcccatggataattaagcgagcgtgacggaaataacgtttcttaaagaatccataggctaaattttccagtggcgtgcataattgtctccgattctttaggccaaagtgcccaacagggtgtccgcccaaaaaattcgcagagtttttttcactgttcaacaccatttgggttgagatttaaggaccacttccggggcctaagcgaaatttgaacccacgcaagggttttttcttaaagc

SEQ ID NO: 712178 - DNA, 190 bp, Homo sapiens
ggcacgtgctggcatctggtacctccctaactgggccccgctggtcccatttgctcattagtaatttcctctcacatcagtgggtatacagaattcagatttctccctttaccaggttccttgggtatggttgacccatgacctctgcagtagcctttagttgaggtctgactaaggtagctctaacaca

SEQ ID NO: 712179 - DNA, 113 bp, Homo sapiens
cgcagtggccaggtccttggcgtacatatgctgcccgcccctgtgagagaggcgcttccaggcaccagagcccttgaacttggacaggctcctgtggatgccatgcaagccaa

SEQ ID NO: 712180 - DNA, 185 bp, Homo sapiens
cgctcctagacggccagggaccttacatgcggtggggttaggatcataaatcgagtatctccattactggacaacacgggtgtcacttcttcaaaacattaaaactagaattacgataagatcaagcaatcccactactagatatatatccaaagaaattacatcagtatgtcaacgagatatct

SEQ ID NO: 712181 - DNA, 248 bp, Homo sapiens
ggattatgtccggactacgcctgctcatccaggtacgagtctatctgaatcctgaacaatcaggcgagatatatgtatgactgtgatggtgatgagattttccatgtggatctggcaaagaaggagacggtctggcggcttgaagaatttggacgattagccagctttgaggctcaaggtgcattggccaacatagctgtggacaaagccaacctggaaatcatgacaaagcgctccaactatactcc

SEQ ID NO: 712182 - DNA, 738 bp, Homo sapiens
gtcggggagactgctgggggccctcaagcgcggcctgggtgccaggcggtccggtgtggatcaatggagacgcgcacccgctcactgcggttcccgagactttctggcaccgtgaccgcgcgctgcaggcgcgcttcggatggacggccaggttcctggagcatttgctccatgccctcgcctgcctggagggccccggtgtggccccggtgccgtgcgcttgcgcgccggaaccctcgcagggtctgtctctcctaactggcagcggtccgccgtcttcgagcgcgtcctcatggcgccgtggccgccatatgccacgcccgtctcgcctgtgcctcgctgggccattggcgtcttacgtacacgtgcccagcacttgcgcgagcgtccccactgtcggcactccggcgttgagcccaggcgtgcgtacggtgctcgtgggccgatcaccttggcgcgagcccatgcagcggctcacgggggtgtgcgtgcgccttagtgccagctgtgcgggatcctgaacattgctgaccttcctgcgagcaactgcgggttggactaggcccggtgcctcggaagagaagcgttcctgccataccctgtatagatgccacgcccttgaagaactttacctctggctaatgaccgggaggacacttgtgccctggtcatccctagggccagactggtgttctgcacaggagctggttgcgatgaacaggggccgcacaagattgg

SEQ ID NO: 712183 - DNA, 259 bp, Homo sapiens
gaagttttgattaaaggatgttccctgttatatgtctggtaagcccttccattccctttttgggcccatttatggaatttatgggtttctagggatttggccccttcctctagggtttccccatttttgggggataattggtcctggggttcttttataaagcttttttttcctgtttgttccgaaattatggccccgctttcctttctgattttgattttttggggattcctggggttgtgtgggtccgcccagctta

SEQ ID NO: 712184 - DNA, 449 bp, Homo sapiens
  misc_feature (268)..(268): n is a, c, g, or t
tctcggctctatcaggagcggtggtgaacatttacgtctaagtcttggtatggatctatgctttcattgcggtgggggtagaaacatctaagaggggaagggcggggtcatatagctagatgtctggtgccacaggggtggtaccatggtacacttccatgggcgggatagcaataggcttggaaaatttttcacaagttacttcaaatctatgcagtattagacacagcaggcccttcagcatgtaaacccgtcttccctagagggnctcctcccatagtcatttctcggtagggtagacgggtggctagaaatagggaggatgtgacggcacatcagtaacccaggttgctcttctccctagctgaacattaccaccatgtccaatgctaggggcaatagtagcattcggcctatctgggaggggacagctaccactcccgggggtc

SEQ ID NO: 712185 - DNA, 944 bp, Homo sapiens
aaatcatcacttaattataacatgcacagacacagaactaatcatatgtatatctacattcgagaccacaccttatccccaccttggctatcatcacccgatgaggcaaccagccagaacgcctgattgcaggcgagatactgcctattctacaccctagataggctcccttcccctactcatcgcactaatttgacactcacaacaccctaggctcactaaacattctactactcactctcactgcccaagaactatcaagactcctgagccaacggcttagtatgactagcgttacgacaatagctttatatagtagagatacatctagaggactcccaattatgactccctaaagccatgtcagaaaggccaatcgtgggtcaaaaagtactttgccgagagagatctggagaatctaggcgggtaatgggaggtaatacagcagggaacaactcattctacagagccccctgacagagaacagcatagactaacgccttccctaagtgactactcccctatgaggcactaatactataagaagctcacaatgccttgacctgacgacgaacagacctagaaaatcagatcagaggtattacacaaccaagggcaggcacagagacctcgatagtaacaggcatctcatacaaagccacggaagaacgcggcgaggcaaccaaagacgccacgagacacaaatcacaatacatgctggccagccgggcacacaagaacgaaccacaggagaactcagacccacgccagggccagctcaccacaacggcggggacgcaacgcgcgacaccactgaccaatatacacgggacgacagacgaagacgggcacaacagagaaaaaacaagaggcacatacaacggacagcccgaccacaaacaagaaacaacaagcaagaaaaagcgaccagggcaacaaagaac

SEQ ID NO: 712186 - DNA, 1134 bp, Homo sapiens
  misc_feature (1134)..(1134): n is a, c, g, or t
tggtttttgaaaaagtgcttggaaaattatactgtacagttttttataaacaatttatatttattattgttgggcttctaacatggctcttaactattcgtggtaaaactatttataactattattcttttacaatttggtcactattattattgaaatgggctaatagctataaactattggtctctaatggggatatttcatagaaagacaaaaatcaaggtggggaagaaattatcttatgaaaactattaaccaaaaacccggtgaattatgtgaagaaacaagaatgttcctcattatccattgtgaatatccatctaacttaattttggggtgctacatttatatgtgagtgcgtggcccagaactttctccattctcccgttaatttattaggctcagaaaaagtgtgaaagcagcgggaaggaaacgcggttaaggcaccgtggtgggaaaacgggaagcgcctccttccgacaggggtgtgacaacgggtggcttgccagtgtgttgtgagttctcagagcgtagacgggtgtcgccaaggtctccgtggtttggcattatatgcgcgtataaggtagaagcgcttggaaagttgcgtggtgctcagaaaacaccctgttttgaagtttcggatgtagtcgggaagggccgctggtctgagtcttactctccaagctcagagcgccggggactctgtacactgctgaggctgcaagcttcttaggtcgctaaccttttctatctagtggggaggcaaccggggataacactacacttggggaatgaaacccactgtgctgaaacccggccaaagcaaagtgtgtccggcacaaaggggtctactaaccggggcagaggcgcacaataaaaaaggcgcaaaaaccgcggggagggaggcccctacaaagagccccaaagagatgccatagagaacccctgtgatacaacggagaactcaaggagaccaccatagagaatatgtgcgaaacagatcgcatagaagggggaccaacaggcctctcaacggaacgctgaagacacgggacgacaactgacatcaggagcgacgtaataatagagccagacatggacgagtatgcctcctaattatcaacatactgaggn

SEQ ID NO: 712187 - DNA, 879 bp, Homo sapiens
ggcacacgaatgcgggcgcacacgaatgcgggcgcacacgaatgcgggcgcacacgaatgcgggcgcacacgaatgcgggcgcacacgaatgcgggctgcacacgaatgcgggcgcacccttgagtctctccaccgcagacatgacgaagggccttgttttcaggaatctattccaaagaacacaagaagatgatgtgccacagttcaccacagtgccaggagagcaattttgatcacacattgtctagctggcaacgctgcagcagagcacttctgaaccatatctggcaccacctctgcaaggccagggcaagcactcgcaaccttctcatggtctgcactcaggacttccccacgcgtggctgctagcttggccctcggccaacacacaggcagctggcactcgacgcaaccaggcaacactggcctgcacaggccaccgaaaacatcagagctgctgttgcagcggggtgcaggcagattcaaggactggagctctcgtctgtggaggtggatccctgtggagacgctcaggctgctgcggagggagcggtgctttggtctctatgaactacgatgaccctacatgcaacacaagaacgatggctggtgtcggcaaagatctatggaagtggggctcaggacggcctggccgaccggagttctgtatggattctggtgccggacacttcagggcaccgccgcaattggatgcgacgcacgcgcacggccaactcgaacatggactccccagcagcatttggcccgaccttctcgcgcacgaatctcaccacgctgcactctcgtcaacccgcaggtccttattaacaccacggtctgcattggtcgacacggcctgcgcatcctcacccacgtgc

SEQ ID NO: 712188 - DNA, 357 bp, Homo sapiens
gggtgaacaacggcatggctctgactaggcagcactgaagacacgtcatgtcaaggggtcaaaattctcgggggagcgtgagaggagacagtgagaaaatggggaggggctctgtgcacaggagactcaggacagtggggggaaaagtcacttctccacataagaggctcaaatcccaacgccaccctccgtcagacccctttggccccagctccgacccctccagggtttaccaagttgggctttcacagcatgtctgagcaaacacgcagcgaccttttacataattgcaacctcctccagagaggagagaggccacattctctcggccccacccccaggacttcaaacacactg

SEQ ID NO: 712189 - DNA, 157 bp, Homo sapiens
atatcaatagtcgccaggacaaaatcaatatagagagcatcttgcaaagtgagctttcttgtctcctttagggcttcatctgtgccgaaccgtacaaacatttttgtgaaggcagcgccggttaaaaccctgcgaataaaagtgggactgattttat

SEQ ID NO: 712190 - DNA, 260 bp, Homo sapiens
agaggatccggctatcacattatcttcccctctctgggtagtgcctcattttaataagccatgctccaataaccgaatggacctttatcctggggatggccttgtaccaccgggagtaccaagggcttaccaagtgagtagactggctccaactaacaatccactttggctttggtttagccactttgcttaccagtgaatgggcttctacggctaaggttaatagttttccattccttgtaatttggtaatggtggtag

SEQ ID NO: 712191 - DNA, 289 bp, Homo sapiens
gtagagcaacctccagcatgtgaacgacggttaataaggagggctcacatctcatgtcgaaggccaatgctaagagtggctgcctggcgtgcagcgctgggacgttttagcaagggcagagtgaggctgttcagtgattatggggaagagtcagggcccatcagaggaatgaagtggctaagggtgcctccagtcccaatagccacaagtgaattctgttgaaagggagttctagcatctcacagaccaagtggagcctcaggatggaggccgaaggccagagagcgtc

SEQ ID NO: 712192 - DNA, 905 bp, Homo sapiens
ggaggttaagggagaagatggcggcgctaggggaacccgtgcggtggagagagatatttgtagagcaattgaattatggaaaaatacaaaggagtggagaagtaccacaagaaacttcaggctttgcaaagagtccttcaaagtgaattctgcaatgctgttgcagagaggtctctgacacatgtctatgagactgtggacatcagtagcagtcctgaagtgagagcgaacgctactgccaaagggctactgttgctgcattttgctgccagtgaccggacatcctcatcctcgagtggtgagctaccaaaaacagaaagagggctgggtttcaaatattatgggaggcaaagaacaaaatctccaatctatataatcccgaataattcccggtggaatggtgatagacaatgggggcctcaaacgtggagatcaacctcctctctgtaatggagtgagtgtcgaaggagaccatcatgaaaagctgtagaactgtgaaagcgccaaggacggttaattagtggtacgatacacacccaaagtcttagaagaatggagtcgcgctttgcaaaaatgagatccggacaggcaaggcaacagaccctaaatacattttcacacgttggatatttcatttggcgtctacgcaagaaggagtttcccttggtggaactactaactgggtggcatcgccatgatttgcagaaaaaccaaccaacttttcatgaaattcccctgcattaataagtgccatttaccatactctggcgccgaggaggcacattctctgcagacaagtaaaggtgggggcttgcatacgttgcagggtacagagatggaacggggagacacacgtgaatagaggctcctgagaaggacgcggagacagttgttataagtgtacc

SEQ ID NO: 712193 - DNA, 123 bp, Homo sapiens
tagaagcactgtgttcaggcagtgatatttctgtcaggaggacaaacagtgccaatgtctaggggcttatcctcagaagaaaggacaagaagaccacctcacatcagaaacctagcctgacac

SEQ ID NO: 712194 - DNA, 876 bp, Homo sapiens
  misc_feature (1)..(1): n is a, c, g, or t
  misc_feature (3)..(4): n is a, c, g, or t
ncnntcattgtaagtatcgaaacaagataatacagacacgaacattactacgtccgcctagcttttttgctcttgtatcaccgttcgcgccaatgtgtgccccgaaaaaggtggtgttaaatccctgttgttgtttccccccttcatgggtctccgtgcgccttaaaatgtttatccgtgttgtactctgttttacacagggggggcccttttaaacctcggggcgggttaacaataacttataaaacgctggtattcggaataactttcaatactggcgacattctccctttttggacccccccccaatcccccctgtttggtggccaacacatactgcccctcttaagagcaacggcctgtttaaataaaaaattagggccccggtgcataatatttggtcccctcctaaacattcccacgagaattaattgatattccccctgtctcttaaacaggcgtttcttctaacactatctgtaacaaagcactcattatattggtgtgcataaagagtgtaaaaattcttagagaaaatttcttccacacccccctcccctctttaccgcatctcacatacaagtgacaacctccttttaataactgtccccagtatcaagtctcactcctgtagccttacccacatcataaagtcccatccagctctatcaccctgagtctctgtattaacccctccttctcgcccactacgcccgtgtaaaaccccggtcacacttagactgcgtgattatacgtactccgcctcctactcacaactacattcatcctcatccgaaaataccccccactattctgaatcacaagcggtccagccccgccccaaaacttctataacatacaccacccgccctcatc

SEQ ID NO: 712195 - DNA, 807 bp, Homo sapiens
ccaagcactgagtgtgcctggtgttgccacggccagcagtctctgcggtctgcgtcgtggccttcccttggccgtccgctccctccctcgcggcccaatttatggtaccgccccgttggtggtccgccccccgccaaaacgggggttctcttcttggtaggccccgcccctgcgcttgtttgtgcacgcccgcgcccatcccggtgccgccctgcgtgcccgatgatacatccgggctgtgttcttttgccggccctcacgtcgggagacacattgctctgctgtgtgttcttctcagaggaagtcttttcggtgacgaggcggagtcttcgactaactcacacgcctgtctgagatccccccgatggtcgtctctttctcttgctccccgccagtgcgtcggtctgtcgcaacctggtcagctcgcagattagctttcacttcgcctcgtcgtgtctgtcctccgcgtcgcgctatctgtgtcactcacgccatgtgtcattgcctctcgtgacgggtggtgccttctgtgtctcgccccgcacgtgcgtgcccactggagcagcctcacgtcctctggttatcttatcgctccttgtgtcctcgttcatttccttctggggcgtgtgatcataagagaaggcagagtcgcacttcatcgtattcccgcagccatcatctgccgccggaccttgcgagcagaaagcgccggaggcggcgctccccttgcatgttccccacggagtctgtgtctgcccccgggtgcgcactcaagacaaagccctcttcgtcccatcatggaaccac

SEQ ID NO: 712196 - DNA, 578 bp, Homo sapiens
tcaggatcttaaaggcgagtcgggtaggagaaggcattagtgctggtcagccgggtcgcttgggggtgagcagtgcaggcaggtgcgagggccgggagacccgaggtttaaggcaaagcaggcaagggtgtacgcagcccaggcgggtcacctttggcacaattaggggcggcaaccgcagtgaccgcagggcatggccgagtacaggggctggaggaccagaagccccttggtcctgaacctccactccaggccctggcaggcacttgggggacttctgtccccaattgttgagtccctggcccagctctgggtggtcagtggagcgtgtcctccctgtgccagctctgggtggtcagcagagcgtgtccgtgttgaaggacagctgggcccgttcctcctcgaagctgatgaggccctcgtcctccgtgtccaggtcctcgggctcgtcttgcacaagtgcccggagctccgtgggggcagaccggggccggagcaggctgagcaagcagccgagagggactgcagttgcgggatggggggtccgtctcctgctgctccaggttgccactctggtt

SEQ ID NO: 712197 - DNA, 736 bp, Homo sapiens
acgctgaggtgggccagaattgggagctggattgctccaacggcaacctcctaagtggcaacgccaggcaggggaagttggttccgggccactcagggctcaggctcatcatccagtgaagccaaggccctggacaacaggttcctggggcccctgtggggccccagggacaggtggtgggtagacggtatcattggggtgtggacattatgggccttcaatggcgatccatccatggctctgggcagacacccattctgggcaccccccaaaagaccccagggagatggctgggcgcctggaaaacccccactggtggcgggcagggcgtgtgggggctggggcttgtgcggctgggaacactgggttggggcttggagtggggcgggagactctctaaaactccgggtggcccgaagggcacaggcccacacgggggctttggggcttctctggcctttccaaggcgggagagaatgaatggctgaacgaacgaacttcttcaccggtggggcagaaggggaaccacaggccccaagcctgggtctctggttccccctggtcttttgggcagcgaacaaccttttggtgaaacccttcgatgaactcactggctggaaggaggaacttctcctggatcaccccgaaggaattctcaccaggtcccgtgaacgaaggctggggggtggggccgagaggatgtgaacaggggagggagaaccactttttgggctgg

SEQ ID NO: 712198 - DNA, 423 bp, Homo sapiens
gagccacgtgccatggtgtttgtgtaggtatgtaaattgtgatgtgtgtgactgtgtatggtacttttgtgcacgtgtgtatgtgtgtgttcacatgtgtgtggtgtgcgtgcattgcatggctgtgggtggtgtgtgcacacctgttttgtgcacacatgtataagtgcttacatatggttgtgtgcacatgtgcatgcataaggtgtgttcacatgtatgtgtgtggtgtgtgtgcatgtgtggtatgtgcacacgtctgtgaaatgtgagtgcatgcatggggttaatttgtgtatgtgcatgggtgcccacgtagggtgtgtgcacgtgtgtgcatgtgtgtgttcaccattgtttgtctgtgtggtgtgcatgtgtgcacttgagtgtatgaatgggggttatgtgcgtctgcttgtc

SEQ ID NO: 712199 - DNA, 774 bp, Homo sapiens
gataacacccgcgaccccgcagctaagcgcagctcccgaagcaatggacccggaagctggcagcccagatgagcgaggctgatggccgagtaagactgctccagctaccggcgtgtacataagcgaggcgtggaagatgatgccgcggatggccactggattacttcatggtctaccgtggaggccacttatttgcgatgttgccatggggaaccgtgtaccgaggcagacaggcgctcgctaatctgcggaccagctagacgagacgggctggtgaagaccctggatgttgacatgcgcatgacgtggatcggggcgggccctaccagacctgacaacgtgtgtgaattgaggaaatgtttgaccgcgtggtgcatccgaacactatactccctaagaagccgatgaactgaaccaatcacccttgatgctgtttggactggcactgaaagcccgtcttatgttcccacttcacgatcttggacctccttgacaaggtcctacacgttttgttctccctcatagaagaacttactaaggatagcgaacttctgagagttggcttccacggttatggagagacagacttccttggcgcggacttgggggtacccaaagtgcaaggtgatcccaaagcggacctatgtgcgagcaatggttgctaccaggcaacatcacccgctctagtttgcttcacccagccagacaaggtaccaacggacattcgacggatgcaacacgaggaatgtgttaaagccactaccatgcggcggc

SEQ ID NO: 712200 - DNA, 379 bp, Homo sapiens
  misc_feature (351)..(351): n is a, c, g, or t
  misc_feature (353)..(353): n is a, c, g, or t
caccaagagcgaaactccatctcaaaacaaaaaaaaaagactgagaatatcgttactatatagagatgttcattggggagaaagtcaatagagtcttgaatattctcgtgatgtgcagaataattgtgtagagattattttaaatcataaatacatcttatatcttaatatcttaaatatgttttgttttccatatatacttaagatatttctatgaaaagtctatcctatattgccagcagagtctgtgtaacctttgaaagttgagtaataacgtaagctgcttgcttattttcataaaacgtgatttctttatatcgtgcattttcattatttttctatatatagtanantcagtgtggcattgagagtcggtgtt

SEQ ID NO: 712201 - DNA, 403 bp, Homo sapiens
acccaggagaaagccccctcccttaggaattaggagtgggcatcaggcctgggaccctgctttccttccccgcccccagcctgttaagttaagtggacaggcccccaaaatgcccttgcatgtgagcaaatggcaaaaatgggtgtgtgaggggtgaggaggcctcacccgttgagccccgaaggagatcaggcagccccccctgcaggagaacgtcagccctccagggggtcagcccctgccagttccccccagctgcaggggccagcccggcagggatgggaaaggggtggggagcgagtccctgcctcctttgagcaaagattcagagtagggtcccatgaataggggaaaaaaaagagtctttttttgtttaataataaagaatttttattaactttta

SEQ ID NO: 712202 - DNA, 297 bp, Homo sapiens
ggcacctgtgatctcagcttcccgagtagctggtattacaggcatgtgccaccacaccccgctaattttgtatttttagtagagacagggtttctccacattggtcagggtggtctcaaactcccaaccccagatgacccgcccgcctcagcctcccaaagtgctgcaattacatgagccaccatgcccagccacatttttcccattttttggctgccacttgtatgtttttttttttttctcctagcagaaaacaaattatatgtcctctttttttttttgagacggagtctcgct

SEQ ID NO: 712203 - DNA, 229 bp, Homo sapiens
ccgttcagtctgggaccgctacgtgaactccaccatgagtttcctctgtgcttctgccctgcccatggcatatgttcaccactctttctgggtcctaacactgtgctgcgagtctgggggctctgcactgaactgcctgcctgtggtgcaatgcagtgtgaaggccggcgctgctcgctggacgaggtgggatcccgaggcctctccagtcctgccgagagcgcaccac

SEQ ID NO: 712204 - DNA, 355 bp, Homo sapiens
gaaaaaggccaatttaaaaaggttttgtaccaaaagattccatttatataacgttcttgaagtgacataattatagaaatggagaacagattagtggtggctgtgttaaggagggggtgaggatgggagagaattgggcgtggctgtgagaaacatgagggatccttgtgatgatggaaatgttctatatcacagctatcgatgtcagtatcccagttgtgatattgtgctatagttttgcaagatgttaccactgggggaaattgggtgaagggcacatggaatctctgtattatttcaactgcatgtaaatctacaattatctcaaaataaaaataaaagttaaaaaaacaca

SEQ ID NO: 712205 - DNA, 424 bp, Homo sapiens
ggcacgagattcaaatagtacaaagatttggcttaatgtgaaattgggtcttctttctaccccagtccccagtcttttagttctgtgttacagaaaagtactatgcgattgttagcaattgtctcatgtagtctttcagaaatattccaagtatataaatagtaatatactttgacatttttatacattgatttcccccttacatatgtttgaaacacttccatatcagtacatgtaatctgactcattcttgttagtagcttcataatagttatatgaatgcattataggtcatttccagtattttacttgcttagtgtttttggtcagcatcatttggagatagtgtgtaaagttaattttgacaaaggccaggcttttcaggttacatgtaattttatgtaaatcttacaggtgatatgag

SEQ ID NO: 712206 - DNA, 133 bp, Homo sapiens
ggatcccccgtccatcgttcatgtctgaactatccaacggttctgatcggtcttcgcataccgtccgactttcgattcgttgcattaactgagccacattcttgcgtcaattgcgttcgctctggtccgtctt

SEQ ID NO: 712207 - DNA, 1092 bp, Homo sapiens
cgccaaccgatcccacagcgccggcaggactccgggccgaactcctggcaaatccagttccagaggtttcagaccactcctagcaagacctggactggtgcaccgcgtatatcccccatcgcagtgcatgcccagcatggagggtggccaggctttccttcctgatgcaaggagaaccagctctgaaagaccgccagtatcgccgcaccaagcaaggaagcatcagaatgcctgggctttgaacctgaatcggtttttgactgctaggaggaagccagagactaccttcggtcctcaggtgggaaaacgcacaatagatgcggctcatgagcggttcatcaggacacaggtactgataaggtactgctactagccacaaaggccactcctggctccagccggaagacctgccgttacattccttccctgccatgcaccgtgatcctggagtgctgcctgaaagtccgacaatgactattacctgaaccttgtggcattggcagttctgggcaatgtactggcctgtggcactggacaacagtgtgtacctgtggagtgcaagctctggtgacatcctgcagctttgcaaatggagcagcctggggaatatatatcctctgtggcctggatcaaagagggcaactacttggctgtgggcaccagcagtgctgaggtgcagctatgggatgtgcagcagcagaaacggcttcgaaatatgaccagtcactctgcccgagtgggctccctaagctggaacagctatatcctgtccagtggttcacgttctggccacatccaccaccatgatgtcgggctagcagccaccttgtgggcccctgagtggcccagcaggaagtgttgtgggctgcgcttgggcccagatggcgacattggccgtgtggtcatgctacctggtcacgtggtgtgccctatgccctgagaaggggggcggggtcaccggggaatttcccgctcagggggttcaggccgcctgttctctgggcctgttgtcccaggggccctgttcacaccctcatatgttcccggcaatagggagccaccattgtctcttctacgacgagccggtggcga

SEQ ID NO: 712208 - DNA, 518 bp, Homo sapiens
agcgagtaatatataccagaaataaaatgaatggtactttagactgctgtggcaaagtttcctgactaatacattcaggacctgaggggtagagcattcatgatggtacctggaagtcagccatatatggtttaggagatcagagtaatttcttattgtcgggaactcaaaggtaataccataaccttcatatgggatctagatgtagtctgtagtaaggaggactcaacgttacttgtatgaaaatttagaggaatcaccagttcagtatgctgcgtatgtcacagtgggaggcatcacctctgtaataaagcagatgtaagcaggacttaactattagtactattgtgaggtaaggaataggaaggcaacttctcataacattcccatggttactatcaccttatggctatttttcacaacaaggcccaacacaaaaacagatagatgctgcctcatacacgctgaacattctttggacacggatacagccaaggaactggtacggataagcgcgg

SEQ ID NO: 712209 - DNA, 121 bp, Homo sapiens
tcctgcaagacgggaaaagagctcggaagttgatataaaatggatgtctgagttccagcacgcaggtggggccatgggatcacaggataagtggcgttggcttgccatgattgtgaggggt

SEQ ID NO: 712210 - DNA, 138 bp, Homo sapiens
cgttatgtagtgcagtgcatgctcgaaagcgctttcttgtcttgcaactgctgcagtatcgtagagtgcctatacgacgaatacttgacagtcaaagtaggtgagtacgtggcatagtgtgtccttataaataggtag

SEQ ID NO: 712211 - DNA, 189 bp, Homo sapiens
cttaaaaacccccgggggcggttccccccccggggttttgccttgggcccgggggggggtaccctttttccccggggaccccttttgccctttgggcctttttgggggcccctttaaacccggttgggcccaaaaaccgggtgggggcgggccgggatttcccgggtttttttgccccccgggggccga

SEQ ID NO: 712212 - DNA, 896 bp, Homo sapiens
ttctgatatacgttttcctggtgcccatgacctgggactgcttcttaccccggtgttatcccaaggtgccctctcgagcgcctgtgttgttgtaggtccgccaatctttggcagaaatgatgtggttcagctccgcccagattcctgggtttgctcatatttgcgggcgggtcttacaccgaatttaggaatgagttctcccatgacctctagactaacatggcgtccttgtttggtaggtcaacatgggacataattcctcgtgcttaagacgtaaccacgaatcgccctctgttagtaccaccacacagctgaacacggtagtcgttctctccaacagtaccccagtacatggagacgtccttcctagggaggcaacttttgctctaaaaatctctagtgttggaggggcagtctcacggatttcttgagatgagcaacaactctacgggatgctcgctcctacgatgccctctttagtcaatatttgttcagcgtgcgtctcctaaagtggactacagtcgatatgagtgtgaaaggactactatgagggacaggcagtcgtgagtggttggcccgttaatctcccgataagctggtgttctctcccgtgtcttctgccgcgaggagcgcttttgagccaagagttctccacgtgggaaaggacatgaaagtacgctgctgacacgttgttctggtaaacaagtctcgtggtgagccacttggaggtaacagaagcacggccccctggtcgcgtcctgttaatttctaccgcgagcgtacattgactcgccattgggtttctgccactaagaacagttcaccattcggtacgttaaaattcgtagggggcaataaaatcactaacaaggaaagacctccaaacgaaaaatgac

SEQ ID NO: 712213 - DNA, 893 bp, Homo sapiens
tatcaacgcagagtggccattacggcgggctagagcgacatcatggtattccccttactaaagaaagtgtgtattaggaggagagagaggaaaaaaaagaggacaaaggaatggatataaaaaaatgtaagttccaaaaagagataacataagaataatacgacgaaaagatgctccttgtgttgtggaacagataaatttttttttagacataaaagaagtttttacggtggggaagtggtggggaacattcgccaagtaaatatgaattggcgcgccttcgaagaatggtccggggggtatcatattggggtgccgtctggggtgcttcaattgtatagcccggcgtttcggcgggtggctcattacacctctggtcctgggttctcgtgatatagactggggaagaaatcgtgcagttaccaggagtccccccggagggttcactctcacggcggtgtgtaagaattgcgcgcgcttctgccctcctgtggcggagtaaaaatgtggcggcaataaagcctgtaggttttaagggggaggggggctaaaaggggagaggccttccacagaggaggtttgtaaagggtgcatttaagggatcaaattggggaaacggcgaaatccttttgtaatgaacacacgcagtgagtgcaacaatctcggaacggccctgtatataacatgtgggagcgcgttgggacatgtgtgccactgacaccgtgcgggggccaaccacagctcggcgggtcgagtacgaaggaggccccatagggtgaaacaggcaattttaacaaacgccaccgctggacccgacagggggtgggggaaaagacatttcaattcgcacaagcttcggcgcgggcactgaaacaacaaacaggggtgggcga

SEQ ID NO: 712214 - DNA, 1140 bp, Homo sapiens
actagttctagatcgcgagcggcgccctttatgtatttttttcccaaggtttgaaaataagccattttattccaaaagcttgtcagtggccctgatgacatggtcgatgcgcgtgagtgatcaacgggcgtcaggtcagtttcaaacccaccgagatcgttcataagactcgtgaggatcatgtcacagttcatggctgtaatgccgtgattatttggccagagtgttgcgccatttgtcttccatcttatcagccagcgtgagaggaacactcgaggcaagggaagaatacttcacgaggcagtttctcgttgtctcgttggcagtgaaccatgtgggcacattgtgggctcgctcgaaaacagcgagaacatcgtccctctgccaatctttcgtggacagcatgaggcccctcgtggcgtgtcaacacgttacgccaagccatggaccagacaatattgtgtcgcagagagcccccacagtttacacactcccatacgagctcataaacaggtggtctcctttacccgagggtcgtcccgtgcaacattattgggtgccggttcgggccattataaagtgagcgcaatttatcaccaaatgtgtggagaaagaagaatgtggggatctcacattaacgatactatactatcctttaaacaccgtatagaaacctccccagagctccgagtggtaaggaaacctactctgtgcctaaatattcccgtggcattgctgagaggacacgacccaaaggatacgtggggcgccccatacacaacgtacctacacgtgggcatctcgacgacaaaaaaggaaagacatacgaagggttactcgtgctatggggcagtaagacgtaggacgtcagggacaggaggggacattagttcacgtagacctaacttatcataaaaaaaaagctgtggacgtggcgtggcatcagcagcggcagcaccgaaatcacacgtctcacaaggattacccacacatatccccaccctatagagggacacgtggactaatcacgtcctataccaccacttaagacaaaacagcggcatcctatcacagccatttgagcgccacggtagaaagactacatgtaccactccgagggggacagaaagatccacgtgg

SEQ ID NO: 712215 - DNA, 766 bp, Homo sapiens
agcggctctctctgcgtaatggcgctttacggccgcgccgcaaagcaaaggtcgtgcgttgtcggcttggtagcgccttccttctccgacttcccagacttcccagtctgcgcaggcttacttggggacgcagggaactaccaagaaagtgtcagaggaaaggaaaggtgaaacagacgaggaactggaacgggaataagtgggaaagaagccaaggggtttgagagagacttgctgccctgggtttttggtttttgttttttgagacaagagtctggctctgtcgcccaggctgcactgcaggggcgcgatttcagctcattgccgcctcaacctcctgggcttaagcgagtctcttgtctcagcccccgacgtagctgggactacaggcacacaccgccatacctggctaatttttgtatgttttgtagcgacagatttttgccatgtcgcccaggctggtctccaactctcaagctcaaataatccaactgtttgggcctcccacagtgctgaggttacaggcctcagccaacgcgcctggccctgctctggttttttagggagtaagtagtgcggaaaggacgcaggtcttagccatcatctatgaataatacttcgtcatgggaatgaacacgcctttgcaaacattatgacctgatcagggaggccgacgcgggatcacttgcagtccggagttcaagaccagactggcaacgtggtgaaaactcgtctctactaaaatacacaattagctgggcatggg

SEQ ID NO: 712216 - DNA, 381 bp, Homo sapiens
ctcagcactcaagtcctcccgaaccgagtgccttccagcttgcttggccctctggtgctgcggtaggggctctgggaaggtctttgctgggatttcttcctcttcctcttcctcctcctcctgtgactcctgcagcagttctttggcttctatccacttcctgctcccttgtgctcatggtgcccactgtgtgccacatgtgccaggccacagcgccgtccccgagtcacggcccacaccccatggggattctcgacaccggagctgaaggccacaaggcgcccacagtgaggatcacccgagccgtgacagtgagggcgttgggctccgtgaagaacaggtccccaccctggaagtcatcgttgaggatggtccgcacag

SEQ ID NO: 712217 - DNA, 128 bp, Homo sapiens
cccccccccccccccccgggggcttgggctgcaggtttcccgggggggggttttttttttctttcccagccctttagccctttttccttttcccccttaaccccccattaatttttttttccccccca

SEQ ID NO: 712218 - DNA, 311 bp, Homo sapiens
  misc_feature (8)..(8): n is a, c, g, or t
  misc_feature (100)..(100): n is a, c, g, or t
tgtcaggnattacaggcatgtgcaccacacccggcttatttttgtatttttagtagagacaggcttcgccatgttgaccaggctgtctcaactcctctgngaatccgcctgtcttgcgcttccagggtgctgcgattacaggcgtgagccactggaacctggccttgtattgctttattttttctcttacatgaagtaaagcgctttggtcaaacacacataaaatactgccttgtactggtggtgggttccattagtggatcacccacagtgttctacttggcttgtccaatggtgccttggaataggga

SEQ ID NO: 712219 - DNA, 169 bp, Homo sapiens
agaggtggtgtctcccaattagtgcatgagtaggtgctgcagtatgtagcggttaggcgtacggcaggtattggttgatgagtaggctgatggttcgataataactagtatggggataggggtgtaggtgtgcttgtggtaagaagtgggctaggcatttttaatctta

SEQ ID NO: 712220 - DNA, 647 bp, Homo sapiens
gagagatcgggatagaatcgccggacaggtggccgctgccattcaagaagcattagaacaaaccatgctggtgttagtcaatagcctcattcgtgaatcctggatctgggtcgtcttcttttcgaggtctcttgcgtctgtctggccaggctggagtgcggtggcgccatctcagctcacgtgcaatctccgccttctgggttcgaatgattctcctggcctctagccatcccgaatagtgctagggattcacaagtgtgagccattgtgcctggtctggtatgggtctcttgattgtacttacaggggacatgaggaagaggcgcttcctcccattcccttgggtgagggggcccagggtgattgggtggatgtatacccggcatgccagtcggtggcttcccaggtcaaacatgttcccatctgagttaggaggaaggagccagggaacccttgtggctcagctcccccagcatcctgtcttgcgcactatgtcagcaacacgtgtagcaccacgcaagaggataggctcgtgagcttgttgagctacagatgggtccctggggctgccagagagttggcttcctgctggagtcaacgctgagagggccaggggttccatgctcattccctggcacggtcacaca

SEQ ID NO: 712221 - DNA, 937 bp, Homo sapiens
  misc_feature (787)..(787): n is a, c, g, or t
ggtttacaccggcggtcagtgcggccgggttccttccgcgggacggggatggaagaaactgagtgccttaggatgagctgtccatcacagtatgagtagagagagaaccccgagattctagttctggcctcctgactgggagaaacgatgatgagtcgtcgtaaagagagaggatgtctctctcagacctggcacctggcggtgaagctggctgaccagccacttactccgaagtctatacttcggttgccagagacagaactggcgagaaatactcgctagggggctatagtatttcattctcgtgaagcacgcgttatatgcgtggctaaagctccacgtgagtcgtgttcctatgagccctggagctgtattgatcgtgatctacttgtggtcgtgaagctacaagatgactcagacacttggacttctattggcattcaacctgggtccactgtccatgttctgcgagaagtcctggcctgaacctgatcgagagaccggaacctgtggtacaaagtggactagtccattgagatgagttcctggtgtgttagcacactggcctgtcacagtcagtcgtcctcttgacagggatggcggtacttgtaaagatgctcatggtaataaaggaagtccgctggcatcacgcatcattcgtggtactacccctaggcctcaggcgagtgaccctatttgcttcgttgagggttctcccagggagcaaggacctctttctcgtgtcttcggctgtatgccaaatatgcttgagtacgtcggtgcctgntcacctcatgcctcgtcaatgccatttgtcctgggttctgcactccgtagccaggcagtggcccgaatgcctggggactgatggcctcttccccggagcatgcccttccaggtcataaccgggatatgccaggtgggttacctggttgag

SEQ ID NO: 712222 - DNA, 165 bp, Homo sapiens
caaagacacaggaatatacttttttgaaattcctgaaagagattgggaaacagtatggcagcttgtcacgcgggtgcattgtgttagtcagaagtttgagatttctactgcagcatcgtccagtcagatgattgctgcagcattgtttgtcacgacctgtctcta

SEQ ID NO: 712223 - DNA, 262 bp, Homo sapiens
atgacgtctagtaggatccccgctcccgacggggtgcaggaaggagactgaggagccacagtgtctgatccatctgcagcctcctctccgggttcttcagggtccccgaagtttctgaggcaggggtctgctggggtctggatgcaagtcttctagcagtgctgggattagctccatgtgggtaaagctccccacgtagcctacctctgtccccccagcgccgaaaagcccagattctcgtcaaaagcttggtcggcccaag

SEQ ID NO: 712224 - DNA, 1049 bp, Homo sapiens
ggctacataagctatcgggcccataacccgaaaatgttggttatacccttcccgtactaatttaatcccctggctccaaacccgttgcatgctactactatccatctttgcaggcagcactcatcacagctgctaagctcgcattgattttttaagctgagataggccatagaatataagcatgctagcttttattccagttctaacgcaaagaggaagatacacacccgtcgttccacacgaagactgccgatcgaagctatttcctcacgcgaatgcaaccagcatccataattccttctaactagactatcctcttcaatcaatataacttcatccggaacaaatgaatccagtaaccaagtagctaccaagtcaatgtactcatcatttaactaatcataaatggctctaatagcaagtaaaactaggaactagtccccctttctcttctgagttccctagaggttacccaagggcacccctctgacgatccggtcctgcttcttcttcagcatgagcaaaaactagcccccatctcaattcatatagccaaatctgctccctcactaaacgtaagccttctcctcactctctcaatcttatccatcatagcaggcagttgaggtggattaaaccaaaccctagtacgcaaaatcttagcatactcctcaattagccacataggatgacataatagcagttctaccgtgacaaacctaagcataagcattcttaattgaactatttatattatcctaactactaccgcattcctactactcaatttaaactccagagcagaccctactatatttcgcactgaaagagctaacatgactaaagcctttattccattcacctgctttcctaaggaggctgccccgttagcggctttttggccaatggccttatcgaagattcgcaaaagcatagctcatatcccaccattatagcacatgaacctcttaagctctattttactaagcctattattcacttatcaattatcccattttaacgtaactaatgcggttgaatacaaaccg

SEQ ID NO: 712225 - DNA, 302 bp, Homo sapiens
ccctgaacttaggctggctctgaacttaggcctggcaggaggattgcagcactttgggaggccgaggtgggcggattacctaaggttgggaattcgagaccagcctgaccaacgtggagaaaccccgtctctactaaaaatacaaaattagccaagccgtggtggcatatatctataatcccagctactcgggaggctgaggcaggagactcgcttgaacctgggaggcggaggttgcagtgagccgagatcacgccatagcactccagcctgggcaacaagagcgaaactctgtctcaggg

SEQ ID NO: 712226 - DNA, 83 bp, Homo sapiens
catttatttggggggttttttccccccctttctttccccagcccttttgaaatcaagcaagggggttcctttttgagatttta

SEQ ID NO: 712227 - DNA, 233 bp, Homo sapiens
ctctagaggatcctctcctacgagcgcagcaggtggtttcgacgaaaatagaataaaattctaaaacaggttgatatggaaattattttctaatacagtcttttccaggttgcataaagtacgtcccggaacctacgggcgactcaacaaaaacaagatcaaaaacaaccaggtaccgtcagatgaaaatcttcaacgctgtactgcgagttttacgccccctccaagcgcca

SEQ ID NO: 712228 - DNA, 184 bp, Homo sapiens
ccaaaatatttatgtcaatgtccaaactaagtccaatgccatgagactgaagtctttgtggaaaccatctgttacagacaagcttatttccaaatgccaccttcatttccaatacatctcactcaggcaaaggaggctcaagtgtaacctcagagggcctagttttagacatttgaaagtggtt

SEQ ID NO: 712229 - DNA, 106 bp, Homo sapiens
tgtcagcggcccccaaactctctatccggcccgggccagttcactcattttttatttatttatttatttatttatttatttttgagacggagtctggctctggtgc

SEQ ID NO: 712230 - DNA, 393 bp, Homo sapiens
caatttatttatccattttcctgtcaatagacgtttggaatttttgaagcttttgttattcttggctgtgatgtaggaactctcttatgcatgtctctgtgcacacatgcaactgtttctctgtgtttataccttggaaggccatggtacaaaatattaaactctacaagatttacaactccagaaattatttttgacaaactgatttatctttactctctaacacttggtattgtcagacttcttaatttttgccaaatactttgaaaaatgatattgtgatctgatattcattttcaaggttttttcataagattgatcagctttatctgtttatttgtcaaatatattcattttgattaaaatattatatctttttcccagttaaaaaaa

SEQ ID NO: 712231 - DNA, 563 bp, Homo sapiens
  misc_feature (457)..(457): n is a, c, g, or t
  misc_feature (479)..(480): n is a, c, g, or t
  misc_feature (483)..(483): n is a, c, g, or t
  misc_feature (504)..(504): n is a, c, g, or t
  misc_feature (528)..(528): n is a, c, g, or t
ctatgccccccattcccaaaaagccccccagatggccaacttcttcctaattgcaaaaacttgcctttttcgcctttacgtccccctctattcctttaaacaaattttcaaacaaaaattgttactcccccttaaaaccaaaaattttggttttgtgtaaagaataaaaaggggggattgctgggtaaaattacaagcaaattttgtagatttttttccctttgtcaaaaaaagtttatggaagttaatgctgtcaaccccccctggggggcccttaaaaaaataaaatgccgccctcccctgctgagtttaaagcttaaaggcctaaggagccccagccccatttggctaaattggtttgcaagtcccccacttttgggtttaccccccccccaagatgccaccagaccaccaaaatttcccctgtgatttatctttttgctgagggggaaaaaangtaaatgttttgaaaattcccnnccncctttgtggaaactgtttcancaaaggtttttgtataaagggaanagggaatttccaaataaaaaattaagtatgttttg

SEQ ID NO: 712232 - DNA, 91 bp, Homo sapiens
tcagctgaatgctccttggggaaaggggttggggtacagtcatcatcaggccctggggcctgagagaattggctcaataagatttcaagat

SEQ ID NO: 712233 - DNA, 570 bp, Homo sapiens
aacagaaaggcctagcaatggaccacctgatgatgcttccactgtggtcagataagataatttacaattgaatggaattattttcctttcagtttatagtttactgaagtgagccttgcattgtaagttcctgaagtaatcactggaaatgtcttaattcagtagctccatctttagttaatgctgcactaaaagaaaaaaggaattttacttacatactttttgacaagtcacattcatatatgttttagtggaaaaactgttttacatcttatatatagaagctgtaaaataacatgttctggggagaggaataagatgaatagaataacattataattatctaaatgttctttaaatggagatagccacaatctttcgtaaaactctggaaagaacagcatgaccttcttattgccccctttccaccgacgtcaaacagaaggaaattatagaataagtctgtctaaattttaaatggttcagttatcggaagactttagagagcaagttttccacaaatcatctctgcgccattttgtcttgattatttttttaagggttggtttg

SEQ ID NO: 712234 - DNA, 1011 bp, Homo sapiens
ctccgattattttctcaccaccacgtggggagatttctcgagaacatgggctttttcgacagatgtttctcaacatgttgttcttcgccgacacgtttggtggtgccaacacacaattgccccctcgcgtatgagagcgaggttctcctcttcgacgagtgattgttttctggtcacttctccccgcgccagattaatagtcgccggtcttcattccccctcttttttgtgtggtggatcgacggccagcctccgtcgtagactcaaagaggttgttcgttgccggctgaccaacagagagttgggtttgcgccccccctgctgtttgataagaccgggcgtgagggacaggcgcccccccttcttcttgtaacagttgtggggagggcccccccccctttgttattttggttctccgcccgcccacccccctttgttgggtggtgcctcttttcatcagcactgccccccctctggggccgtcgtctttctgttttggctaagtgtgtgcagcgcagccccctcttctgcggtcggggttttttttctcacacccggcggtgcgagctacatacttgtccttctgtggtggcttcctcccgcgctgtgctctctctccctcttcttcctccccatcggcttcgtctcgctgcggcgcggcgcgaagagattatctcttccctccttctgctcgccccccccccgccttttattttcgttgcggtggtgtgatcaacccctttctctcgagcagttgttgttttctctattcgtgccgcccctcttgttctcttgtctattgcgtaggggtgggtttggtttcgtgcttccgctgctgtttgtttgaccccctccttcggcgagagaggagcgtagtttcttttggtccccccctttgtgttctttttttcttggtgtgctccccttctgtgtttttttttttttttactccccgctttttttttggcccccccccccccccaccttcccccgcaatgtgggcccccccca

SEQ ID NO: 712235 - DNA, 265 bp, Homo sapiens
gagtaactggtcgtcaaaactccaggtgacacaaaatagacgtacgaaatggaatttaagatatctagaacacacaaatagtctaagacccaaactggtattagatacccgacatatgcttagccctgtaagctcaacagttaaatcaacaaagctgctcgcagtatctctacgagccacagcataaaagtcacaggacctggcggagattcatatccctctagaggagccttttctgtaatacgataatgtgatagccgggtac

SEQ ID NO: 712236 - DNA, 351 bp, Homo sapiens
agtgatccccctcccaaggtaatgaggaacttgtcaagagatattccgcctagaccagatacggtgcgctcccatcttgcgccaaggtggctcacgtggtcacccaagttctttgatggctttcacctgctcattctcggtatgtgtctcatctgcagtcacacaaatgggggtcatttttgtcagtggccagtttgtgcagtatccagtcgtgactgatacacatctagcgccaaatagtaatgcacactccattgcatacagaccgctctcccagtcatcacagtctggtttcttgatatcctgaaggaagattcggccacctcgtaggttctgcagcttcatcagtac

SEQ ID NO: 712237 - DNA, 183 bp, Homo sapiens
ggtgggctacctgagtgtgcaagcctgagaactggattactagccaggctccccggctcgactgtaagtcttgtgtaggtgctgggaagtccctgaggtcatcaggagcccggacactgcgggaagagggaggcacaggggctggacccgggatcctgcccccctggccacccaccatcaggc

SEQ ID NO: 712238 - DNA, 794 bp, Homo sapiens
gaaggagacagacttattactagatgattcgctggtgggggtctattgggaatcgacgtactcaagaggttctccatgtgtggtacaggatggcatagctgaaggccctgaactgtggaaccagatggcacagtgcctcacctgcagcctggcaaccatatatcatctcacagctctgaggccctggggggggttacttcctccaccaccatccctatctcacacatgaccagaccgtgtgctggtggcccatgcaacttggaatgttggccagactttctgaaaataaagaactatgtggataatagcaggccaacaaaaaaacaaaaacacacgaacaacaaaaaaaacaggaagacacacaacaaagaaaaaagaaacagaaacgagggggggggggcgcacgaccacagcacgacaggagggagggacggggagaagagagcagagaggagaagaaaaagagaaagcagcacaacagacgggaagaacacagaaagaaaccgacgaagagaaaccaacacacagagagagaggcagacaaatagagccgagcacgacataataactaacacctcaacatctatctcctctacacaaaacaatcacatacgcacacgacaaaaacatatacattacaactacactcagttacctataatcttcaaataaattcaacatcgtctcgttcaaaacaatcgattccatatcgctttatgacttttacatatttattctcactcactatcattcactcattactacattatattcaatagcattccaccacaccc

SEQ ID NO: 712239 - DNA, 432 bp, Homo sapiens
agatactgtaacaaaataaataagtcagacagagcaatgaaatagatgtaggagttctatagtgtgtggcataaacatagtaagaaaacagatggtcatgcacctagaaatatttacttactatactagcttatgtagctttaggaacaacacatgtataaccaataactgactctgaactatcaagcactgtggggtggctggaaggtaacggtctaagctttgtgcaacactctacatatataatctatatttcacttatattggcaatatactatacccagataaaagtcaaaatacacctagaacataccagaaaagcaagctatagtcatacctgctttaccggtatgatctcgtctaacacaaacattacattacagaaaatctgcatcaatctacacggaccatacacagtgcacaaactgaaat

SEQ ID NO: 712240 - DNA, 758 bp, Homo sapiens
ggttgcaaatactgggagcactttgctaaggactggtggtgcctggggtgtcatccgttcatcatgtatcggggtttcccctggggaactagatctagagcttcgttatgctgtaagtcttcattcacttggagaacttgttccatgacgactggaccaagcctgagtgaaagaattggcttcagtcccgggtgtcattcccttatttggctacccagataaattaggcaagttccatattcttggaggtctgggggtcaaccagatgtgcagtgacgcttctgcgcttggcccgtgttgaggtcctaggatttgggcaggttgggacctaccgaagtcagctacacgagtaggggtgggaaaacctggagtcccttgtggcatgccgattggatgaaccccacgaacggctgggtttccgacgaaggtacatatattccctgggagaataggggagtggcctttcccaagccattgttggcgccacaaaattgtcgtttcaacattcaacggtgtcgccagaaatcttttccaaagggctagaaatccaatgctcccttttggacccattccaagccgttagagcattggccctttggcacgccttggcacaccttctccatgggggaacgaaaacaggggggggggtcctactttacaagaggcgaaaacacttgggaagccactctgggcgcacgaacacacaaaccccactcacacaccccgacaagcacatcacacaaacgacacaacacttg

SEQ ID NO: 712241 - DNA, 331 bp, Homo sapiens
ggataggaacataggtatatgggaaatcctcgtgcggacatcaaagacaagacgagcaaaagcggaagcgaataggcccgctacaccccgaaagcgccggctggacttcggcgctatgccgatagcgcctttactcggcgcaatgcgcgtggcatgaggcgcgccatgacccgcaccatcaccgtcgccgcgttgcatattcccctgaccggccctgttcagccgaatatcgatgccgtcaccgcgctcgtcgaggaagccgcctcgaaaggcgcgcaggtcatcctgcctcccgaactcttcgaaggcccctattactgtcaggtcgggg

SEQ ID NO: 712242 - DNA, 1053 bp, Homo sapiens
  misc_feature (490)..(490): n is a, c, g, or t
  misc_feature (494)..(494): n is a, c, g, or t
  misc_feature (511)..(511): n is a, c, g, or t
  misc_feature (529)..(529): n is a, c, g, or t
  misc_feature (646)..(646): n is a, c, g, or t
  misc_feature (657)..(657): n is a, c, g, or t
  misc_feature (903)..(903): n is a, c, g, or t
atctatggggccgcgtgaaacggccaatcttgttctgccataagccgtcacggatactggggttctcccccctcagtctctctatcatagtgtggaccctctcgcccatactgtgggacccactaaaacgttataccccggggacacatctccgctgagtgccaccgtttagaaacaaattgtgctcgtggaccccacgtggaaattggcgttaaaaagcggcaagaacgggaaacttaagtcactggaagcacaggtccacccccaccaggccttgaagaaagccatgccaccagggcctcaagggctgaagataagggggaaccagaaattgggcctaacaacactcgaaacaattggagacgaattccattccgcctaaaccacgttatacgtccttccgtgatacgagactctgtccgctcatacaggaatgtactctactccacaacaagcgttacatcggattcacatgagagtggtcatattncttncgattagggaatgtacnccatgtcatgtgttacancccaggaacggtgttagaagtccccggtctcacacctgtcagaatgtaggtctcaaatgtcataagtaccaatcttgtggaatcttaaacgttaagttccacgttatgtgacaccanaatgctctccnttaggatacgttccgtggtgttcagattcttgttaggccttctgtcacccatgtgaaagtgataccatgtggataccattgtggtgattggccgtgtttactctataactctaattccgtgtaaatttaagtggaactctagccaataagttgaggttaagttccaccaccaggccaggaaaggtgtgttcctggagaggaaccaggtagccaacctctgtatatgccgatatattgggttttgtncttggtaatatctccaggtctcctgtggtccattatgtgaggaaccaaccggatggaagaagaggtaccgtgatagagtttcataggaaaaagagcccagctgacttagtgccagtttttaacatatttttcccattaaatcccattacc

SEQ ID NO: 712243 - DNA, 519 bp, Homo sapiens
  misc_feature (330)..(330): n is a, c, g, or t
  misc_feature (377)..(377): n is a, c, g, or t
  misc_feature (507)..(507): n is a, c, g, or t
tgggtgacagagcaagcccgtctcaaaaaaaaagaaaaaaaaaaaacccccctcaattttggattacattgataattggggccagatcataaagagagctttatttactgtattagttttttcttacactgctatcaagatatacctgagactgggtaatttataaaggaaagaggtttagttgactcatagttctgcatggctggggaggcctcaggaaacttagaatcatggtagaaggcacctcttcacagggtggcaggggagagaatgagtgcccagcgaagggggaagccccttataaaaccatcagatttcgtgagaactaanacaatcacgagaacagcctggaggaagccatccccatgattcaatcncctcccaccaagtccctcctacaacacatggggattatgggaactataattccagataagatttgagtggggacaagcctaatcatatcagcgtatcatgaaaagattacattttattccaggggtcatngaaaccattgaa

SEQ ID NO: 712244 - DNA, 695 bp, Homo sapiens
  misc_feature (52)..(52): n is a, c, g, or t
  misc_feature (73)..(73): n is a, c, g, or t
  misc_feature (99)..(99): n is a, c, g, or t
  misc_feature (102)..(102): n is a, c, g, or t
  misc_feature (122)..(122): n is a, c, g, or t
  misc_feature (138)..(138): n is a, c, g, or t
  misc_feature (146)..(146): n is a, c, g, or t
  misc_feature (250)..(250): n is a, c, g, or t
  misc_feature (258)..(258): n is a, c, g, or t
  misc_feature (262)..(262): n is a, c, g, or t
  misc_feature (329)..(329): n is a, c, g, or t
  misc_feature (421)..(421): n is a, c, g, or t
  misc_feature (448)..(448): n is a, c, g, or t
  misc_feature (454)..(454): n is a, c, g, or t
  misc_feature (466)..(467): n is a, c, g, or t
  misc_feature (491)..(491): n is a, c, g, or t
  misc_feature (493)..(493): n is a, c, g, or t
  misc_feature (570)..(570): n is a, c, g, or t
  misc_feature (575)..(575): n is a, c, g, or t
  misc_feature (692)..(692): n is a, c, g, or t
gctccctttcaccaaagctgaaggcagggcacagttgggggatgggggggcntcggggtaaatgtgggggttntagggcccagtgacctcagttctggntcntgggaaaggggtcggtatgnggtaacgtggtagggntccagttntagaagccaggacctagaacctagtggtttcacagtgggcagagcagttgggaataagccaggttaggggtgggggaagacagccagctctgtcctctgcaggnggattccntggnggggggtctcagatttaggaagggggggtggggtctggtccagaaagggccagaaagacagggaggnatctgggctgagactgtgtgtcctccagaagggatgagcagccaagtggttctaccacctcttgcttgggcaaagtgtaggggatgacaggngccggatggagggatcctccagggagngcctgnctctgacatgcnngggagggctagaacatccctcccngngccccacttctggggttgaaatggaggaccatctgctctcagttaccttcaactctggaggtgccccggcgtctggncttgntcgccccattcgcggggcaccacgtggtttccagaacttggtggcccgcatgccgggcctgagcgtggcctgctctgtatgctgtagaatttgtaagccacacggggggctctaaanccc

SEQ ID NO: 712245 - DNA, 429 bp, Homo sapiens
acaggaaacaataataggatgaaggttcatgcatctgggatagaagataaagacgactagtatcccatacactcactatgatcaaataatgaactctagatggatgcaatggatgtgacatgtagaaaggtatcaagatttgggggatgatacaagaatatatcgggaaatgtgttagtgagctggaggacgactggggtgaagaagtttgtgactggagaaaagcactgacgataaggcaaataattgatgaatttgattacatcctcaaaaacctaaagacggaaatatcattcgactcagcaatcccattactaggtatatacccaaaggaatataaatcatcctattacaaagacacatgcacgtgtatgtcattgcaaaactatccacaatagcaaagacatggaatcaacctaaatgcccatc

SEQ ID NO: 712246 - DNA, 237 bp, Homo sapiens
  misc_feature (13)..(13): n is a, c, g, or t
  misc_feature (43)..(43): n is a, c, g, or t
  misc_feature (83)..(83): n is a, c, g, or t
  misc_feature (97)..(97): n is a, c, g, or t
  misc_feature (167)..(167): n is a, c, g, or t
  misc_feature (235)..(235): n is a, c, g, or t
aattcgcggccgnttcgacggtggggggccatgctgcatgtanagtctttgcccgcggcctgatttttcctctcaatcgtganggggccaacgagangcaaccaaggattcacaatcattgccagagattcaaaagttttccagtcgaatcagagaggccaagttancaggagacccataatgagtattacaaagctttctccgagatgggcacttttaaccgaacatggtattnct

SEQ ID NO: 712247 - DNA, 315 bp, Homo sapiens
tagctgggcgtggtggcaggcacctgaggtcccagctactctggaggctgacgcaggagaatggcgtgaacccaggaggtggagcttgcagtgagccgaaattgcgccactgcactccagcgtgggcgacagatctagactccatatcagaaaataagctaaaataaaatcataataataataataataatgcttgtggtgttcttcaggctaccggagaatgcggttgctgttgggcgcaagctgctcctgactgtttaaaaagggagctgctcagtggttcacgcctggcatcccatgactttggtaggcctg

SEQ ID NO: 712248 - DNA, 443 bp, Homo sapiens
agcgccacagaaacactacgaggaacattacaatgaacagaatatcagtgagatatgggacagctgcacgtaactaatatacatgtgatatggttgggctgagtccccacccaaatctgatcttgaatattcacgtggtatgggaggaacacagtaggaggtaattaaatcatggggacgggtctttcctatgctggtctagtgatagtgaataagtctcacgagatctgatggttctatggttctgtaagggggagtttctctgcacaagctctctctttgcctgctgccatccatgtaagatgtgacttgctcctccttgccttccaccgtgaatgtgaggcctcgccagccatgtggaactgtgagtccattaaacctctttattttgtaaattgcccagtcttgggtatgtctttatcagcagtgtgagaacaggttaa

SEQ ID NO: 712249 - DNA, 185 bp, Homo sapiens
gagagtcgagagtgggagaagagcggagcggtgtgagcaagtactgcggcctcctctcctctcctaacctcgctctccaggcctagctttacccgcccgcctgctcggcgaccagaacaccttccaccatgaccacctcagcaagttcccacttccctcccggcatcaagcaggtgtacatgtcc

SEQ ID NO: 712250 - DNA, 161 bp, Homo sapiens
caggtcacgcgttgtagaaggtcctcatctcctcccatccctacgcatctttacataacagacgaggtcaacgatccctcccttaccatcaaggtcgggtgtggcaccaagtggtactgaaccctacgagtacaccgcactaccggcggactacatcttca

SEQ ID NO: 712251 - DNA, 721 bp, Homo sapiens
ggtgtggggttgcgcaggggcacggatctcggagctctccccgcttgcgccgagtttgtcagacgccttccccacccaaaccggggtctctgcagtcggaagcactcatcagtgcagtccccgcgcgggtgccggctcgtaaccgttgccgcgggccgtacgatgcccaagaagactgctgctgtgcacggtagccggtccgaggctcggaggagcaatgcgtggctgatcggcagattcgtcgcaagactacgcttgcctacgctcggagcaggtgatgaagacgaagaactcggcatctcgcatccgtagttcccttggccgcacttgtcacaggaagggcaagatggcggccacaagtgggccggatcctagacaagagaatcgagcctgtggatgatgtgcatagttcggaaatcgagatgcattatcacgtagcctgaggtatatgcaacgccttgcacccctcaccacacagattctagactagaaacaacagcaacagttctaccgacgggtaagaaccacgaccacctgcttacagctttcgcggaatagtagacatgggtactctaacaattacaccttacctagaagaccatcatagtgaccttcgaactcctcccatcccactacttccgcaggcaatataccggctcagccatctgtgctgccactggcgttccacgcacctgacggccagtgtctcaattcccacatg

SEQ ID NO: 712252 - DNA, 327 bp, Homo sapiens
gacacggagtctcactctgtcgcccaggctggagtgcagtggtgtgatctcgtctcactgcaacctccgcctcccagattcaagcgattttcctgtttcagcctcctgagtagctgggattataggtacatgccatcacacctggctaatttttgtatttttagtagagatgaggtttcaccattttggccaggctgatcttgaactcctgacctcaggtgatccacccgcctcagcctcccaaagtgctgggattacaggtgggagccccaacacccggccatgaattaactccgttaaaaaataaacgtatacattttgtgagca

SEQ ID NO: 712253 - DNA, 180 bp, Homo sapiens
ggactatagagcaagactctgtctcaaaaaaaaaaaaaagagacttcccattattagagtgaaaaattattttgtccagagtacttggaccagcccggaagcttccccaaaatacttttgtcggttgttaaacaacagcaacaacaaacattgacagggctccagggccgggccgggggt

SEQ ID NO: 712254 - DNA, 474 bp, Homo sapiens
  misc_feature (324)..(324): n is a, c, g, or t
  misc_feature (378)..(378): n is a, c, g, or t
  misc_feature (383)..(383): n is a, c, g, or t
  misc_feature (426)..(426): n is a, c, g, or t
  misc_feature (469)..(469): n is a, c, g, or t
catccctactatcttctgtctagtcatactcctattcaccattctcaactactcatgcattccctgctcttgtttacactgccggtttacactacttctccaagccatcacagctgatatttcctggtgctatccccaaactgccactcttaactcttgaagtaaataaataatctttgctggcaaggctatgctgaatctccttaggcactctaattagatgtcctaggtcctcccaattcttagacctttaatacctgtttttctccttctcttattccgtttagtttttcaattcatacaaaaccgtatccaggccatcancaataattctaaatgacaaatgtttctgctaatagtccacaatatcacccttancacanaatcttcctcagctaatctctccactctaggttccacgcggcntaatccgttgaagagcctgagaacacgccatattttcaaacanccaaa

SEQ ID NO: 712255 - DNA, 116 bp, Homo sapiens
gctcgaccccataaccgcggacccggctattcgaatagatcatgttaaccctgcaggggtgtacttcttcacacacgctctcgccacttaccaccatgtacacatcgtgtatctcg

SEQ ID NO: 712256 - DNA, 179 bp, Homo sapiens
cgggaggctgtcagtgcacagccacatacctgatgttctatatatacttagcatgtataccatgagtgtctcatgttctctcgatgggattataaaactggttttgtattgctatatgtcagtgcccatgttctatgttgctagcatgtataattaaaattgacttttgatcgtcaatc

SEQ ID NO: 712257 - DNA, 325 bp, Homo sapiens
  misc_feature (32)..(32): n is a, c, g, or t
acccccctttgcccacctgtgagtggcttccntgatggaaagactgagtgagaggactccttagtggccggcccttgtagaggcacagagctgcaggagctgtggtgagggccggcaccatgagacctctagaccccaggctcttgaagcgtccctgcctgccctccctgaaggacttcccaggccaccttgccctgcccagcgctgggggctgagtcctttctgggcacaccaggtcacttggcagagtccctggccccgagcgggcactgaaggaggccctcgcacttctgggggccctgggttttcgccgtcagcatttgag

SEQ ID NO: 712258 - DNA, 501 bp, Homo sapiens
ccggaagcagggcgtcgcgagctgtgaagctgcttcggcggtgcttggcggacagaagaggcatcagcgtcgagaacgaacggaggtgaggcagctctcgtccgagaccgacctggagagtggcgtgcgcaaggcagccctggtcatgtactggaagctcaaccccaagaagaagaagcaggtggccgtggcggagctgctggagaatgtcggccaggtcaacgagcacgatggaggggcgcagccaggccccgtgcccaagttccttcagaagcagaggcggattgtggaacggctggttcggaggggattccagaacttacttcgcgctggatgactttgtggagatcactaagaagtacgccaagggcgtcatccccagcagcctgttcctgcaggacgacgaagatgatgacgagctggcggggaagagccctgaggaccttgcactgcgtctgaaggtggtcaagtaccccctggatgccatcatggagatcaagg

SEQ ID NO: 712259 - DNA, 609 bp, Homo sapiens
accggcagaatcacactccaagaatttagtacctttagcaatcaacctccaacttgctcctcccccccagcctcaggcaaccagtaatccactttctgtctctatggatttgcctattctggacatttcacattaatggaatcatacattctgtggccttatgtgactggcttctgtcacttagcacaatgttttcaaggttcacccacagcgtagcatatacgagggcagggtttgttttttaatttctttttgaagacagggtctccctctgtcacccaggttggagtgcagtggcacgatctcagctcactgcagtcttgatctcccaggttcaagtgatcctcccgcgtcagcctcccaagtagctgggactacaggcatgtaccaccacacccagctaaattttaaatttgttggagagatggggtctcactatgttgttcagactggtctcgaactcctgggctcaggcaaccttccctcctcagcctcccaatgggattacaggtgtgagccaccacgcctgactagggcaggtattttggctctattttttgggtgactaaactagttctgagatgtaaaggggcttgccatggtcaaata

SEQ ID NO: 712260 - DNA, 285 bp, Homo sapiens
  misc_feature (38)..(38): n is a, c, g, or t
ccagctacttggtaggctgagcaggagaatgccatgancccaggaggtggagcttgcagtgagctgagatcatgccactgcactccagcctgggtgaaagagagagactctgtctcagaaaaaaaaatgctgttagagaaatgaagaatgcttttgatgcttactggtagactgcacacagctggggaaagaatctctggcttgaggatgtgtcaatagaaacttccaaaactgaaaaaggaaagttcaataagagtgggggaaaaaaagtggaacaacacattc

SEQ ID NO: 712261 - DNA, 287 bp, Homo sapiens
ctctgcaaatggcacaccaaagcctggatgacagcacatctgtctacaggcacaatggctgaatgttttacgcccactatgagacctattgcttgggaaaaacaaggttcctttcaaaatatgactgctcatggacatgacctggtcacccaagagctctgcgggagactcgcaggagacgaactgtgtattcatggctgctcacacgacatccatcaggcagcccatgaatcaaggagtcatttcaactttcaagtcttattattatttgagttggagtttcgctc

SEQ ID NO: 712262 - DNA, 1002 bp, Homo sapiens
  misc_feature (1002)..(1002): n is a, c, g, or t
gaaaggcgtcccccacgcatccccggcttcctttgtgggagtggctgtacccacaaaggaagcgggatgggtggctttaggcggggaggtggtctaaaaaagaccccttaaggttcaaaaagggtaagatgatttatatacaaatttaggtggcaattgagtgtgaaacggggggccatttcccaagggggggatagaagggaggcagcggcgtgacatgtgaaggaaaacgggcaacaaataaggttttacctcctttgggcagcagagaatagagttttattacaacatatctttaaacaacattttggtaactacggggtcacataacgaattgtggcaacgcggataaagtttataaagggcaattttaaatatacgcttaaagaatttacaggaagaacacatttgtgcaggaccttgaagagagtcagccgtgagaggaaggccaaacgaatacaggggtttcaaaaacaatagtaaagcgggggtgcgagaatgcaaaagcgtcttacggggggaaaacaacccggtgtttttgcacacgcaacaagtgtggagacaggggacactcagagcccccgggttattaaccatagcaagagcacacgagtacatacacaagcaggggaggttaacacacagaagacgatgtaccacacgcaagggggcccgaacaaaaaaaggcggggacccccacagacagcccacacccgcccggggacagaccgccaacaacaaccgcaggcaacgaacggcatcaccagcacaccgcactcatcgccgacaccacccgaacaggaaaatgccaggcgggcaaccacacacacgcaacagtcacgggacagcagacgcaaagacgggcgcaacacgaacgagcacggacccaacactcagccacgaaccctcgcacgacaacacgccaaccacgccacccaggaacaacaacaaagtccgtcgagtccacaacacgccccaccgactcgatgacacacccacacn

SEQ ID NO: 712263 - DNA, 288 bp, Homo sapiens
tatcaacagcattagcagttaactatatcttaactcacatgatgtaggcaatgcgctgtcttaaaatcatttttgtgcctccacctatcagtagatcagggttcttaaattctgtgtgccatggtcatctgataccaatagaccccttctcatagttatgttttcaaatgcataaaacacatagaattacaaaagaaaccacttatgttgcactacagatataaacaacatgttttttaaagtggtgatgtagtcatatgtacttttaataaattaacttattgattt

SEQ ID NO: 712264 - DNA, 420 bp, Homo sapiens
ctgcattggcggcgacgtcttccctagtttccagtgtgtcttcccggtgtgttcctaccacccagagggaagcttttgcacaggatcgactctggaacccctggcctctcttttaagggtaaccatcctcatttgaaagatcagtttacaattttgaacatactaattttgggaaaagatgagacattccaggctgcttgattaccataagtcttgttctctttagctgtaagtctatgaaattactttgtagatagcttcttaatagttagataagagtacttactgagactggtaataaagtatctttaacattatcacaaataaaactagttgctacgtgctgaatttctgtatttgtttacacatatgaagtgaaaaaaaaataaaattttggctttgaataccaaaaaaaaaaaa

SEQ ID NO: 712265 - DNA, 361 bp, Homo sapiens
actcttgtttgtagaatctgcaagtagacatttggagcacttggggcctatggtagaaagggagaatatcttcccatcaaatctagagagaagcaatctgagaaacttctttatgatgtgtgcattcatctcatagagttaaacctttcttttgattgagcagttttgacacctctctttttgtagaatctgcaagtggacatttggagcgcttggaggcctatggtggaaagggaaatatcttcacataaaaattggcaccgaagaattctgagaaacttctttgtgatgtgtacattcatctcacagagttaacacttttctttttcattgagcagtttggctcagtcgacacggactg

SEQ ID NO: 712266 - DNA, 193 bp, Homo sapiens
gaacggtgatgtggttgactagtcggtggagtcgatgggggtgttggagacacagttttcggcaggtccttgagatactcctgtggggtcctggatggcatggtgtggaattgttggacttgtgcgcggtgtgctcagcgttaatcaccttgggcagcaagaagtctctgaagacgtcggatttgcggcatgt

SEQ ID NO: 712267 - DNA, 376 bp, Homo sapiens
  misc_feature (11)..(11): n is a, c, g, or t
  misc_feature (294)..(294): n is a, c, g, or t
  misc_feature (321)..(321): n is a, c, g, or t
  misc_feature (360)..(360): n is a, c, g, or t
tgaagacaggntttgctcacgtgctgcgatattgggtacgagcagaccagaggcgttaggtacgactccggggctttcagctgaaagcaaagagagtaataatttcctcaggagggcacgacttaggaggaacagttctgcaaggcaggtgcttgtgggtgggggtgttggtgtccaggaagccatgtaaagaagtaatttcaggaagcatggagtgggcagctgcgtcaaaggttggtattgaataaaatcaggaattgagaactgagctttggttctggccatgggagggtnatgagtggcttcgtcagatggagagtnggggaaggcctggctggtactaggcaggcgagagccctnggcagcagacactgcg

SEQ ID NO: 712268 - DNA, 296 bp, Homo sapiens
gggagacatgattaaatcgagctcggtactgaggaaaacgtacgagaggaggtaagattggagactggagtcgggaagagtagcttgctggagtggaaaaaaaaagcaactcagtggtatatgagagagggcagtagaagatagaaagtggggactggtgtgagtagacagagatagtacgagtccgtgggagcatagacaagtaaaggtgcgaggtggatcagggagtaggtgatgggtctgttctggatagcagggatggcctccgaggcggggactgcaggtgccggataggc

SEQ ID NO: 712269 - DNA, 392 bp, Homo sapiens
cagattcaataattattcttttctacatactgtgtttaaatgatatccctttttctttttgttcttatagctcgagctgtaaaagccaaaggtccggtgatgatcccatacccttttttccagtctcatgttgaagatttttatgtagaaggccttcccaaaggaatttttttttttttttttttttttttgagatggagttttcactcttatcgcccaggctggggtgcaatggcacaaccttgctggtcactgcaacctctgcctcctgggttcaagaaattctcccacctcagcctcttgagtagctaggactacaggtgtgcaccaccacgcttggctaatttttttattttttttattttttggtggagacagggtttcacctagtt

SEQ ID NO: 712270 - DNA, 171 bp, Homo sapiens
gaacgactgggctttcattatataaccaggccaagaagcctgtgctagttccagtattgatccggttctcctccgtcaccatccgaccacagaacctacaggctgatagattgttcactaactcatagagtctctggcaatgtctctcagaaactgggaaattgccgtctc

SEQ ID NO: 712271 - DNA, 153 bp, Homo sapiens
atgatagtaacatgagaggatcagcgggctgggtaggacttggactgataggcactgacgtgcggacctgcagcctggccacaccatcacgggctctgagtcatctcctaccctctcccttgtagtcgcagcccaggagaagtgcgctgggtg

SEQ ID NO: 712272 - DNA, 198 bp, Homo sapiens
  misc_feature (73)..(73): n is a, c, g, or t
acgatcccctgattcgtgccctgatcttcggcccatagatgcttggccactgccatccatcacccgcgtgggnctggacgtgctctcttgctgaggcactgtacacattgagtgaggtcttaacattcccactacttgccttcctcctcagaatttaacagtccacttgatctattcattattctgaggtcacttttt

SEQ ID NO: 712273 - DNA, 966 bp, Homo sapiens
cactatgaggctaggtgcgagcctgggtgttaatcggcagaggggatcgctggtctgttatggcggaatcatctgaatccttcacatggcatcagcccggcccatgtcggcgaggcaagtgatcctctcacctccagccctggacgaagactcccggcgtactgatgccctcacctccagaccctgggcgtgaccttccaccatttgaggatgagtccgaggggctcctaggcacagaggggcccctggaaggaagaagaggatggagaggagctcatggagatggcatggaaagggactaccgcgccatcccagagctggacgcctatgaggccgagggactggctctggactgagtgaggaccgtaaggagctgacggccagctcagagggaggcacgcggacgcgggccatgcggcagcgtgagcgggaggctgggcggggcctgggccgatgcgccgggggctcctgtatgacagggatgaccgaggacgaggagcgccctgaccgcaagcgccgccaggtggagcgggccacggaggacgggcgaggcaggcacgcaggagatgatcgcagacgcatcgaagaacctggaccgatctccaacagggcaccgctgagccgccagtggggtgagcatggcgggccccggctgcgacatccaccaccggttccaagaatctcctgcgccctcacgtccacaggcccggcccacaaacgctctctcaaggcaccgcactcaaccgcacgctgtgcaacagacacccgggcagagcccgctgccagaacactcccgacacgcgcccccagcgacccacccagccccgccaaccatcttccctgcaagcccgccgaacccgcgccgaccccagaccacgcgcccgcaacgggcctcgccacgtcccaaccacccccacacaacaacacaccgaatccaccgcccttccaccaccccccaccatgacc

SEQ ID NO: 712274 - DNA, 161 bp, Homo sapiens
ggtctctcacaaggctcctgtcgtgaattcacattcagattattcatccaattgcaaggtcgataattaagcggaacaattaagaaaataatattatgataagtatgtgaagatataatactcaagacagccatatgaacaacattcattgtcgaaaaaaa

SEQ ID NO: 712275 - DNA, 113 bp, Homo sapiens
gacgctctctctgatggggagaagaggctgaggagtggggcacagcgaagggaagaggcatgtgcaaaggaggagtcgcccaggcagggtgcaatgtctcacgccttgtaatc

SEQ ID NO: 712276 - DNA, 365 bp, Homo sapiens
accgatacaagaatatttagagaaactttattatgtgtaatacctttaacctggaaatgacccttgttaattaattaacaggagagcagatggataaattgcgtgtattacaattgaattctccttagaaagggaggaggccttacacaacaacgtggatgaatcccaaaaacctgacacttaaaactttccaaaatttggccctaacattcattagttccatagtcacttttttcccgctaatgacaccatgggttattttatttttagaagaatggcaattatttttgatcagaagcattaaagttctgacctattttccgttcttctatgtcaaaagggaattggtatgttttctaaatatt

SEQ ID NO: 712277 - DNA, 83 bp, Homo sapiens
gtcaagagtggttttttggtttgcttttttggcttttcaagacagaagaaattagagcagtttgtgcgctgctggaatgctga

SEQ ID NO: 712278 - DNA, 730 bp, Homo sapiens
  misc_feature (43)..(43): n is a, c, g, or t
atgtcgagatcagagagcacattttggagaattcttctagatnttcagaacttgagactatttgtcaaagtctattttttttcgatgtccaagtatgttagactctagacacccgttgtttatcctgggtttacttagataacttttgtaccgtggttatattgcttataatgttaatggaccatactattgaaactggtgagttctgattattggaatattctctgtaaatccagtaaaccatgtataaagtatttgtgaatagtttggtcaataatattatttatgaagacccgcccaagactgatttcccatgatggggcgaacaccaattagccccaaggttaatttctgtaccaccgtggttgtccagaatactgatttactataatgatatatacatgccagatatttacttatatcttagacacagagttctgggtaccattttgggatctagttcccctggaaaaggactgctgtatttttaatttttaatggaatgtagcttttaaaatcctgtcactggcatccaccaaagggattataccctgagaccctatagctgtactttaaagcccttcagttcagctattgggagttcatgatgaattagcatatgcccgaaaggttgctaaccttaacattttgagagccgtaaccctgattttatctgctgtataagactttgtgccttttactttggaataaagatttttttccccgctga

SEQ ID NO: 712279 - DNA, 277 bp, Homo sapiens
atctggggccaaagatcagaactcactttatcttgtactcagagaacaaagagcagaaaaatgtctcccatcccattttcagcggagagtattaaagcacaacctaatttaggatctggcacccttgttggcaaggcagacacagctgaggttgggctaaatcttagcttccactgccatagctttagtatcaagtttaggataggcagctgctccaactactgggcagcagcgagggcaacagacaggggcatcctctcagcagtcgcaccgtgcc

SEQ ID NO: 712280 - DNA, 703 bp, Homo sapiens
cctttgtctgtgctggaatagggttaagaatgactgtataaagagaagccaactcagtgttcaaatacagactagttccaaattcatttgacttattccaaaggtgtatttagaggccagaaatggatagtacaagtgattcaggaaagaagcacagctagcatggagcttatgggacatctcagactaacatacattttgtggttgaggagacaaagaagttaagtgacttgtcaaaggtccaccaacaagttagcagaagagttgagtttagaaatcagtaactaccaacatttagtgggtaaaatcagtacttgtactgaaaactaacattttcagaaaaggttggcatggagaaacagagaccttccctcgaaaccctagtaaattatccataaaaccctctgaaaagaaaatttctcagtgatactcatgagtgttaaaaattgagcatatcccagattctggtagaagtttctataatcacctatattaatgagtggaattaagaaatattcactcatctttcctctcttgtcccatcaaatataataggtataattcaaaagtacaacattataaagtgaaacagattagatattcacagtagtttccacaattcacaattcactgtataaaatcccagggttacttacaaataagtcataagagacatttactttgaatgaaatttctaataaaa

SEQ ID NO: 712281 - DNA, 678 bp, Homo sapiens
ctaaaaattgaagccacctggcatcaaaaggcttcggcatttaagctttccataagctagttaccaattcctcctgaaaaggcctgtgccccttattgctctacccagtagggtcagcctttgtcggtctaagttggttccacatgataatgtggattgcatttctgaaattgtaagtaagattaagcatatctttctggcctctaatctgcatgtatttcaggtaagagcctaatgatgtcaattttccgtatcaggctaatgaactctctgctactgatcagttaattcctatatattaagacaatgatgcatttcactgtcacgtgttatcagtggtttctgcataccattggcagtttgacttctgccatctagagtgtgtaaattaagtggtcaaatctgatctagcttccttgagaggtgcctcacgtcaatagttatcagactgataacttatttgcccattttttcaaatcaatcatggtttcatttcgaatgtcgtagtgtctgctcagtctggattccctttctgtcttcctgcagaaccatatgtgacttcctacaactccagtgccgttaactcaacctcctggtcccctcagatcttcagtacgtgcatccgagtagaccataagccttcatcctgagtcagacctttttcatccatcattcaag

SEQ ID NO: 712282 - DNA, 409 bp, Homo sapiens
  misc_feature (21)..(21): n is a, c, g, or t
  misc_feature (64)..(64): n is a, c, g, or t
  misc_feature (68)..(69): n is a, c, g, or t
  misc_feature (100)..(100): n is a, c, g, or t
  misc_feature (157)..(159): n is a, c, g, or t
  misc_feature (386)..(386): n is a, c, g, or t
tccaaccctctgccagtttgnccctcagagcttggtggctcaagactgttagcctggcagagcngcgnngaagggagaagctcttggagcaggcaggatnccaccgctgcttcagtgcctccacgctcagctaccctttggcccattggccctcgtnnncctctccaggattgtatgtttcaagcttgtcctgtgttcctttgtctgatgctctgtgtattgctctttgaatcgagtttggaggaagagttgagttgtatgagtggcggcatgttggtaagtgccgtacttcctgtttcaaagttttctgggggctcgctaattgaatgtggaaaagtagcaccacttgacggctacaagtgccgactcctgaattttcccatggngttctgacttcaagggcttgcaa

SEQ ID NO: 712283 - DNA, 383 bp, Homo sapiens
cacattattctgtggacaatatattgggaagttcaagctatcaggacagacagctctttagtcccccagcattactactaagcatagcgggctctattcttgcactcgttccgttactcgaggccactgcctatgtggaaggctccaaatccatgacagtcaaagtctctgactccttcaggaaccgtacatcttcctggccttaatccattatagcaggcgtgatgtggtaaatgtatgccaggaagactggcagacagttgcttacatactccctcaaagtatttaccatcagctacagtccaaaatcgcttatagtacaaggagatttatgaaaagactctgacaaggactcttgaatacgagttcctgatagataagag

SEQ ID NO: 712284 - DNA, 123 bp, Homo sapiens
gttttacgtgagactacatgggcagggggaaaatgacaccaatcattggattacagaaaagggttttataaatcctcctcttgaaattatgttcaggcccagcagggtgcacattcttccaag

SEQ ID NO: 712285 - DNA, 162 bp, Homo sapiens
  misc_feature (42)..(42): n is a, c, g, or t
aaactaaaggatgcgtaaggatgggtgggggaggatttctangatgatggccccctccgatagttcagacggtctctatttcctgagcgtctgagatgttactattagttagttttgttgtgagagaaatttggccagatggggaaggtcactggaaattga

SEQ ID NO: 712286 - DNA, 2311 bp, Homo sapiens
  misc_feature (1266)..(1266): n is a, c, g, or t
  misc_feature (1270)..(1270): n is a, c, g, or t
  misc_feature (1282)..(1282): n is a, c, g, or t
  misc_feature (1296)..(1296): n is a, c, g, or t
  misc_feature (1312)..(1312): n is a, c, g, or t
  misc_feature (1320)..(1320): n is a, c, g, or t
  misc_feature (1328)..(1328): n is a, c, g, or t
  misc_feature (1338)..(1339): n is a, c, g, or t
  misc_feature (1360)..(1360): n is a, c, g, or t
  misc_feature (1366)..(1366): n is a, c, g, or t
  misc_feature (1370)..(1370): n is a, c, g, or t
  misc_feature (1374)..(1374): n is a, c, g, or t
  misc_feature (1379)..(1379): n is a, c, g, or t
  misc_feature (1385)..(1385): n is a, c, g, or t
  misc_feature (1388)..(1388): n is a, c, g, or t
  misc_feature (1390)..(1390): n is a, c, g, or t
  misc_feature (1405)..(1405): n is a, c, g, or t
  misc_feature (1416)..(1416): n is a, c, g, or t
  misc_feature (1427)..(1427): n is a, c, g, or t
  misc_feature (1454)..(1454): n is a, c, g, or t
  misc_feature (1457)..(1457): n is a, c, g, or t
  misc_feature (1467)..(1467): n is a, c, g, or t
  misc_feature (1473)..(1473): n is a, c, g, or t
  misc_feature (1483)..(1484): n is a, c, g, or t
  misc_feature (1490)..(1490): n is a, c, g, or t
gcggccgcgcctgtgcgcgagggcgcgcgcgtccgagccctccacccgtcgtgccggcgccgcccggaccgccagatgctgtgtgctgtggacccacctggggttcatggagtgggccacggggcccagccctaagcactgctgcgcccagggtcgccgcgcctcctgctgaggggtccccgtgccactggctctcaccattgccctcgcctgccgatggcctctgctgcccagcctggggccagctctaccgcctgagccccctgccccactccaggactcaccgtaccccgatggggtaacgtgacacaggccccacacgtcagaggccgctgtccccacggccactgcccgtgacccctggcccaaggcagctggagttggttcagttcaagttcattcttcctctggcccttgggggcttggggcccacctctgagtgaagggggctgtctgcccatccaccaatgtggagagggcgcccccggtgtggggtccagctctggacactgcttggcggccgggttcactttgagtttttaagttttctttgctgagcttttttggttgttctttttattttttgcctctttatgactatccagctctgagagacgggagtttggagttgcccgctttactttggttgggttggggggggcggcgggctgttttgttccttttcttttttaagagttgggttttcttttttaattatccaaacagtgggcagcttcctcccccacacccaagtatttgcacaatatttgtgcggggtatgggggtgggtttttaaatctcgtttctcttggacaagcacagggatctcgttctcctcattttttgggggtgtgtggggacttctcaggtcgtgtccccagccttctctgcagtcccttctgccctgccgggcccgtcgggaggcgccatggctcggatgaaccgcccggccccggtggaggtgagctacaaacacatgcgcttcctcatcacccacaaccccaccaacgccacgctcagcaccttcattgaggacctgaagaagtacggggctaccactgtggtgcgtgtgtgtgaagtgacctatgacaaaacgccgctggagaaggatggcatcaccgttgtggactggccgtttgacgatggggcgcccccgcccggcaaggtagtggaagactggctgagcctggtgaaggccaagttctgtgaggcccccggcagctgcgtggctgtgcactgcgtggcgggcctgggccgggccccagnccgngggcgcggcccnagggagagcgggangaagaacgaggacgcnacccaggncacccgcnagaagcgccnnttttttttttttttttttttntttttnaccntccntttangaaagnccngnctcaaaacagatgtnggcgtggtatngactcaatatnctgtacaatgaccccggtgcggcgggnagngcgcgcaggnacctgntgcggggccnngggcgnctagggagtgtcaggaccttggctggacctggaggccctgcccagccctgctctgcccagcccagcaggggctccaggccttggctggccccacatcgccttttcctccccgacacctccgtgcacttgtgtccgaggagcgaggagcccctcgggccctgggtggcctctgggccctttctcctgtctccgccactccctctggcggcgctggccgtggctctgtctctctgaggtgggtcgggcgccctctgcccgccccctcccacaccagccaggctggtctcctctagcctgtttgttgtggggtgggggtatattttgtaaccactgggcccccagcccctcttttgcgaccccttgtcctgacctgttctcggcaccttaaattattagaccccggggcagtcaggtgctccggacacccgaaggcaataaaacaggagccgtgaaaaacacacaaacaaacaaagacaacccacacaacacaaaaacaccacgagaaacaaaggcgcgggcggcaacagacaaaacccggggagacaacaaaggagacgaccgatctagaacaggagggcaccagagcgaggcacaaaagcaagcgagccgggacaaacgagcgcggggaagaagcagcacagatcctgcgggcgagcacaccacgccggggcagccgagacccaccgcataacacggcgaacagaactgtggaaaacacacgcagggggacgtctaaaacacagcacgaagcacacacacgccagccaccgccagcagcactagcacgcgagcaggcgacccgagacgcacgaccagcgcca

SEQ ID NO: 712287 - DNA, 2237 bp, Homo sapiens
gcggccgcgcctgtgcgcgagggcgcgcgcgtccgagccctccacccgtcgtgccggcgccgcccggaccgccagatgctgtgtgctgtggacccacctggggttcatggagtgggccacggggcccagccctaagcactgctgcgcccagggtcgccgcgcctcctgctgaggggtccccgtgccactggctctcaccattgccctcgcctgccgatggcctctgctgcccagcctggggccagctctaccgcctgagccccctgccccactccaggactcaccgtaccccgatggggtaacgtgacacaggccccacacgtcagaggccgctgtccccacggccactgcccgtgacccctggcccaaggcagctggagttggttcagttcaagttcattcttcctctggcccttgggggcttggggcccacctctgagtgaagggggctgtctgcccatccaccaatgtggagagggcgcccccggtgtggggtccagctctggacactgcttggcggccgggttcactttgagtttttaagttttctttgctgagcttttttggttgttctttttattttttgcctctttatgactatccagctctgagagacgggagtttggagttgcccgctttactttggttgggttggggggggcggcgggctgttttgttccttttcttttttaagagttgggttttcttttttaattatccaaacagtgggtttttaaatctcgtttctcttggacaagcacagggatctcgttctcctcattttttgggggtgtgtggggacttctcaggtcgtgtccccagccttctctgcagtcccttctgccctgccgggcccgtcgggaggcgccatggctcggatgaaccgcccggccccggtggaggtgagctacaaacacatgcgcttcctcatcacccacaaccccaccaacgccacgctcagcaccttcattgaggacctgaagaagtacggggctaccactgtggtgcgtgtgtgtgaagtgacctatgacaaaacgccgctggagaaggatggcatcaccgttgtggactggccgtttgacgatggggcgcccccgcccggcaaggtagtggaagactggctgagcctggtgaaggccaagttctgtgaggcccccggcagctgcgtggctgtgcactgcgtggcgggcctgggccgggctccagtccttgtggcgctggcccttattgagagcgggatgaagtacgaggacgccatccagttcatccgccagaagcgccgcggagccatcaacagcaagcagctcacctacctggagaaataccggcccaaacagaggctgcggttcaaagacccacacacgcacaagacccggtgctgcgttatgtagctcaggaccttggctgggcctggtcgtcatgtaggtcaggaccttggctggacctggaggccctgcccagccctgctctgcccagcccagcaggggctccaggccttggctggccccacatcgccttttcctccccgacacctccgtgcacttgtgtccgaggagcgaggagcccctcgggccctgggtggcctctgggccctttctcctgtctccgccactccctctggcggcgctggccgtggctctgtctctctgaggtgggtcgggcgccctctgcccgccccctcccacaccagccaggctggtctcctctagcctgtttgttgtggggtgggggtatattttgtaaccactgggcccccagcccctcttttgcgaccccttgtcctgacctgttctcggcaccttaaattattagaccccggggcagtcaggtgctccggacacccgaaggcaataaaacaggagccgtgaaaaacacacaaacaaacaaagacaacccacacaacacaaaaacaccacgagaaacaaaggcgcgggcggcaacagacaaaacccggggagacaacaaaggagacgaccgatctagaacaggagggcaccagagcgaggcacaaaagcaagcgagccgggacaaacgagcgcggggaagaagcagcacagatcctgcgggcgagcacaccacgccggggcagccgagacccaccgcataacacggcgaacagaactgtggaaaacacacgcagggggacgtctaaaacacagcacgaagcacacacacgccagccaccgccagcagcactagcacgcgagcaggcgacccgagacgcacgaccagcgcca

SEQ ID NO: 712288 - DNA, 1764 bp, Homo sapiens
gccggctccgcggcggaggggcggcgccccgacccaggcccagcaccgtgggcaccgccaggccggcgcgtatggaggcggtgggacgcctgcggcgcgggtgagcctggcagatgctgtgtgctgtggacccacctggggttcatggagtgggccacggggcccagccctaagcactgctgcgcccagggtcgccgcgcctcctgctgaggggtccccgtgccactggctctcaccattgccctcgcctgccgatggcctctgctgcccagcctggggccagctctaccgcctgagccccctgccccactccaggactcaccgtaccccgatggggtcgtgtccccagccttctctgcagtcccttctgccctgccgggcccgtcgggaggcgccatggctcggatgaaccgcccggccccggtggaggtgagctacaaacacatgcgcttcctcatcacccacaaccccaccaacgccacgctcagcaccttcattgaggacctgaagaagtacggggctaccactgtggtgcgtgtgtgtgaagtgacctatgacaaaacgccgctggagaaggatggcatcaccgttgtggactggccgtttgacgatggggcgcccccgcccggcaaggtagtggaagactggctgagcctggtgaaggccaagttctgtgaggcccccggcagctgcgtggctgtgcactgcgtggcgggcctgggccgggctccagtccttgtggcgctggcccttattgagagcgggatgaagtacgaggacgccatccagttcatccgccagaagcgccgcggagccatcaacagcaagcagctcacctacctggagaaataccggcccaaacagaggctgcggttcaaagacccacacacgcacaagacccggtgctgcgttatgtagctcaggaccttggctgggcctggtcgtcatgtaggtcaggaccttggctggacctggaggccctgcccagccctgctctgcccagcccagcaggggctccaggccttggctggccccacatcgccttttcctccccgacacctccgtgcacttgtgtccgaggagcgaggagcccctcgggccctgggtggcctctgggccctttctcctgtctccgccactccctctggcggcgctggccgtggctctgtctctctgaggtgggtcgggcgccctctgcccgccccctcccacaccagccaggctggtctcctctagcctgtttgttgtggggtgggggtatattttgtaaccactgggcccccagcccctcttttgcgaccccttgtcctgacctgttctcggcaccttaaattattagaccccggggcagtcaggtgctccggacacccgaaggcaataaaacaggagccgtgaaaaacacacaaacaaacaaagacaacccacacaacacaaaaacaccacgagaaacaaaggcgcgggcggcaacagacaaaacccggggagacaacaaaggagacgaccgatctagaacaggagggcaccagagcgaggcacaaaagcaagcgagccgggacaaacgagcgcggggaagaagcagcacagatcctgcgggcgagcacaccacgccggggcagccgagacccaccgcataacacggcgaacagaactgtggaaaacacacgcagggggacgtctaaaacacagcacgaagcacacacacgccagccaccgccagcagcactagcacgcgagcaggcgacccgagacgcacgaccagcgcca

SEQ ID NO: 712289 - DNA, 183 bp, Homo sapiens
aaaaggaaggaactttgaacctatgtaccgagcaatgccaggtttagcaaacataatgctagtcctagattacttattgatttaaaacaaaaaacacaaaaaatagttaaattttaaaaccaattattgttttatagaccctggaaaagattttcagcaaagtacaaaatttaagcattcctt

SEQ ID NO: 712290 - DNA, 1780 bp, Homo sapiens
gcggccgcgcctgtgcgcgagggcgcgcgcgtccgagccctccacccgtcgtgccggcgccgcccggaccgccagatgctgtgtgctgtggacccacctggggttcatggagtgggccacggggcccagccctaagcactgctgcgcccagggtcgccgcgcctcctgctgaggggtccccgtgccactggctctcaccattgccctcgcctgccgatggcctctgctgcccagcctggggccagctctaccgcctgagccccctgccccactccaggactcaccgtaccccgatggggtgcacagggatctcgttctcctcattttttgggggtgtgtggggacttctcaggtcgtgtccccagccttctctgcagtcccttctgccctgccgggcccgtcgggaggcgccatggctcggatgaaccgcccggccccggtggaggtgagctacaaacacatgcgcttcctcatcacccacaaccccaccaacgccacgctcagcaccttcattgaggacctgaagaagtacggggctaccactgtggtgcgtgtgtgtgaagtgacctatgacaaaacgccgctggagaaggatggcatcaccgttgtggactggccgtttgacgatggggcgcccccgcccggcaaggtagtggaagactggctgagcctggtgaaggccaagttctgtgaggcccccggcagctgcgtggctgtgcactgcgtggcgggcctgggccgggctccagtccttgtggcgctggcccttattgagagcgggatgaagtacgaggacgccatccagttcatccgccagaagcgccgcggagccatcaacagcaagcagctcacctacctggagaaataccggcccaaacagaggctgcggttcaaagacccacacacgcacaagacccggtgctgcgttatgtagctcaggaccttggctgggcctggtcgtcatgtaggtcaggaccttggctggacctggaggccctgcccagccctgctctgcccagcccagcaggggctccaggccttggctggccccacatcgccttttcctccccgacacctccgtgcacttgtgtccgaggagcgaggagcccctcgggccctgggtggcctctgggccctttctcctgtctccgccactccctctggcggcgctggccgtggctctgtctctctgaggtgggtcgggcgccctctgcccgccccctcccacaccagccaggctggtctcctctagcctgtttgttgtggggtgggggtatattttgtaaccactgggcccccagcccctcttttgcgaccccttgtcctgacctgttctcggcaccttaaattattagaccccggggcagtcaggtgctccggacacccgaaggcaataaaacaggagccgtgaaaaacacacaaacaaacaaagacaacccacacaacacaaaaacaccacgagaaacaaaggcgcgggcggcaacagacaaaacccggggagacaacaaaggagacgaccgatctagaacaggagggcaccagagcgaggcacaaaagcaagcgagccgggacaaacgagcgcggggaagaagcagcacagatcctgcgggcgagcacaccacgccggggcagccgagacccaccgcataacacggcgaacagaactgtggaaaacacacgcagggggacgtctaaaacacagcacgaagcacacacacgccagccaccgccagcagcactagcacgcgagcaggcgacccgagacgcacgaccagcgcca

SEQ ID NO: 712291 - DNA, 997 bp, Homo sapiens
  misc_feature (388)..(388): n is a, c, g, or t
agcgggactctcatgaagagatggagtgttcgtggatatcaaacagggcaagcattaactacatggactgaactaacagaagactgaagtaattttttttttttacttttggtttaaaatgttgctgatgctttgttttatttttcagagtcaagaaaacttcttttgagctgttgtgagcttttctttgagctgtttaacaattgagtaaactatatcactgtgaataaaatttggagcatatttgtttctgatttctccagaattgggaacctatttatgaatattcttaacttacagcaatatagttatttggcataagtgcaatacgaatgtttccttttgcaacaggacacaactggagaaactggttattttaccaaggctnttggctggaatagtgtgctttcctttaaggaatcaaacttgacttataaagccaataaaggcccttgggaaaacttgcctcataccttgtttatgcagtccctgtacagggttccttacctgtggtaaataaagaatgtcactttctgacaggcccaggagccccaagttatcttgggacctcaagaggaaaggaatttacccaattcatattttaaaaagtcttatctgagtttccttatgaaacagagttccatcaaagccaattttaaaaagcccatgtgaaaaataattattcttgctgtactttatacagattatccagaccagttttaaaaagcaatccagtcttatcatgatttgcctttagttaaaactggcggactgggcagagcaaacacacttttgttttaacaacctattgttcacctgttattaacgggtgtcgagggttgtctctcacgtggcctgaagggttattctgcatttagattacctgcttttccctgtgacccccgtgtctctggtgtggtcgaaaccagcagctgtctgttgaactcgtcctttaattcggccattgaatactggttcccagtgccccatgagcttt

SEQ ID NO: 712292 - DNA, 1408 bp, Homo sapiens
gcggccgcgcctgtgcgcgagggcgcgcgcgtccgagccctccacccgtcgtgccggcgccgcccggaccgccagatgctgtgtgctgtggacccacctggggttcatggagtgggccacggggcccagccctaagcactgctgcgcccagggtcgccgcgcctcctgctgaggggtccccgtgccactggctctcaccattgccctcgcctgccgatggcctctgctgcccagcctggggccagctctaccgcctgagccccctgccccactccaggactcaccgtaccccgatggggtaacgtgacacaggccccacacgtcagaggccgctgtccccacggccactgcccgtgacccctggcccaaggcagctggagttggttcagttcaagttcattcttcctctggcccttgggggcttggggcccacctctgagtgaagggggctgtctgcccatccaccaatgtggagagggcgcccccggtgtggggtccagctctggacactgcttggcggccgggttcactttgagtttttaagttttctttgctgagcttttttggttgttctttttattttttgcctctttatgactatccagctctgagagacgggagtttggagttgcccgctttactttggttgggttggggggggcggcgggctgttttgttccttttcttttttaagagttgggttttcttttttaattatccaaacagtgggcagcttcctcccccacacccaagtatttgcacaatatttgtgcggggtatgggggtgggtttttaaatctcgtttctcttggacaagcacagggatctcgttctcctcattttttgggggtgtgtggggacttctcaggtcgtgtccccagccttctctgcagtcccttctgccctgccgggcccgtcgggaggcgccatggctcggatgaaccgcccggccccggtggaggtgagctacaaacacatgcgcttcctcatcacccacaaccccaccaacgccacgctcagcaccttcattgaggacctgaagaagtacggggctaccactgtggtgcgtgtgtgtgaagtgacctatgacaaaacgccgctggagaaggatggcatcaccgttgtggactggccgtttgacgatctccgccactccctctggcggcgctggccgtggctctgtctctctgaggtgggtcgggcgccctctgcccgccccctcccacaccagccaggctggtctcctctagcctgtttgttgtggggtgggggtatattttgtaaccactgggcccccagcccctcttttgcgaccccttgtcctgacctgttctcggcaccttaaattattagaccccggggcagtcaggtgctccggacacccgaaggcaataaaacaggagccgtg

SEQ ID NO: 712293 - DNA, 1631 bp, Homo sapiens
gtggggacagtgtgagcacacagtccgggtccccgctgtaaggacccggtggcggggacaggttgagcacacagtccaggtccccgctgtaaggacccggtggcggggacagggtaagcgcacagcccacgtccccgctgtaaggaccaggtggcggggacagggtgagcgcatagcccaggtccccgctgtaaggaccaggtggtggggatggtggggacagggtgagcatgcagcccaggtccctgctgtaagggaaggtcgcgcagctgggctggaattctgggctcagcccctcccttactcacaggccccccttcctggatggtggaggtgcccaggcaccacccttgttgtctgctcatggccttggggtgggtcctaccgagctggggaagcctgggggccgtagggagcccagagtcagcctggaggaggtggcgctttggtgagtttggaaggcaagcaggggtgagctgcagggggccaggaaagggtgactgtgactctgggagcagccgtgccaaggccctgggacaggaggggcttggccagcctcaaggccttactccagcccactgcactctcagattccagctccctggggcaggtgagatggccgagccaggtccttggatgatctctgttcctgttcccctcttcccaggaagcgccgcggagccatcaacagcaagcagctcacctacctggagaaataccggcccaaacagaggctgcggttcaaagacccacacacgcacaagacccggtgctgcgttatgtagctcaggaccttggctgggcctggtcgtcatgtaggtcaggaccttggctggacctggaggccctgcccagccctgctctgcccagcccagcaggggctccaggccttggctggccccacatcgccttttcctccccgacacctccgtgcacttgtgtccgaggagcgaggagcccctcgggccctgggtggcctctgggccctttctcctgtctccgccactccctctggcggcgctggccgtggctctgtctctctgaggtgggtcgggcgccctctgcccgccccctcccacaccagccaggctggtctcctctagcctgtttgttgtggggtgggggtatattttgtaaccactgggcccccagcccctcttttgcgaccccttgtcctgacctgttctcggcaccttaaattattagaccccggggcagtcaggtgctccggacacccgaaggcaataaaacaggagccgtgaaaaacacacaaacaaacaaagacaacccacacaacacaaaaacaccacgagaaacaaaggcgcgggcggcaacagacaaaacccggggagacaacaaaggagacgaccgatctagaacaggagggcaccagagcgaggcacaaaagcaagcgagccgggacaaacgagcgcggggaagaagcagcacagatcctgcgggcgagcacaccacgccggggcagccgagacccaccgcataacacggcgaacagaactgtggaaaacacacgcagggggacgtctaaaacacagcacgaagcacacacacgccagccaccgccagcagcactagcacgcgagcaggcgacccgagacgcacgaccagcgcca

SEQ ID NO: 712294 - DNA, 919 bp, Homo sapiens
gctgtctccgtgtcccgtcagacagctcggagctccattaagctagctcggtcacttgaccgtccctctgggcccttcccgccgtctatcgcctggactaccccggcgcccactcgtagctcgctcttgattcgcctccgcctctttttgttccgtcgcctagagccccgccgcctctcagggctgatgagtgtggacggcgtggagtctccgtcgcctcccgcgtgcatgggcattgacgtgaccgcagcgtttgaatgacatgccattatctggctgatgggggtaccgacaaggtgagccctgggccagagaatgatccaggcgtagaggtcgttccgtgggaagtcgacgacatgacaactgacaggcctaagggaagctaggaagtccccgtcaccgactcaggccagagatgatggtgatggactgacagactccagtgaatttggagcttgcctgtcaggctgattggctgatagacagccctggatttggctcactaagactgaccagcccgggaccaagcagttctggggtcccaacctgggtggaaggtctgaactgatgacccacccaggctgaccaggccagcccaactcactgacctcctgaaccctgacctcatcactgtgcagcatggagaaagatgtcccgtgtgaccacaagcctgggtggcagcgtgctgacaggccgcaccatgcactgacacctggatgctcccgcgcaatgccatcagttgtgtgccgcgaacgcagccagggtggtcgttggcagggccgtagcatcttcaagaatctatgcccatcgaaggacggaacagttcgtgggaaaaagctgaacctgcgtgtgggggcgcaaagccttccgcttaacctgagctgtgctgaacgtggttgggcaccagatggactcacca

SEQ ID NO: 712295 - DNA, 411 bp, Homo sapiens
gagtctacttctaagtatgtacaattgcccttagctttttgtttcctaacttgtctatttttcttctgcttcctacatttcaagtgcaaatttatctttttacttctaaaactatgtatttatctatctaatttccctatctacactatatcatatctacgccttcccgtacttcgtgtcttccagtaatccacttcaaacatctatctagaaactcttgacaatattttcatttactatcttatttctatcttccatttatcttctaagttagtacattttgcccttagctttttgtttcctagcatgtctttttttcttctgcttcctacttttcaagttaaaatttatctttttaaaagatcgcctatcaattatttaaatcacctaccacttttaaactaaactttg

SEQ ID NO: 712296 - DNA, 332 bp, Homo sapiens
gtgtgtcccgcgccaagtaaggtttggtcaagaaaagggtgtaaggcacctaagtcatagtccgcctagaaagcatttgcggtgaacaatggagggcccgaactcgtcatacccctgcttgctgatccacatctgctgaaaggtggacagcgagcccaggattggacccgccgattccacacggagtatactgcgctcaggaggagcaatgatcttgatctccattgtgctgggtgccagggcagtgatctcctttggcattcctgtcgcaatgccgggttacattgtgttgccgccagacagcactgtggggaatcctctaaagtcaacct

SEQ ID NO: 712297 - DNA, 362 bp, Homo sapiens
ctgtggcagcaccgtcgtgatacccagtgaaactctggcaggcacagctctgcggtcgatccagaaggacacccagcactactctgatgtgcaaaccctagagctgcctcgtggccaccccgggaggagaaggagggagtgtgcagggctggaagggctgacagcgctttagacaccgtaactccacacttgtggttttcatgcttggagcttctgtaggaagatggaggttggccaaagtttcagcgactaaaagtgtgaaattcatttaagcccatcaaactcaaacttgtgcagggaccaggcagacacccatgatgaaggcagctggccaggcataaaggacacaatccgcagagcca

SEQ ID NO: 712298 - DNA, 1044 bp, Homo sapiens
ggctccagtcctgtcgtgcgcgcaggcccttattgagagcgggatgaagtacgaggacgccatccagttcatccgccagagaagcgccgcggagccatcaacagcaagcagctcacctacctggagaaataccggcccaaacagaggctgcggttcaaagacccacacacgcacaagacccggtgctgcgttatgtagctcaggaccttggctgggcctggtcgtcatgtaggtcaggaccttggctggacctggaggccctgcccagccctgctctgcccagcccagcaggggctccaggccttggctggccccacatcgccttttcctccccgacacctccgtgcacttgtgtccgaggagcgaggagcccctcgggccctgggtggcctctgggccctttctcctgtctccgccactccctctggcggcgctggccgtggctctgtctctctgaggtgggtcgggcgccctctgcccgccccctcccacaccagccaggctggtctcctctagcctgtttgttgtggggtgggggtatattttgtaaccactgggcccccagcccctcttttgcgaccccttgtcctgacctgttctcggcaccttaaattattagaccccggggcagtcaggtgctccggacacccgaaggcaataaaacaggagccgtgaaaaacacacaaacaaacaaagacaacccacacaacacaaaaacaccacgagaaacaaaggcgcgggcggcaacagacaaaacccggggagacaacaaaggagacgaccgatctagaacaggagggcaccagagcgaggcacaaaagcaagcgagccgggacaaacgagcgcggggaagaagcagcacagatcctgcgggcgagcacaccacgccggggcagccgagacccaccgcataacacggcgaacagaactgtggaaaacacacgcagggggacgtctaaaacacagcacgaagcacacacacgccagccaccgccagcagcactagcacgcgagcaggcgacccgagacgcacgaccagcgcca

SEQ ID NO: 712299 - DNA, 648 bp, Homo sapiens
ccggtccacccccttgacccaaccctatgtggcagccctctaaggggcgtgttaagaagtaatatctgggagcgacatgagggcgcaatagcagaacatcatcccattctagcaagaatccagtcaggaacagccaccttgctatagcactaagtaagcgcagatgcctcttctaaacaagcaagttcactcttgttcaaacagtgagtctttgagagtatcaactctcaccacgaaaggccgaactacatatgcatgctaatgacctcttcttatgaaatattcaggcaagatgcagaggattccacagtgaacagcagtgagaggcgctgagacgcacgctgtcataacttttaccatataaactttatctatatattagagtcacgaactctcattagtacctgtaccactcagatatagcagataattcgtgtatgagactaaccccatgcctttgtttcgttattaaaaatttcgtcagcagccctttaataatggtggtgtgtagttcattcttgtcgccatgcaagagcagcattagcatggcactcaacagctgccgtccaagcctgggtgctcgtggtggtcctgcatctcaccacccacccgcaggtctggctgttcagtaaggttgccctgggaaga

SEQ ID NO: 712300 - DNA, 183 bp, Homo sapiens
gcccagctgattttactgaccttctcagtggaaaggtaggtctcattatcgtgtatcttctgggtgaaaacaatcgtaaacacagcggtgggagacggcgtacttgtttcatatcatgtttgtagctcgccctgtcctgggctttgttcccccggatccatgtaaggtccgcaatgtcttgtg

SEQ ID NO: 712301 - DNA, 1238 bp, Homo sapiens
tgttcagattaagaacgaggatcagaactcaacatgatcagacgcaaaagtaagtcagcgcccgactaggccagaaagagattagccaatcgatgcgaagtgcaagtttcaacacagatccctacgtccggtgcatttggaatcatggtccaagatgagatgacagacgtgactgggcgggtgctgcagaccgacctccatcctctacgggggcaggaataaagctattgcgacaccctgtccagggacgtctgggacatgcggaacaagcagttccacacgggacatcgagatcaaaggtgtgggccattgcagtgcttacgacccaccagacagccagatgcacggaagtccatactgaagtccttacacagagcagctacagaaagatctcgagagacgctaggcatgcccataccagggtcacagacagtgactttctagcaaaatacagcgacagggagtgctggaccacgtaggaagccccaagatacccggacaacctgaaagaacaacgtaatgcagagcctgacaaacttcggtagagtggtcaatccctagcaccagggaaaggacaaccccgatgtacagcacgaaggtcacagccgcagtggagaaaaacaacggattgcatatggggattgggccaacacaaggtgcgttgcagaatagaaaagaaccggatacaagaagggaaccaccagacccaaaagaacaccctgggacaaaacagcgatgacactgaaagaatacaaacagcacaaacaaaggaaagggacgatgaaaaaaaaaatacaagaaaggaacaccaaagacaacggccagaccgaaaggaaccagaaagaacaagacaaaactaaaaagaaaaccaaaacaacaaaaaaaacccaacaacagaacagagaaaaagcgaaagaaagacaaacaaaagcaggcagacgaaaaagaaaacaaaaaaaaaacaacaccaaacagaaacagacacaaaccaaaacaaaaaaaagaacacaaaaaaaaacacaaaaacaagaacaagaaaagaacaaaagacaccaaacaccgaaaaatcaagaacgggacaacacagaaaaccaaaagaaaataaccaaacagaaaaaaataagaaaagacaaaatacgcacaaaagagacgacaaaggacgatgaaaacgaaaaacacacggaaaaagaatacaacaaacacacataaaaagaaaaacgggaaagagaaaaagagag

SEQ ID NO: 712302 - DNA, 259 bp, Homo sapiens
gtccagaacgcaagctctcaccgaggaagatgcacagatagccattatgcagcagcacattgaccgcctagcccttgctgaatgagaagcagtgcggccagcccactggagcccaaggtagcttgaggagctgcgtgacaagaatgagagccttaccatgcggctgctttaaacccttaagcagtgccaggacctgtaagacagagaagagccagattgatcgcaaaatcaaccagctttcggacgaggtcagcgttgt

SEQ ID NO: 712303 - DNA, 518 bp, Homo sapiens
  misc_feature (4)..(4): n is a, c, g, or t
  misc_feature (16)..(16): n is a, c, g, or t
  misc_feature (79)..(79): n is a, c, g, or t
  misc_feature (316)..(316): n is a, c, g, or t
tttnaaaaaaattgtncccccaatatggcctgaaaaatccaacaagcctacctgaagttggatccttccatcctgtttncaaaataaaaggaagaagaataaattccttgtcccttcaattccccattccttccttcccaccgtggaaccgtaagcctgaaatgaatacccttgccgtgcctctggcccaatgaaagaagttttacctctttcctgaatttcccttttgggctggttaatggtggctcatgcctgtaatccccagcattttgggaggccgaggtgggagtattgcttgaggcccaggagtttgagncccaggctgggaaacataacgagaccctgtctctacaagaaattagccatgtgtagtggtgcacacttgtgtttctagttacttaggaagctggggcaggaggatcatctgggcccaggcgttcgaggctgcagtgagctatgatagagccactgcactctaacctgagtgacagagagagagagagactctgcctctaaaa

SEQ ID NO: 712304 - DNA, 472 bp, Homo sapiens
gtagctgttctagaggatccgcgctgtatcgagtagtaagtgattggcatgcggggctgatttaggcagatgtacgagaggaacggacaaggtagttggggtaaagcacacagcaaggccacagctcactgagacgcaaggtcggtctcgtaccccttcaatcgtgatcctctgtctggaggattttcatgatggctttactccaagaagctccccagggcctttgtaaatatggggatatttctgacactgacaatccttacagtctcttatacattgacaatgatcaggaaccgcccggcatgaatatgagaaggtggctggccgacataggacacacagaagaaaccatcaaccacacaacacacacaggaggaatcctgatgcaggaggacaatagaacagcaggggaccccaagactgaactttgcatctcatgtattgagatcattccccaatatggtttggctgt

SEQ ID NO: 712305 - DNA, 206 bp, Homo sapiens
ggactggaccgatccttcactctttacgtgcacctcaacgccgatgagctggaagccctgtcagatgtgctcaggttacgtttgctggatttgttcacttggtaggttagctcccgaccagacctctatcatgtgtttgtgaatctggtcagacagtgcacgattaccattgctccccttgcaatagaggtcatggctattggcaa

SEQ ID NO: 712306 - DNA, 516 bp, Homo sapiens
atggggcgcgttacgcaccaaaaccgtgaagaaggcggccgggtcatcatagacaagtactacacgcgccggtggtcaacgagcttccactcgaacctatcgcgtgtgcgaggagatcgccattatccccagcaagaagctccagcaaccaagatagcgagtgttatgtcacgcagtctgtatgaagtcgatagttcagagcaggcccaggttaacgaggttatcctccatcgaagcctgcgaggcaggcacggagaggagagataggagagtcgaattaatgttccctgaaggttctcaagcccttggtctcaggcagattcatcgcacagtagatcctggacagctaagggaaatgctgaaagctttcggacttacggctagtgctgtccacatcttgcaggtcgactctacccgtacagttgggcatagaattctcaagaacggcctcggggagctgcttagaatttgtctctgtacgtagctgtagtaatgtttcgactaagatctggggac

SEQ ID NO: 712307 - DNA, 230 bp, Homo sapiens
tacagactgtcactggaagcttgaaccccgcagggatttcattaaatgttactgctccaatataatcttgttttgactccgtctcccacatccaggtgactcgtgatgtacagggcgagctaccaaggctgagggcagttctacccatttggctacgcagggttcggcccctgtggctactctcatagcgctgttaagtgcctgcagcattttccagagtgtacggatac

SEQ ID NO: 712308 - DNA, 291 bp, Homo sapiens
tgcaaatagcacacgcctctatccaaaccagcaaagggcagttctgcctaagaaaagacacgttggcagccatggctgacactgatgctgacacacacacacacacacacacacacacacacacacacacacacaggccacccttattctcccagggtctcagtgatccagagacccgtatgagagacccactgatgccccagggactcccccaaagtctgtacaaccaagctattctccattcttccggctgagacacagtatccaggggtgctctctccttcccccatc

SEQ ID NO: 712309 - DNA, 177 bp, Homo sapiens
acgcttcgaggcaccccaaattagctgcccattcgtcaggacacccacaccacccagtgtatatatatctgcctcgccggcagtggtgtaccctgggggcacattgctgacacagcccctatgcgtccccaggatttgcatgctctcacccgtgggccaagtcaaccatacctagga

SEQ ID NO: 712310 - DNA, 368 bp, Homo sapiens
cacagtggctcacgcctgtaaccttagcactttgaaaggctgaggtaagcggatcacctgaggtcaggagttcaagaccagcctggctaacatggtgaaaccctgtcttttcaaaaatacaaaaattggccaggcatgatggcgggtgcctgtaataccagctactctggaggctgaggtaggagaatcgcttgaacctgggaagtggaggttgtagtgagtcgagatcacaccactgcacttcagtttgggcgacaagagcaagactctttctcgaaagtgattttgtttacttgcatgcataacaggtaaagaagcttcttaataaagtagtgctccgtgaatcttgcttttaccggttcagaccc

SEQ ID NO: 712311 - DNA, 167 bp, Homo sapiens
gatgaacctccttgaaagcgctggtttttctcgagcaatccttattatattgttaacaaggaaagatcaaccagatggcacagcaccagattctcagagattaagctattatgagaagtagctggtactagagtgtattacgaccgaaggaggaaagcatctcctta

SEQ ID NO: 712312 - DNA, 251 bp, Homo sapiens
cctgacatgcctgcttagccgactcttagagtatccccgccgtacgtgaacgtacggcagagcccggttaatcgcctaaaacttataactcttatagtcggagcttcaattcctcttcttaacaacatacccgtgccaacctcctactcctcattgtaccctatgacccaagacgccacacaaagggccacccttaagagccgcccaatgagccacgccattagccccgcgaagggccccacgaacagcct

SEQ ID NO: 712313 - DNA, 153 bp, Homo sapiens
tatgttgaatacgagtggtgaaaaagggcatcctggtttcatgccagttttcaaggggaatgcttccagcttttgcccattcagtatgatgttgccctgtaaattgtggtagtgggaccaggaataaaaaattaaggaatttttaacttttca

SEQ ID NO: 712314 - DNA, 833 bp, Homo sapiens
  misc_feature (833)..(833): n is a, c, g, or t
ccagcccggtaagatttttctttcggccacaaaccccacggaaagggtttgattctttttcagggaaaatgacactgcccgaaagacctgttttaacccggcccttaaaaaactttgtccacaaacccacaacgaaataaaggagtctgactgaaagttctccggggaaagataccaatagccactggtgttgtggaaggtccttggtgccaagaaagtatccccacaagggttaaaggaggtctcccctccacaacattaaaagacaggaaccaatttgttctgcttttaataagaaaattttgctaacttctggccccttggttactccaggtcgtcatgtacaatttccaaaagagagggtcacatagaagcacagccaagtcattatcactcctgtttgagaccagggtcaccccttgcatgcagtataacaactatcccaactctgatgctttgcaggtgccgggcttaatcgtttgagacatccagtgcgcttataacaattttcgacaagtgtaatttatccatgggggcattcaaaaacagatgaccttctgggatacaaattgcgggggatggacggtttaaattggggcgaggataggccttcatcaccagtggtcaggttgtcccaaacagttcctgcgtttatagagccacagttctatgtcccaatgagtcacgcatttaatggcacaaagaggccattgccccttccctccttttgagggaatatgtagtaaatcacaaccaggaaaaagtaactctagctgtgcactgtctcaaaaacaaagcttgccaccatcaagtatgaaactttatagccgtcn

SEQ ID NO: 712315 - DNA, 352 bp, Homo sapiens
gagttcgcccaccacctcacgttcatgctcaaccggatacgttttcgcgtcacgatcgacgaggagtcggtgcgcagcattcgctatcagtacccggtggcccatcggatggccgagatcagccgcgacgtcatcgaggaacgcaccggtatgcggatcagtgactccgaaaccggactactgacgggctatcaccaagtattcctcgactcccaccgtgcctgcccctacctcaggctggcgatcgtcacagcgaccggacggtctcagcccacctcatgcggatacagctcgacaaagtgctcccccacggcaccaagtacctcatgctgaccggcgacgaggcagacgc

SEQ ID NO: 712316 - DNA, 1389 bp, Homo sapiens
taaggcttttttagtatttttaaaaacatttaattggggaaactttgattcttgaaagagaaaacaaaagctattgtgatataaatctttgaatgtgtgttcacctcatgtttggggcaccaaatctggtcttggtatctttggtaaaacaccggttttggttattgtcaaggaggagttataaggccttttccgaccacctttgtgtgtttcccctttttctgtgcgcagccatgtgttttcacgtgtggagttgtgcctcctttaccaaaccttcaggtgtgccccttggagcccttattttccgtgaatttcttcgtgggctgtggattctccccgtgttcttccaccaggcagctctccagttattctccaaactttctctagttccgtgcgtgattccttcccagaaagcgggggtgtggaacacgtggaggggcaggtgttcgtggtcgtggtttctcataagaaaacctttagtagaaatttcatattatattctttttaccccatttttttgagcaacaaattttttttctccaaaatattttgtttacaatcaaaactcctttttataataaccgatgtgacacagggaaaactctcttagtggactccgaaatataacggcgaaacgcgggtgggtaaatagcgcattgggagttgggattacacggaggggattaaaagggggggttcaccataatgaagatgaaacacatatagtgtattttttataaccccttataggcttgttataaaaggtattaacagattttctacagaatttgttttggcgggggagaaaacaatatccccttttcttaagaagtgggcgcccccttgagtgaatatagagccatttagtgaggagaagaggagggccctgtgaacgagggagcaacactacacaagggggaattataatggacttatatgttatttattggggagatatatgggacacacaaatatttttcgccccccagagatattaggagcctaaggatgagatatatgattaggagagtactccaccccgtaaataggggagaaaagtaactactgatgaaacgaagagggggaaacatcggaagaagagacaccagagctagaggggggaaaacgaaaaagccaccccacaaagagtggggaaacacccccgcgggaaaaaaacaaaagaagggtgcgcaacaaaccaaaacagaagacacaacaacaaggaagaaagaaaaggagaggacgagtaactaacaagagcgcaaccaagacagcaaccgacggaagagagccgaagagaataatgtaaaaagaagaggggacagcgacagaagaaggtgatacagccaccagaggtgagaaacaccagcacatctactggagcaagta

SEQ ID NO: 712317 - DNA, 676 bp, Homo sapiens
caactctgcctcttcccccgctgactggggtatcagtttatggtgccctgcaggaagaccctcttgtccctcctctgcagagatgtgggcagctgtgtcaggatggccattcgtggctcagcacagctagactgcagcccagcactcgagactgggtgaagcagacactggggctggacaggccaggtaagagcctgtcggcacagtgatcctgagatgtgggagttgctgcagacgggagaaggccaggcagtgtctgtggcctggagctcagttgcctcgagtagaacgttctgcgatgccgacgctgcggctggatggccctgtgggtcctgtctgatacaagcaagtactcggagggttatcctggcaagagatactatgggggagcagaggtggtggatgaaattgagctgctgtgccagcgccgggccttggaagcctttgacctggatcctgcacagtggggtagtcgaatgtccagccctagctccgggtcccctagtcaacctggctcgtctacacagcccttctgctgacctcacgagcggatcatggggctggacctgcccgatgggggccatctcacccacggctacatgtctgacgtcagcggatatcagacacgtccatcttcttcgagtctatgccctataagctcgacggcttagctgtt

SEQ ID NO: 712318 - DNA, 724 bp, Homo sapiens
tggtctcttggtggtcccttgaagggctttgatgatcaggccagaggcaaaaggccccacctcaatctgggcctgtctgtcctgaatgtgtcagtttcactgtaatcctcaggcccttccagtcacccgttgccttggcaatgtcatcaccaatctttttttggtgagacagacccagggtggccgatctggggggccaggcagaagtgtgcccgatcttcacctccggtgcacctcagtgttatacgatctttgatctcgtgtgggtgtcgaacttcggcggcatggtgaaggcggctggtgtcggatgaccccggatctcggaacgaccgaaggaagttgcacctgtggcctccgatatcctgagacaggcttgggcagtgggataccagacagcttctcacaacaggatccccaaagaaattacggtgagtaatattccccaggccatttgcacacatccctttcctgggactccctcaaaaacaacccctggggatcttttgactcgggcccgtgagcggagtgagcgtcgccctggaaaacgcaggctttgaaggccacgcgaagctgtaactgaggccctgcctgcttgggaacggcggtggtcccgctgtgactccggctgtctgggtcaccccttctgccgttcctgtccccgttccagcgctggcccaataacccagaagagatgtccagatagaagggcaaaccaatttgcaac

SEQ ID NO: 712319 - DNA, 702 bp, Homo sapiens
  misc_feature (30)..(30): n is a, c, g, or t
  misc_feature (106)..(106): n is a, c, g, or t
  misc_feature (155)..(155): n is a, c, g, or t
  misc_feature (179)..(179): n is a, c, g, or t
  misc_feature (187)..(187): n is a, c, g, or t
  misc_feature (197)..(197): n is a, c, g, or t
  misc_feature (216)..(216): n is a, c, g, or t
  misc_feature (234)..(234): n is a, c, g, or t
  misc_feature (244)..(244): n is a, c, g, or t
  misc_feature (377)..(377): n is a, c, g, or t
  misc_feature (379)..(379): n is a, c, g, or t
  misc_feature (387)..(387): n is a, c, g, or t
  misc_feature (400)..(401): n is a, c, g, or t
  misc_feature (406)..(407): n is a, c, g, or t
  misc_feature (419)..(419): n is a, c, g, or t
  misc_feature (424)..(424): n is a, c, g, or t
  misc_feature (429)..(430): n is a, c, g, or t
  misc_feature (442)..(442): n is a, c, g, or t
  misc_feature (445)..(445): n is a, c, g, or t
  misc_feature (458)..(458): n is a, c, g, or t
  misc_feature (478)..(478): n is a, c, g, or t
  misc_feature (507)..(507): n is a, c, g, or t
  misc_feature (510)..(510): n is a, c, g, or t
  misc_feature (518)..(518): n is a, c, g, or t
  misc_feature (526)..(526): n is a, c, g, or t
  misc_feature (543)..(543): n is a, c, g, or t
  misc_feature (570)..(570): n is a, c, g, or t
  misc_feature (585)..(586): n is a, c, g, or t
  misc_feature (670)..(671): n is a, c, g, or t
  misc_feature (673)..(673): n is a, c, g, or t
  misc_feature (675)..(675): n is a, c, g, or t
ccctttgctgtaaacaatgtcaagaaacanaaataacaaccaaaaatgaaatattcagtttatccttatgtgggccgatggcttcttattttaatcctcatttatnttttcattatacactttctttttttaattctttcaactttaatcttttnttccctccttctacataacacttnttttttcntttttattcntttactttttcccattttnatatcttttcaacccatnttttatttanttttacccccaccaaaaaatacatttcacctcaaaaatttttgggcttaaccccatcttctctgtttcccaccatcccacacacttaatattaaataattccacacaaattaatacttttcttttaaaagatntnatagatanaaatttatctaannaattnnttatattctaanatctnctttnnaaattatttccnctnatacatacctaantaaacataacattaataccnaagtaaacataacattacttggagggttncantttctaantgaaactntatttgaaacttttaantatactttaggaaacaagcatgaacgncagtctagaataccnnaaacatctacttgggtagcttggtgccattatcctgtggaatctgatatgtctggtagcatgtcattgatgggacatgaagacnncntnggaaatgatgagattatttccggtgtt

SEQ ID NO: 712320 - DNA, 100 bp, Homo sapiens
acacactgaaacgtataccagctgattgactgtgcccagtacttcctgtgacaagatcgatgtgatcaagcaggctgactatatgcctgagcgatcagga

SEQ ID NO: 712321 - DNA, 904 bp, Homo sapiens
gcagactgccgaggatggccgtcatggcgccccgaaccctcctcctgctactcttgtggggccctggccctgaccagacctgggcgggctcccactccatgaggtatttcaccacatcctgtgtccctggcccggctgggggagccccgcttcatcgccgtgggctacgtggacgacacgcatgtacgtgcggtttgacagcgacgccgcgagccagaggcatggagccgctgggcaccgtggatagagcaggaggggccggagtattgggacctgcagacacggaatgtgaaggcccagtcacagacctgaaccgagcgaacctgggtgaccctgcgcggctactacaaccagagcgaggccggattctcacaccatccagatgatgtctggctgcgacgtggggtctggcacgggctgcttcctccgtgggtacctggcaggacgcctactgactgggcgaggattacatcgccttgaacgaggactgcgctcttggaccgcggtggacatggcggtcagatcacccaggcaagtgggaggctggccgtgtggggagcagttgagagactacctggaggggcacgtgctgtggagtggtccgagatacctgggagaacggggaaggagacgctgcaaggcaacgggacagcacccaagacgagtattgactcaccagcgcttgactcttgacacaatgagggccaccctgagggtgctaggcgcctgagacttctaaccttgggcagatcacactgactttgccgcgggatggggaagggacaagaacaaagaacggagctgggaggcacagcgctgcggagatggcactacaaaagtggcgcctgggcgagcaatctggaggagccagtacctgacagtacactctcgttgccagcttact

SEQ ID NO: 712322 - DNA, 339 bp, Homo sapiens
  misc_feature (1)..(1): n is a, c, g, or t
  misc_feature (68)..(68): n is a, c, g, or t
  misc_feature (74)..(74): n is a, c, g, or t
  misc_feature (78)..(78): n is a, c, g, or t
  misc_feature (81)..(81): n is a, c, g, or t
  misc_feature (87)..(87): n is a, c, g, or t
  misc_feature (91)..(92): n is a, c, g, or t
  misc_feature (149)..(149): n is a, c, g, or t
  misc_feature (163)..(163): n is a, c, g, or t
  misc_feature (192)..(192): n is a, c, g, or t
  misc_feature (205)..(205): n is a, c, g, or t
  misc_feature (212)..(212): n is a, c, g, or t
  misc_feature (234)..(234): n is a, c, g, or t
  misc_feature (240)..(240): n is a, c, g, or t
  misc_feature (244)..(244): n is a, c, g, or t
  misc_feature (246)..(246): n is a, c, g, or t
  misc_feature (251)..(251): n is a, c, g, or t
  misc_feature (263)..(263): n is a, c, g, or t
  misc_feature (312)..(312): n is a, c, g, or t
ntggtcagggcactggccactccagttaccatcttctgctaggtagcctgcaccttaggggtgatttntttgcngaantgntttgcnaaannggtcaccagcacatttcccaggagcttgaagttctcaggatccacatgcagcttgtnacagtgcagttcantcagctgggcaaaggtgcccttgagatcntccaggtgctttntggcatntcccaaggaagttagcaccttnttgccntgtncnttgantttggggttgcncatgatggcagaggcagaggacaggttgccaaagctgttaaagaacctntgggtccatgggtagacaaccaggagc

SEQ ID NO: 712323 - DNA, 122 bp, Homo sapiens
gacagaatgatagagtcgcgagtccatggtaggcgtcagaatcaccgtctacattgtagtggcagttattggtggtcccatgtggccgcttctatcacctgtttaaagtagtcagccagact

SEQ ID NO: 712324 - DNA, 127 bp, Homo sapiens
gggttttttttttggggggggggggttttaggtttttggtttttaaaaccgggcttttttaaggggaccccctggcccaaaattttgtcccgaatttttgggcccccttaaaaaggttttttgggga

SEQ ID NO: 712325 - DNA, 160 bp, Homo sapiens
gggcccaagttgggttcaattaaagggccagcttgttccccccaaaaaagccccttttgtgaaacccaatggaaaggagcttaagttgttggaccctattccctataaattcagggcaaaaaaggggttaaaaaaaaaaaaaaaggccctttgggctcca

SEQ ID NO: 712326 - DNA, 458 bp, Homo sapiens
  misc_feature (19)..(19): n is a, c, g, or t
  misc_feature (341)..(341): n is a, c, g, or t
caatccccaagtgccctanaccctgaggttcctggagcctcagaatctgacagccttctcccccccatcctgtgtgtgtcgggggggaccagagggaaccccatttaaagaaaaagatccccaaagtagaagtcaaaagaaagacatgttggctataggcgtggtggctcatgccctataatccccagcactttgggaagccggggtaggagggatcacccagaggccagcaggtcccacacccagccctgggcaacacagcaagacaccgcatctacagaaaaattttaaaattagctgggcgtggtggtgtgtacctgtaggcctagctgctcaggagnctgaagcaggaggatcacttgagcctgagttcaacactgcagtgagctatggtggcaccactgcactccagcctgggtgacagagcaagaccctgtctctaaaataaattttaaaaa

SEQ ID NO: 712327 - DNA, 137 bp, Homo sapiens
tccagcgctgtctcctgtggcggcatcttgagccgcagggttacgtctaggccagcgatgcctgtgcataggtgctgcccgcagctgccatcctccatatctgtgtccgcagcacactcctccaccaccttcaggaa

SEQ ID NO: 712328 - DNA, 945 bp, Homo sapiens
agtcaaataaaaaatttggtcattggtactgactttctctctctctctctctctcttttttttttttggacagagtctcgcacttggttgccggggctgggaatgcaggggtgcgatctcggctcactggcaacctccgcctcccgggttcaagtgattctcctgcctcagcctcccaagtaggtgggattacagggccgcccgccaccacgcccagttaattttggtatttcagtacgagatggggttcactatgtgggccaggctgggtctcgaactccggacctcgttgatgtggcccacctcagcctcccaaaggggctggtattacagatgtggagccaccgacccagccgtgagtttctcttactctctttaaaacctttattttgtggaaaaaccgcggtagactttggggggggaggcatttgggtgcgaaaattaaagtgatcaaaaaaggctgaggtaggaatcttttttcacacagagaaacttcttggaacatgtgggtgttttccctacaaacgaagttaatttttgttcttccgtggctcctgaggggaaggggggaacagacgatttgggaacaatgggggcttggaagaacatttctaaattaagacattctggggggcgtgaaaaaatcggggcggggggttgagtatatatgaaaggtgttccacacccgtgggtggtgggaccacaatttaattcatttatctagggttgggcagagggaaattttgggttggagacgcaatattcgtggggagagaattatatgtcgggcaacaggtgtaatacattaaaaaaggctgtaaaaaaccatattggtttgtgtgcggcgtggtttaagaaacccgtcggataaaggccaatttttttggggaactattgaaagaagagactttgagaaaagaaaatatagagaggtggtgttataag

SEQ ID NO: 712329 - DNA, 752 bp, Homo sapiens
gaagatagcggcgcggtcgtcgtcgggggtggcggcggcagagcggggcggcggccctgtgcggcagcggagacggcagccgtgacggtggcagctgtgcggcgctgggacctgggccttgggggcaatgagtgcggcctgcggctgtggccagcggctggagccgtgtagcggagaagctccccctccctgcttcccttggccgagccgggtgccgctcgcgcagtgacggcacgtacaagtagccggggcatccgcgaaaacacgtacaacatccatgggaatcccgaaaacggaaaccaccaacagaccagggccacggtacggactgataagcacacaaagctagaaaacgagaaccccgagaacgttaccggaaggagcggaccggggaattacagaggacataccggggagccctgaatttgacccatgtataactacccccagcaaagacgcagagagcgcgactcgacggtacggttagcaaagaatcggatgcaagaccaggaaaatacggcgagatcccacgaacacgacaagtgcacctaggcaaccaccatatgtaacggaacgcggcaaattcaagagacagccaataggaaaggagatcgcacaaaaatcaaatagagcagccagcaaggagaccgcagaagagacaccatgcaaaaggaaggcgctgcaaatagaaacaaacgggcacaaataggggcaaccgaacacagaatcgacacacaacatgagagaaaaaa

SEQ ID NO: 712330 - DNA, 151 bp, Homo sapiens
  misc_feature (9)..(9): n is a, c, g, or t
  misc_feature (42)..(42): n is a, c, g, or t
  misc_feature (74)..(74): n is a, c, g, or t
cacaacagngggactactgaagactagagaacgcctctgtgngagtggtgcagacaaagacctcactaaagtgngcttaacagagtactagaggagagaacttggcaatagcaagtacagacaactatgtgagaaatactgctcccaaagg

SEQ ID NO: 712331 - DNA, 121 bp, Homo sapiens
ttgcgatatggagccctcatcagaaaagtggagaaatggtacatgtcactgcttcatggaggctagtggattggccagggcttcgaactgcaaggacaataatgatgagtagccggatagg

SEQ ID NO: 712332 - DNA, 266 bp, Homo sapiens
ggagtgacaggaggataattattagaaaaaaagcgaaaagaaagaaaactcagcattacctgctaattacttcgctgccgacgggaggctgggcaggtgattccgtgaaggcttctaagtttaggagggaggctggtgaagaaatagaagatttccgcctcagaccacagagcctgaatggatcagattatggaggagatattcctatcattccggatctggaggaagcacaggaagaagactttgttttgcaggtggcagcccct

SEQ ID NO: 712333 - DNA, 505 bp, Homo sapiens
caacgatggtcctcagctactcaggagctgaggtgtatcactggagtccaggaagtcaaggctgcagtgaaacatgattgcaccattgtgctctagcctgggtgacagagttgagaccctgtctcaaaaataataaaataaaaataaagaatcacatctgggccgggtgtggtggctcataccagtaatcccagcactttgggaggccaagacaggagcactgcttgagcccaggagttcaagaccagcctggggaatacagtgagaccctgtctctacaaaaataaaaattagttgggtgtggtggcacacgcctgtggtcccagctactcaggaggctaaggtgggaggattgtttgagcctgggagctcaaggctacagtaagctttggctgtaccactatactccagcctaggtgacacagcgaaaccctgtcacaaaaaaataaataagtaaaagacaagaaagagccaggcgtggtggctcacacctgtaatcccaaca

SEQ ID NO: 712334 - DNA, 507 bp, Homo sapiens
tgctgattttcaggatggaaacccatcctgtcggggatgcattccacagcctctccggcctccagggaggaagaagtccctactcccagcccaaaaacccagtaccctgctgcccgattcactcagcaaatgctttcagagaactcactttgtgccaggccctgagaggaacgaagagatgctgcccttcactatttagggtctgcaacctcctgggggctcctgggaccctttcaaggggtctacaaagttaacactatttttataacaacacgaacatgtgattcgccttctctcacatgcatacagtggggttttccggaggttacatgatatgtgatattgcaacagactacacgcacaagcaggtatgagtttctgttaagcctggcatgaaagagatgggcaaaaatataaaaacaatgccactcttttcacagtattttttgttttaaaaaaatagttttttaaaataaaaatgttatctatgttaacatgcaaaaaaaa

SEQ ID NO: 712335 - DNA, 136 bp, Homo sapiens
ttcatgcaggcctctgctccttgtcttttttacctgtaaaatgggtttcaaatgctccgccctgcttggccccagcttgtctgtttttgggtcctgggccaaccaggatacctgataataaaagatccttgggtga

SEQ ID NO: 712336 - DNA, 292 bp, Homo sapiens
ccgtgattatagaggatcccgcatgagggctgtcccagtgtcatgcggtgaggctgtgcatctggttccacattcagtgccttcactatgccatcctgtaccaccatggagaacctcttgagacgtcgattcccaaagatggacaccagcgcaatcatctatgtaatcaagtctgtctcctctcccaaagtgccccaggtgggatcacgccaggagcctgaacctttgccgttcctgccattgttgggcgtcggccccaactctgccaggtcacaacaggcatcgattaaca

SEQ ID NO: 712337 - DNA, 902 bp, Homo sapiens
ggacaaggaatgccagagcctgccagggacattgatggtaatagtcagctcactttctatctttcattttttttggagactgagtgtcgctctgtgtggcccaggctggagtgcagtggtgcggtctcggctcaccggcaacctctgcctcctgggttcgagcgattctcctgcctcagactcctgagtggctgggacttgcaggcatgcgcccaaccaaccctgactgatttcgtgtcacctagtggagacggagtttctccgtgatggacaggtagggtcctcgaactcccagcctcaggtgactctgtacgcctcggcctcccagagtgctgaagattgcacggcttggagctacagaacagcggcactagtctgatcacatttctagacgagaatcctctaccctctagtctacgaaaacgggctgaactaacgcaatatgcaccaacatccaactatccatcccagggcagatcgcaagtcgccgagctccacgacaactcgtaccaaggaccagccaacacaggcccgaacctgacctggactaagccactgagtgactcactggacactacgcgcgctcacggcccctgaagcgaaatggacacggcacaccagacacgaactaacgccccctaacagagacggcacgcccgacgggctggactaccaccaacaaaagccaagcccgccacacagcaaaaaccatgcgtgaacagcaacatggacccccggccttagagcgaaacatcactggacagcaataaacagtgcgatagactacctccacaaggcgggccacacaacgcaaagacccacatcagaagctcctgcatcccctaagaagcacaacgaccaagcgtgcaaacaatcgaaaaagtagtgtcagaacacgcacc

SEQ ID NO: 712338 - DNA, 498 bp, Homo sapiens
tactatcactctaaaagggagcttacgactggcagattggggatagcaccaggagatactagctgtgatggcttggagcaaccgtgtagaccagcagtgtaaacaagagcaggacatttatgagtagttgagaacagtgaataggagtatgactagacagaagatagtacggatgacaagtttttggggtgcagtccaagttgggctggtgtctggaatgagcctggagcctaacaaaaaggagcgtccatacagaagctcaaatgggctgtaccctgtagcatcccgaggacaggcctgaattctgagaagggcaagtggtaaaagtattgtccagtcctttttaagttggaggctgaacttggcgaggtgtgtttttataagaccattagtccattttacctttcctgaagattgaggatggtaaggggcctgaaggttccactgaataccaagagcctgagaaactgcttgggtgatttgactagtaaaggcctg

SEQ ID NO: 712339 - DNA, 295 bp, Homo sapiens
tgggtgcagacttctcgttagcagctggaagacagtgtggcgcgttggccatccacccctaaaaagccccacttttcgcttcgtggcccaagagagcatccagaaggcaggacggagagtgtttattctgtcgagtgtttatgtgcggggctcactcgcttgcactgtgcttagggtagggatggtaaatatcctccctgcatggctttatcctccctctcatcccaaagcaggtatcttctggttgtcacagagtttcattgagtccagctgcagccacgtggccatctggagc

SEQ ID NO: 712340 - DNA, 148 bp, Homo sapiens
gtttttttttcccttgggcctgggaattttccccatttttatgaaggggtttaaaattgttcaatttggtgtgctggcctccaaacccttaactgtcaaatctggcattatcttgtttgtacagaaatatactggcctagcagaggca

SEQ ID NO: 712341 - DNA, 592 bp, Homo sapiens
  misc_feature (267)..(267): n is a, c, g, or t
ggtgtgacggagactctcatttctcacttcctttctccttaccccgctggctccaacctgaaaccaggtacaatcttctgtcgcatctgcattgggtggggtatcacttctgctgacaggagacgagtgagcaggggcaggtaaggattctgaagcagacagagtctcccgcccccatcatactatctttccaggctcttgtccactttcagcacctcccctcctgatcccataccttggaaaaggacaaatatatccaccctaaanaataatgggacctacaatcttggaagcaaaatttgtctgtgaaaagaggctatgtagagagcacaaggctttgttgcctcccagtaatgttcacaattccgccttacccacctcaaccctagcaggtctagacctgctccctctgggaagtgtacctacagccctggtttcaggaggcttggcgctcttgttctttaggttatttgaggatcttgtctccttgagtagactgtccatgcctggagggcagggctgtgcctcacacctctctgtatcccactaaagagcctgaccaatgctgggatacagagagtctccgcgaact

SEQ ID NO: 712342 - DNA, 234 bp, Homo sapiens
cgggagccttaacctacaagcaatctcagggtaaagaatactggatcataagtttctcttggtagaaataccccagtcttaaaagggaagggggaacaatataaagagaatttaaaaaagagggacacccagatgttaaatgcctccgtgagggaagtacataacatctcctattaagtattctgggacaaacaaaatggaatcggaattggactacggaatggcactatcaag

SEQ ID NO: 712343 - DNA, 204 bp, Homo sapiens
  misc_feature (14)..(14): n is a, c, g, or t
  misc_feature (144)..(144): n is a, c, g, or t
cccgcacagcacgnagaggcatccatctgcccatcggtatggagttagggaatgtggacaaggaaatagcaggaccccagttgtctggaacaggaagaatatgtagagagcaggtctggatatgcagatcagcaccatctagtncatctattcagcaagtattgatgaagcactgtctatgctccccttctccggtggcgtggt

SEQ ID NO: 712344 - DNA, 317 bp, Homo sapiens
  misc_feature (29)..(29): n is a, c, g, or t
  misc_feature (45)..(45): n is a, c, g, or t
tgggtaaccacaacccttgctggtgactngtgtcaggacagaggntgtttgtagtgaagaggcagaaccgaggtcgtgaaccttattgatgtctgagcttataaaaggcacgggctggagaagaagcctgcctctggggcctgtccccggggtgtgggggtggggaagcataccaccttctgctgtccttgctggagttgggcttgtgctcactacctccttcctgaccccccacctgagcgaggcaccaggcttaagagacttctacgctaagggacttaggggaactatgactagggggaccccttttcttccct

SEQ ID NO: 712345 - DNA, 112 bp, Homo sapiens
ccgcaacgtggatatactggatatggagcttcctatgcccagagattgacatacagattaaagatgcgattgggcggtacctaccagtgccagtaaatcccacgttttgcgt

SEQ ID NO: 712346 - DNA, 181 bp, Homo sapiens
acagctgggcatttgagtgtcttttccttgagaggagaaggttgggtgagagagatgttgagtggagcccagagaggaaccaggactggatatatagatttgggagtcatcagtcttatcgacttgtatagtactgggtgagatcacctaagaagagatgaagacagagaagataaagggc

SEQ ID NO: 712347 - DNA, 320 bp, Homo sapiens
  misc_feature (13)..(13): n is a, c, g, or t
  misc_feature (19)..(19): n is a, c, g, or t
tacggccgtagcngcgagntatcaataatgatatccgtcccattgatgtatcgcccagcattactcacaagcgtaatgagtggccccgtgagttcccacggatgtcccatcctgcccatcggattccttgcattccagctgtcacgcgctttcttcagcccctcgccatcattcagtattgtgtccatgtatcccgggctcaagcagtttacacggatgccatagctgctccattctgccgccaggctctttgccagcgagaggagtgccgtcttagacgaattgtatgcgcattgaggttgcgggtaattatatgctgg

SEQ ID NO: 712348 - DNA, 154 bp, Homo sapiens
  misc_feature (53)..(53): n is a, c, g, or t
  misc_feature (82)..(82): n is a, c, g, or t
  misc_feature (85)..(85): n is a, c, g, or t
cagagacgccctcgtataacttcatcttccttctttccttattgacattacantattctcaccagactcctaggcgaccagnatnataccctagccaaccccttaaacacccctccccggtacatgcaagacatgcaagcccggtacatgcaag

SEQ ID NO: 712349 - DNA, 204 bp, Homo sapiens
cggttacaaagtacaacggtagaagtcatcagttaaggctattttcagttcttgtggggatcttcaggtgcttcaggccatctggatgtatacatgcaggtcacaggatatgatgatttagcttgggcttagagacctgacattcctgtcttcttatattaataagaaaaacaaaacaaaagggtggtgatcgtggggttgtaa

SEQ ID NO: 712350 - DNA, 358 bp, Homo sapiens
  misc_feature (1)..(1): n is a, c, g, or t
  misc_feature (202)..(202): n is a, c, g, or t
  misc_feature (210)..(210): n is a, c, g, or t
  misc_feature (225)..(225): n is a, c, g, or t
  misc_feature (241)..(241): n is a, c, g, or t
  misc_feature (333)..(333): n is a, c, g, or t
ncaacatttttcaccccccccccaaacgcaaggggatggggaaacttggcccaaagtaacgggggtaggaattttagaaccaagcccccttatactgtctgtttgaggcagaagataacaccagcatctcgccccccctctcccttaaaggaaatctttattaatcccgtagggttcccagataattctttttttaaaaaancccccccncctaaagaagcccanctgtcaagagttttgnacccccaacttcagctttgcatcccgagttttgtattccaaaaaaatcaaagggggccaatttgtttgtttcccctatgaacctttttaaanaaactctttttttttaaaaaaaaaa

SEQ ID NO: 712351 - DNA, 215 bp, Homo sapiens
  misc_feature (22)..(22): n is a, c, g, or t
  misc_feature (141)..(141): n is a, c, g, or t
accttgtggaatactgtgcatnagtagccctggggctgcaacgaggtaaagagaaatcttttagggaatcagccgcctgaaagatcagttccagaagccaggcacagtggcttatgcctgtaaactcagcactttgggagncctgaggcgagcgaatttcttgagcccaggagtttgagaccagcctgggcagcacagcacaacccgatctctgc

SEQ ID NO: 712352 - DNA, 355 bp, Homo sapiens
cacgagggggactcccaggtcggtgctcggcccagacttatgctcgtgttttcacagtccacactcgtgcccgaagccccttaccccgccccgggttgtggtctgtgggctgtgggacgagctgcggcgcgggccatttctgagcattggaggtttcaagtaatccactaacacacagttccaatttctgtcatcaaatcctgtgctgcagttcctcgtggtaatagatgcatattatttcttttatttacaagaaatgaatgtgactagtattgcattatcagctgaaacttggcttttagctgcatggcatgttaatgtacctccgatgtggctggaagcttgtattaactgg

SEQ ID NO: 712353 - DNA, 3100 bp, Homo sapiens
  misc_feature (8)..(9): n is a, c, g, or t
  misc_feature (11)..(11): n is a, c, g, or t
  misc_feature (18)..(18): n is a, c, g, or t
  misc_feature (1332)..(1332): n is a, c, g, or t
  misc_feature (2563)..(2563): n is a, c, g, or t
  misc_feature (2647)..(2647): n is a, c, g, or t
  misc_feature (3005)..(3005): n is a, c, g, or t
agggactnncncgccggngctgacaggggccgccagcccctccgccgcgcggagcccacgaaggggacagcgcagccggcccagagctcgggtctccggggaccgagccttatgatctcctcattgcgtccccctctgcccactggacttggacttcagatctgaccccagacctgccggctacctcgggagggcccacctccccgcccatccagcaagatgccaatcctcaagcaactggtgtccagctcggtgcactccaagcgccgttcccgagcggacctcacggccgagatgatcagcgccccgctgggcgacttccgccacaccatgcacgttggccgggccggagacgcctttggggacacctccttcctcaatagcaaggctggcgagcccgacggcgagtccttggacgaacagccctcttcttcatcttccaaacgcagtctcctgtccaggaagttccggggcagcaagcggtcacagtcggtgaccaggggggagcgggagcagcgtgacatgctgggctccctgcgggactcggccctgtttgtcaagaatgccatgtccctgccccagctcaatgagaaggaggccgcggagaagggcaccagtaagctgcccaagagcctgtcatccagccccgtgaagaaggccaatgacggggagggcggcgatgaggaggcgggcacggaggaggcagtgccccgtcggaatggggccgcgggtccacattcccctgaccccctcctcgatgagcaggcctttggggatctgacagatctgcctgtcgtgcccaaggccacgtacgggctgaagcatgcggagtccatcatgtccttccacatcgacctggggccctccatgctgggtgacgtcctcagcatcatggacaaggaggagtgggaccccgaggagggggagggtggttaccatggcgatgagggcgccgctggcaccatcacccaggctcccccgtacgccgtggcggcccctcccctggcaaggcaggaaggcaaggctggcccagacttgccctccctcccctcccatgctctggaggatgaggggtgggcagcagcggcccccagccccggctcagcccgcagcatgggcagccacaccacacgggacagcagctccctctccagctgcacctcaggcatcctggaggagcgcagccctgccttccgggggccggacagggcccgggctgctgtctcaagacagccagacaaggagttctccttcatggatgaggaggaggaggatgaaatccgtgtgtgaggcggacagtgggtggccaccgggagctcttggctgcatctnctccctgcccccaccccactatgacctttgaccctacggcgcaggggcagccaggacccttgattcagaccatggaccctggaccttgtagatgagggacactggcctggccctcgggtcttcggaggacgtagggggctggcatgggtgccgactggctgcctgacttcatcacgctccctgcacttaggctgcgtgggacaagggctgtgttgtcacagcaggaataggttttcctctgttggcctcccttttcctccaccctggcctcaaatggatgccagatgccaaccccagttctggccacgtacagccagcgggtcagcccagaggcagcctcagctccagggctaaggactctcggctcccattttctctgctggcgtttctgctgtgcccagcagtggctgctggggaagcagctgcagcaggagggagacggtcttgcctctcagcccctccctgccccaccccagctcctgccctggaaatctggagccccttggagctgagctggacggggggccagctgcgagcatgtgcactaaacgcagccctttccaggggaagagagcaggatggagaatggaaggaaagccccccaggcttcgtgaattgcaagaagggacccttccaggatgacactaggaacagggctagggcactcgctcagtccctaggggcttgtttgttctttattattgtgtttaaatccttatagagcaatatcaggatggtgttaataggtctgcctcagaatgagaatcaatccttttagaaaacctttatactaagcctcctcttcaaaattcacagtggcgattagcggactggagtctggtggcgattagcggactggagtctggggacatccgtggcaaagacaccagctcaactttagtgcttcccaactttatttagaatgacatggggtgggtgtctggtgtgtgtgttttccctacgcacctcccatagctattaacaactgaggaaggccagtgcagaatatttttggagaacgattttttttttaaataatatatcattcctatggggggaaagccttttttttctttttggctgagttattccctccctcccctcaataccctcagtactgactacttccctttcttttctcaggcctccccccaccgacttttgaggccagggttggccagatttagcaaaaccaaaacagagtgctgagttaaacgcaaatttcaggtanacaaaagataattttctagcattaatatgccccacgcaatatttggaacacttatgtgaaaaatgatttgtttttctgaaattnacgtttctctctgagtcctgtaactgtccccgaggggattgagcagaagctcgggtatgagcccctgaggttgactgccggttatttttctgtcctgggaacagcctgacccacctccctgtctccatgtagccagtgaggggagggggagacacagaaccaaccacagccaggggcgtccccatggcgactgtggcccggcccctcctctcttgcctgactctcctctcttgcctgactctagacactaacttagttccaggttcggtgccctgttggtgctcctgtttccaatagcttaggtcccatggtgggggaggaacctcaggggctatgcagcccccgccagctgccctcnaatcccgtccaggccagttccagattctaaactgatttttttcatgatattgtcaaaacagtgaggaaacattaaaaaaaaagccctaaagcaaa

SEQ ID NO: 712354 - DNA, 277 bp, Homo sapiens
tgaccatgtctgagctctttacccccaatctcgcagccggcggatttcccatgcccggtgcagcctagttgcacagaccagcctttgaaaacccaaatctccaggcttgtcaaagcaggcaggggctccagtggtacccgatctcatttaccctgcctgctctttaggcctttggcacccatggtcacttcactggttttccatttggcttctcacctgggaaatacaaaaatagccacacctgaagttaaaagtcgttcagatggactgcacaaaa

SEQ ID NO: 712355 - DNA, 589 bp, Homo sapiens
tattaatatctgcatataaataattttaatatactacgtcatgactgtgtgtctgtacgtttaccaacttatctgccaaccttatatctccacgctcgaagttaccttctatcattctcaacaacgaatcgaataacacttgatacattaaatcagctactttaatgggctttgtccaacaataaactattgcgccgccttatatatcacactattgtagaaagtattatttaatttaaatggatgcaggttgtctactaaagaaagattatatattactatgctaattgttcataatcaacagaaaccaagatagagctacaaactcagctgtacagttcgtacactaaactcttcttgcttgttgcattataaggaattaagtctccgattattaggtgatcaccctggatgatcagttttctgctgaaggcacctactcagtatcttttcctctttatcactctgcattggtgaatttaatcctctcctttgtgttcaacttttgtgtgcttttaaaatcagctttattcttaagcaaatctcgtgtctaccttacaaaacttgcctcatgaaacataactatctc

SEQ ID NO: 712356 - DNA, 2790 bp, Homo sapiens
  misc_feature (8)..(9): n is a, c, g, or t
  misc_feature (11)..(11): n is a, c, g, or t
  misc_feature (18)..(18): n is a, c, g, or t
  misc_feature (1332)..(1332): n is a, c, g, or t
  misc_feature (2253)..(2253): n is a, c, g, or t
  misc_feature (2337)..(2337): n is a, c, g, or t
  misc_feature (2695)..(2695): n is a, c, g, or t
agggactnncncgccggngctgacaggggccgccagcccctccgccgcgcggagcccacgaaggggacagcgcagccggcccagagctcgggtctccggggaccgagccttatgatctcctcattgcgtccccctctgcccactggacttggacttcagatctgaccccagacctgccggctacctcgggagggcccacctccccgcccatccagcaagatgccaatcctcaagcaactggtgtccagctcggtgcactccaagcgccgttcccgagcggacctcacggccgagatgatcagcgccccgctgggcgacttccgccacaccatgcacgttggccgggccggagacgcctttggggacacctccttcctcaatagcaaggctggcgagcccgacggcgagtccttggacgaacagccctcttcttcatcttccaaacgcagtctcctgtccaggaagttccggggcagcaagcggtcacagtcggtgaccaggggggagcgggagcagcgtgacatgctgggctccctgcgggactcggccctgtttgtcaagaatgccatgtccctgccccagctcaatgagaaggaggccgcggagaagggcaccagtaagctgcccaagagcctgtcatccagccccgtgaagaaggccaatgacggggagggcggcgatgaggaggcgggcacggaggaggcagtgccccgtcggaatggggccgcgggtccacattcccctgaccccctcctcgatgagcaggcctttggggatctgacagatctgcctgtcgtgcccaaggccacgtacgggctgaagcatgcggagtccatcatgtccttccacatcgacctggggccctccatgctgggtgacgtcctcagcatcatggacaaggaggagtgggaccccgaggagggggagggtggttaccatggcgatgagggcgccgctggcaccatcacccaggctcccccgtacgccgtggcggcccctcccctggcaaggcaggaaggcaaggctggcccagacttgccctccctcccctcccatgctctggaggatgaggggtgggcagcagcggcccccagccccggctcagcccgcagcatgggcagccacaccacacgggacagcagctccctctccagctgcacctcaggcatcctggaggagcgcagccctgccttccgggggccggacagggcccgggctgctgtctcaagacagccagacaaggagttctccttcatggatgaggaggaggaggatgaaatccgtgtgtgaggcggacagtgggtggccaccgggagctcttggctgcatctnctccctgcccccaccccactatgacctttgaccctacggcgcaggggcagccaggacccttgattcagaccatggaccctggaccttgtagatgagggacactggcctggccctcgggtcttcggaggacgtagggggctggcatgggtgccgactggctgcctgacttcatcacgctccctgcacttaggctgcgtgggacaagggctgtgttgtcacagcaggaataggttttcctctgttggcctcccttttcctccaccctggcctcaaatggatgccagatgccaaccccagttctggccacgtacagccagcgggtcagcccagaggcagcctcagctccagggctaaggactctcggctcccattttctctgctggcgtttctgctgtgcccagcagtggctgctggggaagcagctgcagcaggagggagacggtcttgcctctcagcccctccctgccccaccccagctcctgccctggaaatctggagccccttggagctgagctggacggggggccagctgcgagcatgtgcactaaacgcagccctttccaggggaagagagcaggatggagaatggaaggaaagccccccaggcttcgtgaattgcaagaagggaccctggtgtgtgtgttttccctacgcacctcccatagctattaacaactgaggaaggccagtgcagaatatttttggagaacgattttttttttaaataatatatcattcctatggggggaaagccttttttttctttttggctgagttattccctccctcccctcaataccctcagtactgactacttccctttcttttctcaggcctccccccaccgacttttgaggccagggttggccagatttagcaaaaccaaaacagagtgctgagttaaacgcaaatttcaggtanacaaaagataattttctagcattaatatgccccacgcaatatttggaacacttatgtgaaaaatgatttgtttttctgaaattnacgtttctctctgagtcctgtaactgtccccgaggggattgagcagaagctcgggtatgagcccctgaggttgactgccggttatttttctgtcctgggaacagcctgacccacctccctgtctccatgtagccagtgaggggagggggagacacagaaccaaccacagccaggggcgtccccatggcgactgtggcccggcccctcctctcttgcctgactctcctctcttgcctgactctagacactaacttagttccaggttcggtgccctgttggtgctcctgtttccaatagcttaggtcccatggtgggggaggaacctcaggggctatgcagcccccgccagctgccctcnaatcccgtccaggccagttccagattctaaactgatttttttcatgatattgtcaaaacagtgaggaaacattaaaaaaaaagccctaaagcaaa

SEQ ID NO: 712357 - DNA, 2718 bp, Homo sapiens
  misc_feature (1260)..(1260): n is a, c, g, or t
  misc_feature (2181)..(2181): n is a, c, g, or t
  misc_feature (2265)..(2265): n is a, c, g, or t
  misc_feature (2623)..(2623): n is a, c, g, or t
aggagccatcctgcccgcggggatcccgtcagccgccttatgatctcctcattgcgtccccctctgcccactggacttggacttcagatctgaccccagacctgccggctacctcgggagggcccacctccccgcccatccagcaagatgccaatcctcaagcaactggtgtccagctcggtgcactccaagcgccgttcccgagcggacctcacggccgagatgatcagcgccccgctgggcgacttccgccacaccatgcacgttggccgggccggagacgcctttggggacacctccttcctcaatagcaaggctggcgagcccgacggcgagtccttggacgaacagccctcttcttcatcttccaaacgcagtctcctgtccaggaagttccggggcagcaagcggtcacagtcggtgaccaggggggagcgggagcagcgtgacatgctgggctccctgcgggactcggccctgtttgtcaagaatgccatgtccctgccccagctcaatgagaaggaggccgcggagaagggcaccagtaagctgcccaagagcctgtcatccagccccgtgaagaaggccaatgacggggagggcggcgatgaggaggcgggcacggaggaggcagtgccccgtcggaatggggccgcgggtccacattcccctgaccccctcctcgatgagcaggcctttggggatctgacagatctgcctgtcgtgcccaaggccacgtacgggctgaagcatgcggagtccatcatgtccttccacatcgacctggggccctccatgctgggtgacgtcctcagcatcatggacaaggaggagtgggaccccgaggagggggagggtggttaccatggcgatgagggcgccgctggcaccatcacccaggctcccccgtacgccgtggcggcccctcccctggcaaggcaggaaggcaaggctggcccagacttgccctccctcccctcccatgctctggaggatgaggggtgggcagcagcggcccccagccccggctcagcccgcagcatgggcagccacaccacacgggacagcagctccctctccagctgcacctcaggcatcctggaggagcgcagccctgccttccgggggccggacagggcccgggctgctgtctcaagacagccagacaaggagttctccttcatggatgaggaggaggaggatgaaatccgtgtgtgaggcggacagtgggtggccaccgggagctcttggctgcatctnctccctgcccccaccccactatgacctttgaccctacggcgcaggggcagccaggacccttgattcagaccatggaccctggaccttgtagatgagggacactggcctggccctcgggtcttcggaggacgtagggggctggcatgggtgccgactggctgcctgacttcatcacgctccctgcacttaggctgcgtgggacaagggctgtgttgtcacagcaggaataggttttcctctgttggcctcccttttcctccaccctggcctcaaatggatgccagatgccaaccccagttctggccacgtacagccagcgggtcagcccagaggcagcctcagctccagggctaaggactctcggctcccattttctctgctggcgtttctgctgtgcccagcagtggctgctggggaagcagctgcagcaggagggagacggtcttgcctctcagcccctccctgccccaccccagctcctgccctggaaatctggagccccttggagctgagctggacggggggccagctgcgagcatgtgcactaaacgcagccctttccaggggaagagagcaggatggagaatggaaggaaagccccccaggcttcgtgaattgcaagaagggaccctggtgtgtgtgttttccctacgcacctcccatagctattaacaactgaggaaggccagtgcagaatatttttggagaacgattttttttttaaataatatatcattcctatggggggaaagccttttttttctttttggctgagttattccctccctcccctcaataccctcagtactgactacttccctttcttttctcaggcctccccccaccgacttttgaggccagggttggccagatttagcaaaaccaaaacagagtgctgagttaaacgcaaatttcaggtanacaaaagataattttctagcattaatatgccccacgcaatatttggaacacttatgtgaaaaatgatttgtttttctgaaattnacgtttctctctgagtcctgtaactgtccccgaggggattgagcagaagctcgggtatgagcccctgaggttgactgccggttatttttctgtcctgggaacagcctgacccacctccctgtctccatgtagccagtgaggggagggggagacacagaaccaaccacagccaggggcgtccccatggcgactgtggcccggcccctcctctcttgcctgactctcctctcttgcctgactctagacactaacttagttccaggttcggtgccctgttggtgctcctgtttccaatagcttaggtcccatggtgggggaggaacctcaggggctatgcagcccccgccagctgccctcnaatcccgtccaggccagttccagattctaaactgatttttttcatgatattgtcaaaacagtgaggaaacattaaaaaaaaagccctaaagcaaa

SEQ ID NO: 712358 - DNA, 859 bp, Homo sapiens
  misc_feature (21)..(21): n is a, c, g, or t
caggggttgaaaagccttcgntcgcgcgggcgcttttttgcggcggggagccttttaaggcccggggaccaggggttatcccgccgcgcgcccctcggttatttccgccccccctggtggtggccaaggcgctccccgagtggtgtgatttctcggagcggctccggcaattacgcctgtgtccccaggcgcctgggtgctcgccgcgcccggcagaatttctggccgtggttgcaccgcgcgcacctttgggcgcggtgtatcccacccccgacgagttcttggtgtgtcgcgagcaataaagggggcgaatctttcaagggtcctctacatggggagatcaaaccgagtctcccccgtccgcgtctgtccacagggcaaacaagtgcttgtttccccatccataatgagccaccgtgaacgtggctttccccggaactttgcggtgaaagggtcatcttttttgaaaactcgggagaaaatcttacaggatggtacgacaaacaattctgttgggttctagggagacttctgggatcctcccgcctggaatccacgagaaatatgtccaagggttaaccacaatcattcctctttactttgtaaaaaagccgactcctccctcccgaatttacaaaaatgcagaccttctctctccacctgataatgaacatcaagctgatgacctcacgcgcaccaccataaagctttatcccccgcctattatacatgaataataagcactttttccttcgcctccaaaattctgttgtgattagaacttcaagctgaattgagacgagtctatttctcttttcgggggtgaaaaaaacctctttctcaaaacaaaaaacaaaac

SEQ ID NO: 712359 - DNA, 611 bp, Homo sapiens
  misc_feature (226)..(226): n is a, c, g, or t
  misc_feature (534)..(534): n is a, c, g, or t
gtttccaaaggggttaaaaacccaaagaaaaatggaagttatacttggttttgctaaggccaatgtagaccagtgtccccaacggcaatagtgttggaaccagcttatgtgaacacacatgactttgcttttctctgagaattccacgtcttctcctctgagctccatgtacacctgtttccccgacgcggtgacctgatgccatgaagccttcgggtatcgtagnccctgaaggattgagctgtctcgggtgtactgttttactgttgcctgggaacagcctgacccacctccctgtctccatgtagccagtgaggggagggggagacacagaaccaaccacagccaggggcgtccccatggcgactgtggcccggcccctcctctcttgcctgactctcctctcttgcctgactctagacactaacttagttccaggttcggtgccctgttggtgctcctgtttccaatagcttaggtcccatggtgggggaggaacctcaggggctatgcagcccccgccagctgccctcnaatcccgtccagccgatcatatctactgattatcatgatagctgataacccccggtgaggaaacattatatagcctc

SEQ ID NO: 712360 - DNA, 781 bp, Homo sapiens
  misc_feature (721)..(721): n is a, c, g, or t
gcggcagtctagtcatccagcgccatcctgggcccacgtgttgcctgaccattccgtgatggccaggtggtgagccgtggctgagtgctgacggctctcaaagtggcagagcttactgtcagcagcgaactcggttaatgcaacgatgacccgggcaggaatagttggtgaacatgcccaggacctgctgatggtccctccttgagtctcatgttcaatgcagtcttggtcgcatgaaactgggaggggagcgtgttagctggcagttcctgagagccacgctctcaccagtggctggcagctctgtgtcctctgaacccagcacatggcacaagagtgccgtaggccatccgctcagtgtttctacagcgagcaagtcccaggatgctggagctagaggggacctgatctgagagaagatatcttcagtggttgccaggctgttccttggaacctgtgcagggatgaggcctgcctgtgtaaatacacctagtgaggagtggagctgaatttgaatgcagccttggcagcttaatatgagcaagttatgacacctcctcttgttgcccttcttggcgggcgtcaggagatttgccagtgctcggagcctggtgactgtgggtctaggcgagacgagagctctgggcctaggttggggtggccaggttctctgtggccagaaatgagacagctttgcggtgcccaggacctggcccttttngttttctctgaatgagagacaagggtctttctaatgtggttcacttgtgaccactgtgga

SEQ ID NO: 712361 - DNA, 110 bp, Homo sapiens
aacccacgggtgcgcgccacgaccgccagactcgagcagtctctggaacacgcttcggggcttccgggccttagccaggtctgttcttcacggaggtgtttcgcgcgccc

SEQ ID NO: 712362 - DNA, 296 bp, Homo sapiens
cggactcccgacacggcatgcggttgagtttgggatgcctgagggcgagacgctggtgaattactactcctgcagctactggaagggcctgtgtgccccgtgaggactgtgtgtacctgactggtcaaccacctgtgcttctactccttcctgctggggcaggacgtgagcctcgatggtgccgtgggtggacataatgcgtctggcgcagaaggccaccctgctcttccccgagagcatctgtgtgtgcacaccctgcgcaccaggagctcttcttctcccatgttcctccaaca

SEQ ID NO: 712363 - DNA, 742 bp, Homo sapiens
  misc_feature (459)..(459): n is a, c, g, or t
  misc_feature (625)..(625): n is a, c, g, or t
  misc_feature (730)..(730): n is a, c, g, or t
ccgaaggcattgttgtactttgtagggaccaatgtgccatttgtttgtggcaaaagccctaccaattgaccaaaccttgtaaatttcttttgtatattaaaccagctgtaaccctgaccattccctttgtgtttacctgtttttgtaaatttttttccttctattaaatgaaagggtgttggttcagaatggcactttgaataatgtaaaccagtggtggattttctttactttttgtctttgggtttggggtagtttttgttctttttgaagttttattatttttaaagtgcctcccacctaggcgtaggccatgaccatttggggtacgagagcctaattttgtaggacttaatctgttggttggatttgacatgtcaggtagggttcagggactgattggtcccatttgccctcaggtcagtttgtttaatctcaagaccctgttactactgattntattaaatcagagtctttaattcttgcatgtttgtatctaatttctgaacgaatgagcacactttaaccagttatttacagttacctttttcctttaccggattgtgaagcttcatgtattttaattagatcctggggtttaaagggtcttaactgaaacttgccnataatcgcaggactcaatttttatcatggctggctgatttcttcattgataacagattttggtatcttgctttctggagttttccatcactgtttactttacctnatggggagaggg

SEQ ID NO: 712364 - DNA, 129 bp, Homo sapiens
tcaagcttctaacgatgtacggggacatgacctgcagggcctgcctgcctctccacccactgtgcccccctctctgtgtgcttctccagcctgggaacaagagtgaaactccatcccaaaaaaaaaaaa

SEQ ID NO: 712365 - DNA, 332 bp, Homo sapiens; identical to SEQ ID NO: 645850

SEQ ID NO: 712366 - DNA, 603 bp, Homo sapiens
gtttaggaggttcgctgctgaatatgtaacctcaaggccttaagaagggcttcaagagaagtgcgcacaacatgttattagcaattctcataataccatacagcggcgatcactccccaaattagtggataaacccaatcctgtccacggacataggccaggcagagatttagtagttgtttcacagaacatcttaataggtcatgatttctcaagtcacacatgtgtagcaaagatagttagctgctgcaaatcatataaagttggagcaccgttcagctaaagctcaagtgctaaaggagtgagagtttctcccctggcatttcgcggtccattattccccagacaaacagtggcatgacccaccaggtctttcttctctgcagaccacaggacgaagagtcagtgcccccgggactgatccatcacatcatggcttccaccgtaaggccctaaccgcatgagcacagctcatgttcgatgtctctcataccatgcacaactcataaagacactgtaataatggcatgcaggttcagatgttagcctggcagatgtagcactatttcagtcggtccagagttccagttcggcttgataaag

SEQ ID NO: 712367 - DNA, 846 bp, Homo sapiens
ttggccgtcgccgtttggggtgtgcccccttgggtgttttccgctctggcgtcccaatcctggcggggtgcacccctcctggcgaagattccgcgcgatgttctgcccgccccatattgggctccagcgtttcgcccattctacggggccccccctgtggtccagtgtgtgcggcccccggtattattccctccggggccggtctcacacccccgtggaacagcccgtgcggtccgggcgctcctgcgtggacgtgtcccgcaaacgagtatgttcccgcgaaagggtctccccccattttgcgcgccggcccgctctgttgaaaaaaggcacgccttgcacggcgacatccgcagtcccccaagtgggcccccgccgccggccctaaaagcgggcctcaacggctccccccccgtgtggcaaacgccgtgggccgcaccccccagagagggggaccacacaaccaactcgaggcgccctctcgacaaggggcgccccaatacggcgcgccgcgccaccacttgaagcgtctcttctcttcgaggggaggctctctacccataaggtcggaagagcccccgctgatgtccccccctctgtgtacagtagtaccgtcgtcaacaaagcggcgttgttctccgtgtagtgcccgccccgcctgtgtaaacaggacccacccctgcggctctcctatagtcaccacaaccagcttctccgcttcccgagagccctcccccagcaggttaatttgtgggggtcaaataatcggggtgtaaggacgtgggcgccccagtttggcccccctgcgtgcttttttccaacaaccccccccacccaacaaaaaca

SEQ ID NO: 712368 - DNA, 231 bp, Homo sapiens
ggctgaccaagaggacccccgagtacgggagtggctatgggccgcagaagggggagctgagcacactgctgtacaacacccacccgtaccgggcctacccggtgctagctgctggacaccgataccctggtatactagcggctgtatagtgcacaccctacaccatacacctaccaagggtcaaggcagaacacaaccaagtatacataccactaaccagtcctagcccag

SEQ ID NO: 712369 - DNA, 423 bp, Homo sapiens
  misc_feature (371)..(371): n is a, c, g, or t
gggtaagacagagcaagactctatctcggaggggaaaagttctggaaagaagggcagcaaaatgttaagagtggttgtgacaagggattgatattaaaatactcttgttttcttttatcactacctgtgttttctacaataaatgtgttccttctctacgttaccaaagaaatcaaacccattgccctgaactgcctcaaattcctactgctttctccccctccctccctgaagtccacaaccgtctctgaacccacatccatccctccctctagaatcagagcctgaggcaaactctccatctgtgttctcactgcctctcaccgtgtccttgctctacctgctatgtctcatctccgaatacatcgcanagttgtcaggagtaagacttgtgaattcttcatgtagtaccttatctacggc

SEQ ID NO: 712370 - DNA, 313 bp, Homo sapiens
ttacggtactgaggtgtctcttcgatatcttgatctcacggtgtctcagagagtatgcgtggtcagacacagtagagcgggtccggtgtgagctgttgaggatgacagtgaaggtgcgttgcctggctctccagcagggagaggcgtgcctcgtactgtgccttaacccacccctcgctgtccaccagcagtgggcagcggccattctgggccccttcccagagacaccagtacttgatgcttttgctttccttacggttgtaggggcagagcacgggcacagagcttcctgccacccccttcaccacagtgg

SEQ ID NO: 712371 - DNA, 325 bp, Homo sapiens
tcagccaatgtgatgcagacagaaatagaggagcagatacattcttgagcggctgacaaccaaagtggacaagttagacttcacatacaaagcacagacagaaaagttcgaccactctgaagacagacggatttccactctattgtgatgaaaagatttgaaagatcttattttgaacttccaagaaatttcatttactattttagctatgtaatattaatgtgtgtttgcgaattttataatacagtaggtcttaagacatttttgctgttataaggaagtgtttgtcccacattttcctatggttaacacctcaccaagttct

SEQ ID NO: 712372 - DNA, 257 bp, Homo sapiens
aacggcatgcgtagacagctcgtgtggtgtttgtatttggtcctgataagaagttcggagctgtcttttgtctacccaggtagcactggcaggagcttgcatgcgattctcagggtagtcatctctcgttatctgacagcagaaaacagggttgcaccccagttgattggaaggatggggatagtgtgatggtccttccaaccatccctgacgaagaagccaaaaaaggtttggggcgaaaggagttttcaccaaag

SEQ ID NO: 712373 - DNA, 158 bp, Homo sapiens
ctagccacatatagtctcaaatcactatctctatacatctatttagtacgtacacctttcactgtcatcgctgagggcgtagatatatctctgctcatcagtgatgatacgccagcagatgcacaagcagccattcagcatctttacaccgtatcgcg

SEQ ID NO: 712374 - DNA, 120 bp, Homo sapiens
gaaacgaaggagagcacaggacagggtgctgctcagcaccgacactcgtgcatgagacagggggcagagcatgggaaaggctgcagagtagggggggctgcagttggggtcacgggaact

SEQ ID NO: 712375 - DNA, 285 bp, Homo sapiens
tattaaccagtgtcatgtgtatttgtgcatacgaacgcgcaaaacactggaagtgctgctatctttataaaaacaacccttatggccatgtggactatcagtaaaagagaaggagacaagaaattcataagagagatgagacctcaacaatggccgaagcacaggggatggagatcaagaagagccaggagaaatctggaagatatacttaattactgatgacatatggggaatgacaattttataaaaggacacactggccaagtgcagcgtatcaggcatgtc

SEQ ID NO: 712376 - DNA, 266 bp, Homo sapiens
  misc_feature (50)..(50): n is a, c, g, or t
  misc_feature (80)..(80): n is a, c, g, or t
  misc_feature (111)..(111): n is a, c, g, or t
gcacacgccgaattgacagaccgcacaggtcccaatggacgaagtgtgcngcacacgccgagacaccatacccggctaantgttgtatttttagtagagacaaggtttcancgtgttagccaggatggtcttgatctcctgacctcgtgatctgcccgcctcggcctcccaaagtgctgggattgcaggcatgagccaccgcgcccagcccgttcaagtattttctgatgcctcttgtctggactctcggcgtgtgcaggggatcc

SEQ ID NO: 712377 - DNA, 1144 bp, Homo sapiens
gaagggcctacggaagcatcgggaaccactttccacttgccgagggaccaccccggggtgacccgccggccctcgtaaaaatccgcgcacaacacccgggaagaggcccgcagagccgtgagcccacattgaggacccaaagcgccggcgaaaagggtaccctcggaccgcgtgaaccagtcggcctgaccgcgcggaaaagggtcctgcccgtggggaggtcattccggcatggagtccccagaaaggccagggcaagaaccccgggaccgacctgcttcgacaccaaatgccaacgcttggtggccaaccctggacccgcttgcctgcgccccgagcactggcccggaagccatgatacggcgtgcaacgccaatccggttaattccaccatccccatcacagcagaagtttatcaagaagcatggaggggtacagaccccaacaacagttgcttcggccgtgacgaccctggacatcgtcagagccaacacctttgcttgcagacgctgaagggttcggactcctagctcgagtcgaacgttcccatcgatgcatttggctggccatcgactgggaaggaccatcagtgccgccctctgatctgctcagtagcacccccataggtggactttccccaggaccagctgacagcacgtcactgggcggatccatggaggccggcacggaggtggatcaaggctaaagccggagcaggctctggccaccctctccatggcgtatgccggcgacccgcgtttgtcttctgcccttgtggatgacaatgaatggaaaggaaggtgcttgatggcaatgttcacggtcgcttaagtacacaggaaacggaatgtacctagcgttctgcacagcaccgctagctgcttgggaaaaagggcatcgaggagagcaacctgggcatcggcaaacgtcgtcctcttgttgagagagggagatgatctcggatgcccatctcccgagctgagaggcctccatctaagaagggggaagtatttcgtggagaacactgaagtgagccagctgtgacgggaggccagtttaccgttaatagtatgaaggcatcatgtacactgcaaagccgttggaagataaactttgtatttcaatttgctttggtgatgattac

SEQ ID NO: 712378 - DNA, 436 bp, Homo sapiens
gggctcacacctgttattccagcaatttgggggccgaggtgggcagatcacttgagatcaggagttcaaaaccagccttgccaacatgacgaaaccccgtttgtacccaaaaatacattagctgggcaccgtagtgggtgcctgtcatcccagctactcaggaggctgaggcaggagaatcacttgaacccgggagatagaggttgcagtgagccgagtctgtgccactgcactccaacctggggtgatagagtgagactccatctcaaatactacccatcctctcacccaaacaaacccaataacacattagatgcattcgaagcctcccagcaattctccaatgatggcagaataggcatccaggagactcaccttaccctgtctgaccaccctttgccgtgcaacttgatttgccagagcagcttgcgcggcg

SEQ ID NO: 712379 - DNA, 118 bp, Homo sapiens
tatccatgtacaggatgtcagctttaaaagtgccaatgagagataggaccggtcagcacagttaattctcagcacggtttcaacaccaagacagctgacccccgagagtatgttttgg

SEQ ID NO: 712380 - DNA, 529 bp, Homo sapiens
attggaagtggggatattggttttttagaacctcttcatgaggagaacttcattcacaaacttaagaagcctttgaacacggtgaatatacacttacttggaagtgtgttatatctgtaacccatatcggtctttacccatttattcaccagagaaagttgaagaatacaggaacagaaatttttatgaactgagccctcacatctttgccctttcggattaagcatacagatccctacgagatcaagataaggaccaatgtattctcattactggggagagtggagcaggaaaaacagaggccagtaagcttgtcatgtcctatgtggcagctgtttgtggaaagggagcagaagttaatcaagttaaagaacagcttttacagtccaacccggtcctggaagcttttggaaatgccaaaactgtaaggaatgacaactcctctagatttggcaaatatatggatattgaatttgactttaaaggcgatccactaggaggagtaataagtaactatcttttagagaaa

SEQ ID NO: 712381 - DNA, 293 bp, Homo sapiens
tccggctagcgggtacaaaggttgtggattgcttgcgattctacgatcgagctggtacggtatacacacttcctgatggcagacttgggctgttgggcttcaactcctacttttaccagcacgattcctttagcatgagaaggccctccaaaagagttggccgtatagggctgtgcccaattgagctttcttatacggtctatcatgccacttctggtctcgtcggtgactacggacgcttcctagcagtacgaagtccaggatgtttgcgcttcctgtcgggctagtcgggg

SEQ ID NO: 712382 - DNA, 247 bp, Homo sapiens
tggggtttttttaaaaggtttatagggggggtccaaccgcccgccctttttttgtttggggttttttcccccgggatcctttttaaattccttccttttgggggcaaaatccaaaggtcctttttttttttttgggggccgcccactggtgggtggggaccccccgggttttttttcccctccccccctgaaggggggtttgttttccggtttttggggggggttccaaaaaaagtgcttttgatta

SEQ ID NO: 712383 - DNA, 243 bp, Homo sapiens
ctagaggatccggtattgatgtggcatgtatgcactgctgcagcacagagctgtcttcccctgtagactatgtgctgtatggagtactgctgcccagttactgttggccccttcgtgatccaatcatcttcagtgagcaagacagagacgcatgaatggaaagcggagttcctaacagtgatgaaatgtttccccgatcagttcccccgagtaactacaaggcaatgtagctttccacatttt

SEQ ID NO: 712384 - DNA, 136 bp, Homo sapiens
gaggccaatgctgactggttcacctctctgagcctcaagatcctaagccgctaaacagagaaggtggtatctcctcctcaaaggtgcagtgtgcattaacagagaatatgcataaggaaccagtcagcattaacca

SEQ ID NO: 712385 - DNA, 175 bp, Homo sapiens
attacttatacttcctcaacgctccatacttcttaccgggaaatgaaatgagaagtataaagcgttgaggagtataaattgtagaggaagtataaagcgttgagaagtatacaatgttgacgaagtataaagcgttgaggaagtataaagcgttgaggacgtataaagcgttgag

SEQ ID NO: 712386 - DNA, 161 bp, Homo sapiens
gcactaaaggccaattcagatgagaggcggcggttcagggcaagaggcctttggtaggtaagaaaggaaagaggcttctgtttggttttagaaggcagaagaggctcttggtggaaaaaaggcaagcagctaccaggaaaccagccctcaaaggaggctca

SEQ ID NO: 712387 - DNA, 416 bp, Homo sapiens
cgcacgggcagataaagaccattcattcattcattcaccaggaagtgctcagccagcctgctgtgtgataggcgctgtcccagcagtaaaggaagcaggcaagaatccctgccctcatggagcaactgatgctggtgctatgttcccctaacacttggggggagggcgcgggcacacagcctgagttctgagggcttgaaagaactaacagttatctttcagtaattatttaagcaacaacaaaaccctccacattagacaaggagaagagagcaatcatccagaatttcatcatttagaaacaacatttctaactgtttgcgggcagcatgcatccaaggccagagctcaggccgcaagtgtttgtgtattcaagctccattgtgattaaactgtatgtaaaattttaaaaaaaa

SEQ ID NO: 712388 - DNA, 120 bp, Homo sapiens
cgagtacagactttgtcagcatggcggagacattagggggtttacaatgagggagtaataggatgagatttacatatgagaaaacattcctctggtaatcactgtaatggatggcttcag

SEQ ID NO: 712389 - DNA, 1676 bp, Homo sapiens
  misc_feature (1180)..(1180): n is a, c, g, or t
tccattttatgccttagggaaaacccagctatggaatatgtcatggggaaagctatgcacaggcccctgccctagggagtgggtggatgtgtgtgtttgggggaggtggcttgttcccagggtccatcccacactgttgcccagttggttcctatggcagcgctggcttgtggctttctctctcctgggttctcttcctctccctccaaataaagggctcgtgcagagattcttctcgtgcttataccaaaggtgtgggtggccaagagacgtgggtgagagtgggtgtggctgtgagaaacacaggcgcacaaatgtgcctccaccaggtgtggcaacctgtgttctgtgctcctccaagcggactcttcagtgatattgtgtgctcccaggatgtggacaaaaactctctcagtgtgttcacaaaaatctctgtgatataactctccgtgatctcgcggctgcggccaaatcttatctttcacagggggggccacaatttcttaaaagagtggcaatttctaaaactcccttctcgcgcgtgtcgcgtggcacacttctgtgacacacttatgtagaagccgagggtgtgtgtatcaacccagaaaaagtttccgaaacaccagggggtctccaaagaggcggaaacaccctttgatgtggggccccccaaagagggaggggacaccacaatgtggcatgttgtagcacagcgacaaaaaccccgatggaccccccgaggtgtctacaaaagggacccaatcttagcccccgaaaaaaaaacccagctgtggattcatccaaggggagttgtgtaaaacactcccctagagttgaggggactctcccccccacaacgaggggggcaatagtcgcccgacggtatacaacacacgcgaaaacagtggtgggagaatgatggaggaggggccctacccacaaacaagaccgcggtgtgtggtggaaacaatctttccccacacaaaaaatccttcatattcggaagcgttgtgacccattaaaacggcccccatttatgggtcgtcgggcgcaccgcatagtaggggcacccccccgataccacaaaaaaggtggggggggttcccactcgcaaagatgatataaagtccctccccacaaaaacgtagccgagcagcccacccaagggcatagatacccncctctgctgaaaacacattttgttgactcgagggggcccacacaagtacaacaaaaagacgcggcgacccctatgtgtagcacgaaagaaaaagggagtacatcacccccttcggtgcacaaaacacataggggagggaacaactacggtgctagcaaagaggggggtcgccccccacacgacgtggtggcggttaaataaagaacagagggaaccgcacatgcgatgtgtgatgacaagcaggcgcaggcacaaaatagtagtgggtctatcaccgaacaggatgtaataataacccggacagcaacccaaagagggaggagaaccccccccaccactttagtatagagttatgaatcacaccactcctgacagaacaaggaattaattgtatgatagcggctgacgatagttgaggcgcaaaaaatccagcacacccttcctctctgcttagaaagcaagaagagtcactaataagaagaagaaacacacaata

SEQ ID NO: 712390 - DNA, 686 bp, Homo sapiens
  misc_feature (575)..(575): n is a, c, g, or t
caactggcgagaagctcatacctgcctgacgtgccgccatcgccaccaggctgtggctggtcatacccggtgaggtattggcttccagtcacataacacatctgtgccatcgctgtccaggcataacgtcaatacgtccccatcctttgtcatacctaacgtcgtccatgcttctcagcactaactgcctgtcgaaattggcctcttgtagacagcttccagacctgcggggtcaaaaaatactgtgtctcatcagagagatacttcgcctcataatcatagaaggttccggacggttgaatacgtattgacggttcaatttcttcaccgagtatcgcaaccgtgaactccggcccatttagccatttttcaatcaatacttcttcatcgtgctgaaatgccaatcttaatgcatcttgtagagcattttctgctactacttttgacattcccacactgtaaccttcgcggctcgggttagcgataaccggcaaacccagagcagaaatttctgctaactgcttatcgctcaggccttgttcaaactctgtcgcgggttaacgctacccacgagnagcgaccggtaaaccggcaccttgccatagaagttagctgcgtatgtttaatccatttgaaagcgcagatgccatcactccgcttccggtatacagggcaagccccatcag

SEQ ID NO: 712391 - DNA, 338 bp, Homo sapiens
  misc_feature (101)..(101): n is a, c, g, or t
  misc_feature (134)..(135): n is a, c, g, or t
gaaacatcctgtctcttcctccatctgcagagcctgtagagccgcagagttctctccgcccagccctaatgattatgctctctacccctcccacaatcttnctccaactccttctctctgcatgcacctcaganncagtaccaagaactagcagtagccctggattcaagctccgcaataatcagtcaactcactgaaaacatcaattcactggtaagagtccagtgaggtcccctgattacagctggtcaatcctggactccagtttcctcttggggccctgaagaaaggggctaggggcccctgatgccaagggcaaatggggagctgggcaccca

SEQ ID NO: 712392 - DNA, 845 bp, Homo sapiens
ggagcgcgcgctgcgcgcctttgagccccgagcaacggcccctcgccttgcccacccaaccactggcagaccttcgctacccgctgctccccgcttccttagctgcctcgacatgctcccaaacctgcacagcctgcaacgaacgccccgccccctgcctctgcaccactgcccgcccgccccccccgccccctgctcgtactggccctccctggctagcgcacggcgctgccccacaccctctcccctccacctcacccgcgcacccaaacctaaacctcccaactgaactgcctacactccgcccgcacaccccccccaaacccccgccccgccccccccaccgcccccccgacccgccccccctggcccccccccccacccccgcgccccacgcaccgcccccaccccccgcccccccccccccgcccgcacccccccgcccccacacccacctactcacccgccacccgcgcaccctcgccccctcccccgccctcccccctacctcccccccccccccgcccccgccccccccacccgcccccccccccaccacctcccctcgccacccccagcactcccaccccctcgacccccccacccaccctacctccccccaccccccccccccccaccctcacccaccccccccccctccccttcccctgtctcaccctccgcgcccaccccccgcccccccggccgccccccccccacccccgcccccccccccccccccccccgcggcccaccccccgcccccccccccccccgccccccccccccccccacccccgccccccgcccccccccccccccccccccgcccccccccccccccg

SEQ ID NO: 712393 - DNA, 188 bp, Homo sapiens
tgttcttagaggatccccagctctgaccgagtccctgggacgatccgagtgcgagatcgagcgtctgagcgcctgaccgcagccctggatcgcctgcggcagctgcggcctggaacagaggtgtctgcggttgtcagcccgctgaggcctcggcaagaggagcttgggcctgtgtgcacatgagtacc

SEQ ID NO: 712394 - DNA, 163 bp, Homo sapiens
  misc_feature (110)..(110): n is a, c, g, or t
  misc_feature (124)..(124): n is a, c, g, or t
  misc_feature (154)..(154): n is a, c, g, or t
aattacagactcaggaaatgcagtgaaagaaaaatacaggttggccaggtgaggtggctgatgcctgtaatcccagcactttgggaggccaagatgggaagattgctttnagaccagaagtttnagaccagcctgggccacatagtaagatccngtttctacc

SEQ ID NO: 712395 - DNA, 926 bp, Homo sapiens
  misc_feature (291)..(291): n is a, c, g, or t
cgccgttggccgcctggccctgtcagaaatgcttcgtgttacccacagatctttcgccagtatgagaccggtgttccagtgctactggctccttcatctcactcgggcttatgccataagatgtaacatatttggtgcaggatgccgctgacgccttaatgcgttcatacggttgatagaccgtttatacgacctgatgcctgtgagctcgttaacaattggtggccgagagaggcggtaagacatcaggatgcattagttgatggcatgagattgggcgaatgctcccanaagtttgaaacgagaaaagggataggtcgtgactcgctctagccaaacgtctacttgacttactaagactaagagtacaagaacattggagcttataacttagttctaggatggtgttgccgaatgaaccacaaatcggaagaacgctggggatggcgtactacccactagctgactgtgactggcactgctctcataagcccaacggtaaggctattcggaagaagattaagctaagacgtgtgctgaatcccagttgtgcatacatccacgcgagcaggtgttgattgtttagctgttggatgctgtaattgctgaactttcaaagcagtctaaacctgtgaccaccccgtgaagaaattgcacaggttgctacgatttcctgccaaacggagaccgaagaaaattgggccaatatcatcctctgatgccactcgacacacaggttcggacgacaggggtggcacccaccagtaaaggatggaaaacactggaatgatgcattttacaccttttgagcgttgtcatatgagcaagggtaattttcccctaacttttatactctcacaggcggaatgtgattccgggcctctttgtggggcgaacaatttcttcacctcttgcgcctaagaagc

SEQ ID NO: 712396 - DNA, 504 bp, Homo sapiens
tggtccccccgctcctgctcctgactcccccctgttcgctctccccgagggaccatcggtcacggaagcccgcgcgcagcagccactggcttttaaggataccgggaaaacaccccgcctggagccgcgaggtggccaattcacccgaattcgaatcaccccttaccagccgccacgttaaatcccttggaaaaggtgtgtgctgacttgataagaggccccaaagagaaaggtatctcacaagtgaaaggacccgttcgaatgcctacccagactttgagaatcacctacccagagaaaactcccttgtggtgaaggttttaagaacgtgggagtcgtttccacgatgagaattcacccagcgactcacttgacttgccccagtccttctgagattgttaagccattacttccctccagtattgagcccggagttgaggtggaagtcacccttgccagatgcttaagtccaactattttaataaattgatgacccggttggtt

SEQ ID NO: 712397 - DNA, 1135 bp, Homo sapiens
cgttttcgtgtgtcgaggatgtggcctttctgcggcattgtggcgtaactgtttgccattgtgtagtgcgtagaacgtatgggcgtggtttgccctggcggttgtactatggtgggcctctgtcctgtcggtgaatactgttaaggtcatcaattgcaacgccctcttgatagagggcgtaactgttggggtctgctggctatgtagctaggtccaaaattctgatgccaagccaacgccctgcaaaaggactcgagggcaccgggagggaaaggacccgcccctgacccccgcagccacggcgtcaagctctcggcacagaacggcctctaagggtgactcagccaactccccttggggctgcgcagcaggaggcggggctctggcatcaggccccaggagcactgtgcagctgtgcccatggccctaggcagcgaggggacagcctgggggaattcctgcctagccaaggtcattggccgggcctggcctgtggatagtggggccaggggccggcccaggccaaatgagtgccctcctagttatgacaccaagtgactacaagggaggcaagacccctccaggcctctcagctcgagcactgggtcccaccacacacagtgactgtgccgtgcagtgcaggttctggccttatgtccttgaagagcatcgtggtagacccgaagcgcacagctcatcggtgccgcacatgacaacgcacgcgagcagacagtctgaccctgaggctagctatgtaacaacgcatacacctttcccctcgtctccagctgtaacctggagagtcagccatgaccttgtcgttttgttctcataaatagtcatctggggccgggcgcagtgactcacgcatgtaagtcccagcaactttgggacggcctaggtgggcggactcaccttgaggtcagggacgttcgagaccagcctggccaaacatggatgaaaccctgtctctactaaaaaaatacagaaaattagcatgggcgtggtggcgcgctgcctgtagccaccagctacttgggaggctgaggcgggagaatggcaatggcgtgaacccgggaagcagagcgttcagtgagcttgagatggcagcataatccacgtgagcctggaacca

SEQ ID NO: 712398 - DNA, 160 bp, Homo sapiens
  misc_feature (40)..(40): n is a, c, g, or t
  misc_feature (62)..(63): n is a, c, g, or t
  misc_feature (138)..(138): n is a, c, g, or t
  misc_feature (146)..(146): n is a, c, g, or t
ataatactgacttaaaaaatcaaatcccccgacatacganatttttaatctgtgccatgtgnnttcagaggtcttattttcatattcagactttgtattgcccactcatttgtataagtgcgcttcggccagcacggntcctgctnccgcgatgtggggt

SEQ ID NO: 712399 - DNA, 675 bp, Homo sapiens
cccgcgttctttttgctcggcgcaccttgcttagttggccaaagaactcgtgtgttgtcgtatttaacggcgtcgcgcctgcgttgtgtttcactaccccgccgcccccgctcgttgtggtggtgtcgccgcccctggcgtcatctgggtggtttggaggggtgacaggctacctgccttcttgcctaccttctggtgggcgttcgcatgtgttccgtatctgcgctccccctcctcatcggttggtttctcggccctctttaagggcctcatcgccccacacaatgccaggcggtgttgtcgcgcgccatgctcccgcggtgttcctctcccacccatgtagagtgtggtgttctcgcgcccgcccgccggctttttatttcgtgctcgcggcgcgtttggccactatagatgtggtgttccccctccgccgtcgcgacaccccgcctttgggtggggcggcttctgctacgctactctcacgcgcctctccccgcgggttctcgcccacacgcatgtgcccctcgtcgtttctcccccgggggcaccccctctcgctaggttagaagccccgcttgcgcccgcatgttgtccccgcgcagtacgtcgctcgctgccccgcggcgactctctttatcccgggtggttccccccaacatggtcagaacagcacaa

SEQ ID NO: 712400 - DNA, 798 bp, Homo sapiens
tctggaacgcattacttccagaatacccagggtctcatttgtgtggatagcatagtcaacgactcgtgcaactgaattcaggaaggtagcagatgatctgcagaacaatgcttctgttaaatgaatcgacagatgccgtgctgttacttgtagctaacaaaccaggattcgccaaattgtcgattgcggcatcagttgaatatgatgcagcataaacatctagggactctcagatcatctctcgctacacagtacacatggctatgttcccacaagtccatctttgatgcaaacatcacaggcaaactggatctgttcatgaagggcacttgatctggctgtgttcaatactgaggctctatccaccaacgctctcaatattgaagaatatgcggatatcataatcacaacgagacattgattctagatacaatatgtggctcttaaggctttgttttacaagctaaacaattgtagtattgtaatcttgagttacttattatacctactctgggacctgggtctctgggttaagaattagtgtaagaacctattgttgattgctcaatttagttggttaccgagtcataacagttgcatagtttagccaactgtgcttgggtggttcacatgaacatttctgccttggtggggaaaaaaagtgatacctgctatttcagatctttcatcgttcccataaagcgtagaaatgcctgggacatagcttctctgtgcaatccttccatataaattgtcatgagtagtggattcgagccccaagtacaaataatgtctaaa

SEQ ID NO: 712401 - DNA, 843 bp, Homo sapiens
  misc_feature (31)..(31): n is a, c, g, or t
  misc_feature (72)..(72): n is a, c, g, or t
  misc_feature (201)..(201): n is a, c, g, or t
  misc_feature (205)..(205): n is a, c, g, or t
  misc_feature (229)..(229): n is a, c, g, or t
  misc_feature (237)..(237): n is a, c, g, or t
  misc_feature (242)..(242): n is a, c, g, or t
  misc_feature (264)..(264): n is a, c, g, or t
  misc_feature (267)..(267): n is a, c, g, or t
  misc_feature (281)..(281): n is a, c, g, or t
  misc_feature (304)..(304): n is a, c, g, or t
  misc_feature (306)..(306): n is a, c, g, or t
  misc_feature (310)..(310): n is a, c, g, or t
  misc_feature (337)..(337): n is a, c, g, or t
  misc_feature (365)..(365): n is a, c, g, or t
  misc_feature (370)..(370): n is a, c, g, or t
  misc_feature (373)..(373): n is a, c, g, or t
  misc_feature (389)..(389): n is a, c, g, or t
  misc_feature (392)..(393): n is a, c, g, or t
  misc_feature (401)..(401): n is a, c, g, or t
  misc_feature (420)..(420): n is a, c, g, or t
  misc_feature (503)..(503): n is a, c, g, or t
  misc_feature (514)..(514): n is a, c, g, or t
  misc_feature (523)..(524): n is a, c, g, or t
  misc_feature (532)..(532): n is a, c, g, or t
  misc_feature (534)..(534): n is a, c, g, or t
  misc_feature (539)..(539): n is a, c, g, or t
  misc_feature (543)..(543): n is a, c, g, or t
  misc_feature (552)..(552): n is a, c, g, or t
  misc_feature (598)..(598): n is a, c, g, or t
  misc_feature (606)..(606): n is a, c, g, or t
  misc_feature (828)..(828): n is a, c, g, or t
  misc_feature (833)..(833): n is a, c, g, or t
cagtgggtggatatcatgaccatggactatntgatctttaatgttctggatcttaatatgtaaaccgccccntttatacttaccaggttcatgactacctccgcagcaagctgtgtcccctctatgaaaatgactgcatatttgataaatttgagtgtgtgtggaatgggtcagacagtgtcatcatgacaggctcctacnacancttcttcaggatgttcgacagaancaccaagngtgangtgacccttgaggcttcgaggnaanacagcaagccccgngccacccccaaaccccgaaaagngnggcnggggggcaagcggagaaaagacgagancagtgtcgacagtctggactttagcaanaaganctngcatacagcctggcanccnncagaaaanagtatgagcagtggcggcnacaaataacctatatatattccaggacaaggttaactaggtggacaagttattacttaataatctcacatactgaatactagncaaacaagttnttaaatgtnnctttgggncnccatntgangcattgacnttaatttccctatacaggaaatgattggaatagaattaaaaggagnccaacatncccagcccccaagttctaagaaacttttgtcaaacccaataggtttgggacacttctgtttagaattgaaagctgccagctaacagtaattcttccatagttgacttgaacttctgatgcttttattgcccagttttctctggtgggtccagtgttttgttcctaggtgtctgctgcgataaaatgaggttgtctgtagtatttaaggagaaaagagataanttttntttaattacc

SEQ ID NO: 712402 - DNA, 910 bp, Homo sapiens
gggacccttgattggctcatgaagttcctggtaccctagatatcctaccttggctccagcccgactcactgtggaccatcaccagagcccagccagaggccccctgagcatctgtgagcgctggagggacaacctgctggagcactacggtggcaccccccgaggatgaccagtacgtgccctattgcgtatgacctgtgcctacttcgatccccctgtcagtgtccacggcaatacgagtcgacttcttgctggtgtgtggtacaaagtatggcagagaggtgctagggccatccgcttcccagcccaggcataccatccctgcgtgttataccgcactcagtcgctccaatccaatggtcctggatccacgctcccggctcagatgtgaaccctccatcttgtgcggcaccttctctgcatctatactccagggccagtcagattggctactttaccctctccaatggctaccaggtcttcagaatggcatgcatgctatagactcctgtcatgctctctgccatcggcttcctataatcagtagggaacttcgcattacgagactgcccgtggacgaaggattgagtcgctacgggccctgacttgtgagcttggactggcaacaactcaagcccgatgcctcgagtcctggagaaacctcggcgttacgcacgcatgtcccttggagcagcggagacggttcgagatttctaagggttcttcgaataccttgtcccctttgaatctggggaactttcggcccagtaaaggaagcccaccattcccggccgtaaatctacctttgtaatcattgggcagccgggtaccaagtatggttcccttgtgccttactgcattaggcacgcagcgctccattgcctgtaattggtgcttctctagcgccacg

SEQ ID NO: 712403 - DNA, 1451 bp, Homo sapiens
  misc_feature (85)..(85): n is a, c, g, or t
  misc_feature (231)..(231): n is a, c, g, or t
gtattggtccgagtgaatcgagaaaggaggctgccggactgtggcggacggcgcggagctgctcggaatgctacaccctcgcaanggggctccccgaccaaaatccacgcaaccaaaagcacaacggggaggaactggacagacaacacgaaacaaaaccaacaagcacacacacaccgacacatacagaaagcagaagacaaaagcacgcacccctttttttcgacaaanagagaacacaagaaagcaacaaaaacagacgacaagagggagcacaagcaaaacacaaagaaaccaccaccccaagaaacgacaacagaccatagcaaaacaacacacacaaagaagagaccagagaaaaaaacaagcgacggaacaacaacagacagtgagagaacagacacgagcagcacaaaccaaaataaagaaatgagcaaacacacgcaaaaaaagcaaaagaagaaacaaagagaaaacgagccaaaggacaagacaagagagaccgacgtcgcagacaccaaccgcgaacaaacaagcagagccgacgaagagagcagagagacaaccaacaaggacgcaccgcaacgaaggaagacaaaaggagagcgagagcgatacaaaacacgagcagcgaacacgggagctacacaaacaacgagggcggaacaagagacagcgcccccagccacaacaaaaaaggtcaggcaaggaccccgagcagacaacagaaagccaaacgcagccgacgaggagcaaacaggcagtcacgcccccacaaaaaaagagcagaaaccaaccacacattgtgccgacacaaaaacaaaaacacacagagaacgcaacgaagacaaaccgctcacgggaggagcacaccacaagcaggagcagagcgacaacaagaacaaccgacgaagatacgacaaagcagaatggagagagaaggcgacacgaaagccgaaaaagaccgagaagaaatcaacagacacggacagaaacggaggagcaaaccggaagaacaaccagcaggaagacagccaacgaataaacaaaaaaaggaacacaaacacgacaagaagagagcggagagaacacacaacacacaaggacaacgaaagacgaacaagcagagaaagaaacaacgaaacgggcgaagagaagagagacacacaacacaggaagaaaaaagacacgcgagcgaacagtgacaacacacacaacaaagcgatgaagcgaaccggaaaagcaacacgatagcagacgacgagggacgggagaaacagcagcaccacaccagaccgcacaggccaccagcagacaggaagaccgacgcagagggcacacagcagcggaccggcaaaaaacgcaagagcaagagcacacgacagaacgagaacaacgaaacacacgagtgagcacaaacacaacatcagaaaacagaaggaacacaaaga

SEQ ID NO: 712404 - DNA, 347 bp, Homo sapiens
ccaccttatgcgtggggcgatctcagcccgctgcagcccctgtttcccgggctcaggtgattctcataccccggtctcccgagcatctggaaccacaggcatgcagcgccatacccggctaatttttgcacttacattaagtgacggggtttcgccatgccggccaggatggcctcgaactcctgacctcaagtgatccaccagcctcggtctcccaaagtgctgggatcacaggcctgcgcgaccgcacccagcctatatgtagtcaaaaagttgatttagagttgatttagagactcccatgtgacgcactcaccatcgttcccagcccacggcataatggtggg

SEQ ID NO: 712405 - DNA, 246 bp, Homo sapiens
cagattctccccagacgccgaggatggcctgtcatggcgccccgaaccctcgttcctgctactctcgggggccctggcctgacccagacctgggcaggctcccactccatgaggtatttctccacatccgtgtcccggcccggacgcggggagccccgcttcatctgccgtgggctacgtggactgacacgcatgttcgtgcgtgttcgacatgcgactgacctgtgagccagaggatggagccgc

SEQ ID NO: 712406 - DNA, 107 bp, Homo sapiens
  misc_feature (3)..(3): n is a, c, g, or t
aantggaagatagattgtagcgtggcccacgtgctggcctcccgcatctgctcaccccgatccaaacactcgacccaccacttcattttcacctgtgctggctgctc

SEQ ID NO: 712407 - DNA, 288 bp, Homo sapiens
tgagacggaatcatgctctgtcacccaggctggagtgcaatggtgcggtctcagctgactgtaacctccgcctcctgggattcgagattctcctgcctcagcctcccaagtagctgggactacaggcacccaccaccacacctggctaatttttttgtatttttagtaaagacggggtttcactatgttggccaggctggtctcgaactcctgacctcgtgatccacccaccttggcctcccaatctgatttgctttacaagtcctgcttcagggttaccttccctga

SEQ ID NO: 712408 - DNA, 304 bp, Homo sapiens
cgcgtcgactgtatgtgtgcctgtgtgtgcgcgtgtgtgggtgtgcacatgtatgtgtgtatgtgtgcctgtgtgtgcatatgtgtgtgagtatgcacatgtgtgtgtatgtgcgtgcgggtgtgtgtgtgtgtgtgtgtgtgtgtatgtatgtactttaagtaatgcatccttaactgcttttagaatttgaggatgaatcaaattaccatgctaaatatgaagaagacaatcttttcttcaaatttgcgtgtgtgtgtgtgtgtggtctacccgcccgcgaatttagtagtagtagtcgacc

SEQ ID NO: 712409 - DNA, 407 bp, Homo sapiens
ccttgacgggcaacttgttgctggtgttgctggcggtgcgcgacccgcgcctggacacgcccatgtactacttcctctggcggctggccttggtagacgcgggcttcactactagcgtggtgccgccgctgctggccaacctgcgcggaccagcgctctggctggcgcgcagccactgcacgggccagctgtgcgcatcgctggctctgggttcggccgaaagcgtcctcctggcggggatggctctggaccgcgcgggcgcagtgtgcccgccgctgcgctatgccgggctcgtctccccgcgcctatgtcgcacgctggccagcgcctcctggctaagcgggctcaccaactcggttgcgcaaaccgcgctcctggctgagcggccgttgggcgcgccccgcctg

SEQ ID NO: 712410 - DNA, 94 bp, Homo sapiens
tttggttgttcctcagcagctcgctgccattggttttgctcatttctcaaccagctcccattcgcatctttttccattcaagcgcacacagggg

SEQ ID NO: 712411 - DNA, 648 bp, Homo sapiens
tttttttcccaaggttttcccattcggccatttgggtaaaaactagtgttttaacaaaatttaccgcatttttaacaaatataacgccctcatttaccactccccaatcacaagcgcaactgtaggatggcaatcggtgcggcctcttcaatattaacccgctgccaaatgtggaatatacgcaaggcgattccactgggaacacccaggatttcacaagccacaacgtcgtcaacagcggtccagtcacgtgtaatacgactcctatgagcctaatttgggtaccggccccccccacaagatccccccaaccaaacagcttgaaccagacttccccactataagataaatagttgcaagtccctctgtagtattcccctacgaggcttagaaacaaacgcctgttaggcagccgacccgtggtaccgcttcaagggcagggccgaaaaggggtggcattagatgttcaaccgtcatgtttccttacggttgttaaaatgccaagcagcgtcataaagttgaaatagctcagcagtagatacaccaacggtttaagaagcttacgcgggctcataatcgtagggattataaccccctcgaactttgaaattctcacaatggggcccaataaccctcgccccgggccga

SEQ ID NO: 712412 - DNA, 496 bp, Homo sapiens
  misc_feature (404)..(404): n is a, c, g, or t
  misc_feature (409)..(409): n is a, c, g, or t
  misc_feature (446)..(446): n is a, c, g, or t
aattctcttgcctacacacatacacatgcatagctatatttttagaacacatgctccaagctaagccctttaacactctttgaaatgatagcatactaacggttgagactttatagtcacactgtaaatgaaagagtctcacagagagctggcatgaagatgtgggcatctggagagaggggaaggtctgcaaggagtttgagagatagaagcctgagacttgacccactcattgctctgaaattctcttgtgtgaacctgaaccagactcagcatgctgaacctttgacctactcagctccacccagacccctaactctggaggaaagccaaaagagctataggcaaggtcatcagtcctgggctgtagtgtgcctcctcctgtctcatggtgactcaaagcnagctncttgacctgtcttcacctgtgaaatggggcagggganggtgttgcaagtgtgatgggaattcaggaagatgcccatgagatgataaa

SEQ ID NO: 712413 - DNA, 681 bp, Homo sapiens
cgggccagggcctggtggatggcaagatctcgtaccgtgacgggctggggcaacacgcagtacgtagtggccaacaggccaggggtactccaggaggctcgagtcccgcataatcagcaagtgatgtctgcaatggcgactgacattcttactggaaactcagatcaagtcccaagactgtttctgtagctaggctacgcccgagggtggcaattgatgcctgccagggcgacatgcggtggtcccatttgtgtgtgaaggacagcatctctcggacgccacgttaggcaggcatagtgtaggcattgtgagatggggcactggctgtgccctggcccagaagccaggcgtctacaccaaagtcagtgacttccgggagtggatcttccaggccataaagagtgcactgcagaagccagcggcatggtgacccagctgcagaaccggtaggcttcgtgcatgcagcagcctcgcagggcccgaggtgatcccggtggatagggatccacgaatgggcctaggatgggacgtttttcttcttgggcacggtccacaggtccaagacaccctccctccagagtcctctcttccacagtggcgggccaactcagccccgagaccacccaacctcaccgtcctgaccccatgtaaatattgttatactgtctggactcctgtact

SEQ ID NO: 712414 - DNA, 941 bp, Homo sapiens
agcggagggctggacatgggccccggtccgctggcctgtgtcctgtctgcgtggtggacccttgcggcctcacagtatgttcgtcccgttcgtggcgtcatcccgtggctggcaagttgggagacctactgctgacatgcgagcgcttggcgctcgagcctgcgaggccctcatcgcctccctccttgtggtgcttggcgggcatcagttgccagctgcttctgtgccctcgttcatcgtggcgatgggtgtcgttgcggtgccatacgggatgaaacatgcccgagacaaagtggacaagcaggttggtggagaataagggggtccaggaaagatctcatggacctgtcaccctggtgttactgtggagtcccaagctaatgggatcgctagacctggaggtctccactggtgccaccacatagacggatcatgagacctctggtgagccgatccgccgagtggagaggctttcttcagacgggaagggccgtcgtagcaaccccacgccccttagctttcgtagacctaagaagggcttgaaggtcagcatggtgcgagaagggcgaataaatagcggtatccaagaggcttgaggtacattgtaactcccataggcaccgtgcgttcattggaacgcgccaggtaggcgcgcggaggtggtaattcaccccgtgtagtccaggcgtgttgaatcttggagagctcctcagcatcacttgacagtcccgcaatacaccgactcgatgactgcggacaagcacacaatgtcccaaggaaggtgggcccgcgtcaacaaggttcctaaggattcccagtgaaagggggcggggagaatgctacgaggaagcgcccggaacgacacaaggagtccacaaaacgagataactctcgcgggtaaaagaagttgcaccccccgtggcaactaccttcactcagtg

SEQ ID NO: 712415 - DNA, 153 bp, Homo sapiens
  misc_feature (7)..(7): n is a, c, g, or t
  misc_feature (15)..(15): n is a, c, g, or t
gcccccnagggcctnaaggggctaatgttttgggtaccagtaaattttgtcctttagccttttctatgtgattgtgcccgtcattctgttttaagctcatggatcaatggatttgtttacaatgtgatattttctattaaatccagtattttc

SEQ ID NO: 712416 - DNA, 675 bp, Homo sapiens
gggaaaagcgcgcgagcaagatggccaccaccaagcgcgtcttgtacgtgggtggactgcagaggaagtggacgacaaagttcttcatgctgcgtacatcctttgtgagacatcacagatattcagattcctcgtgattatgaaacagaaaagcaccgagaattggcttggtggaatttgagtgggcagaggatgctgcagcaagtaatcgacaacatgaatgaatctgagctttttgacgtacaattcgtgtcaattgggccaaaccaatgagaattaaggaaggctcttccaggcccagttgtcagatgatgactgtgttgaagaagttttctggaaagacgcttgaagagaataaacgaggacacgaagggtcagagcctcccaaagcagagacccaggagggagagcccatgtgtaaaaaggccgctcaaatcctcaggttgtcacatggaccttcaagattggaacacagccggtgccgattccagatgctccgtggtctgattgtcgtgccaatgacagcagagaattccgctgcctgtgccatcaatgaaaaggctgtggtttaagggaagcagcttcaccgaatattccccagtcatgtgcaggggtgattccaaaccaaatggctggggacagccatctatgaaagtcggatgaaacttatctcac

SEQ ID NO: 712417 - DNA, 752 bp, Homo sapiens
  misc_feature (15)..(15): n is a, c, g, or t
ctgaggagttacaanattccagaatgcgctattagtttcgtttcacctaagcaagtgcccccaatgttccaccctcctaactcgtgtaaaagttctcaagatacccctaggaataagtggcaactcaattgttgtatgcatcctcaagcaaaaagaattcggtgtccaggaccctatctattcgtggtcgtaaaccagttatgtgtctggcataacaatactccagtaagtcacaaagtcacaacctgctgcacataaactttggtgaacaagcgaccatgctttgtacttgtggaagtccataaacttgcgttcccaaagagtttatgattaacacattcaccttccattcagatataggccactttgtctggtgcatgttcaactcactgttcattatgcccttgttatgcgtgtaaacgcaatcgcaagccacctaaagtctaagtcaaagatgttatgtgatgattttgcagcgtttgtagacaaatgcctcaagcctcaagataatgaactctggtccccgattatggtcaacctcatgaccttctagtcaagtcacctcaggcttatatctttcaggttttatagatatatcagcaggccttgataataacagaagctagtgccattcactggttcactcgtactgctattcttcattgctggtgcagacccagcagcctgtttctgaaacatccctttatcctaacacgcttcttcacaatggcgtgctacaaagagcaagtgat

SEQ ID NO: 712418 - DNA, 486 bp, Homo sapiens
gcgcgccatttggcccgccctctcctaccgcgtcccaagccccagccctctcagccctggccaagcccccctggataccagagcccattggccctccctctgtggcccatctttcccaccagtactccccccgaggaagggtgcacacaagaccaccaccctgaacgcccagaaaggagactgtaagaagaacgtggatcccagaaaggagctccacccattggctctgaaactccccaggattgctgaaattgccaggctgatggaagacattggacccggcaccaggacccgggaggtgaacattcccaggagtatgtccacccttcctgggggcccttggctttgatcttcaccaatgaagcccctcaagggctgaaaataaatagaggaaaaatggagaccaccctcctgggggtcctcttctgagatccaatcccctggtgggtaattgtcaccaaaaaattttttttggtccaaatttta

SEQ ID NO: 712419 - DNA, 744 bp, Homo sapiens
ggccattgtgtggctggactcggccgcccctgtggtgtgcaggcgcgtgttcgggctcttgcctgtcccctgcaccctgcaccgcggttactggcttgcggtcctgcgttctgacaaccagcccttgggtccccgcccgccacggacatgcctgcgcgtctacataggacgcctgagctacaacgtcctgggagaaggacatccagcgctttttcatgtggctatggccgcctcctcgaagtagacctcaaaaatgggtacggcttcgtggagttcgaggactcccgcgacgccggacgacgccgtttacgagctgaacggcaaggatgctctgcggcgagcgcgtgatcgtagaagcacgcccggggcccgcgtcgcgatcggcgacgggctacagctacggaagccgcagtggtggagcgtggataccacgcacgtcgggagaacatctggcagagacccaactacggaccacctgttacgtacacgaattacgggctcattgtacgaacaactctttctagtcggcgcacgtgcgcaagattcacaggatctcatgcgacaacgcaagcgtgcaagtaacctatgcggactgcccacaacggaacggacaccaacttgagtggctgtaattgcagtacacgctcctacctcctgaccctgacacgcgtgcttttggaccaactctgggagtggcaccgcacatacaactggccgacatattagcgcctatggaacgatacg

SEQ ID NO: 712420 - DNA, 221 bp, Homo sapiens
atccccgcaggttgactgaggtcattcctgagttgaagtatgttaagagggtaatatttattgattctctaacataccatactccattgtatttcactctacacttaggagacttttagtgagttatgtccttgatgatattgcctatttttttttatagaacttgagtgagcgaaaagacaatgtgcctattcagacaatttttatgcttttataagggc

SEQ ID NO: 712421 - DNA, 233 bp, Homo sapiens
agtatttagaggctctaccaaggcctgtctacagggacagccttcatcaaacgggacattttttttaaaccctgttattttacaatgccacattatactgttgtaatggcttgaagcatacagggtacgaatttctgggattcgtaaacttactagtgtgacttctggacggtttacaggttcagacaaatggtttctcaaagggtttatcagttatgtattgatgatttggg

SEQ ID NO: 712422 - DNA, 191 bp, Homo sapiens
tatcgattggcggtacttagtgagtcccatctctaccaaaaagaaaatcaggtgtggtggccactttgagtcccagctactcaggaggctgaggtgggaggattgcttgggaacagaagatcaaagctgcagtgagctaggatcacagcactgtactccagcctgggtgacagagtgagaccctgtctcag

SEQ ID NO: 712423 - DNA, 369 bp, Homo sapiens
  misc_feature (89)..(89): n is a, c, g, or t
gcacgcggggtggcacacgagcccacaggagcacagcctgtggccccacaccctcttctcaacacacacttacggggccgctgtgtccnataggcaggacgcggatgtggtctcccctttccccctttccaagtcaagggagttggacaagttgcacagtgtttggttttaaagcgcacacctttgggaaagccacacattattgagacttacatggaattccccgggagtgaaactggctttgtgctcttcctctctggagggccatgggccatcaggagcttcacatagagccccaagccacaacccccttcctttacacgagagggaaccttattgcgcattgggtgccttttctcttgtgtgttg

SEQ ID NO: 712424 - DNA, 143 bp, Homo sapiens
ctatgttccactcgttacttttgatgatgtttggcaaggggtccggtcttggtagcacatttgaatttggcacagggggtacatctggttgaatggccactatccccaacttggattctcattcttcactagtcaacaactcc

SEQ ID NO: 712425 - DNA, 128 bp, Homo sapiens
ctgccttctctagctctaccaccttttgccactcagcaggtggtcccccctcgagtcactgagccccaccaacgggcagtcccatgggactgtgcgggccgttgtcagtggacagcggctgtgtactc

SEQ ID NO: 712426 - DNA, 251 bp, Homo sapiens
cgtactatacacctaactacttcaaaaacaatttgatgggcagggctggtggtcacacatgtaatccccgcactttggaggcgaagtgggcagatcacctgaggtcaggagtgcgagaccagccctggcagcattagaaagccccgtctctactaaaaatacaaaaattagctggggatggtggtgcacccgtgtaatcccagctaccttggaggctgagtgcaggagaatctggctgaaccaggaaggcc

SEQ ID NO: 712427 - DNA, 434 bp, Homo sapiens
  misc_feature (317)..(317): n is a, c, g, or t
  misc_feature (336)..(336): n is a, c, g, or t
  misc_feature (409)..(409): n is a, c, g, or t
tcagacgcaattcacagtttactggagagatgaactgctcatgtagagatgttgagaggcacatggagttttcaggagatactccaacacttgagctcaccattatagcagcaggaagtgactacaaaattattacaatagtacaatatgtgctacagttaagtttatgccattatgatttaatcttgcatctttacatttgtttacatttctttccatgcaagtcgcaccatgtattgtctgcaattggatgcaagaattttgatagatgttaatattttataaaatatttttgtacattttctggtaataaatgntaaaaatacactatcagtntttacatatatttgatgcattcaagacatatccaactttaagaaaatatatttccaggctacaagatatgtcngggagttttcctcaatttgttgaaa

SEQ ID NO: 712428 - DNA, 994 bp, Homo sapiens
acttttggtgttgtacgacgacgtcgggcgcgttggtataatattcgtgcaggggcttcggtagtatttttcaaaaatgtgccgtgtcaaaagcttggtgtgccgcccttttctttggggtttccacccttgggccttaatcacttttggggggcaagaacatcgccccgattgtcgggtttgtcggttccgccgtgtaccccgccgggggctggtcccccctagtgaggggcgctggcatcccttgacgggccgctcgctcctcttctttcgcttgtctgcagaaattcttgcccctggtccgctataaggacccctaagcacccgcctcctgtggtggggcgttgtacacgaagtccgcaaaatccaggtggctgttcccacacagggaaggaagtaaaacaatagaggcaccatggttagcgcgtaccgttgctccaaaccagacggggcttttccaaccaacatctggtaacaatactcctgtacttttttggctgaaaatcagggataccaactttttaaaaggtcttgtgaaaaaccaccatttgcaggttaactaaaaggacgacaggtgcctcttttttccgctcattttgcggggtgcggtaatacagtaaaatgggcgatccaccctcaccacgaaggatgccggcttcaaaggccagcgtttcttcatgacaaatactcccgttgcaccgtttcggaaccgttgaccccactatgagtagctcttgcaaacatcagtgtaaaataatatcggcggggtagaaaatgaatggaggtgaagaacaaatgtaccaactttgttacatattgcacagcaggcacacgcaagataaaatgttgccacacgtgcaggcgacggttcactctgtgggagaaagaggatggagtcacgacttagtttggattccgatgaataattattttcaccttccttttctgaaaaaaaggagaataaaaaataatctttcaaaacccccacataaca

SEQ ID NO: 712429 - DNA, 169 bp, Homo sapiens
tggcttagctgttccagtggcatagctgtttcccagaacgacgttatagcagaatttagactgtagctgttcgctatgcttgaaggaacgaagcaaaacaactgtcagtcttcctgaaatgaagaaactacaccagggctgctatatcagagcaaccccaaccagcact

SEQ ID NO: 712430 - DNA, 627 bp, Homo sapiens
  misc_feature (9)..(9): n is a, c, g, or t
  misc_feature (109)..(110): n is a, c, g, or t
  misc_feature (117)..(117): n is a, c, g, or t
  misc_feature (165)..(165): n is a, c, g, or t
  misc_feature (176)..(176): n is a, c, g, or t
  misc_feature (185)..(185): n is a, c, g, or t
  misc_feature (187)..(188): n is a, c, g, or t
  misc_feature (190)..(191): n is a, c, g, or t
  misc_feature (201)..(203): n is a, c, g, or t
  misc_feature (210)..(210): n is a, c, g, or t
  misc_feature (227)..(227): n is a, c, g, or t
  misc_feature (240)..(240): n is a, c, g, or t
  misc_feature (242)..(242): n is a, c, g, or t
  misc_feature (274)..(274): n is a, c, g, or t
  misc_feature (304)..(304): n is a, c, g, or t
  misc_feature (308)..(308): n is a, c, g, or t
  misc_feature (317)..(317): n is a, c, g, or t
  misc_feature (324)..(324): n is a, c, g, or t
  misc_feature (329)..(329): n is a, c, g, or t
  misc_feature (369)..(369): n is a, c, g, or t
  misc_feature (386)..(386): n is a, c, g, or t
  misc_feature (394)..(394): n is a, c, g, or t
  misc_feature (463)..(463): n is a, c, g, or t
  misc_feature (497)..(497): n is a, c, g, or t
  misc_feature (500)..(500): n is a, c, g, or t
  misc_feature (504)..(504): n is a, c, g, or t
  misc_feature (598)..(598): n is a, c, g, or t
atataactnacagaatagtgcaacactagacatgaagggatcaccactcataatcgggcctttacaaccgaccgccccccctcatcaagagagagagagaacccatgcnnaacagcnaactatccagaaataaaagaatcaccagaatatatcgcatcggaagtnacaaatccacnaaaaaaaancnnannaaggtcaaannnaaacacntcccacccgcccctgcncgaaactcagtantngcgcggtagggcagaccgaaggcaaagggagnccacgtccccgcgagccggcgacaacgggnggcncgcgcgcanggggagnggcgncgtgtgcggggcacgcgggggggggggcgggcacgaaccngaatgggactggaaganaaaactgncgctgcgttttcctctcttttttctttttaactcactcaccaatacacctttccctcttcgcatttcangacaaacactataaactcttcaaacaaaaatctnttngaangtcggttttctcttcacgtatgtctaagaatcacatacaacgccatattacattggtgtcttatacccctagaatatcgctaacaccttataanaaaatcgcgcaaatttttctttaaatttg

SEQ ID NO: 712431 - DNA, 219 bp, Homo sapiens
  misc_feature (42)..(42): n is a, c, g, or t
  misc_feature (109)..(109): n is a, c, g, or t
  misc_feature (199)..(199): n is a, c, g, or t
  misc_feature (215)..(215): n is a, c, g, or t
ccggttgatgtggaattgggattacaggcatgagctacgtgnccagccgcctagccaattttttaagtttttgtagagatggggtcacaccttgtttgccccaacgtgntctcaaactcctgagctcaagccatcctcccgccttggcctcccaaagtgctgggattataggcataggccactgcgccctgccaatatnatggctaatactgtgntaag

SEQ ID NO: 712432 - DNA, 904 bp, Homo sapiens
  misc_feature (188)..(188): n is a, c, g, or t
ggagaagccgcgatagccgagtacctcgcggggccagtctggtctgtgcgtggtgaatcttggactgttgattgaaccgcagaggcattcctgtggaggttgatgagtcatatgcataaccgactgagtcggtgaaaccgatcgcagaatattcgccggtaagaggaatcagagccatgctgctccanaatatggatggaacagtggtgagcccgatcagtcttgatattgcaaccacaccaagtgcttcagaatgttccatccgagagagcattattcctcaaagacgtcatctcaatccgtgaaatctttggctaatcaccagtcggtctggtagtccctggacaaaggtcacctttggtgctgtggtcatctcagatgttctggaggacacgtgaagtacagtttctgcgaaggagacacctatgcctgggacaaagctttcccttctgggtgctctgcagtcagcggagcgctgcgtctgagtctgtggttggagctcccgtccctggagagcatcaggtttgactttatggaaaaacgtcatcacatggctggtatctcaggtttcagacgggttctcctgacactggctgtgactcacgacaaatcagaccaaagtttagctaatgctcagcagacttccttggggcggtaagccaggagatgtgtgcaacggccccagtctctacaggaatccgaagcaggcctggatcttgcaaatcatagacacgggattttgattcccagggccccaggatgttccttgggcacccaatgccagctgttgaaaggcccctggcccttcaacttccgggttgttatccccaaggaatctcccagaaactttaagggccagggaaatccctaatttgaacgctcaggtttcccgctttgcccattg

SEQ ID NO: 712433 - DNA, 195 bp, Homo sapiens
caaagtcaagatggacgtgaatttccgcggggcagcttgttgtgtgttgtagtcttgtaaaaggaaagtcaagtctggattccgcaaagactcctctctgtacaagggcaccgtggacacgtgtgctcgtatatggccgtcggccgacaaagtgaagcgaaatggtcagctgaacctcagtcgagcccgcctgtt

SEQ ID NO: 712434 - DNA, 252 bp, Homo sapiens
tgtgtgcatgtgcactggagtacctcaggcttacctgtgactatgcccaccagtcaaagaaagctgggaacacatgtctagtcgaacaaggtttggtttattacttgctacagcaaaagaaatctcacaccttgaggaactctgggcatctcaaggggatgtaaagtggatttcgaatttaggattctgttagatggtttgggggaggctttaagaatgcaaggattttctctggatcagttatggtcagga

SEQ ID NO: 712435 - DNA, 1162 bp, Homo sapiens
gggagcaggtcaacagcgtgagctgatcaactgaccggactgaagaaggccagccatgcgagatcagactcgagatctatctccgactctgagaacctggatgtcgtcatggcatgcaccagtacagaacgataatgtctcggcatgctagctggaatggccatgcaacaagggagcttacatgcgtcaggctgcgaggaagatggagggtcgactgtcaagtgtccaacgctacaagggctccatcacctgccctcgatggccaatgattgcgacatgcctggaagagagggcaagacgtggtacctagacgatgacccaagtgcagcgtcgcgaggcctaggtcatgttgaactagtggtgcgcttggagcgatgcacacgaacgcgtgaacggatgtgcttgctgctacggtggaatgacggagcggaggtaatccgccgatgcagtaggaaggtaccatggccgatccaggcatcctaaccgtgctgtaagcaagctccacaggcggctgctgggcatgggaggcctgaatgagggacggtccagtcggggccatacgcacttccccgccggtgaatatactggcgaggcagttgatgctgggatgcgtacagcctcgtgatgactgggcggatgccatgaacttgcgaagtcagctcgccttgagaacaagctcaggctgcggggtaccttgctcgttatgtcgtgccccgccgaatggcccggaaaggcgccggggatggctccgaccgaagaggtagatggcaaagcggatgggggctgagtgctaaaacttgccgaataagcctcttctcgctgaaactgagatggctggacaggcagacccaaaagctccctttccagacccgcagaagcttccaacacgtttggggactgtggaaattcgccttcggggcgccggccaggcccaatccgagcttcacaagggtgtgagaagagtaatgatccctagatgatatccttcacacccccctggtgcaaattgtgcaaaaaatgcgcggtccggaaaagtgagaggataacacctctcgaaccgccatattagcgcgagacccgaaggacaacatagtattaacagggaagaagtccgatcatctataaagcacctatagagagagccagtcacctaagagaggag

SEQ ID NO: 712436 - DNA, 680 bp, Homo sapiens
ctaggcttgggtgggaaggcctgttctcgagtccgcgcattgttcgtcaccgccagtgtcgggagggtggtgtgagttcgtggccccgcgggggaacaacgatgccgcatctacgtgggtaacttacctccagacatccgaaccaaggacatttgaggacgtgttctacaatatacggggctatcctgggacatcgacctcaagaatcgcgcgcggggaccgccttcggcttcgttgagttcgaggacccgcgagacgcgggaagacgcggtgtatggtcgcgaccggctatgattacgatgggtaccgtcgtgcgggtggacgtttcctcgaagcgggcgtggaaccaggccgaggcggcggcggcggtggaggtggcggagttccccgaggtcgctatggcccccatccaggggtctgaagaccagagtggttgtctctggattgcctccaagtggatgtgggcaggatttacaggatcacatgcgtgaagcgaggtgatgtgtgtatgctgattgttaaccgagatggcactggtgtcggtgaacgttgacgggaaagaagatatgacctatgcagttcgaaaagtggttacagtaagttagatctcatgagggaaaaattgctcatcgggtaaagtgatgggccagaagtccagtatggaaattcgatttaaagcg

SEQ ID NO: 712437 - DNA, 366 bp, Homo sapiens
tcagatcccctgagagcactctttattttccttctaaattctatggttttctttgcatttcttgaagtgtatatcaagggaaacggtgatcaccaatacatgcattcagtgttgttttttttaaggtggctatcacttaaatcaggatcaaggcttttgagcaaagcctctctgcattttttccccagtggaacagactctgctgtacattgatgaggcagagaattgaaatattactttgcatcagtatcggctagaaaagaaaataacctaagaccctgctagtttactcgtaacaacttacagagagtctttctgttggaagaatatgcaacaaatcagaatcacgtttttagttgtgcgtgt

SEQ ID NO: 712438 - DNA, 226 bp, Homo sapiens
tatgcgcgctggagtacaaggagaaagccatcaggcggcagggctaatggacagacagctccaggctggggatggagaggcactgtggttcctttactcatccacagcctctggattggggtggggactgcaatccatacaggtccgactgtgtccctaatggaacccataacagcccagtcgcttcctgagggcagctgcttcccacgtgctgtgggcctaagaa

SEQ ID NO: 712439 - DNA, 188 bp, Homo sapiens
agaccctatctgggaaacaaaaaagaaagaaagaaattgctacagccaccctaccgttcagcagtcaccaccctgatcagtcagcagccatccactcaaggtaagaccctctaccagcaaagggattacaactggctgaaggctcagatgattgttagcatttttcagcaataaagaaggaaaattag

SEQ ID NO: 712440 - DNA, 292 bp, Homo sapiens
aatccaagcagtcgctccgaagcttccctcaggttgctggcgctctcgcagacccgacgcacgggggcctttcagttttatccggtaaacccaatgattagaggtcttggggccgaaacgatctcaacctattctcaaactttaaatgggtaagaagcccggctcgctggcgtggagccgggcgtggaatgcgagtgcctagtgggccacttttggtaagcagaactggcgctgcgggatgaaccgaacgccgggttaaggcgcccgatgccgactgcttggattacaagga

SEQ ID NO: 712441 - DNA, 358 bp, Homo sapiens
gccggcaaactatagccataacacgaacccaggagacacctacggcccagatggaaaaggcttcctcaatcggaaacacgagtgggaggcccacaataagaaagcctcaagccggtcctggcacaatgtatatagtgatcataaataaccaaagaaatgggttactacgaaagatgcaaagactgctgctaactggaataccctaccacagcgaggtccctgtgagtttgaacgacgctgtctgcgaagtaacccttaacttacaaaaagaagaaacacgtatacaagataagactaaatgatggccatgagtacctcttccaaaccaaagacgataaggcaatgacacatggatcca

SEQ ID NO: 712442 - DNA, 174 bp, Homo sapiens
gagagataaaagaaaaaaatgctcatctggagagagaatactgggatagttattttctcagttgataaggccctctgttaaggatggttaatttccctaatcattttattgaataccatatctaaatagagattatccttttcaactttaagcacactgtactgatttggttgg

SEQ ID NO: 712443 - DNA, 392 bp, Homo sapiens
cctcaggcgtcggaggacgcgtgggttagcatttaatgtgatgatctaagaaattagaagtagaactgggtttaatggtatagacatctttgatattattatcaataatttgtccagagcacgaacaagcgaccacacgctcaataagactaaacaaaacaaaatataatatgtacatcattcaagtgtcccatgtggcttctattctacctgtacgaaaatgatacaaagagccaccctaagatatttgaagcctgacaaatcagcttcatggagagcaggtaccaaatgcatttggcaaccgaaagggcagatccaatagaagacccgctccttaaattaaacataacaatgtaagaatacgttgaacaacataacatacaatacaacgg

SEQ ID NO: 712444 - DNA, 410 bp, Homo sapiens
cgaggatccccggtgagcaactgcaacagtcagggagctatgggctgtagatagatgttggagaaggcactaaaggttgagcagaagggaggtaggacaccgggacatggccggtcagcagctgacaagccccgctgagatcgtggcggtgctcggccaccatctgaagatttaggccagtcctcgttgggcttacaggcaggcccgtatggtggccggcaagttggggaccctcccatttggatacattagttccccctcagctactggagatctcagccacaactgggctccagctgtgacccagactccgccaggatcccctagatcctcagctgtcagataatcccctgtccccctcctcctccccactcaacccccagtgcttgacatgttgcagtgtgcttccg

SEQ ID NO: 712445 - DNA, 1885 bp, Homo sapiens
gttgccggtggtgcggctttgctgctgtgtgtctctagtaggatagcaggacaagcaagagaaggactacgagtcagcagaccagctgtgaaattctctacgtgatcgctcggtacgttcggcatacgctcgcatctcctctcgatgtggagggtagagcagtgacgtactacgcctcgtactgctacgtagttgctctatgcacccgatatctatccattgcccatccctcttgctggtgtggttgttgagcgacaacatgatgcttgggtgttgttgcgcttccacgtgtgtgtgtctgcatgcttcgcgctggtgctgccacgcgagggtcgtttttcttttttgtgtgagaagctcattctccttctgtgtggctggcggccagttttgtgtgagctcctagtgttattgtcgccctctcgtgggcgtgtcgcctcctccgtttgctcctcccttgtgtgagatctgtgtcttgtggcggaaacgatggtggggacaaatagtatggcggcggctaccagtagcacgacgagaggtgtatgctacgcaccagcagattgtctgtgcttggaccacataatccgtccagggggtgggtcgctccccccgtctacttgtactggttgctgcccctcgccatatgtgtggcttccttcgagctgctgttttttgcgcacatctacataaatattgccgtcagattttttggtagggaggtcgtacatcttaggggccgcactaagggaagcagaagtattgacggcgcatgcgtcagatggactgatcagaatttggtggttctcaccaccaccacccaggggtgttgttgtctgagcagcgcaacatttgagccgccttggggtggtgaaccaaccacagagtgttgcgtccaccacaaagatattgtccgctgctgcgttgctgaatagatcggttgggtgcggacgacaaagagtggcgtttggttgtggcgacaagaagatgataattttattgtgggggcgccgaccacaatacatctcgtcggtgacgaaatactgagacccagacacctttttgcacagagggagatgggtaataggttctataggcgcccccgattctcttttagtgaggggacgagccgttgttgacacccccaggggggcccccaagggagaatttgtggtgtgacagcgcacagagataaacaggatgtgccccccacagaggaagagcctttctttgtacaggtaggttcctttggtctctgtctctgcccagtgggatagactctgtgggataagaggagcgcacaacacacactcgggcgctctctctggtggttccacacactcgcgcctacaccccccaccagagtgcccctctctgtttgggagtgaaaacacactactggggagggccctctatttggcgtgagtatgcacagtcccctcgtgcgcgcaaggtgtgtaggagacacccaaggacacacttttgcccaccacgcaacaggttgctcatcacattgtgccccccaagcactctgggagaaatattgttcaacatgtcgcaacacattcacacaccgggcttaagagggaacaccacgagggtttggaccaagggacacaatggagccctgtggaaggaaagggcgcttctctcagcaccacgtctaaggagaaaagaattttgaggcaatctcccgggtcaccatggagatctcctgctgtcctgtataatggggaccccctctcccccctttatcttttgccacactctccgtctctccccaatcaattggtttttttttgtgtgtcaactgggccccctctattttattccctttatttttcccccctttcaacagagaaataaaggttcttgaagttaaacccaa

SEQ ID NO: 712446 - DNA, 313 bp, Homo sapiens
  misc_feature (86)..(86): n is a, c, g, or t
  misc_feature (191)..(191): n is a, c, g, or t
  misc_feature (214)..(214): n is a, c, g, or t
  misc_feature (245)..(245): n is a, c, g, or t
  misc_feature (304)..(304): n is a, c, g, or t
taagcaacctgtgtggaagaagccatttttaattgtttatttttttgaggtagagtcttgccctgtcatccagtctatagtgtagnggtgcaatttcggctcactgcagcctcccacctcctgggctgaagtgatcctccctcctcagcctcccaagtagtgtgccaccatgcctggcgttttttttttgnattttttgtagagacagggtttnatcatgttgcccatgctggttttgaactctnggactcaggtgatctgcctgccttggccttcggtgctggattacaggcgtgagccctgngcctggccc

SEQ ID NO: 712447 - DNA, 341 bp, Homo sapiens
agttcaaggtcagcctaggcagcatagggatataccacctcataaaaagcaaaagacaaaacaagcctatggccagggctacgttgtctgtggggccttgcatatgctgtataagtctcagatttcctccagcagcctgaggaaactcaaaggcacagttcccagatactgcgagagaaccaccatctctggcaacagtttccataacaacaggaatcagggatgtggagggagatgtagtaggagccccccgccctcctccccttctctccttcctcctcattctaacgcaagctgctggccatgcacctccagactgccccttgggggtgagtttcttg

SEQ ID NO: 712448 - DNA, 440 bp, Homo sapiens
  misc_feature (21)..(21): n is a, c, g, or t
  misc_feature (37)..(37): n is a, c, g, or t
  misc_feature (51)..(51): n is a, c, g, or t
  misc_feature (67)..(67): n is a, c, g, or t
  misc_feature (115)..(115): n is a, c, g, or t
  misc_feature (137)..(137): n is a, c, g, or t
  misc_feature (153)..(153): n is a, c, g, or t
  misc_feature (157)..(157): n is a, c, g, or t
  misc_feature (222)..(222): n is a, c, g, or t
  misc_feature (237)..(237): n is a, c, g, or t
  misc_feature (245)..(245): n is a, c, g, or t
  misc_feature (417)..(417): n is a, c, g, or t
ccgcattccggtacggaaaantcaagatgcaggaagncccggcctgccgcntatttatagtgcagcnagtccgcttaaaaatacacttggccccttgcacttgccgccgggacantggcaaccctggacgtggggcntggggcttgtggcgcntgcntggcggggttgactcttccagtgagggcagaaccaggcttggcaggaggggaggacggtgtaccntgcatgcatcagagncctcaagntctcctcatgagagccaccaagcaggacagagcagctcttgtcccaggtcccatcggcatgagcgccgtgtcaccaggagaatagtgctcacagcccaggcagggtgtgtggcaccatggatgggctcgtggggcgggatgggacagggcacgggttctcagaaaataaacntgctttattggaattaaaaaaaa

SEQ ID NO: 712449 - DNA, 473 bp, Homo sapiens
  misc_feature (95)..(95): n is a, c, g, or t
  misc_feature (102)..(102): n is a, c, g, or t
  misc_feature (222)..(222): n is a, c, g, or t
  misc_feature (224)..(224): n is a, c, g, or t
  misc_feature (232)..(232): n is a, c, g, or t
  misc_feature (262)..(262): n is a, c, g, or t
  misc_feature (276)..(276): n is a, c, g, or t
  misc_feature (289)..(289): n is a, c, g, or t
  misc_feature (293)..(293): n is a, c, g, or t
  misc_feature (298)..(299): n is a, c, g, or t
  misc_feature (306)..(306): n is a, c, g, or t
  misc_feature (335)..(335): n is a, c, g, or t
  misc_feature (369)..(369): n is a, c, g, or t
  misc_feature (381)..(381): n is a, c, g, or t
  misc_feature (386)..(386): n is a, c, g, or t
  misc_feature (389)..(389): n is a, c, g, or t
  misc_feature (393)..(394): n is a, c, g, or t
  misc_feature (399)..(399): n is a, c, g, or t
  misc_feature (404)..(405): n is a, c, g, or t
  misc_feature (408)..(408): n is a, c, g, or t
  misc_feature (420)..(421): n is a, c, g, or t
  misc_feature (425)..(425): n is a, c, g, or t
  misc_feature (430)..(430): n is a, c, g, or t
  misc_feature (437)..(437): n is a, c, g, or t
  misc_feature (446)..(448): n is a, c, g, or t
  misc_feature (453)..(454): n is a, c, g, or t
  misc_feature (457)..(457): n is a, c, g, or t
  misc_feature (462)..(463): n is a, c, g, or t
  misc_feature (468)..(469): n is a, c, g, or t
gacattttatttccagtatcatgctaaaaatctccttgttgtgtgattcttttatttcttgacatgcacacatatatggatcaaaaagtatgtanaactagnaaaatggactccaagcaaaaatggaaaacatgtttccatgagcttagatttccgggtatattactaccataaacctaaggtagaagtaatgcattgttcacttaaatgtccacttttctnanccaagtcnaagggtctgtgaaaaatgaaagatcagaanagtcccaagataantctgggaaatccntatncagtnnttaaacnaaagattacacagaaattagttttaagtngtgaagtctcttattctacctatgacagtgcttncctgagggtatntttgntanatannaaacntttcnnatncattttattaanntctnggctntacacangtatacccnnngtatnngtntgaannttacnnatca

SEQ ID NO: 712450 - DNA, 156 bp, Homo sapiens
atcagatgtaaaatcattccttctgtttactcttttaattttcatccgttgcaggtagtgcaaattcaacttcaaatatggtgtaggtgttgctagattccatattttccggccttgggagttttgctaatattttaggcaaaaaattttgctcag

SEQ ID NO: 712451 - DNA, 1246 bp, Homo sapiens
  misc_feature (542)..(543): n is a, c, g, or t
  misc_feature (551)..(551): n is a, c, g, or t
  misc_feature (556)..(556): n is a, c, g, or t
  misc_feature (571)..(571): n is a, c, g, or t
  misc_feature (610)..(610): n is a, c, g, or t
  misc_feature (657)..(657): n is a, c, g, or t
  misc_feature (1032)..(1032): n is a, c, g, or t
gtccactcacagtagtgaaagtgatctctttgcagaactatagatagaacagcctgggaaactaaagggagaaatacaagtgttttcggggcaaacactttttttctgggtgatgcatctgttgaaatgctcaagacttaattatttgcctgttgaaatccaccgtagaatgcccccatccggttcctcttcttccccaggtgtgcccaggaattaatcttggtttcactaccacttaaaattcactcctttcccatcatgtccattcgaaagtgcccttcacgaaagaaatggtcactgaatgggaattctcttaagacaaccctgagattaaaaataagactatttggataacttataggaaagcctagaacctccccaatagagtggggatttattattctttctgtccccttctctctttggaccaataagttaaattgagccagtcattgagttatgagtttggttgccagtagttcttatcttgtgggcttgatttcccaaaaccacatggctgctgaacttacccgggatcctcnnacctcacnatgcnaaccacttactaccnggcctttttctgtgtccactggagagcttgagctcacantcaaagatcagaggacctacagagagggctctttggtttgaggaccntggcttacctttcctgcctttgacccatcacaccccatttcctcctctttccctctccccgctgccaaaaaaaaaaaaaaggaaacgtttatcatgaattcaacagggttttcagtcccttatcaaagagagatgtggaaagagctaaagaaaccacccttttgttcccaacttccacttttacccattatttttatgcaacacaaacactgtcctttggggtcccttttcttacagattggaccctcttggaaaagaatttatcgtattcccacgtttttttagccctcaggtttaccaagatacattatattgtattattttaacccttatatttatggctatatcttggtggataatacatttcaggttggntgctgggtgactttattataatctgaacctaggatatatccttgggtcttccacagtcatgtttgaggtgggcccccgtggtatggtaaaaagccaggtataatgtaacttcaccccagccttgtactaagctctgatagtggatatactctttacgtttagccccaatatagggtaattgcacatttcctgccctctgggtccccattttact

SEQ ID NO: 712452 - DNA, 1273 bp, Homo sapiens
  misc_feature (777)..(777): n is a, c, g, or t
cgcgggggtaagcgcgttcttgaaggtgtgtacccccggctggatcttgggctttcctctcactgctccctaatcgaatgtggtgatgttgggcaccaggagttgtcgtttttctttatgcttagtggggccgccccacgtggtcggttgtcgctcggccgcttctgccccccttgtgctattgcctaatgttgctcgtttctgttggtgccgttggctgtgtgtcagcacgcgtcccagcgggtatgtggtttcctgtggtggattgtggcctgataactgtggggagccccgccccttgtgggggacctatcgttcacttttatgtgttaacccctctccccttatggtgcgccccacagggtgatccctccacaggtgtttatggagtgatagtttccttgacagtttcacgggcgagtttgggggtttcccaccaagcctctcccgtctctttcttggggcgggaatcttttctccccaggggggcccctcgttgtgtgcaactctctaggaagatgtatggtatgtcttggagatgttcgtggggtttttgcccctcgccactacacaacggagtgtggttgtcccctccccggttgtttctgtcggtggagcacggtctcccccgcgtccatctgtagccccactatagggggaactcttgggttgtctatagaccacttgctagatgatcgggagaagacaacattgtccccacgcgcgcggatataggaacaaggctgaatttgtgcgaataggagcccacagacaatnattcttgtggagacaagcggagaatgcggttatgagacaccaagagcttgaagagaaatccacacacacggtgtcacgaaagtttacagaagggtttcacgcggagatttggttttcggataagtaaggcttcttccactcgcgtgccctcttcttctacacacggaatgtcttctcggagaaaactatcacgaaagaccacaaagtgttggaacacccctggatagcccacctctcttctgtgaaatagcctaccccctttgtggcacacaggtgccatacactgtgtttttcctcgtggagctgtagagacagttttagacctcttgtggatgagcgacttaaatgccctcctggacttctagtttcctgcctgcctcagcttctgcaagttagtttagtaggagatgaagtggaagtcccaggcttggattgcccaatcaccctgcttaaaattatttggaaccccttaataattaaactttggattttttta

SEQ ID NO: 712453 - DNA, 195 bp, Homo sapiens
  misc_feature (74)..(74): n is a, c, g, or t
ggactggtcagtgatctatgttctaagataggggttgggatggttgctgaaagtggctttgtttgggttaaggncaaggtgagtaaaagttgcattgggaagtatgaaggggcctgagaatggagtgatagaggagttgctagtataaattctggctaagatgcaggatttaaaactttgtctcttgtgttgaag

SEQ ID NO: 712454 - DNA, 692 bp, Homo sapiens
cgtctttaaaccctgcgtggcaatacctaacgcaccgccgtgatgcccaggaagacaggtcgatctggaagtccaactacttacctataaagatacataccaactcatatggatagattataccgaaatgtttcattagtagggagcagacaatgtgggctaccaagcagatagcagcagataccgcattgtacccttacgcggtgaaggctagtagtgtagctagatgggcaagaacaccatagatgcgcaaggccatccgatggcacctaggaaaacaacccagctctggagaaactagctagcctacataataccgggggaatagtggggctataagtagtatacaccaaggaggacctacactagagatcatgggacattgtatagctaggccaataaagtgtagccagctagctagcccgtagctaggtagccatatgccccatagttgaagtcactgtagccatgccccagaacactaggtactacgggccccgagaaagacctcctttatattcccaggctatataggagtaatcaccaacttaaaaattctccaggggggcaccatttgaaaatcctagagtgaatgtgcaggctggatccaagactggcagaccacagtgggagccaggcactccacgctgcctgaaccattgtccacatactccccttatacttgggctggc

SEQ ID NO: 712455 - DNA, 723 bp, Homo sapiens
cggcccccaggtgggatcggctccgcggcccccgggacttctggactccccggcctccctgtgtcccccagtgacctcccgtgaccccctgtgacacccagtgagtcctccctgaaggcgctactgaccttcagtgcccaatgtatctgccctgccaggtcccccagtggccccctggaatgccagggttcaaggtgacccactggctacaaaggcgatgcagggggaagtcggcaatggacggcgagaagggtgaccctggcccccctgggcccgcctggactcccgggcagctgtggggctagcatgggccccctggggattactgaggacttgccatgggccactctgggccccctggggacctgggggtcccattggggttcctgagggcctgctgggatcccagtgagctgcctgggcaaatgccgggtgacctgatggcgagaatgggcccaggaaggggttccgcgggcccaagggttgacctcggaagacctggtcccaagggaacccccgggagtggccgggcatgcggagagccgggcaatgcgggcaaggacgggcagaatggctgtgccagggactcgatggccagaatgggagaggctggtcgcaaggtgctccggagaagaagggcccaagggctgcgggctccctggaacaacggggacaaagcgagaagggcgacagtgcaaagtgcgaactggtgaatgcgcctaa

SEQ ID NO: 712456 - DNA, 178 bp, Homo sapiens
ctgcatctcaggtcgctcacaagacagctgtctcaagcttttcaagctgtgagagacacatcagagccctgtggccctgtcgctggagtgcatcctgagagtagctccctccttttccacctgagctcttcctcctacacatcacagtagcgaccacagctccgatgaccacaactgc

SEQ ID NO: 712457 - DNA, 776 bp, Homo sapiens
  misc_feature (22)..(22): n is a, c, g, or t
  misc_feature (27)..(28): n is a, c, g, or t
  misc_feature (58)..(58): n is a, c, g, or t
  misc_feature (90)..(90): n is a, c, g, or t
  misc_feature (202)..(202): n is a, c, g, or t
  misc_feature (231)..(231): n is a, c, g, or t
  misc_feature (238)..(238): n is a, c, g, or t
  misc_feature (259)..(259): n is a, c, g, or t
  misc_feature (273)..(273): n is a, c, g, or t
  misc_feature (310)..(311): n is a, c, g, or t
  misc_feature (317)..(317): n is a, c, g, or t
  misc_feature (322)..(324): n is a, c, g, or t
  misc_feature (336)..(336): n is a, c, g, or t
  misc_feature (339)..(339): n is a, c, g, or t
  misc_feature (343)..(343): n is a, c, g, or t
  misc_feature (364)..(364): n is a, c, g, or t
  misc_feature (385)..(385): n is a, c, g, or t
  misc_feature (428)..(428): n is a, c, g, or t
  misc_feature (529)..(529): n is a, c, g, or t
  misc_feature (555)..(555): n is a, c, g, or t
  misc_feature (562)..(562): n is a, c, g, or t
  misc_feature (566)..(566): n is a, c, g, or t
  misc_feature (626)..(626): n is a, c, g, or t
  misc_feature (643)..(643): n is a, c, g, or t
  misc_feature (661)..(661): n is a, c, g, or t
  misc_feature (677)..(677): n is a, c, g, or t
  misc_feature (731)..(731): n is a, c, g, or t
gaagctgggtcttcttgctgtnaggtnncgttccccaagtgttatcggagggtccttnaggcaggagtgaaaattgggtctgggggttantcctggggtggaggtctgggcacgccgggtcggaccccctccatcttcggttttgctacaccccgctttccagcgcggattcgcggcgggtagggcggcgtgcgcgtgcgtnacgtcatctcatgcgagcagcctcgcgangctccantggccattgacctcccgcggngtgggaggctgcgnggcgatgctgctagttcgtccggtgcgcagggtgcgnnggtctnttttnnncctacaggcaancanggcntaaattcccgtgtgtcggaanaggcagcgcgtgcgacgcganataccgcggagcagtgtgagcagaggcgaaggtctcccggtancccgctgctgtcgcaaagtcgacgctcccgggtaccacacctcatgcgacgtcccatgtgcagggccctgtggctcgagatccattgcgggggctttcgangcagcgatgcgcgctggggccctgtnccgaccntganacccccgattgatttttcgcccacccgcgccccagggcgtgggacaatacctgcacccanggattgctaatggtggncagaaagaaacgttcaangaggaaattaggctantgccaaagacccaaagaccgaggagccggaggggtgcggggggcgggggggccnggaaagccctttggccggcagaaaaaggcacctgggggcggggcc

SEQ ID NO: 712458 - DNA, 819 bp, Homo sapiens
agcggagtcgcggagggtgcgggtttggctgcggtggtttctgtggcggttgctgtggcaggagtttggaggttggagagaaatccaggtactcactagactggttaccttctgccaccatgggggggcttttccggagtgaagaagatgacactggcccagctttttctacagtcagaggctgcttattgtctgtgtcagtgaattaggagaacttggaaaggttcacgttctcgtgacttagtatccagatgtgaatgttgttccaagcggaaagtttggtgagatgaagttacgaagatgtgaaggaaactggatcgatagagcttcgactttgttgagaaagagataagaaaatgctaagcattccgattatggacagccggtgatagaaccctgcaggttcccttcgccccgggacatgcattgacttagaggccgaattttgagcaagattgataaagtgaactgcaaggaagatcgaacgacaagaccaggaaggctctgaagagaagacttcctggaactgagcgaatttagaatttatacttcgcagaactcagcaatcttggatgagatggcggatccgagacttgctggaagagtcctcgatccctcttggagccaacgtgagatgggaagaggctagctcctttaagacttggcttcgtggctggtgtcattaaccgggagcgcatcctacttttgagcgcatgctttggcgggtatgccggggaacatgtgttcctgcgacaggctgaaatcggagaaacccgtggaggatcctgtggaattgggactacggtgcccaagtctggg
